United States Patent Application Publication US 2011/0183924 A1 - sequence listing, part 17

SEQ ID NO: 41572 - DNA, 1281 bp, Homo sapiens
tctttccccaaccccgttacccctgagcgagtttgggggcaagcataggtttgtaggcactgcaaagaagaactctcacgctgtggtgcaggaccgtggccttggcctctggatatctgggccaggtgggtgcatttgggcctcttccctacagtgcctggtcagactgcaagagacataggaagcagccagggcaggctatcttaagaggagggagcatatttgataaagttagaaaatgattctcagctgtccataggaagagcagagtaaggggctatgtgagaagtttggaagatggcccagttccaaaaatgaagaaagaaagtaagaaagaaagagagaaagagagaaagaaaggaaggaaggaaggaaggaaggaaagaaagaggaaagaaagaaagaggaaagaaagaaggaaagaaagaaggaaggaaagaaagaaagaagagagggagaggaaggaaggaagaaaggaaagaaagaaagaaagacagacaaagaaagaaagacaggaaggaaggaagaaaggaaagaaagaaagaaaaaggaaggaaggaaagaaggaaggaggggaagaaggaagaaagaaggaaagaaagattcattattctgtcctctgaacctgagtgaagaaaaataccctgtcctttgtacctgcgtgaagagagaaaagaaaagaaaagaaaagaaagaaagaaagaaagaaaagaaagacaggaaggaagaaaggaaagaaagaaagaaagaaagaaagaaaaaaagacagacaggaaggaagaaaggaaagaaagaaagaaaagggaaggaaggaaggaaagaaggaaggaaggaagaaagaaggaaagaaagaagattcattattctgtcctctgaacctgagtgaagaaatatactctgtcctttgtacctgcgtgaagaaagaaaagaaaagaaagaaaagggaaggaaggaaggaaagaaggaaggaaggaagaaagaaggaaagaaagaagattcattattctgtcctctgaacctgagtgaagaaatatactctgtcctttgtacctgcgtgaagaaagaagagaaaagaaagaaaagaaagaaagaaagaaagaaacgaaggaaggaagaaagaaagagtgtaaagaaataaaaggctgtaaagaaataaaataatgtaaagaaagaaaataatgtaaagaaagaaaagaaaggaaagaaagaaggaaggaaagaaagaaagaagagagggagaggaaggaaggaagaaaggaaagaaagaaagaaagacagaca

SEQ ID NO: 41573 - DNA, 880 bp, Homo sapiens
actcggtacctcataggttcgcagtgaaggaaggaaagaaagaaagaagagagggagaggaaggaaggaagaaaggaaagaaagaaagaaagacagacaaagaaagaaagacaggaaggaaggaagaaaggaaagaaagaaagaaaaaggaaggaaggaaagaaggaaggaggggaagaaggaagaaagaaggaaagaaagattcattattctgtcctctgaacctgagtgaagaaaaataccctgtcctttgtacctgcgtgaagagagaaaagaaaagaaaagaaaagaaagaaagaaagaaagaaaagaaagacaggaaggaagaaaggaaagaaagaaagaaagaaagaaagaaaaaaagacagacaggaaggaagaaaggaaagaaagaaagaaaagggaaggaaggaaggaaagaaggaaggaaggaagaaagaaggaaagaaagaagattcattattctgtcctctgaacctgagtgaagaaatatactctgtcctttgtacctgcgtgaagaaagaaaagaaaagaaagaaaagggaaggaaggaaggaaagaaggaaggaaggaagaaagaaggaaagaaagaagattcattattctgtcctctgaacctgagtgaagaaatatactctgtcctttgtacctgcgtgaagaaagaagagaaaagaaagaaaagaaagaaagaaagaaagaaacgaaggaaggaagaaagaaagagtgtaaagaaataaaaggctgtaaagaaataaaataatgtaaagaaagaaaataatgtaaagaaagaaaagaaaggaaagaaagaaggaaggaaagaaagaaagaagagagggagaggaaggaaggaagaaaggaaagaaagaaagaaagacagaca

SEQ ID NO: 41574 - DNA, 270 bp, Homo sapiens
cgtcaggccactgctcttctctgaccctcggtttcctttttgatgaaactggaacatgataccccctgcaaggctgttgtaggttgaatgcggtgatgtaaattgagggccaagcttggagctggcacagagtggacactaacatatgccaggctgcttcctttggtgagaggagctccattctctcttcgagctgagagacttttctggcttgaatgtgtagcggaaccggaagggcagtgaggccggaagtgggaggagcctgagatg

SEQ ID NO: 41575 - DNA, 426 bp, Homo sapiens
cccatctttgtcctttgaggagttttcagtggtgataatgggaatgattgtgctgtagtaaacctctttcctggctattttagctgtaattgaggtgagtctgagacaacaacagtattctgtgggtaattcccattggccttgggaccccaatctcaaaccttttcaatccaaacaaactttatcatgtgtaggaaaagaggaagggtgaagagtcctaaacttaagccatcccccattcacagatacacatggtggttaaatctgttttgccataggtatggtccacctgctaacagtcaaattcacgaaagtctcagtggcctaataaatagatctcttttttgttgcacagcctcactgcactcctggtccccagatttagggccttcctagtagcatttatagaggaataggagaggtgtt

SEQ ID NO: 41576 - DNA, 411 bp, Homo sapiens
tgcttaaactcaggaggcggaggtttctgtgagccgagattgtgccactgtactccaggcctgggtgacggagagagactccgtctcaaaaaaaaaaaaaaaaaaaaaaaaaaaaaacgaaaccaaaacaaaaaccaaatgtcttaaaaggtaggtactataagcagacccattcaacaaatggggaaatgggcttagttccaggtcacacccttaactgtgacactatctgtgtgacctcttttcttaacagtgacctgcccattttgactgacctgcccagacaggatttgtctcacttagtgacctccctggaactcccttcgattggtccccagagatcgcttacctccagcactgggttggagaacagcagtctgtcacgggctatttgtagtgactgggtcattg

SEQ ID NO: 41577 - DNA, 477 bp, Homo sapiens
aacatttgcattagcttatccgtggaaaagagatgaagtgggacctcatggctcctatgtgaacctcatcccagcatcactacatttacacctagaccattaaagacagaaggaaagcctgacaggagccatgagccaatagcaaagtggttcccaatggcaggtctgtggacccagagctatatggaaacatttttattcacctgtattcaaaaaagaaattagaatgatgttataagttttttaacatttcttatgaaatactgaaatatacaaaatgtgaccgggcttggtggctcatgcctgtaatcccagcactttgggaggctgaggcaggcggatcacctgaggtcaggagttcgagaccagcctgaccaacatggagaaaccccgtctctactaaaaatacaaaactagccgggcatggtggcacgtgcctgtaatcccagctaatagggaggctgaggcaggagaatc

SEQ ID NO: 41578 - DNA, 401 bp, Homo sapiens
cagaatcttgctctgtcaccaggctggagtgcaatggcacaatctcagctccctgcaacctttacttcccaggttcaagcgattctcctgcctcagcctcccgagagctgggactacaggcatgcgccaccacaccaggttaattgtttgtatttttagtagagacagggtttcatcatgttggccaggctggtttcgaactcctgacctcaagtgatccccctgcctcgccctcccaaagtgctaggattactggcttgatcccatggtgcccagcctcattactgtattttatatgtgattcaagaaaattctttgtctttcaatgtggccaggaggcggaggttgcagtgacccaagattgcgccacagcactccagcctgagcgacagagccagacc

SEQ ID NO: 41579 - DNA, 203 bp, Homo sapiens
gtcaaggaagggaagtgggagagagagctttgactagcagaggcttggaagccagccagccagcagccaacagtgcatgtgtgcattgggaagctagtggtccagggaccaggcactgctcctgtgggatccatcccagccctctaaggagcggtgcaaaggttcttatcctatttatcggagccagtgtccagaaaaggaag

SEQ ID NO: 41580 - DNA, 345 bp, Homo sapiens
ggcaggcttataaaacacacacacacacacacacacacacacacagagagagagagagagagagagagagagagagagagagagagagagagactcagagaagttaaaaaaggcagccctggtcataaagtgcatggtatgcagatgagacacatgaccttcccctgagcacttttgaacacttcccatatgtctggttaaattactcaccggtcttatctcacttcatctcacaaaatcttctggggtagtaacggtaacgatccccattttacagatgagaaaaccaagggtttgagaggttacatgcttgccccaaggctgcacagctacagagtgaggact

SEQ ID NO: 41581 - DNA, 376 bp, Homo sapiens
ctcagacataggacctaaatttagcaatcccagctagcagctgtcagtgtaagctacctcaggagaggtcccaagcagcttggaatagagatgagatgctccattttacccttcctgaattcctaacacacaaaattgtgagaaaataagctggtaagttttggcgtggtttcttacacagcaataaaacacttgaatgaaaatgtttttcagctttctcaaagtctcgtggctcttgatagctgactcaattttacctcacattttgttcatattacatatgtgtctgagaatcctccataatttccacttggtaaatgtcttaggcagttatgccatttctcttcatctagatcaccagcactcaattctttgg

SEQ ID NO: 41582 - DNA, 436 bp, Homo sapiens
  misc_feature (402)..(402): n is a, c, g, or t
  misc_feature (425)..(425): n is a, c, g, or t
gtgtagaactcagcagtttaatgagaaatcagacttttataaagaaaaaataggaagcaacctaaaaattcagcaattaagggaatagttaaaaatacccatggtacatagaatatcatgcaccctttaaaattatatttatggaacttttgtaatgagctgaagaaatgcttacgctatgaattcacaggaagcagtacatactagatgatgttggctatgttgaagaaaaatagatgtctagaaagattaagtacctttcacactcacaagatttgcagtaatttaaaagctgcccaagaagtagggcaataagaatttgcgttcactgctagtgggaagtataaattggggaccaaccccttttaaaaatttcccggcggcccgcaagcttatttcccnttagtgaggggtttattttaggnttggcactggc

SEQ ID NO: 41583 - DNA, 475 bp, Homo sapiens
tatgatttactcagaaatcacaaagagaggtaatgagggtttttaaatgaagccatttagatttcctattgttcaggatagatggtaacataagaaaaatccctatttcacttaattttgagaatgtgccaatgtcatgatgttaagcgtaggctttgcttgatagattgaaagaccggctgaaagaaccaagactgcttcaagtggcccacagtagtacctatcagactttgcaatgacttccaattgcttttctaattatttatgtttgtccttgttcccaaaccttaaagaaattctacaggatcattttacttttcctttagattattaccttgtaaaagccaagttccagcaaattacatagaaatgtgatagagttaggttaaaatggttccttgatacaaacacataattctaccaagaaagccaaagttaaacatgtctttccttttttggacatgcctatcctcag

SEQ ID NO: 41584 - DNA, 424 bp, Homo sapiens
gacattttaaacaaacccgtaaagctgtagggagataaggctactcaaatctaaaagatccagtaaatttcaattgaaagaactaccaagctggtgtttctcaagctggaaatcaaaaacaggcatgattctgaggatatcacagaaaacacagctgaaacactaattagctgtgtagtagtggcagttgttacttaaaaagcacacagggaattacagtggtaatctgatataataaggaattgatttaggggaagttttcagggtgttagaaatattaacaaatggttttagaaaatagataaccctctcttatccccaaattgatttttaatctgcttatcagataaaaaggcagcccagaagcatgaagttagtttggtgaaaaacaccaaatctagaagttattcggttaaaaaaagaa

SEQ ID NO: 41585 - DNA, 331 bp, Homo sapiens
gaacagcacagcctgtggctccgccccaaggaaccacttacacaaaatagctccgcccctcggaactttgcccagtgggacttcccctcgggactccaccccttgtggccccgcctccttcaccagagatctcgcccctcgtgatgtcaggggcgcagtagctccgcccacgtggagctcgggcggtgtagagctcagccccttgtggccccgtcctgggcgtgtgctgggtttgaatcctggcggagacctggggggaaattgagggagggtctggatacctttagagccaatgcaacggatgatttttcagtaaacgcgggaaacctca

SEQ ID NO: 41586 - DNA, 844 bp, Homo sapiens
ccctctacattaattcataacagtttcttttaagagctttggggccttcgttacatgcttaaagttccctgtgtgtgtgcagatgcaggtacacacatagcgcacacactcagaacaaaaccaccctcattctttattctatccctttcatctacaggcatttaatacagaaaattcagcttaccttagtggaagagtgttgatactgattgtgatccctggcatttccagagtagtttcagtgaacacatagtgaaatattggcagatactatttgttttctgaaaggtattaattttgtgatttctgtatgccccaagtggtggataggcctgcccgctccccaccttgacaaaaatcagaagggcaaaagaagccatccgttcagtgtaagagcaaaacaaaatgaacaattgtgaacatttaggcatttgtaatacagcatatagaagcaaagaaaaggggccagtcagtgtgtactggagtcattggggaagttttcatcttgggaatggtccttgaagagtggactggggtttagatagacacagggaaaggagaaaggcatcacaacagaggaaatagcatgagcaaaggcagagaggtattaatgcccagacggcctggtgtgcaagctgagtttttctggaatgctgtattgaagaaggaagacagaaagttgcaggaaagatggaagtgccaggtgtacacagagtttggcattctcaaaatttttccattgtctttacatccttgctattcgcctgatcagttgtttgcataacttgaatttagatctttatatctgtgaaattcaacgttaggctaattatagaaaaaaaaa

SEQ ID NO: 41587 - DNA, 845 bp, Homo sapiens
ggctcacttcctggcttgcagatgtcctcacatggccttgagtgtgtggtgggtggagggagcagaagctctctgatgtcttttcttaaaagggcacaaaccatgtcatcttatagaacatcaatgacctcattaacctttgttacttccttagaggccccatctacaatacacattgggagttagggcttcagcatacgaattttgtgccacaaacattcagtccataacagggccctagactcagttaggatcataggttcttttagacctaatgctgtccttaatagccagatgattttgggcaagtcacttaactactcacagtttcttcatctggtcgtatgttgggattgggtatagtacccctatcaccttcatggggttgttgtagttactgggtgaaataatatgtgttactgtaaataatagaattatatatatatgtgagagatgtcagccattaattctctgaatttaaagccatcctgacaataagatgtttattaaaatcagagaaattaaccaacatgataggattttttttcccagagcactaggtcttttcttttacagaggtattgcttcacatagccacctaattattctgtaatatatgtgcttatcaattggtcttatggactaaaaataaacacactttgatttctgatcaaagaaaaatgtaatttagatgaaaggatagattgctaatctgttgaattgtcacagctctaagatataaaaagattgcttacttaccagagcatagaaagatttgttattctttttttttgagatggcgtctccctctgttgcccaggctggagtgcaatggcacgatccca

SEQ ID NO: 41588 - DNA, 969 bp, Homo sapiens
gcatgcaacagctgggtcagtgggttatgcctgtaataccagcactttgggaggccaaggcaataggatcacttgaggccaggagtttgagatcagcctgagcaacatagtggggccatgtccctacaaaaaataaaaaaattaccagatatcatggcatgtttctgtaatcccagctattcagggggctgaggtgggaggatcactggagcctggaagttcgaggctgtagtgagccatgaccactgcactccaacgtggatgacagagtgagatcctgtctcttaaaaaaagaaaaataaaagggcattcaacatgtataggctagagagtaatcctcttactatattttcatgtcttttgcctctgttcttaactactgttttcaattttatggactaaaagtgacaaagtctcatgctcatgacagacagctcaaggaagaaaaagtagaatatggattaaaagaagagaatggatttgtgaaaaatcttaatgtaagaatcattaaatgctgaggcagatcatataatgtttatccatggagattttcaagaagagaaataagtcttgcagcagattctgtgtttcttacagttagagggcttgactaggtatcagtgagcgttccatgatttaatagtaccttacagcaaaatatgcctcatcctcttttggaaccacagttgcatatactgcgtattttaatcagaagtaggttatgaaggccacagcagtcactttttttttaggaagaaatgtgatgctgagagaagaggtacagctcagtgatatagaaatgtatatatctgtgtgtgtacacacatacatgtgtattctatgtattcagcacactcaaaacctatgaaaaaactatatagttagcaaacactgtgaatgtttcttctggctgcttgttgtttctctttatatgtgccttcatttgcaaaaggtgtattttcacttgtt

SEQ ID NO: 41589 - DNA, 283 bp, Homo sapiens
gcctcacttagttcccacgcagccagcaaggccagtctcactctcactgtgccccactaacagcaccaagtttatatccaggcagcctgtgagcagggctgatattttgcccaaggctacaagcctcccttctgagaaagcaagcagggctctcagtcctctcctttccccacctgccctcaccatcaactgtcacttctgtgcttgtatctgcacttcctgtctgcccccctcaaacccagattctactcaggaaaattcatgctcagtcaaagttattaca

SEQ ID NO: 41590 - DNA, 364 bp, Homo sapiens
cagaaaaaaatactgcagctaattaacaaattcagcaaagttatagggaacaagatcaacacccaaaaatcagttgtttccatataccagcaaagaaatttttaaaaaaagaaaaaaaaaatagttcagtttgcaacatttagaagagtaaaacacctaggaatatatttaaccaaaaaattgaaagatttatccactgaaaactaaaaaacattgctgagagaaattaaagaaaatctaataaatgggaaaggacatcccatattcatgggattgggaaaacttttaaggataggcaatattccccaaaacaatcttacaggttccagtgggtctgttttgcagaaataaaaagccaaccttc

SEQ ID NO: 41591 - DNA, 235 bp, Homo sapiens
tagtgtgcctgcaagcatgtgagagtatctgtgtgagtttcatggcctgcctgtgtgtaggtctctgttgaggaagtcaggagatccagattgggtgactcctctctgtatctcttgccagattccagagactggtgttagaaaatgtcaaaggtcttagccttggtggtgggcattcagggtggggttggagactggtattagggttggacggtgctgccttgccttgggccta

SEQ ID NO: 41592 - DNA, 325 bp, Homo sapiens
ctccactgattcaatagtatttagttttacgttgtttaaaaggaacattcaatctcctttgcagtcatagttcttgatttcatattactgaatggttgcattaaaatcccttttgactaattatgaggttgggaattctaaagtctgttgagcagacagcttgtgtcaagtgaggcagctggtgatttctggacactcttgattccatctgagcttccttttccagcacagccttatcctgaacacctgattttggggtaacttcttataaagcccactgtgtgttattgtggacacggtctcctggtgtccccccttgtgatga

SEQ ID NO: 41593 - DNA, 425 bp, Homo sapiens
ctgcaaggctatgagctaaggacaagcagccctacagcaccatttccattaggagatgttaacacagctctgatgaaactaaaactcagttaacataattagagacctccacatcctgctactgcttccttctctcccctcatcattcctatttcttacccccagaagcacttaaaagctgtttaaggtgaactgtgtttagacatgtggctgtcactattgttaaggatgtttgcaagggggtctcagtacaccctgcacaatcactgtctgccaggatctctgtgtctacctatgtttacatcacgcctatcactggcacatcagcagcctttgacaaacaagctgggaagtgcgggaagaaaagaaaaaagttgtttgtgactgatgctattaattatcgcttcgttacaccaggcactcct

SEQ ID NO: 41594 - DNA, 428 bp, Homo sapiens
ttattcacccattcattcattcatttgataaatgatcatgagacctcattgggtgccagttagccagttaggatattgacttccatataataagaaatagaacaggataatgttatagttatatctaggaagagctacagtacatcttgaactgataagcagaaaaatctagccattatacggtcagtaaacaccatttgggtcttacaaataatttcttatgtttgttatcaattcaaatgtttactttcccagaacatacatgtcatgtcatgagttttccatccccatcaagaacatcaaatttaaaggtacgttattgccaaggcatattaatattgattacatgatggggattctgtaccaataaggattatccctgtctcttttcgggactctggtactgctttcataatacagacgcatgc

SEQ ID NO: 41595 - DNA, 1244 bp, Homo sapiens
ctttttaaacaagcgtctccaagataaatagcaaaagaaaaaaagagggtgtgaggctccagacccacactcactcacttaatcatcttcttctgccttgtatagaatgatgtacatatataccttagacaacccagagtttttccctggtggagaggggagactttcagccctacctgtttccaggactgtgcacttagttaagggtgtgtggagagtgaggggaggcctatagatagtggtttgtatactgggtcctgaaaaccctcttggtgctctgtttttcaggagctgaagccaaagaatgccaataataatactttttgagtggttcttttcattattgttaattagacttatggtaccttgaattcttaagtttggcatagcatttctaaagaaagattgaattatttgttgataatgtttttaacccaataccgtgtggtttataattgccaatgccatagatttaaaaacctggcagattatacccctcatcttctctgcttgtcctcagcactactaccacaattaaaaagtactattttcttaaaaaagaaaataaatagaccttaaaattgatattttcattttctacgtattaatctttttaaactatgctagcatttttagtattacattaagtagaattagtcttgggagacaactttgtcttttgtttataaatagaataattctaatacatttcttttaaatgggcaatatggtatatagtatttggtgatgactgtcttcattgcaaacatctagtgaacactctggctacttccacagtaattttgcttttcatgataactacctgtattttcattccagtatctactgtccttccccacatgcacatagcctgtgttctttgaaggagagtgcctcacctacagcagctttggtgggggcctattagacttattaaaggcattccgttttcctggccacagaaactgattctgcatggtcatgtgatttagactaatctaaacagggtaaatttcagaactcttgcttagaattctgagacagaagtattaaactttcccatgtaactctgattgtggctgcagtcttcttttagcactagagcatctggccttgggaggtagcttgtattataaatagcagagtgaagagacaaaaacaaagtccttgatggaaacatctgttggacgctggatcagccagccttcaagcaggtcttccctgcattttagttacactagcca

SEQ ID NO: 41596 - DNA, 589 bp, Homo sapiens
acagataaggaaactgaggcatgattaacttgctcaaggtcacacaaccggaaaatggcagagcttggatttgaactgcagaccacctgtcaatcccaatttctctctctcaagcccacattcttacctaccacctgctatcccacacttaccagagggtgagatttctagttctagttccctccacagcctggcccagcctgtatcctctgtagtgctcaacacgaggctggactggcagaattgttctgcaaaatgggaaggatcactgatgctgagtcaagaggcagcagcctcccgcaatttgaaggggcgggggacctagttcaaggcctggcatgcaggaggtgctcaataaacatgtgtggcctgaatgaactaatgaataagcatgattcagtggagacagcccactagaaatgtgggtgaatgttctttctgccacttcctttgtccatgaaagaggaaataaatgcattacctccatgaaggttgagattaaatattgtatgaccgcttaagttcctttctaggctaaggatctagaatttattcactgatttttttttcattcattcatccagccatc

SEQ ID NO: 41597 - DNA, 2752 bp, Homo sapiens
tctgaggatcctcccgcgtacaagttgcgggaagcgattgaggaaacttgaatatttttgtatcctgaagggagaatggatgaagaagaaatggatgaagaagaccgaagataatgatgaagggataattgggaataggattcacagcaagagagacagaagggaaagacattgaagaaacagactagttaacacatgaaaaaaatagagcagaggaaaacacgtccatgtttttccacgtctaatgagaacagggtcctagcacagtgtctgatggagctttcctaccagaccctgaaattcacgcatcaggcgcgggaagcggatgatgaacgacagttgtcaaaatcttcccaagatcaatcagcagaggccccggtccaaaaccacagcggggaagacaggggacaccaaatcgctcaataaggagcatcctaatcaggaggtagttgataacactcgcctggaaagtgccaacttcggcctacatatatcaagaatccgtaaagacagtggagaggaaaatgcccacccacgaagaggccaaatcattgacttccaagggctgctcacagatgccatcaagggagcaaccagtgaacttgccttgaacaccttcgaccataatccagacccctcagaacgactgctgaaacctctgagtgcatttattggcatgaacagtgagatgcgagaattggcagccgtggtgagccggtatccacagctatttacaggaattctttctccctggaaaggactactgctgtacggccctccaggtacaggaaagactttactggccaaagctgtggccactgaatgtaaaacaaccttctttaacatttctgcatccaccattgtcagcaaatggagaggggattcagaaaaactcgttcgggtgttatttgagcttgcccgctaccacgccccatccacgatcttcctggacgagctggagtcggtgatgagtcagagaggcacagcttctgggggagaacatgaaggaagcctgcggatgaagacagagttactggtgcagatggatgggctggcacgctcagaagatctcgtatttgtcttagcagcttctaacctgccgtgggagctggactgtgccatgttacgccgcctggagaagaggattctggtcgatctccccagccgggaggccaggcaggccatgatctaccactggctgcctcctgtgagcaagagcagggccttggagctgcacacagagctggagtacagtgtgctgagccaggagactgagggctactcaggctcagatattaagctcgtctgcagggaagcagccatgcggcccgtgaggaagatctttgatgcacttgaaaatcaccagtcagaaagcagcgacttacccaggatccagttggatatagtaaccactgccgactttctggatgtgctaactcacaccaagccctccgcaaagaatctggctcagagatactcagactggcaaagagagttcgagtctgtctgaaaccacatttaccctgacctggccacaaaggcaaccacaaagacctcctagtttattaatgtccgtgggagaacaaaatgattggaatggaaaagagaaaattatttttgaagactggattaacttgagccactgtattgttttggatagctgagatatatttattaacttaccattatcgatgtcagcaaaatattgagagtttcagttacatacatatatgtgctattgggtcatacaatggagatttttctgacaattagactccataaaattttaatgaacaattttctgtaatgttactcatttgtaaactttttaagaaaaagatgtacttagaaaagttgtgttggccacacacaggatgaccctgagttggggcagccaagtagaagctaagcttgacaggcactgcccagctgacagtcccagggtgaaggaggacggaagcagggaaggcaatgcagtctgtttctcattccggacaatattctgaatctcatcagctccccctaattctgactccatccagctttgtcagcagcaaacccctcccaaacttaagccccactcagaaatgtcactgagcattctgatgctagagctaatagccagggtgactagcacaccatcaccatcagctgccagtctgattgttttgggttctggcccccaataacatcttttcactcttcacacctcacatccggtgtgctctgcccttctctttccattgccgcagcttctcatcagatccaaagcttaggatggggcacctaagcttcgagaacattcatcccaagtcttccctgctcttaggctcttccccctctccttaaggggttataaacaactagacgcatctctctcagaaacccacaatccgaggcatctactttcaacccttgataaattttgaaggcttctactaagtaatgccacttcttttcccccactagaacttacctatgggaaatcaccttcttttctcttccttgccttgtcttcatcatccctgcagacagactcttcaagaggaaaaacctccagaaagagacactttggatagctaagtatcccaaaggattttacccttttaaacaaaaccaaagcatttttttcggtatcgattattttgagattattctcaaatgcctctttaaacatcatttcatggaaaatgtcaaattgaaaatataccttatttaacaaattgaaaataaaaaagatttcatctcagta

SEQ ID NO: 41598 - DNA, 2908 bp, Homo sapiens
agcgtcaggttccttggatcgaccggtcagcccagtaactgactacttttctcccttctctagggtcctagcacagtgtctgatggagctttcctaccagaccctgaaattcacgcatcaggcgcgggaagcgggtttattgccgtaggagcagtgttattttttgttgtcatcctacctaaattttcctctgttccagtgcgagatgaggacagaagcacgacgaaaaaatcttctcattttgatttcgcattatttaacacaagaagggtatatcgatacagcaaatgctttggagcaagaaactaaactggggttacgacggtttgaagtttgtgacaacattgatcttgaaactattttgatggaatatgagagttattattttgtaaaatttcagaaataccccaaaattgtcaaaaagtcatcagacacagcagaaaataatttaccgcaaagaagtagagggaagaccagaaggatgatgaacgacagttgtcaaaatcttcccaagatcaatcagcagaggccccggtccaaaaccacagcggggaagacaggggacaccaaatcgctcaataaggagcatcctaatcaggaggtagttgataacactcgcctggaaagtgccaacttcggcctacatatatcaagaatccgtaaagacagtggagaggaaaatgcccacccacgaagaggccaaatcattgacttccaagggctgctcacagatgccatcaagggagcaaccagtgaacttgccttgaacaccttcgaccataatccagacccctcagaacgactgctgaaacctctgagtgcatttattggcatgaacagtgagatgcgagaattggcagccgtggtgagccggtatccacagctatttacaggaattctttctccctggaaaggactactgctgtacggccctccaggtacaggaaagactttactggccaaagctgtggccactgaatgtaaaacaaccttctttaacatttctgcatccaccattgtcagcaaatggagaggggattcagaaaaactcgttcgggtgttatttgagcttgcccgctaccacgccccatccacgatcttcctggacgagctggagtcggtgatgagtcagagaggcacagcttctgggggagaacatgaaggaagcctgcggatgaagacagagttactggtgcagatggatgggctggcacgctcagaagatctcgtatttgtcttagcagcttctaacctgccgtgggagctggactgtgccatgttacgccgcctggagaagaggattctggtcgatctccccagccgggaggccaggcaggccatgatctaccactggctgcctcctgtgagcaagagcagggccttggagctgcacacagagctggagtacagtgtgctgagccaggagactgagggctactcaggctcagatattaagctcgtctgcagggaagcagccatgcggcccgtgaggaagatctttgatgcacttgaaaatcaccagtcagaaagcagcgacttacccaggatccagttggatatagtaaccactgccgactttctggatgtgctaactcacaccaagccctccgcaaagaatctggctcagagatactcagactggcaaagagagttcgagtctgtctgaaaccacatttaccctgacctggccacaaaggcaaccacaaagacctcctagtttattaatgtccgtgggagaacaaaatgattggaatggaaaagagaaaattatttttgaagactggattaacttgagccactgtattgttttggatagctgagatatatttattaacttaccattatcgatgtcagcaaaatattgagagtttcagttacatacatatatgtgctattgggtcatacaatggagatttttctgacaattagactccataaaattttaatgaacaattttctgtaatgttactcatttgtaaactttttaagaaaaagatgtacttagaaaagttgtgttggccacacacaggatgaccctgagttggggcagccaagtagaagctaagcttgacaggcactgcccagctgacagtcccagggtgaaggaggacggaagcagggaaggcaatgcagtctgtttctcattccggacaatattctgaatctcatcagctccccctaattctgactccatccagctttgtcagcagcaaacccctcccaaacttaagccccactcagaaatgtcactgagcattctgatgctagagctaatagccagggtgactagcacaccatcaccatcagctgccagtctgattgttttgggttctggcccccaataacatcttttcactcttcacacctcacatccggtgtgctctgcccttctctttccattgccgcagcttctcatcagatccaaagcttaggatggggcacctaagcttcgagaacattcatcccaagtcttccctgctcttaggctcttccccctctccttaaggggttataaacaactagacgcatctctctcagaaacccacaatccgaggcatctactttcaacccttgataaattttgaaggcttctactaagtaatgccacttcttttcccccactagaacttacctatgggaaatcaccttcttttctcttccttgccttgtcttcatcatccctgcagacagactcttcaagaggaaaaacctccagaaagagacactttggatagctaagtatcccaaaggattttacccttttaaacaaaaccaaagcatttttttcggtatcgattattttgagattattctcaaatgcctctttaaacatcatttcatggaaaatgtcaaattgaaaatataccttatttaacaaattgaaaataaaaaagatttcatctcagta

SEQ ID NO: 41599 - DNA, 2842 bp, Homo sapiens
agcgtcaggttccttggatcgaccggtcagcccagtaactgactacttttctcccttctctagggtcctagcacagtgtctgatggagctttcctaccagaccctgaaattcacgcatcaggcgcgggaagcgtgcgagatgaggacagaagcacgacgaaaaaatcttctcattttgatttcgcattatttaacacaagaagggtatatcgatacagcaaatgctttggagcaagaaactaaactggggttacgacggtttgaagtttgtgacaacattgatcttgaaactattttgatggaatatgagagttattattttgtaaaatttcagaaataccccaaaattgtcaaaaagtcatcagacacagcagaaaataatttaccgcaaagaagtagagggaagaccagaaggatgatgaacgacagttgtcaaaatcttcccaagatcaatcagcagaggccccggtccaaaaccacagcggggaagacaggggacaccaaatcgctcaataaggagcatcctaatcaggaggtagttgataacactcgcctggaaagtgccaacttcggcctacatatatcaagaatccgtaaagacagtggagaggaaaatgcccacccacgaagaggccaaatcattgacttccaagggctgctcacagatgccatcaagggagcaaccagtgaacttgccttgaacaccttcgaccataatccagacccctcagaacgactgctgaaacctctgagtgcatttattggcatgaacagtgagatgcgagaattggcagccgtggtgagccggtatccacagctatttacaggaattctttctccctggaaaggactactgctgtacggccctccaggtacaggaaagactttactggccaaagctgtggccactgaatgtaaaacaaccttctttaacatttctgcatccaccattgtcagcaaatggagaggggattcagaaaaactcgttcgggtgttatttgagcttgcccgctaccacgccccatccacgatcttcctggacgagctggagtcggtgatgagtcagagaggcacagcttctgggggagaacatgaaggaagcctgcggatgaagacagagttactggtgcagatggatgggctggcacgctcagaagatctcgtatttgtcttagcagcttctaacctgccgtgggagctggactgtgccatgttacgccgcctggagaagaggattctggtcgatctccccagccgggaggccaggcaggccatgatctaccactggctgcctcctgtgagcaagagcagggccttggagctgcacacagagctggagtacagtgtgctgagccaggagactgagggctactcaggctcagatattaagctcgtctgcagggaagcagccatgcggcccgtgaggaagatctttgatgcacttgaaaatcaccagtcagaaagcagcgacttacccaggatccagttggatatagtaaccactgccgactttctggatgtgctaactcacaccaagccctccgcaaagaatctggctcagagatactcagactggcaaagagagttcgagtctgtctgaaaccacatttaccctgacctggccacaaaggcaaccacaaagacctcctagtttattaatgtccgtgggagaacaaaatgattggaatggaaaagagaaaattatttttgaagactggattaacttgagccactgtattgttttggatagctgagatatatttattaacttaccattatcgatgtcagcaaaatattgagagtttcagttacatacatatatgtgctattgggtcatacaatggagatttttctgacaattagactccataaaattttaatgaacaattttctgtaatgttactcatttgtaaactttttaagaaaaagatgtacttagaaaagttgtgttggccacacacaggatgaccctgagttggggcagccaagtagaagctaagcttgacaggcactgcccagctgacagtcccagggtgaaggaggacggaagcagggaaggcaatgcagtctgtttctcattccggacaatattctgaatctcatcagctccccctaattctgactccatccagctttgtcagcagcaaacccctcccaaacttaagccccactcagaaatgtcactgagcattctgatgctagagctaatagccagggtgactagcacaccatcaccatcagctgccagtctgattgttttgggttctggcccccaataacatcttttcactcttcacacctcacatccggtgtgctctgcccttctctttccattgccgcagcttctcatcagatccaaagcttaggatggggcacctaagcttcgagaacattcatcccaagtcttccctgctcttaggctcttccccctctccttaaggggttataaacaactagacgcatctctctcagaaacccacaatccgaggcatctactttcaacccttgataaattttgaaggcttctactaagtaatgccacttcttttcccccactagaacttacctatgggaaatcaccttcttttctcttccttgccttgtcttcatcatccctgcagacagactcttcaagaggaaaaacctccagaaagagacactttggatagctaagtatcccaaaggattttacccttttaaacaaaaccaaagcatttttttcggtatcgattattttgagattattctcaaatgcctctttaaacatcatttcatggaaaatgtcaaattgaaaatataccttatttaacaaattgaaaataaaaaagatttcatctcagta

SEQ ID NO: 41600 - DNA, 1347 bp, Homo sapiens
agcgtcaggttccttggatcgaccggtcagcccagtaactgactacttttctcccttctctagggtcctagcacagtgtctgatggagctttcctaccagaccctgaaattcacgcatcaggcgcgggaagcgggtttattgccgtaggagcagtgttattttttgttgtcatcctacctaaattttcctctgttccagtgcgagatgaggacagaagcacgacgaaaaaatcttctcattttgatttcgcattatttaacacaagaagggtatatcgatacagcaaatgctttggagcaagaaactaaactggggttacgacggtttgaagtttgtgacaacattgatcttgaaactattttgatggaatatgagagttattattttgtaaaatttcagaaataccccaaaattgtcaaaaagtcatcagacacagcagaaaataatttaccgcaaagaagtagagggaagaccagaaggatgatgaacgacagttgtcaaaatcttcccaagatcaatcagcagaggccccggtccaaaaccacagcggggaagacaggggacaccaaatcgctcaataaggagcatcctaatcaggaggtagttgataacactcgcctggaaagtgccaacttcggcctacatatatcaagaatccgtaaagacagtggagaggaaaatgcccacccacgaagaggccaaatcattgacttccaagggctgctcacagatgccatcaagggagcaaccagtgaacttgccttgaacaccttcgaccataatccagacccctcagaacgactgctgaaacctctgagtgcatttattggcatgaacagtgagatgcgagaattggcagccgtggtgagccggtatccacagctatttacaggaattctttctccctggaaaggactactgctgtacggccctccaggtacaggaaagactttactggccaaagctgtggccactgaatgtaaaacaaccttctttaacatttctgcatccaccattgtcagcaaatggagaggggattcagaaaaactcgttcgggtgttatttgagcttgcccgctaccacgccccatccacgatcttcctggacgagctggagtcggtgatgagtcagagaggcacagcttctgggggagaacatgaaggaagcctgcggatgaagacagagttactggtgcagatggatgggctggcacgctcagaagatctcgtatttgtcttagcagcttctaacctgccgtggtaagagaccaagagagtaaattttgaatacattttcaggagtcactaagtgcaaataaaaattttatattgaccacttcaggcaaa

SEQ ID NO: 41601 - DNA, 697 bp, Homo sapiens
tctgaggatcctcccgcgtacaagttgcgggaagcgattgaggaaacttgaatatttttgtatcctgaagggagaatggatgaagaagaaatggatgaagaagaccgaagataatgatgaagggataattgggaataggattcacagcaagagagacagaagggaaagacattgaagaaacagactagttaacacatgaaaaaaatagagcagaggaaaacacgtccatgtttttccacgtctaatgagaacagggtcctagcacagtgtctgatggagctttcctaccagaccctgaaattcacgcatcaggcgcgggaagcggtatatcgatacagcaaatgctttggagcaagaaactaaactggggttacgacggtttgaagtttgtgacaacattgatcttgaaactattttgatggaatatgagagttattattttgtaaaatttcagaaataccccaaaattgtcaaaaagtcatcagacacagcagaaaataatttaccgcaaagaagtagagggaagaccagaaggtaaagtgaatggtaattcttcttaatcgactcggctcgaggagcttgtggaatccctttccagaagctttaccatcacagctctgtgactgtctcccagcaatactgactgcagtcatgtgacctggcccagcccaggacttctctcattacagctgcccca

SEQ ID NO: 41602 - DNA, 380 bp, Homo sapiens
tagacacagttgggctgcatttaatctaccagtgggactgtggaccctttagttattttctccagctcactgcctgcctttggttttctttcaaataccatcattatattcatttacttgctttctatcatactgtatgtgaaaataacagcaaattgctcattttctctaactctagtatgaacggctccattggccatcagaacagaaactgttctacagtcacagggacattgctgtgaatgctgctcttgtcatgagggcgaaggctctgacacttaggagaatcacgtcttgtctctctgtaggggagaacatgaaggaagcctgcggatgaagacagagttactggtgcagatggatgggctggcacgctcaga

SEQ ID NO: 41603 - DNA, 548 bp, Homo sapiens
agggtggaaaccacattttgggactttattcaccccacccggttgttcaaaaaaactgtgtgggttccttataagtatccacagctatttacaggaattctttctccctggaaaggactactgctgtacggccctccaggtacaggaaagactttactggccaaagctgtggccactgaatgtaaaacaaccttctttaacatttctgcatccaccattgtcagcaaatggagaggggattcagaaaaactcgttcgggtgttatttgagcttgcccgctaccacgccccatccacgatcttcctggacgagctggagtcggtgatgagtcagagaggcacagcttctgggggagaacatgaaggaagcctgcggatgaagacagagttactggtgcagatggatgggctggcacgctcagaagatctcgtatttgtcttagcagcttctaacctgccgtggtaagagaccaagagagtaaattttgaatacattttcaggagtcactaagtgcaaataaaaattttatattgaccacttcaggcaaa

SEQ ID NO: 41604 - DNA, 2771 bp, Homo sapiens
agcgtcaggttccttggatcgaccggtcagcccagtaactgactacttttctcccttctctagggtcctagcacagtgtctgatggagctttcctaccagaccctgaaattcacgcatcaggcgcgggaagcggtatatcgatacagcaaatgctttggagcaagaaactaaactggggttacgacggtttgaagtttgtgacaacattgatcttgaaactattttgatggaatatgagagttattattttgtaaaatttcagaaataccccaaaattgtcaaaaagtcatcagacacagcagaaaataatttaccgcaaagaagtagagggaagaccagaaggatgatgaacgacagttgtcaaaatcttcccaagatcaatcagcagaggccccggtccaaaaccacagcggggaagacaggggacaccaaatcgctcaataaggagcatcctaatcaggaggtagttgataacactcgcctggaaagtgccaacttcggcctacatatatcaagaatccgtaaagacagtggagaggaaaatgcccacccacgaagaggccaaatcattgacttccaagggctgctcacagatgccatcaagggagcaaccagtgaacttgccttgaacaccttcgaccataatccagacccctcagaacgactgctgaaacctctgagtgcatttattggcatgaacagtgagatgcgagaattggcagccgtggtgagccggtatccacagctatttacaggaattctttctccctggaaaggactactgctgtacggccctccaggtacaggaaagactttactggccaaagctgtggccactgaatgtaaaacaaccttctttaacatttctgcatccaccattgtcagcaaatggagaggggattcagaaaaactcgttcgggtgttatttgagcttgcccgctaccacgccccatccacgatcttcctggacgagctggagtcggtgatgagtcagagaggcacagcttctgggggagaacatgaaggaagcctgcggatgaagacagagttactggtgcagatggatgggctggcacgctcagaagatctcgtatttgtcttagcagcttctaacctgccgtgggagctggactgtgccatgttacgccgcctggagaagaggattctggtcgatctccccagccgggaggccaggcaggccatgatctaccactggctgcctcctgtgagcaagagcagggccttggagctgcacacagagctggagtacagtgtgctgagccaggagactgagggctactcaggctcagatattaagctcgtctgcagggaagcagccatgcggcccgtgaggaagatctttgatgcacttgaaaatcaccagtcagaaagcagcgacttacccaggatccagttggatatagtaaccactgccgactttctggatgtgctaactcacaccaagccctccgcaaagaatctggctcagagatactcagactggcaaagagagttcgagtctgtctgaaaccacatttaccctgacctggccacaaaggcaaccacaaagacctcctagtttattaatgtccgtgggagaacaaaatgattggaatggaaaagagaaaattatttttgaagactggattaacttgagccactgtattgttttggatagctgagatatatttattaacttaccattatcgatgtcagcaaaatattgagagtttcagttacatacatatatgtgctattgggtcatacaatggagatttttctgacaattagactccataaaattttaatgaacaattttctgtaatgttactcatttgtaaactttttaagaaaaagatgtacttagaaaagttgtgttggccacacacaggatgaccctgagttggggcagccaagtagaagctaagcttgacaggcactgcccagctgacagtcccagggtgaaggaggacggaagcagggaaggcaatgcagtctgtttctcattccggacaatattctgaatctcatcagctccccctaattctgactccatccagctttgtcagcagcaaacccctcccaaacttaagccccactcagaaatgtcactgagcattctgatgctagagctaatagccagggtgactagcacaccatcaccatcagctgccagtctgattgttttgggttctggcccccaataacatcttttcactcttcacacctcacatccggtgtgctctgcccttctctttccattgccgcagcttctcatcagatccaaagcttaggatggggcacctaagcttcgagaacattcatcccaagtcttccctgctcttaggctcttccccctctccttaaggggttataaacaactagacgcatctctctcagaaacccacaatccgaggcatctactttcaacccttgataaattttgaaggcttctactaagtaatgccacttcttttcccccactagaacttacctatgggaaatcaccttcttttctcttccttgccttgtcttcatcatccctgcagacagactcttcaagaggaaaaacctccagaaagagacactttggatagctaagtatcccaaaggattttacccttttaaacaaaaccaaagcatttttttcggtatcgattattttgagattattctcaaatgcctctttaaacatcatttcatggaaaatgtcaaattgaaaatataccttatttaacaaattgaaaataaaaaagatttcatctcagta

SEQ ID NO: 41605 - DNA, 2040 bp, Homo sapiens
  misc_feature (1962)..(1962): n is a, c, g, or t
  misc_feature (2038)..(2038): n is a, c, g, or t
agcgtcaggttccttggatcgaccggtcagcccagtaactgactacttttctcccttctctagggtcctagcacagtgtctgatggagctttcctaccagaccctgaaattcacgcatcaggcgcgggaagcgggtttattgccgtaggagcagtgttattttttgttgtcatcctacctaaattttcctctgttccagtgcgagatgaggacagaagcacgacgaaaaaatcttctcattttgatttcgcattatttaacacaagaagggtatatcgatacagcaaatgctttggagcaagaaactaaactggggttacgacggtttgaagtttgtgacaacattgatcttgaaactattttgatggaatatgagagttattattttgtaaaatttcagaaataccccaaaattgtcaaaaagtcatcagacacagcagaaaataatttaccgcaaagaagtagagggaagaccagaaggatgatgaacgacagttgtcaaaatcttcccaagatcaatcagcagaggccccggtccaaaaccacagcggggaagacaggggacaccaaatcgctcaataaggagcatcctaatcaggaggtagttgataacactcgcctggaaagtgccaacttcggcctacatatatcaagaatccgtaaagacagtggagaggaaaatgcccacccacgaagaggccaaatcattgacttccaagggctgctcacagatgccatcaagggagcaaccagtgaacttgccttgaacaccttcgaccataatccagacccctcagaacgactgctgaaacctctgagtgcatttattggcatgaacagtgagatgcgagaattggcagccgtggtgagccggtatccacagctatttacaggaattctttctccctggaaaggactactgctgtacggccctccaggtacaggaaagactttactggccaaagctgtggccactgaatgtaaaacaaccttctttaacatttctgcatccaccattgtcagcaaatggagaggggattcagaaaaactcgttcgggtgttatttgagcttgcccgctaccacgccccatccacgatcttcctggacgagctggagtcggtgatgagtcagagaggcacagcttctgggggagaacatgaaggaagcctgcggatgaagacagagttactggtgcagatggatgggctggcacgctcagaagatctcgtatttgtcttagcagcttctaacctgccgtgcttgaaagccattgcactccagcctggcgacagagcaagactccgtctcaaaaaaaaaaaaagtgtactagtccattttcatgctgctggtgaagacatatccaagactgggaagaaaaaaaaattaactggacttacagtttcacatggatggggagcctcagaatcatggcggggggcaaaagacacttcttatatggtggcagcaagagaaaatgaggaagacgcaagaagcggaaacccctgataaaaccatcagaccttgtgagacttattcactaccatgagaacagcatgcgtggtggaaactgctcacgattcaaattatctcctactgggtccctcccacaacacgtgggaattatgcgattacaattcaagatgagatttgggtggggacacagagccaaaccatatcaagaagtttaaggaaatggcctatggatgcaaaatcacataaacttggcctgacagttttgggaggagtaaaagtgagtgtctgaaagggcggttatttgcactgggcacccaggaagggccactggtgctaagttcaccaatgtaatgaagtgaggggtcattcactccagaaggactgagaattttggaagaattaatgtacttagagtgcccaacttattgtcagcaataatttactcactggcaagatcggactgaataattcatgttacaactgcaatnagaatactcatgattgctggttgttagttggtttttgtaccccaaattaagtcgcataaaattacttccttttcanag

SEQ ID NO: 41606 - DNA, 518 bp, Homo sapiens
ttaattaaaaagaaatggtcaaaaaagctagtttaaccaaaaaaagttgagatcaggtgcggtcatggtggtatggctgtcgacattaaccaaaacagaaacagcaattaatatacttcaaaatttagtaggttgacaaagaaatcaaaatcaagggcatgagactcattcgtctctgggtatgaaaaaggattagattcaacttatcacactaaaaaaaggtgatgcataaatgtaacaataagtacattctgtattcaattgtaaaagaaattgtgtgtccattgaaatagtgccctttcatctccccatacaccttataccaccccctcccaaaaaatatcctctcgtgtcacagcttatgagggcatgacattaatgaggtaaaaagcaagcttgaaattttcccaggaaagcaccctaccggagactcatttattgtcattgaagcattcctttggctgacgaccagaagttggtggtttcgacttaagaggccatgttacatgaaaaaaaaa

SEQ ID NO: 41607 - DNA, 710 bp, Homo sapiens
ggagatgtaagaaacatggtggctgagctggtgaagtttctcagcatctctgtttcttgcatgtgtctcacacccttgtctaaaatgccttgctctcatctaacccagagttctctctcaactaaggcagcagggttggcgtgaggggggcaaaggagggaggaggaaggcaaccagcctcacaagtgggggccactcctcacagccacgagcagctgggccacatgcagcactggcagcccaggtggcctgttacggcgggcagtacttccctttgcctcccttcggaatctgtcagcacttttatgtggagtcttcatcccatgttcaaccctgggggttttaaggtgtttctcctttgctttgggatttcaaacatgggcagctcatagcactgtactgtcatttctccctggatgctagggatgccctgcctacttgccctacctcgagcagatgttctgaatgtcaagtcagcattgcttgaaacacacacacacacacacacacacacacgtacacaccactgttactagttctgctatgtctggctcatagacaaggatgtaaagaagcagtctaacattctgccattgacaaactactcctttttaaaatgccaaattcttgtaattctgcttattttcaataggctatgtctggccaaaatgtctgcttgaattggctaattaaaccaaaatatctatgtt

SEQ ID NO: 41608 - DNA, 680 bp, Homo sapiens
tcattacatatatgttctaggccaaaactttattcagtgatggaaatattcttcttccccatccagtacggtagccatcagccacatggcgcttctgagtccttgacatgtggcaggtgtaactgaggaactgaagcttgaatttcattggatttaaggttaaatagtcacgtgtggctggtggctactctattagatagtgcatttctaagccaagtgtgaaatctgaatctgcctctttattcacgcattcattcatgcaccagatatttattgaccaccaactctcccaggtattgttttgggtgctaggggtgcagacttggctacaacaggccaaaataacagaataatccctgccctggtggcaaggctcatgaagagctcactctagtgaggcccccattccagaggaggttctgttcagatgcatccaatcattgtggctttgcccacttgaatcagacaatttgtcaagttcaggggtagcacaaacttcatgacttgtgatgttgttttagtttttaaatagtcattgcaaagaactgcctgtggataagaaaagcaggaaaagcagcctatgtaatcttttacctcgtgaaattactcctattttatttttatttttatttttgagacagagtctctctctgttgcccaggctggagtgcagtggtgca

SEQ ID NO: 41609 - DNA, 551 bp, Homo sapiens
aatgaatgaattaatgattaaatgtatgtatgcatgaatcaatgaatgaagatgagtatctatgctcctagaagttataacctaaatacagggaattttaagtaacagagtacaagtctgggcgtaaatcaaaactaaagattttcaaatatcaaaaagaattttgtttgacttccttcttagagacggttttggtttgcttgttttaaacatctttcatctccatcccttgttttctggaatttctataagctatcaccatcctccccaccaccaccctgctaaaaaaggcccttttctgagaaacagaagaagaaataaatgaaattggtttgcatgccttagtgaattcttatgatgaaagggtaacctggaaacaattcccattacacttagcaaaaccatttttcagtctatacagcccactatctaattacagtattggaatactgttaagaatggagcaaagttcaaagaatcagttatatccccaatcaaagcgaccggccacactttcagtagctggtgagagtgaagaggaagtcactaaa

SEQ ID NO: 41610 - DNA, 373 bp, Homo sapiens
aaactgaggttacttgccctttgaatcaaagctaagaattggtgaggccgggattcagaccctgtggtctaacaccagagcccatgctcttcagcaccacctattatgctcaaggtagtgcctggcaggattaatcctctttcctggagtccttattttctgctagagcctgggaaggattcaggctccgatcttgtatttacacttgtgtattctgctttggattgtattttggagataaggtctcactctgtcacccaggctggagtgcagtggtgcagtcatggctctctgcagccttgacctcctgggctcaagccatcctcccacctcagcctcttgagtagctgtgattgcaggtgcataccaccat

SEQ ID NO: 41611 - DNA, 260 bp, Homo sapiens
gacctcgactctcccctttgatgtgcaggaagtggggtcattcagaattgaggattgcttttaagtcatttagtgctgtcattcggagaggggagaagtaaggtctcactgcttttagaaaacattagaaatgcctacttatggctgggcgcggtggctcacgcctgtaatctcagcactttgggaggccgaagtgggtggatcacttgaggacaggagttggagaccagcttggccaacatggtgaaaccgtcgatctg

SEQ ID NO: 41612 - DNA, 216 bp, Homo sapiens
aactaattcattttggttaactgaaattttgtacctgctgaatagtaattcccagttaccccctctttttagtccctagtaactaccattctactctctgcatttaagagttttactgttttacattcatcatataaaagaatcatacagtattggtgtaaggttcttgtatcagttcgaacaccaagagtgcgccagcagacaacacaaggcagt

SEQ ID NO: 41613 - DNA, 401 bp, Homo sapiens
cacctcggcctcccaaagtcctgggattacaggtgtgagccaggcctgtaccaggcctgttatttgttatttactccatcatttattaggataatgaacctttttccagtgaaacacttccagataattctatgcagaagtaccgctttcttgtaactctgattaactcaagaaacggtagtaaatgaatatttttaggaaagcttttttcccaacagatttaccaatgcttttctcaaattgggtgtgtatgtgtgtgtgttttaatgaatttgatccaaaatcaaaatcaaaacaaaacaaaacaaaaaaactaccctttgccaagtgacctcagggtccactgacttaattaaacatttaatcattgaaatattttaaaatgtcaaaacttcggcaac

SEQ ID NO: 41614 - DNA, 484 bp, Homo sapiens
tgtatatgtgtgtgtgtttttgtttgtttcaggtaacaactgatgttggaactatgaaaagctcttctctacttttaacaaagcttagtcacaaacagttccccagttgacgagaacaactaaaacaacagaacaattgaaagtccaaatttgaaagctccatctccgagaagcaaattttacagccactccagatttgtattccaaatggatagtttgattataaaaatcacatcccttcagcctgcaaatgtgataactgcccaagagacagtgatgcctacatccatagataatcccctttcccccaacctatatataactggagtcaacagcagctggaggaaaatggcaaggacttgtaatcaagattaagttagaaaaacactgctgtagactgtttatcagctcttcagcatatgtccgttttccttgaaggatgagcgtttagaaacctctgacaataaagtttattttacacaca

SEQ ID NO: 41615 - DNA, 419 bp, Homo sapiens
aactttattgttgatcaacacaataaagtctatgtatggcaatcccacagctaacatcatacttgatggtgaaaatgatgaaaagttgaaaactttttctctaagatcaggaacatgacaagggggctcattttgccacttctcaacatcataaaggaagttctagccagagcaatgaagcaagaaaaagaaacaaaagtcacctaaatcagaatgaaagaagttaaattgtttttgtttgcagacaacatggttttatacatagaaaaccctaaatattccaccaaaaaactgttaaactaataaattgggtaacgttgcagaatacaaaattgatatataaaagcccatagcatttctgtatgttaacaatctgcaaaagatatcaggcaatcccattatttatttatttatttctc

SEQ ID NO: 41616 - DNA, 747 bp, Homo sapiens
atggaaggggccacctcagacttcagttttataacattggcccctgcaaatgctcactcagttgataagcttcccataacttagcatccacatagttgagcttcacatggggtcaaactggaaagtatctctttgctatgctcccatttaattaaattaggaaatctgcctaaaacttgaatcactcctcttttcagctggtggccaggcaggaatgctccctgaagagtactctttcaatagacttcagaatgtgttacctgaaaagtgctccatggatgaatcaagacatcactgtgttttccatacttctgaagtagagattgtccactaacagcttagggaaagcagagtacccgctcagctgctctttttctggtgtggtcagaccagctgggtcctctgaaacatgaatccatagtgcttcctttgttatactatttctgactcagttttctctaaacggctgtaaaatttaactgcctagctgtattttctttctgtggactttatgctctcatatttaggagaaagaataagagaacaccaacttacatctctgtagctctggatgattattaaggccctggtctaatgcttaaaggtaagcatctgttatctatattcaataaaagaggaaaatgaaccccagagagaaatcaagttactttagaatcgcaggctgtcccatgaccctggtgaccatcactgaattattaaacctgaccattcattgtgtgaaattat

SEQ ID NO: 41617 - DNA, 514 bp, Homo sapiens
cttcattttgtaaacatagtcatttcttcattaaattctccaaatcactcactcatttgagcgttccatttgtttcttgctgggaacctgatacaggctgtttggctctgaagtcttcctctttccactcttctacaccccctcatttcaccttcctcacataataattgtgatgatggtgatgatgacgatggcaatgataccaagacacttactgtatgagcacttattataggcaaggtgttgtgctgagaactttacataaatgatcttatttaatttccacaactaccctatgcattaggcactgcttcactcccattttgcagggaggaaaatgaatttcagaaattaagtaattgaccccagcagaaccggtaaatgttggtgctgagatatgagcaatactcactccttctaccaggcatcagggccatcatcacacaatattttcccagctaaatgtgtgagtaaaattcttgaaaataaagatgtcgaaaagtcatgttactta

SEQ ID NO: 41618 - DNA, 585 bp, Homo sapiens
tgatgcgaagaatttttttaaatgccattaagtttgaggttttaaagtgtgttctgatgttttaagctgaaaagctgattggtactaaaagcattctctagtatccataaaagcatatgttttttccatcctatctttataagacttacatggttaatatatgactctcatacatattgctcaaatgaaacagaatagaattactatttttgggtgatgggtctataactaaagccttggaaaatctaccctgataccctgttaagagataacagttgtttctacaatgaagtacccaatatctgcctcgtatagcataatccccattatccctgcacctgagaggcttgaagcttggaaaatgttcatgaactgatttcaatatcactagatatcattggctggctagcaacacagtaggaatcgtgcaggatcctttctgaagaaattataaaagaaaatgggccaggcgcagtggcttatgcctgtaatcccagcactttgggaggccgaggaggccggatcatgaggtcaggagatcgagaccatcctggctaacacggtgaaaccctgtctctactaaaa

SEQ ID NO: 41619 - DNA, 581 bp, Homo sapiens
ctgattctaagaactgcattacgggaggtccacctggcacctcagggagatgggaggctctgaggcctgggccttctgaagcacctccctgtggggcagttgggactgaaggattgaagaatacatcttccttcctgtcactcctcttagctgttaactgtcattgccctggaaacgtccccatttccatcgttgggcctaagagagtcggccgaggcagccaagcccggggaacacatagttgaggctggaggaggcctggcagcagcccttccgagccctggcttggccttccttctgtgcctctgcatgggcttgggaggagggtgtgtttagggcaggctgcgaggaggggaaggggaaatctgcaggcagataattgagttctttgagttggagggaccatggaaagtggagaaggggccaggagggcatagagcgaaaaaagaaaaagaaaaaaaaaaaagaccatctggcatagtctgcagagatttgtctttaaagcctatgggaaaacttgcattagtgtgtgccttctcctggggaggcaggggctggggaggctaggcatttgtttcatc

SEQ ID NO: 41620 - DNA, 451 bp, Homo sapiens
ctgattctaagaactgcattacgggaggtccacctggcacctcagggagatgggaggctctgaggcctgggccttctgaagcacctccctgtggggcagttgggactgaaggattgaagaatacatcttccttcctgtcactcctcttagctgttaactgtcattgccctggaaacgtccccatttccatcgttgggcctaagagagtcggccgaggcagccaagcccggggaacacatagttgaggctggaggaggcctggcagcagcccttccgagccctggccagcccctacgtccagcactgaccgtattcgcatgggagacgtgtgctcccaccccaatcatctatcagggtacagagagatgggcatgaagagtatccatttctgtcagaagtacatggcacggtaagtggaaaattgttccttccggaatagaattagaacatg

SEQ ID NO: 41621 - DNA, 1174 bp, Homo sapiens
gatggcaacaggatagaatcacactcaaacacaggaaagctgtaagaaaaagaaaaactcctaatctgctctttcaccttacttattttacagaaggagaaagccaaaaaggggagagcatgtggctaaaccacagaaagactagatgcctaaaggaaaaattttaaagtgttcctaaataggtattagaaggggaagggggatgtaaagcttatgtgatttacatcattttgttaatctgctaatctacttccctggaaggtgagaaagagtgttgtctgccttctgcaattgaagagactagggcagaaacttaattatgttcttaccctgtgtatacctggctgtcatctggctggcaactagtccacaaactattggttcaggcatttgcctggcaataatgttagccatcatttaaattgttaaatatggatcagaagatctctaagaattactgatatgcagctattaatactggatgtaaataatattatttggggtgtgggtaaatcatttgactggaaccacatttaaaaaaaggacttggaaattttatttttgaaatgctgttggggagatggcattgatgaaaaaaaaaattgaaaatggaaaaaaacatcatctacaaagagatgggtaaaaatgactaagcaaagaagccttgtcaccttcgacctgatgcttcattgtatcagaagaaagtaaacagattgctaacaaagagaccaccccttctaatttccaaaaccggcccagcaacaagagggagaaaatagagaagagtgcactgcgtggtggctcagggtgatcctttaatttgagtgttaaaaatgagggcacagacctagaggtttttaatggtccgcgggtggacttcagattctgaacactcctccaccttctgtggagaattcgggacacggtggagtttaaccagtatcttaaatcccagggacagggtggagattgctttgtgatcctgattaattaaaaggaaagaaatcaaagcagacatctctcctttttccatttgagccgcagagccatggaggggaacttgtgctctctggtgcttgcagctatgttccctggctttcatcgtcttggcttttccccttgtatttctaatgctgtgataccaggccaataaaatggaatctacaaaactgca

SEQ ID NO: 41622 - DNA, 859 bp, Homo sapiens
  misc_feature (838)..(838): n is a, c, g, or t
gactctgtgcgactatgggtgtgtgtgagtgctgggatatgactgggtgttgaactgggaacatgcatgtggccttctgtgcatgtcaagtttcctcctcacacagcagggcctctgatgaagcagctgtgcatcttcccatgtgtgtcaatgtggatgccaggtggcagaactggtgtgaatcttggggactgtgagttatcaatgactcatttgtgagcattaatgagagcagaaagcatgctctctagatgcctcttcccaagcagagtgggaaagaggaatgcagatcataggagtgatgtttcctcaggtaggttctgcacacagtgaccaccatctcctgtctttcagcctcatgtctcttcctggctcccaccaaagcctgcccttcttattgtgggtctggagagtttgcagatcctggctctctaaggaagagcattagagtctgtggtttcggatactaaatcaccctaaaccaggaaggaacaagtgtagcctcagttcagacagagtttacagtggatattaatcatcagagtagctgggttcactggctcatgcccataatcccagcactttgtcaagcaaagatgggaaaataacttgaggccagaggtttgagaccagcctgggcaatatagtgagatgctgtgtttacaaaaacttttaagtatcagacaggcattgtggcaggcctctttcatcacagctactcaggaggccaaggcatgaggatcccttcagcacaggagtttgtggctttgtgagctattggtgcaccactgcatgtcagcctgggtgacagagtgagatcatgtttcaaaaaggaggnaaaattatacacttgtaggtc

SEQ ID NO: 41623 - DNA, 852 bp, Homo sapiens
actggactgaaataagcatttgaactatgttgggccaatccaattcttccctcttggaatctgaaattgggattggagacaggtagtaaatcaggaaggtgtggggcagtcatgaatggagaagcagagacagcaatctgtaaagggaaaactgtgaagcagatgtgcaggattcaggattgcaattgtccacaaagcccgagtgcacttccgaactgcgggttctatggtagacccaattatcccggtagcagccacacccccttctacttagactagcgtaagtgggtttctgttaatcggggaaaagaaaggatcttgactaagacaaccacatactgccttctaatatcctgcgatagtggaggctaaatttaaattgtctgaatacagtgtgaagtttggatgtgataatcacccagtttgtgtaatcatggcggacacccaaaatggtggctcaaacaatatgcgcacttcaaaccgtgtggatcctaaagacatctacgtttatctattagtagaatcacctgatctccactcactgctcacagggcggacccacctcaggcaggtagagcaaggtaatccatattactttccattacctagctggcagtggactcaagagtttgtggaaaaagatcccttgtggtttttgaattatttaccattcaaagtcatgaaaattcaaatgcaggcagctttattttcagaaagttgcttaaaaatcaatctctaaacattattttgattttacttttgagctttctttatccagaatactttttttaaagatacatactttctgttatttttgaatccatgtattctcagtaaaaccaaaatcaaaca

SEQ ID NO: 41624 - DNA, 408 bp, Homo sapiens
actaaggacttaccttgcaagaagggcaaaatttgaaacagacctaccacagtgtgtaaacaatgcctttgtaagtttaaagtaattcatcggtaattcagtggaatgctagaacaaaaagtaatactcttgagagtaaaataatagaatccagagattctataatacatctatagcatccagtataaaaaaaatactagacatgtgaatgaacccatagtcaagagaaaaagccgtcaccaaaacaggttccaagatggaattcacagacaagggctttaaagacactattagaaatatgtgtatgaacttaaaggaaaagatggtttaatgaatgaacagatagtggttctcagctgagacatgagaagtagaaaaaagaaacaatggaaatcctggaactacaaa

SEQ ID NO: 41625 - DNA, 1059 bp, Homo sapiens
tgggaggccgaggctggcggatcatgaggtcaggagttcgataccagcctggccaatatggggaaaccccctctctactaaaaaatacaaaaattatccgggtgtggtggcacgcacctgtagttccagctactcaggaggctgaggcaggagaattgcttgaacctgggaggcggagggtgcagttagccgagatcgtgccactgcactctagcctgggcaacagagtgagactgcatctcaaaaaaataaaataaaatttaaactaaaacagattaaatacaacaaagccagtctaaatttttgattgtgtgcttggtattttgctgaaactaaatttccaatgtatttggaatatggcagcaattgttaaaagttgagggagtttttgagtttgtcaagtaaacactcccctaggccatgtggtggctcagttccccttttaagagtaaactatgaggtcactaagtttccagagtcatagatacaatcacattttaagttcagctccattcttttctcattttcttggacagttggagtaacctgctgagtctttgtcaaagaaagctcagatgcagaacccacatagcactacttagatgcaacgtggtgattcagattccccagaatatgcttatatttgcctttgagataaccactgaagtgaaaacaaaacatttaaaagttttgagtacagatctcatgaatctatcagcagtaagctaaggcatgtgtactagtcctggaggggagaagaggcaagtggaaacttaaaacagataattctggccctacagggtggctcttgcctgtaatcccagcactttgggaagccaaggtgggaagatcgcttgaggccaggagtttgagaccggcctgggcaacatagcaaaaccccgtctctaaaataataaatctacacctgtagtcccacctactccagaggctgaggggaggatcacttgacctccaggaggtcaaaaccacagggacctttgatggcaccacagtgagctttgatggcgccactgggtgactgagggagaccctgtctca

SEQ ID NO: 41626 - DNA, 719 bp, Homo sapiens
aagcagtggtatcaacgcagagtgcccattatggccgggagggagtttttgagtttgtcaagtaaacactcccctaggccatgtggtggctcagttccccttttaagagtaaactatgaggtcactaagtttccagagtcatagatacaatcacattttaagttcagctccattcttttctcattttcttggacagttggagtaacctgctgagtctttgtcaaagaaagctcagatgcagaacccacatagcactacttagatgcaacgtggtgattcagattccccagaatatgcttatatttgcctttgagataaccactgaagtgaaaacaaaacatttaaaagttttgagtacagatctcatgaatctatcagcagtaagctaaggcatgtgtactagtcctggaggggagaagaggcaagtggaaacttaaaacagataattctggccctacagggtggctcttgcctgtaatcccagcactttgggaagccaaggtgggaagatcgcttgaggccaggagtttgagaccggcctgggcaacatagcaaaaccccgtctctaaaataataaatctacacctgtagtcccacctactccagaggctgaggggaggatcacttgacctccaggaggtcaaaaccacagggacctttgatggcaccacagtgagctttgatggcgccactgggtgactgagggagaccctgtctca

SEQ ID NO: 41627 - DNA, 303 bp, Homo sapiens
gacagagcaagactccatctcaaaaaaaaaaaaaaaaagtaaaaataaaaaataaaaaaatagaaacacattgtaaaaggagaggattgtaaaagcaatcaaatgataactgaaggaaagaatgctcgtatcctagtgcattataatacttgaggttcataatgatgacccttaattagtaaggaaagattggatttgctgcatcctagagtagagaacatttttagttatttggaattatatagacttggtgctcccccccaagacccccaccgcaagacggagtcttgctctgtcacccag

SEQ ID NO: 41628 - DNA, 404 bp, Homo sapiens
acatactaagttccaattattcctaattaaaataaattaaaaatcagtaccttaataatgtattcaggaaaatatcctttaatttactgaagttcaagaagagtgtaagaaagatataagtatgaacttttcccctcaacatttctctaattctgatttggtacaataacatagacaatcctagcttaatacagaaatgtgccaggcgcagtggctcatgcctgtaatcccagcctacaaaagctgttttgaaaaattagcccggtgtggtggtgtgtgcctgcagccctacctactcaagaggctgaggtgggagaatcgcttgagccgggagttccaggctgcagtgagctatgatgctgccactgcactccagcttgggccacagaatgagactctcttta

SEQ ID NO: 41629 - DNA, 519 bp, Homo sapiens
ttgactaagttctgtcagttttgcgctcctaaatatctctcacatccattcatttctcttcatttcctcttttaccttttcagattaagatactgcctagactaatagcctcctaactgatcttcatatatccattctttcctcttctgaatcagttctcccattttagtgtgagtttttataaaatgtaaatcctggctgggcacagttgctcatgcctgtaatccctgcactttgggagcctgaggtgcacagatcacttgatcccaggagttccggaccagcctggacagcataatgagactccatccccattaaaaaaaaaaaaaaattaacccaatcatgttgtcactcttcttaaagccattcagtggcctccctttgctcttaggataaaagccaaaatcctttatgtcgcctacaatgcctagtagaatgtggctgtgtctccttctctagtctgttatactgtgggactccactttgttctctcctatcaccacccttcttctgtgtctt

SEQ ID NO: 41630 - DNA, 352 bp, Homo sapiens
gaaggacagaatgtgtcagaaatgatgctgtgtgatttccaaggtgaggttagaaaacatggcaaggtttccacctgcttctctctctctctctcacttgggacgtgcacctttggagccctgagctgccgtacaagaagtctagctccctggacaccccataatacagaggccatgtagaggggtttagaccacatagcaatagaggtgacagtggaaccccagctgagtaaatgaaccttcacgtgctttgactcccccacctccatgaccccaccccacactcccacttttttgagccatcccagtgaaagccaaatggagcagatatgagcagttcctgcggcgctct

SEQ ID NO: 41631 - DNA, 430 bp, Homo sapiens
gcatcagtgaattccacaaagcttcaggatacaagatcaacaaacaattggttttatttctatacactaacaacgaacaatctgtaacgaaattaagaaaaaaatttcatttacaatatcaatagtaaaaatactggggaatctggacatggtggatcatgcctgtaatcccagcactctgggaggcccaggtgggaggattacttgaactcagagttcgagaacagcctgggccacatagcgaaacccctgtctctacaaaaaatacaaaaatttagccaggtgtggtggtgtgtgcctgtagtcccagctacaaaggaggctgaggtgggaggatgccttgagcctgggagacagaggttacagtgagccaagatggcaccactgcactccaccctgggcaacaaagccaggtcctgtctcaaaaaca

SEQ ID NO: 41632 - DNA, 508 bp, Homo sapiens
accacatactactccacttcctctgccatctttcatctcctcctgccttgtacaaaaaaggcagcatttcttcttggcttcaactttattttagccaggatacttcacaaccagaagtgaattactgtttcaaatataaataatcctcatgaatttcagcatgcatgatgggtatttatgcagtcttagcaggccgagtcactgttgccaaattatcaggcacctacttgagtccttgttcacttgtttgtagacgcaaaatgatagataacttgtcccctgccttttaagagcttaaaagcttaatagaggagtcagtagagttacagaaatagaaactagctatgaattggattgtatcactggaagtatgtccaaccttccttttgctacaaacaaagaatgcctagggattcaactttttcatgtgttagagaatcagaatgtttaaaatactgagatgcttttcttctttaataaaaatctaattcttaagaaatcctgatta

SEQ ID NO: 41633 - DNA, 656 bp, Homo sapiens
gaccaaacttcactagtgcattaatcagcattactgaccaaaatgaatgcaccaagagtggattcaatttttgttcaaaataatccaaccagcttcctgccaccactttctgagaagccactagaaaaaaatcaatgtgtctggggttgggcaggcttctactgcacataaactaaatggggtttaaaacaacaatgaaaaataggtgcccatttgtacttaagtatacttctctctttttcttgctatcttttacaatttctggataatctcagaaatactcaggttttaaactaaaacaatacagagaaataatgctttagatagtagctaatatgctctcttcttcaaaagtgaatgctcatccactagacacaatgctaacatgaaagcgcatagattatttttttaattctcagatactttggttctctgaggcggagaaccagcatcaaggcctctgaatacaacaagcacaggcttgatgaggggcttgggaggtaagaaggtgcttttgccattcatagttacatgtaaatatggacaggttaggcatttgcttttaaggtattatggaaaagcacacttaacctttacagtatttctcctactgatctcccagtctttacacatcttcttgggtaaaggcaaatgtt

SEQ ID NO: 41634 - DNA, 691 bp, Homo sapiens
gcatgtttcagtgcagccacaaaataaggccacaggtgaaggcctgatgggaagcacagaagatactgtggcccacacttggctggactacctgttaaaagtggcctccgtcactttccacagtgaccatgccttgcctgctgccccgtccctgcaaccaacctggctttgtggccttctgctcatctatgcattgcaggactgaagaagctttatagatgtgtccgttacacttcatcacattaaggaaggaaattgtgtgatacagggattttgcaagaattaccaaagttctctggatggatccctgatgagggcttgacagtgcctgtcctcgaaatgcaggttaaccgctgtgtcctttgttagaggacttggccccgcactaagcatgctgagtttcatccactgatgttctcactcatgtggagagtatttgtggtgcatcctgggaaacgcaattgcaggtagctttctgagccgactagcaatctaaactgagcccacggtgatgagattttcttcaacgccactctttgggatgctgctgacttgtgatgaaatgggcagggaacccttatggatttaaagctgcaactctgaatgcctcagtcccgaggagtcctcagcctgggcattgcaggaaccaagcccctttcacctccacggggtcagagatcagattgtatca

SEQ ID NO: 41635 - DNA, 488 bp, Homo sapiens
aactcttgatcaaaaatggaaagaaaaaaaccagtgaaacaggctaggtagtttgtggaattctcctttgcaggtgaggggagaaagcagctatctcaagggcacagctacagattgggagctggggcttccatccagggtctgggacacccaaaccttaggcttgcccctcccgggaggcctccccctcagagctatgtgggatgcagttgcctttttacctgtgatgagaaactggtgaattgccaggattctggctctggcttcagtctgcccctttccggggattagagggcattaaccctacttcctacagccaagcagctcttcctcatgactctactttctaactccgggggttgactgattgatttgaagaccgccttgttgatgaatgtgttgaaacttgctatcataatgtaaatgctccttaataaaataacaggacctggtgggttcagttgccttgcccacgtgtgaaaaaaaaa

SEQ ID NO: 41636 - DNA, 321 bp, Homo sapiens
taatatttaatgtctgcatttgattcagagagatatttttcagccctatcaaatttgaaagtagcttagaattagaaaattcttcctagcaggagtttgcctcaccagctgctgtctcctaaacctgttcagtagagtcatatttcatagagctgcctcttagatttttactttgcatggcttaattccacttctcattatctcccatctatagttctttcgatctgtaactacactccaatccactagaattctacaagctaaaataacattttatacccccctgccccaatttataaaatacattttataggcagttgc

SEQ ID NO: 41637 - DNA, 1878 bp, Homo sapiens
ggcgtgagccactgcgcccggcccaaacttgtctgtctttatctctacttacagtgagtgtcaggtcaccctcttggagaccggtgatcagaggctgatgacctctcacagctgctggccctggggacctaggggatccctttgggaatcccaggtcaaccgggtgccagctccattgctctggctgtgtgggtggtggtgggtggtgaggcacatagaaagtcaccagcgccagggaagggcagctcagaaatcctggtcatgccaagtgccactcagggctattctcactctagtgagtgctcattggttcttcccgaagtccagagggaaggacaccatcgggggcgctgtatcccacccggcaccattagcccctgccacccaccacccagcagctggattcccacgggagttgcgggtgggggcggaaccggctgaggtctgggggcggggcgtccgggcgcggggcggggctggcgggaatgtgcgcacccccgcgcggggccccgcccgagcatcccgcgccgacggggctgtgccggagcagctgtgcagagctgcaggcgcgcgtcatggctgctttgagacagccccaggtcgcggagctgctggccgaggcccggcgagccttccgggaggagttcggggccgagcccgagctggccgtgtcagcgccgggccgcgtcaacctcatcggggaacacacggactacaaccagggcctggtgctgcctatggctctggagctcatgacggtgctggtgggcagcccccgcaaggatgggctggtgtctctcctcaccacctctgagggtgccgatgagccccagcggctgcagtttccactgcccacagcccagcgctcgctggagcctgggactcctcggtgggccaactatgtcaagggagtgattcagtactacccagctgcccccctccctggcttcagtgcagtggtggtcagctcagtgcccctggggggtggcctgtccagctcagcatccttggaagtggccacgtacaccttcctccagcagctctgtccagactcgggcacaatagctgcccgcgcccaggtgtgtcagcaggccgagcacagcttcgcagggatgccctgtggcatcatggaccagttcatctcacttatgggacagaaaggccacgcgctgctcattgactgcaggtccttggagaccagcctggtgccactctcggaccccaagctggccgtgctcatcaccaactctaatgtccgccactccctggcctccagcgagtaccctgtgcggcggcgccaatgtgaagaagtggcccgggcgctgggcaaggaaagcctccgggaggtacaactggaagagctagaggctgccagggacctggtgagcaaagagggcttccggcgggcccggcacgtggtgggggagattcggcgcacggcccaggcagcggccgccctgagacgtggcgactacagagcctttggccgcctcatggtggagagccaccgctcactcagagacgactatgaggtgagctgcccagagctggaccagctggtggaggctgcgcttgctgtgcctggggtttatggcagccgcatgacgggcggtggcttcggtggctgcacggtgacactgctggaggcctccgctgctccccacgccatgcggcacatccaggagcactacggcgggactgccaccttctacctctctcaagcagccgatggagccaaggtgctgtgcttgtgaggcacccccaggacagcacacggtgagggtgcggggcctgcaggccagtcccacggctctgtgcccggtgccatcttccatatccgggtgctcaataaacttgtgcctccaatgtggtaaaaaa

SEQ ID NO: 41638 - DNA, 1958 bp, Homo sapiens
ggcgtgagccactgcgcccggcccaaacttgtctgtctttatctctacttacagtgagtgtcaggtcaccctcttggagaccggtgatcagaggctgatgacctctcacagctgctggccctggggacctaggggatccctttgggaatcccaggtcaaccgggtgccagctccattgctctggctgtgtgggtggtggtgggtggtgaggcacatagaaagtcaccagcgccagggaagggcagctcagaaatcctggtcatgccaagtgccactcagggctattctcactctagtgagtgctcattggttcttcccgaagtccagagggaaggacaccatcgggggcgctgtatcccacccggcaccattagcccctgccacccaccacccagcagctggattcccacgggagttgcgggtgggggcggaaccggctgaggtctgggggcggggcgtccgggcgcggggcggggctggcgggaatgtgcgcacccccgcgcggggccccgcccgagcatcccgcgccgacggggctgtgccggagcagctgtgcagagctgcaggcgcgcgtcatggctgctttgagacagccccaggtcgcggagctgctggccgaggcccggcgagccttccgggaggagttcggggccgagcccgagctggccgtgtcagcgccgggccgcgtcaacctcatcggggaacacacggactacaaccagggcctggtgctgcctatggctctggagctcatgacggtgctggtgggcagcccccgcaaggatgggctggtgtctctcctcaccacctctgagggtgccgatgagccccagcggctgcagtttccactgcccacagcccagcgctcgctggagcctgggactcctcggtgggccaactatgtcaagggagtgattcagtactacccagctgcccccctccctggcttcagtgcagtggtggtcagctcagtgcccctggggggtggcctgtccagctcagcatccttggaagtggccacgtacaccttcctccagcagctctgtccagactcgggcacaatagctgcccgcgcccaggtgtgtcagcaggccgagcacagcttcgcagggatgccctgtggcatcatggaccagttcatctcacttatgggacagaaaggccacgcgctgctcattgactgcaggtccttggagaccagcctggtgccactctcggaccccaagctggccgtgctcatcaccaactctaatgtccgccactccctggcctccagcgagtaccctgtgcggcggcgccaatgtgaagaagtggcccgggcgctgggcaaggaaagcctccgggaggtacaactggaagagctagaggctgccagggacctggtgagcaaagagggcttccggcgggcccggcacgtggtgggggagattcggcgcacggcccaggcagcggccgccctgagacgtggcgactacagagcctttggccgcctcatggtggagagccaccgctcactcaggtgaggccctctgggcgccccgctcctgccgggcacaggccggcccaggcccaccccttcaatatcctctctgcagagacagacgactatgaggtgagctgcccagagctggaccagctggtggaggctgcgcttgctgtgcctggggtttatggcagccgcatgacgggcggtggcttcggtggctgcacggtgacactgctggaggcctccgctgctccccacgccatgcggcacatccaggagcactacggcgggactgccaccttctacctctctcaagcagccgatggagccaaggtgctgtgcttgtgaggcacccccaggacagcacacggtgagggtgcggggcctgcaggccagtcccacggctctgtgcccggtgccatcttccatatccgggtgctcaataaacttgtgcctccaatgtggtaaaaaa

SEQ ID NO: 41639 - DNA, 1362 bp, Homo sapiens
  misc_feature (40)..(40): n is a, c, g, or t
ggcctgcgtaagccaaagcgttggttgccaaagcaagccnttgccggggggcgcgcgtcatggctgctttgagacagccccaggtcgcggagctgctggccgaggcccggcgagccttccgggaggagttcggggccgagcccgagctggccgtgtcagcgccgggccgcgtcaacctcatcggggaacacacggactacaaccagggcctggtgctgcctatggctctggagctcatgacggtgctggtgggcagcccccgcaaggatgggctggtgtctctcctcaccacctctgagggtgccgatgagccccagcggctgcagtttccactgcccacagcccagcgctcgctggagcctgggactcctcggtgggccaactatgtcaagggagtgattcagtactacccagctgcccccctccctggcttcagtgcagtggtggtcagctcagtgcccctggggggtggcctgtccagctcagcatccttggaagtggccacgtacaccttcctccagcagctctgtccagactcgggcacaatagctgcccgcgcccaggtgtgtcagcaggccgagcacagcttcgcagggatgccctgtggcatcatggaccagttcatctcacttatgggacagaaaggccacgcgctgctcattgactgcaggtccttggagaccagcctggtgccactctcggaccccaagctggccgtgctcatcaccaactctaatgtccgccactccctggcctccagcgagtaccctgtgcggcggcgccaatgtgaagaagtggcccgggcgctgggcaaggaaagcctccgggaggtacaactggaagagctagaggctgccagggacctggtgagcaaagagggcttccggcgggcccggcacgtggtgggggagattcggcgcacggcccaggcagcggccgccctgagacgtggcgactacagagcctttggccgcctcatggtggagagccaccgctcactcagagacgactatgaggtgagctgcccagagctggaccagctggtggaggctgcgcttgctgtgcctggggtttatggcagccgcatgacgggcggtggcttcggtggctgcacggtgacactgctggaggcctccgctgctccccacgccatgcggcacatccaggagcactacggcgggactgccaccttctacctctctcaagcagccgatggagccaaggtgctgtgcttgtgaggcacccccaggacagcacacggtgagggtgcggggcctgcaggccagtcccacggctctgtgcccggtgccatcttccatatccgggtgctcaataaacttgtgcctccaatgtggtaaaaaa

SEQ ID NO: 41640 - DNA, 2335 bp, Homo sapiens
ggcgtgagccactgcgcccggcccaaacttgtctgtctttatctctacttacagtgagtgtcaggtcaccctcttggagaccggtgatcagaggctgatgacctctcacagctgctggccctggggacctaggggatccctttgggaatcccaggtcaaccgggtgccagctccattgctctggctgtgtgggtggtggtgggtggtgaggcacatagaaagtcaccagcgccagggaagggcagctcagaaatcctggtcatgccaagtgccactcagggctattctcactctagtgagtgctcattggttcttcccgaagtccagagggaaggacaccatcgggggcgctgtatcccacccggcaccattagcccctgccacccaccacccagcagctggattcccacgggagttgcgggtgggggcggaaccggctgaggtctgggggcggggcgtccgggcgcggggcggggctggcgggaatgtgcgcacccccgcgcggggccccgcccgagcatcccgcgccgacggggctgtgccggagcagctgtgcagagctgcaggcgcgcgtcatggctgctttgagacagccccaggtcgcggagctgctggccgaggcccggcgagccttccgggaggagttcggggccgagcccgagctggccgtgtcagcgccgggccgcgtcaacctcatcggggaacacacggactacaaccagggcctggtgctgcctatggctctggagctcatgacggtgctggtgggcagcccccgcaaggatgggctggtgtctctcctcaccacctctgagggtgccgatgagccccagcggctgcagtttccactgcccacagcccagcgctcgctggagcctgggactcctcggtgggccaactatgtcaagggagtgattcagtactacccaggtatggggcccaggcctgagccaagtcctcactgatactaggagtgccacctcacagccacagagcccattcatttgtctgatacactgtggggaaggcttgtagagtggagcatcccattgtacagatgaggaaactgatgcccccagaaggtcgggaacttgccctgggtttcccgtgacctgattggaggagccaggatttgaaccccagccttttttccctccagagccctaaaccaggaggacaattagaagtgtcccagcaacctcagagggtgggaaaatggagggcagtgggtcccttggcccagcaggttggtggcttctgacaattgagacacacaccctagaaacagctgctaggccgttgctgcccttcccgccaggacacctgcccttcctgtgccatcctcccaggcagcccctcttaccatcacctgttctttcccctgcagctgcccccctccctggcttcagtgcagtggtggtcagctcagtgcccctggggggtggcctgtccagctcagcatccttggaagtggccacgtacaccttcctccagcagctctgtccagactcgggcacaatagctgcccgcgcccaggtgtgtcagcaggccgagcacagcttcgcagggatgccctgtggcatcatggaccagttcatctcacttatgggacagaaaggccacgcgctgctcattgactgcaggtccttggagaccagcctggtgccactctcggaccccaagctggccgtgctcatcaccaactctaatgtccgccactccctggcctccagcgagtaccctgtgcggcggcgccaatgtgaagaagtggcccgggcgctgggcaaggaaagcctccgggaggtacaactggaagagctagaggctgccagggacctggtgagcaaagagggcttccggcgggcccggcacgtggtgggggagattcggcgcacggcccaggcagcggccgccctgagacgtggcgactacagagcctttggccgcctcatggtggagagccaccgctcactcagagacgactatgaggtgagctgcccagagctggaccagctggtggaggctgcgcttgctgtgcctggggtttatggcagccgcatgacgggcggtggcttcggtggctgcacggtgacactgctggaggcctccgctgctccccacgccatgcggcacatccaggagcactacggcgggactgccaccttctacctctctcaagcagccgatggagccaaggtgctgtgcttgtgaggcacccccaggacagcacacggtgagggtgcggggcctgcaggccagtcccacggctctgtgcccggtgccatcttccatatccgggtgctcaataaacttgtgcctccaatgtggtaaaaaa

SEQ ID NO: 41641 - DNA, 1910 bp, Homo sapiens
ggcgtgagccactgcgcccggcccaaacttgtctgtctttatctctacttacagtgagtgtcaggtcaccctcttggagaccggtgatcagaggctgatgacctctcacagctgctggccctggggacctaggggatccctttgggaatcccaggtcaaccgggtgccagctccattgctctggctgtgtgggtggtggtgggtggtgaggcacatagaaagtcaccagcgccagggaagggcagctcagaaatcctggtcatgccaagtgccactcagggctattctcactctagtgagtgctcattggttcttcccgaagtccagagggaaggacaccatcgggggcgctgtatcccacccggcaccattagcccctgccacccaccacccagcagctggattcccacgggagttgcgggtgggggcggaaccggctgaggtctgggggcggggcgtccgggcgcggggcggggctggcgggaatgtgcgcacccccgcgcggggccccgcccgagcatcccgcgccgacggggctgtgccggagcagctgtgcagagctgcaggcgcgcgtcatggctgctttgagacagccccaggtcgcggagctgctggccgaggcccggcgagccttccgggaggagttcggggccgagcccgagctggccgtgtcagcgccgggccgcgtcaacctcatcggggaacacacggactacaaccagggcctggtgctgcctatggctctggagctcatgacggtgctggtgggcagcccccgcaaggatgggctggtgtctctcctcaccacctctgagggtgccgatgagccccagcggctgcagtttccactgcccacagcccagcgctcgctggagcctgggactcctcggtgggccaactatgtcaagggagtgattcagtactacccagctgcccccctccctggcttcagtgcagtggtggtcagctcagtgcccctggggggtggcctgtccagctcagcatccttggaagtggccacgtacaccttcctccagcagctctgtccagccctagcctccccacctcaccctgtactgcagactcgggcacaatagctgcccgcgcccaggtgtgtcagcaggccgagcacagcttcgcagggatgccctgtggcatcatggaccagttcatctcacttatgggacagaaaggccacgcgctgctcattgactgcaggtccttggagaccagcctggtgccactctcggaccccaagctggccgtgctcatcaccaactctaatgtccgccactccctggcctccagcgagtaccctgtgcggcggcgccaatgtgaagaagtggcccgggcgctgggcaaggaaagcctccgggaggtacaactggaagagctagaggctgccagggacctggtgagcaaagagggcttccggcgggcccggcacgtggtgggggagattcggcgcacggcccaggcagcggccgccctgagacgtggcgactacagagcctttggccgcctcatggtggagagccaccgctcactcagagacgactatgaggtgagctgcccagagctggaccagctggtggaggctgcgcttgctgtgcctggggtttatggcagccgcatgacgggcggtggcttcggtggctgcacggtgacactgctggaggcctccgctgctccccacgccatgcggcacatccaggagcactacggcgggactgccaccttctacctctctcaagcagccgatggagccaaggtgctgtgcttgtgaggcacccccaggacagcacacggtgagggtgcggggcctgcaggccagtcccacggctctgtgcccggtgccatcttccatatccgggtgctcaataaacttgtgcctccaatgtggtaaaaaa

SEQ ID NO: 41642 - DNA, 1821 bp, Homo sapiens
ggcgtgagccactgcgcccggcccaaacttgtctgtctttatctctacttacagtgagtgtcaggtcaccctcttggagaccggtgatcagaggctgatgacctctcacagctgctggccctggggacctaggggatccctttgggaatcccaggtcaaccgggtgccagctccattgctctggctgtgtgggtggtggtgggtggtgaggcacatagaaagtcaccagcgccagggaagggcagctcagaaatcctggtcatgccaagtgccactcagggctattctcactctagtgagtgctcattggttcttcccgaagtccagagggaaggacaccatcgggggcgctgtatcccacccggcaccattagcccctgccacccaccacccagcagctggattcccacgggagttgcgggtgggggcggaaccggctgaggtctgggggcggggcgtccgggcgcggggcggggctggcgggaatgtgcgcacccccgcgcggggccccgcccgagcatcccgcgccgacggggctgtgccggagcagctgtgcagagctgcaggcgcgcgtcatggctgctttgagacagccccaggtcgcggagctgctggccgaggcccggcgagccttccgggaggagttcggggccgagcccgagctggccgtgtcagcgccgggccgcgtcaacctcatcggggaacacacggactacaaccagggcctggtgctgcctatggctctggagctcatgacggtgctggtgggcagcccccgcaaggatgggctggtgtctctcctcaccacctctgagggtgccgatgagccccagcggctgcagtttccactgcccacagcccagcgctcgctggagcctgggactcctcggtgggccaactatgtcaagggagtgattcagtactacccagctgcccccctccctggcttcagtgcagtggtggtcagctcacatccttggaagtggccacgtacaccttcctccagcagctctgtccagactcgggcacaatagctgcccgcgcccaggtgtgtcagcaggccgagcacagcttcgcagggatgccctgtggcatcatggaccagttcatctcacttatgggacagaaaggccacgcgctgctcattgactgcagtctcggaccccaagctggccgtgctcatcaccaactctaatgtccgccactccctggcctccagcgagtaccctgtgcggcggcgccaatgtgaagaagtggcccgggcgctgggcaaggaaagcctccgggaggtacaactggaagagctagaggctgccagggacctggtgagcaaagagggcttccggcgggcccggcacgtggtgggggagattcggcgcacggcccaggcagcggccgccctgagacgtggcgactacagagcctttggccgcctcatggtggagagccaccgctcactcagagacgactatgaggtgagctgcccagagctggaccagctggtggaggctgcgcttgctgtgcctggggtttatggcagccgcatgacgggcggtggcttcggtggctgcacggtgacactgctggaggcctccgctgctccccacgccatgcggcacatccaggagcactacggcgggactgccaccttctacctctctcaagcagccgatggagccaaggtgctgtgcttgtgaggcacccccaggacagcacacggtgagggtgcggggcctgcaggccagtcccacggctctgtgcccggtgccatcttccatatccgggtgctcaataaacttgtgcctccaatgtggtaaaaaa

SEQ ID NO: 41643 - DNA, 1384 bp, Homo sapiens
ggcgtgagccactgcgcccggcccaaacttgtctgtctttatctctacttacagtgagtgtcaggtcaccctcttggagaccggtgatcagaggctgatgacctctcacagctgctggccctggggacctaggggatccctttgggaatcccaggtcaaccgggtgccagctccattgctctggctgtgtgggtggtggtgggtggtgaggcacatagaaagtcaccagcgccagggaagggcagctcagaaatcctggtcatgccaagtgccactcagggctattctcactctagtgagtgctcattggttcttcccgaagtccagagggaaggacaccatcgggggcgctgtatcccacccggcaccattagcccctgccacccaccacccagcagctggattcccacgggagttgcgggtgggggcggaaccggctgaggtctgggggcggggcgtccgggcgcggggcggggctggcgggaatgtgcgcacccccgcgcggggccccgcccgagcatcccgcgccgacggggctgtgccggagcagctgtgcagagctgcaggcgcgcgtcatggctgctttgagacagccccaggtcgcggagctgctggccgaggcccggcgagccttccgggaggagttcggggccgagcccgagctggccgtgtcagcgccgggccgcgtcaacctcatcggggaacacacggactacaaccagggcctggtgctgcctatggtgaggggctgcacggggagcccctagcccgccgccgcctgtcccggccgccgaggagggcgggcctcggggacgctgggggcgagttcttcccgcgggagatgtggggcgggcagctgcgcctggagcaccggtgcacggaagagtccccgggacaggctgttccccacgttggaagggaggaagcgaggaagtggccgggagagggtgcgcggccgcctcttggctcaagcccgccctctgggggctggggctcctcgccttcaacctgggagcatgttccccttaaactgtgaggccctgtgtgccacgcagaaggggacactccgcgcctccggccaccgtggggccccaaccgcagacctgggcgaacgtagccttctggcccagcccgttcaatttacagaggaggaaactgaggcctagagaggcccagtgaactgctggaggtcacacagcaggttcttggcggggctgcgacttgggagtgaggactcccagctttcagcggggggcgctttccgccccatctgcagcttggggagtgcacaggtacaggatgtccagagccaccccaaaatgtaaaggctttggagctccagtgatctgttttccctttgggctagctctcccccttgccccac

SEQ ID NO: 41644 - DNA, 1752 bp, Homo sapiens
ggcgtgagccactgcgcccggcccaaacttgtctgtctttatctctacttacagtgagtgtcaggtcaccctcttggagaccggtgatcagaggctgatgacctctcacagctgctggccctggggacctaggggatccctttgggaatcccaggtcaaccgggtgccagctccattgctctggctgtgtgggtggtggtgggtggtgaggcacatagaaagtcaccagcgccagggaagggcagctcagaaatcctggtcatgccaagtgccactcagggctattctcactctagtgagtgctcattggttcttcccgaagtccagagggaaggacaccatcgggggcgctgtatcccacccggcaccattagcccctgccacccaccacccagcagctggattcccacgggagttgcgggtgggggcggaaccggctgaggtctgggggcggggcgtccgggcgcggggcggggctggcgggaatgtgcgcacccccgcgcggggccccgcccgagcatcccgcgccgacggggctgtgccggagcagctgtgcagagctgcaggcgcgcgtcatggctgctttgagacagccccaggtcgcggagctgctggccgaggcccggcgagccttccgggaggagttcggggccgagcccgagctggccgtgtcagcgccgggccgcgtcaacctcatcggggaacacacggactacaaccagggcctggtgctgcctatggctctggagctcatgacggtgctggtgggcagcccccgcaaggatgggctggtgtctctcctcaccacctctgagggtgccgatgagccccagcggctgcagtttccactgcccacagcccagcgctcgctggagcctgggactcctcggtgggccaactatgtcaagggagtgattcagtactacccagctgcccccctccctggcttcagtgcagtggtggtcagctcagtgcccctggggggtggcctgtccagctcagcatccttggaagtggccacgtacaccttcctccagcagctctgtccagactcgggcacaatagctgcccgcgcccaggtgtgtcagcaggccgagcacagcttcgcagggatgccctgtggcatcatggaccagttcatctcacttatgggacagaaaggccacgcgctgctcattgactgcaggtccttggagaccagcctggtgccactctcggaccccaagctggccgtgctcatcaccaactctaatgtccgccactccctggcctccagcgagtaccctgtgcggcggcgccaatgtgaagaagtggcccgggcgctgggcaaggaaagcctccgggaggtacaactggaagagctagaggctgccagggacctggtgagcaaagagggcttccggcgggcccggcacgtggtgggggagattcggcgcacggcccaggcagcggccgccctgagacgtggcgactacagagcctttggccgcctcatggtggagagccaccgctcactcaggtgaggccctctgggcgccccgctcctgccgggcacaggccggcccaggcccaccccttcaatatcctctctgcagagacgagcactacggcgggactgccaccttctacctctctcaagcagccgatggagccaaggtgctgtgcttgtgaggcacccccaggacagcacacgacggagtctggctctgtcaccctgtctggagtgcggtaacacgatctcggttcactgca

SEQ ID NO: 41645 - DNA, 1199 bp, Homo sapiens
aactcaggggcgagctgctaactcaggggcgagctgctaactcaggggcgagctgcctatggctctggagctcatgacggtgctggtgggcagcccccgcaaggatgggctggtgtctctcctcaccacctctgagggtgccgatgagccccagcggctgcagtttccactgcccacagcccagcgctcgctggagcctgggactcctcggtgggccaactatgtcaagggagtgattcagtactacccagctgcccccctccctggcttcagtgcagtggtggtcagctcagtgcccctggggggtggcctgtccagctcagcatccttggaagtggccacgtacaccttcctccagcagctctgtccagactcgggcacaatagctgcccgcgcccaggtgtgtcagcaggccgagcacagcttcgcagggatgccctgtggcatcatggaccagttcatctcacttatgggacagaaaggccacgcgctgctcattgactgcaggtccttggagaccagcctggtgccactctcggaccccaagctggccgtgctcatcaccaactctaatgtccgccactccctggcctccagcgagtaccctgtgcggcggcgccaatgtgaagaagtggcccgggcgctgggcaaggaaagcctccgggaggtacaactggaagagctagaggctgccagggacctggtgagcaaagagggcttccggcgggcccggcacgtggtgggggagattcggcgcacggcccaggcagcggccgccctgagacgtggcgactacagagcctttggccgcctcatggtggagagccaccgctcactcagagacgactatgaggtgagctgcccagagctggaccagctggtggaggctgcgcttgctgtgcctggggtttatggcagccgcatgacgggcggtggcttcggtggctgcacggtgacactgctggaggcctccgctgctccccacgccatgcggcacatccaggagcactacggcgggactgccaccttctacctctctcaagcagccgatggagccaaggtgctgtgcttgtgaggcacccccaggacagcacacggtgagggtgcggggcctgcaggccagtcccacggctctgtgcccggtgccatcttccatatccgggtgctcaataaacttgtgcctccaatgtggtaaaaaa

SEQ ID NO: 41646 - DNA, 1788 bp, Homo sapiens
ggcgtgagccactgcgcccggcccaaacttgtctgtctttatctctacttacagtgagtgtcaggtcaccctcttggagaccggtgatcagaggctgatgacctctcacagctgctggccctggggacctaggggatccctttgggaatcccaggtcaaccgggtgccagctccattgctctggctgtgtgggtggtggtgggtggtgaggcacatagaaagtcaccagcgccagggaagggcagctcagaaatcctggtcatgccaagtgccactcagggctattctcactctagtgagtgctcattggttcttcccgaagtccagagggaaggacaccatcgggggcgctgtatcccacccggcaccattagcccctgccacccaccacccagcagctggattcccacgggagttgcgggtgggggcggaaccggctgaggtctgggggcggggcgtccgggcgcggggcggggctggcgggaatgtgcgcacccccgcgcggggccccgcccgagcatcccgcgccgacggggctgtgccggagcagctgtgcagagctgcaggcgcgcgtcatggctgctttgagacagccccaggtcgcggagctgctggccgaggcccggcgagccttccgggaggagttcggggccgagcccgagctggccgtgtcagcgccgggccgcgtcaacctcatcggggaacacacggactacaaccagggcctggtgctgcctatggctctggagctcatgacggtgctggtgggcagcccccgcaaggatgggctggtgtctctcctcaccacctctgagggtgccgatgagccccagcggctgcagtttccactgcccacagcccagcgctcgctggagcctgggactcctcggtgggccaactatgtcaagggagtgattcagtactacccagctgcccccctccctggcttcagtgcagtggtggtcagctcagtgcccctggggggtggcctgtccagctcagcatccttggaagtggccacgtacaccttcctccagcagctctgtccagactcgggcacaatagctgcccgcgcccaggtgtgtcagcaggccgagcacagcttcgcagggatgccctgtggcatcatggaccagttcatctcacttatgggacagaaaggccacgcgctgctcattgactgcagcgagtaccctgtgcggcggcgccaatgtgaagaagtggcccgggcgctgggcaaggaaagcctccgggaggtacaactggaagagctagaggctgccagggacctggtgagcaaagagggcttccggcgggcccggcacgtggtgggggagattcggcgcacggcccaggcagcggccgccctgagacgtggcgactacagagcctttggccgcctcatggtggagagccaccgctcactcagagacgactatgaggtgagctgcccagagctggaccagctggtggaggctgcgcttgctgtgcctggggtttatggcagccgcatgacgggcggtggcttcggtggctgcacggtgacactgctggaggcctccgctgctccccacgccatgcggcacatccaggagcactacggcgggactgccaccttctacctctctcaagcagccgatggagccaaggtgctgtgcttgtgaggcacccccaggacagcacacggtgagggtgcggggcctgcaggccagtcccacggctctgtgcccggtgccatcttccatatccgggtgctcaataaacttgtgcctccaatgtggtaaaaaa

SEQ ID NO: 41647 - DNA, 1124 bp, Homo sapiens
  misc_feature (40)..(40): n is a, c, g, or t
ggcctgcgtaagccaaagcgttggttgccaaagcaagccnttgccggggggcgcgcgtcatggctgctttgagacagccccaggtcgcggagctgctggccgaggcccggcgagccttccgggaggagttcggggccgagcccgagctggccgtgtcagcgccgggccgcgtcaactcctcggtgggccaactatgtcaagggagtgattcagtactacccagctgcccccctccctggcttcagtgcagtggtggtcagctcagtgcccctggggggtggcctgtccagctcagcatccttggaagtggccacgtacaccttcctccagcagctctgtccagcacagcttcgcagggatgccctgtggcatcatggaccagttcatctcacttatgggacagaaaggccacgcgctgctcattgactgcaggtccttggagaccagcctggtgccactctcggaccccaagctggccgtgctcatcaccaactctaatgtccgccactccctggcctccagcgagtaccctgtgcggcggcgccaatgtgaagaagtggcccgggcgctgggcaaggaaagcctccgggaggtacaactggaagagctagaggctgccagggacctggtgagcaaagagggcttccggcgggcccggcacgtggtgggggagattcggcgcacggcccaggcagcggccgccctgagacgtggcgactacagagcctttggccgcctcatggtggagagccaccgctcactcagagacgactatgaggtgagctgcccagagctggaccagctggtggaggctgcgcttgctgtgcctggggtttatggcagccgcatgacgggcggtggcttcggtggctgcacggtgacactgctggaggcctccgctgctccccacgccatgcggcacatccaggagcactacggcgggactgccaccttctacctctctcaagcagccgatggagccaaggtgctgtgcttgtgaggcacccccaggacagcacacggtgagggtgcggggcctgcaggccagtcccacggctctgtgcccggtgccatcttccatatccgggtgctcaataaacttgtgcctccaatgtggtaaaaaa

SEQ ID NO: 41648 - DNA, 430 bp, Homo sapiens
tttgacacttctgagtagtgaaatgaagtgtttttattcttttgaagtagtgaggacacagcttctgattattccttctataaatatgcctgctacaaaagcgtgagacccacaaaataacagagataaaaacataaaatgagcaaaactttcaaaagagaaatcagaactttattttactgatgagtgtgtagaacttagaactgtacaacctctgcaaagaggaatttggcatcatctaacagaagtacacatgcaatcccacttccatctttctatctttacaagtgtgaaatagcatatgtattaggttattgcctgtgccattattgtaatcccaaaaggttgtaaacaccaaatgtccagcaatagggaactagtagaatatagactgtggtgtagcacatagtggagtactatgtagcttaaa

SEQ ID NO: 41649 - DNA, 1002 bp, Homo sapiens
catatctaggtgccttctcccaactcagatcctttgactatagaaagacacagatttcaaggctgagatccacaaaactctagcaaatactgcacagacactgaccaatgacagcaggtgctgcctgtcaccctggagcaccaggcagggttccaaagcacccttgctgtgccagcctctgattgctggttatagggaggtctggggtagtcccaaaagctgggatgtctaaggcagctggggtcagtcaggaggctcagggcagtggcaggaaaatattttcctccctggtagagccacagcggggtatccaggctgaatattattggcgagaaggaccatggcacagcaccaagacctgcaggacaaactttgttggagctgaatccagaaaaacaatcttcttctaaaccactctcctgcccctcatttaattattgtgcttttgggtgcacttggactactctgaaacattcagaactctgtcaaaaaaaaaaaaaagacctctctcctcagcacctctcccacttgggcatcagtcttggcttcctctctacttgctttcacttgctccttgtggcagagattgccctcagcagatcccttcccttaggttccttgctgtcaagtggaggctagggagcgagattatggccaatagaatgtgggcggaaccacagatctgagcctgaggaacatcccacaggaccctgagctcttcctccagctgctgcagtggccttggaagccatgtctgttctagaagtgtagctacagatggagaaggcccatgtgctagctagtctccaaagatggcgtatcaggccattcttgcgttgctataaagaaatatctgagataagttaatttataaagaaaagagtttgtattggctcattgttctgcgggcttcacaagaagcatggtgctggcatctgcttggcttctaaggaggcctaggaagtttacaatcatgagcaggcacatcatgtggccaaagca

SEQ ID NO: 41650 - DNA, 586 bp, Homo sapiens
ggtcgactggaaaaacagtttttgctctcacatcatgacaatcaacacaaaagacttctgtgaccaaatgtgtggagttttcttccaccaacaagcaagcaatcaattctgcagcggacaccagctgggtatcatctaattcaattctgacactgtctacttggagatagggtcagatcccttaggtttagggcttagtcctgcaagagggacccccatttctgatgccaatccaagccctaagttgttttacctgtgcttctgactgaccagctacacatgaggaatcctattaatacacaccttggggtgtattaatttgctagaggagctaacaaaactgagggagacatgttttccagtttattataaagatattacagagaccctgggcaacatggagaaaccctgtctctactaaaaatacaaaaaattagccgagcgtcatggcttgcaagtgtagtcccagctacttgggaggctgagacaggatctcactcctgttgcccaggctggaggacaatggtacaattatggctcactgcagcctagacttctcaggttcaggtgattctcccgtcgacgc

SEQ ID NO: 41651 - DNA, 455 bp, Homo sapiens
ctaattcaattctgacactgtctacttggagatagggtcagatcccttaggtttagggcttagtcctgcaagagggacccccatttctgatgccaatccaagccctaagttgttttacctgtgcttctgactgaccagctacacatgaggaatcctattaatacacaccttggggtgtattaatttgctagaggagctaacaaaactgagggagacatgttttccagtttattataaagatattacagagaccctgggcaacatggagaaaccctgtctctactaaaaatacaaaaaattagccgagcgtcatggcttgcaagtgtagtcccagctacttgggaggctgaggtgggagaatcacctgaacctgagaagtctaggctgcagtgagccataattgtaccattgtcctccagcctgggcaacaggagtgagatcctgtctccaaaaaa

SEQ ID NO: 41652 - DNA, 376 bp, Homo sapiens
cttctccctccactttcagccccttccttcaatcttgctgttgaagaagaggaagaaaaaaagatgatctgtagtgtacagggagatagctttgatctccactgctttgctttttcctctctcttttttaaccatccaaaaggctatttctaacaccgaaaggtgtcatgttgcttgcttcatgggagagctcagcctcatttcccttcagccaaaacaggctgctacaaatcctcttacttctgtgattttacttggcttccaaatgtcttatgacagtgttattccacacataaaataatattttgaacagcatgactgtgcatatctttctgactttattcaaagagagaagtacctctgtggcgttcacagc

SEQ ID NO: 41653 - DNA, 311 bp, Homo sapiens
ctcaaggaagattttaaaaataaaagttatgttcctggatgtttgaatgcacaagtcaacagataggagaagaggaatctcaaagccccatgactgagaatagtggtacccttgacggaaatagataaaaataataaatgggctgggcggctgacctccattgtttgggacattttgagtttgagacaagggaaggggccctaagcagaaatgccttgcaaatgggtggagatccaggacgggaactgagttcactacgggagctgtagacttccaaggcttcaacatgcagtaggtgaagtatgaaggct

SEQ ID NO: 41654 - DNA, 290 bp, Homo sapiens
aatgttacaattcagataacctaacactggggcatctataagactcttaaatttcttccagtgttagccaggggtggtggctcacccctgtaatcccagcacccgaggtcaggagtttgagaccagcctggccaacatggtgaaaccccatctgtactaaaaatacaaaaattagccaggtgtggtggcatgcacttgtaatcccaactacctgggaggctgaagcaggagaatcacttgaatccaggaggtggaggctgcagtgagctgagatcacatcactgccctcc

SEQ ID NO: 41655 - DNA, 290 bp, Homo sapiens
gcccagtaggaggaccggctgtatgtgctgtgtggccgggccagcattggactcacccgtgttgttgccatgactatttacatgtcagccactgatgtcagggtacgcaatggtggcgacatggttgctgttctttccggtcaagaagctgtgcagtgttacctctgtagagaaaatgtccagcagactttgctcaattaagcatgtacgtgtagaaatacaacagtcaaatgagcaggaataaaaatagattacttttgaaggagttaactaattccatcgggaaaact

SEQ ID NO: 41656 - DNA, 537 bp, Homo sapiens
cccaatccacaggagtaggtctttagtagtgacatttcttctttgtgcctgttttctggccatggccaactggatctggttcagatattggatccaagctgggccagtcagattctcaatcccaggaatttagaattagaatggacaacgagttattctcagtagaagactggaactgcaaaatataaacctcgcaaacaagagaagcagagaaatctggctttcagaaagaagttattgaagtaaatgttcaaagagaaacagagacaatggtcctaatggcatttatcttgtggtctagttcctacctgaagcccagcgttgagtttcatgagataccttatagtcttaaactgcattcccttttctcacttttaactagttcaaattggttatatgtaacaaaagagccaaagagtcctattaataattcgttctctcttggcttacattttaactatttattttaacaacattttttggatccttgccatgaacactggtgtgaggatatgaagaggaatttttcagactaag

SEQ ID NO: 41657 - DNA, 578 bp, Homo sapiens
caactggctatttcctgcacatagccagaaagaggattcacttactgataggagtaaaaactctgaagaagctgaatcttaagatataaattgtaccatctagtgactttttaaagcacctttacttaagtggctcatgcattttctcccagcagatcagtgcacttcaggtggctagtccgagtggtgtttacagctaattgatcacaaccagttacagatttctttgttccttccccactcccactgcttcaaattgactactgttaaaaaacaatacaaaacaatacactggaggtgttttcagtgagttttccccttccttttttttcaccttaagtgtcataattctattttgagtatgtttttacttttgccatttctgtaaagagtgcttacctttttgtgaacctggagatttgtgtaaactctgatcttgataccggtgattgatgacagagattgtaaataatcatagagatcagatcttaacctagccttgtccaacccacagcccgcgggctgcatgtggctcaggacaactttgaatgtggcctaacataaattcataaactttc

SEQ ID NO: 41658 - DNA, 493 bp, Homo sapiens
tgtgcacatgtggggcctctctccccaggggctgctgtgagcctgggaagtcccaggtggtgtctcatgccccagagagtagccccctgtgcacctcgcacacgccctcctgcgggtctgctgactttctcctctgcctcagccaagtctcccacgcggagcaggtgggaacttgaatgaaggcctcacaggattctgagtccccggtctgacacccacctggctcagcacctgcctcctcagcttccagttgcacgggtggccgcaggtcagggtgtgacggcgagcgtggccagtccggtcagaggtctctgcatcctccacacctctggccaggtgagacccagcctgtgtctctcccagctctactgacggacggcaggaagctgagaccccgagcccgtgtgtcctcggttcttggtgctttgcaatgcccctggccctggctgcagccgccccctggctgggccccgagcctgtctgccctgcaaca

SEQ ID NO: 41659 - DNA, 368 bp, Homo sapiens
ctggaccaaacacatcttcccacttgttttaagagacattgtttccaagatgaggtcaaggttaccttcagggctgacatcacttggtgtccctcaagacagaccctcggctctcctctggtgccagcctcaggtgccatgggcagttcagtgtaagctcagactctcattgcaatacagcattgccccaagcatacgctatgtgtctctctgcttcctggctcagggccttcctgagaggtgggagccagcttgactcactcaaaagtgcagtctgcccagcactttgggaggccgaggcgggtggattgcctgagctcaggagttcgcgaccagcctgggcaacacggtgaaaacctgtctctact

SEQ ID NO: 41660 - DNA, 1434 bp, Homo sapiens
aattgaactattcatatcaagtatttccaaataacaatgacattccaatttatagaatgtcatgtgttgtgagggtagtcaccctgcaactggcttggacatctctaagcaaatagaagtttctgtaagatagagatttggggcatctacttggaactacctatgaggagctggcattcctcaaatcccaactgactgcacttttccatgaaattacccagcagttatgatggtcagtggctcactcagcagcaagccacttaggtagctggcgagggacgtggcacagccttgtcttcacacagcacatcacagccaggcagcaaaggacagatctctctcatactcttcattcacagggcctgagaggtggaccatcagactccaccctgttttgcgctgacttgtagggagacctaggtgtggagcttcctggccaggagggcagtggctgcccagaaggcaggagatggctatctctttttttttcctgagacggagtcgtggtctgtcgcccaggctggagtgctgtggcgtgatctcagctcactgcaagctccgcctcctgggttcaagccattctcctgcctcagcctcccgagtagctgggactacaggtgcccacctccatgcccggctaatttttgtatttttagcagaaacagggtttcacacatgttagccaggatggtctcgatctcctgaccttgcgatctgcccgcctttggccttccaaagtgctgggattataggcgtgacccccacccccggtccaagatggctatctcttaacacacttgtaacccatttgtgcacacaggtgtgccgtgactcactggtggatccaaaaaaagctgaagcctacatttcccagagcccctttcagcttgaattccaaatgtgacttagcttcctctatgcagatgtacctacttgaaactgggaaggccaaatgagatagaggtaatgtttctgccaacaaacagccacagagcattttatttttctagaagagcaataacagagaccccagggtgtggtgtggcaggacgaggagcatccattttgctggtggggattgtggctaaaataatgtggctctggagccagcaatgggcagcatcttcatgactttccagcttccaggctgtaagcagagatagcatctcttctggacagccagttatgtgatagtgttctgagagtcattcctggaagtcagactaaaggctgctccttcagcctttccattcatcttgtaagcaggaggcttctgtgcatggccagaaactaacaaaagcacattgtgtctaaactaggttgcagtggtttctgttatcagcaagtaaatcctgattgataaagatactacaatatatgcacatatatatgttatagaatcaataaaaattggatactttgctttaaaaattt

SEQ ID NO: 41661 - DNA, 2579 bp, Homo sapiens
gcatcgcccttataagctctgtggtatccccgagccccactcctgtatgcagggaaattagtcattctccttggtaaactttcttcaagtaagtccttcagctacagccgcgaacatatgctttttgacctttgagggaatccgtaagatctcgtgagaagcgcagcttctcggggaagctgtcatggctgctcctgtacgtagtcacggtcttgtgctctaaggtgagtggaggacgagcttgggcttagcggcagcccgtatcacatcctagactttttacttcgaggagaagagtctcacgagttgtcctggaagaaaacgacagcacgtgttctttttcactagtagaagtgacgttggtttcatgttgacaactttgaagccatttggaagtgtttcagtggagagcaaaatgaataacaaagcgggctcctttttctggaaccttagacaattcagtacattagtttcaacaagcagaactatgaggctatgttgtttgggactttgcaaaccaaaaatagttcattcaaactggaacattttaaataactttcataacagaatgcaatcaactgatatcattagatatctctttcaggatgcattcatttttaaatcagatgttggctttcaaacaaagggcataagcactctaacagcccttagaattgaaagactactttatgctaaaagactgttttttgactcaaagcagtctcttgtccctgttgataaatctgatgatgaattgaagaaagtaaaccttaatcatgaagtctccaatgaagatgttcttaccaaggaaacaaaaccaaaccgtatcagcagtagaaaactgtctgaggaatgtaattccctgagtgatgtgttagatgcattttcaaaagcgcccacatttcctagtagcaactatttcacagcaatgtggacaattgccaaaagactgtctgatgaccagaagcgctttgaaaaacgactgatgtttagccaccctgcatttaatcagctctgtgaacatatgatgagagaagccaagatcatgcagtataagtacctactgttcagtcttcacgccatagtgaagcttggaatccctcagaacactattttggtgcagactttgctgagggtgacccaggaacgtatcaatgagtgtgatgagatatgcctttcagttttgtcaactgttttagaggcaatggaaccatgcaagaatgttcatgttctacgaacgggattcagaatactagttgatcagcaagtttggaaaatagaagatgtcttcacattacaagttgtgatgaagtgtattggaaaagatgcaccgattgctcttaagaggaaactggagatgaaagccttgagggaattagacagattttctgttttgaatagccaacacatgtttgaagtactagctgccatgaatcaccgatctcttatactcctggatgaatgcagtaaggtggtcctagataatatccatgggtgtcctttaagaataatgatcaacatattgcagtcctgcaaagacctccagtaccataatttggatctcttcaagggacttgcagattatgtggctgcaactttcgacatctggaagttcagaaaagttctttttatcctcattttatttgaaaaccttggctttcgacctgttggtttaatggacctgtttatgaagagaatagtagaggatcctgaatccctaaacatgaaaaacattctatctattcttcatacttactcttctctcaatcatgtctacaaatgccagaacaaagaacagttcgtggaagttatggctagtgctctgactggttatcttcacactatttcttctgaaaacttattggatgcagtatattcattttgcttgatgaattactttcccctggctccttttaatcagcttctgcaaaaagacatcatcagtgagctgctgacatcagatgacatgaagaatgcttacaagctgcatactttggatacttgtctaaaacttgatgatactgtctatctgagggacatagccttgtcactcccacagctgccgcgggagctgccatcgtcacatacaaatgcaaaggtggcagaggtgctgagcagccttctgggaggtgaaggacacttctcaaaggatgtgcacttgccacacaattatcatattgattttgaaatcagaatggacactaacaggaatcaagtgctaccactttctgatgtggatacaacttctgctacagatattcaaagagtagctgtgctatgtgtttccagatctgcttattgtttgggttcaagccaccccagaggattccttgctatgaaaatgcggcatttgaatgcaatgggttttcatgtgatcttggtcaataactgggagatggacaaactagagatggaagatgcagtcacatttttgaagactaaaatctattcagtagaagctcttcctgttgctgctgtaaatgtgcaaagcacacaataaagtgaaaatcaaccttttcatattaggagacatgcatttgtaaaaattaataaagatgacaagtcagttgtcaatggaa

SEQ ID NO: 41662 - DNA, 6902 bp, Homo sapiens
gcatcgcccttataagctctgtggtatccccgagccccactcctgtatgcagggaaattagtcattctccttggtaaactttcttcaagtaagtccttcagctacagccgcgaacatatgctttttgacctttgagggaatccgtaagatctcgtgagaagcgcagcttctcggggaagctgtcatggctgctcctgtacgtagtcacggtcttgtgctctaaggaaaacgacagcacgtgttctttttcactagtagaagtgacgttggtttcatgttgacaactttgaagccatttggaagtgtttcagtggagagcaaaatgaataacaaagcgggctcctttttctggaaccttagacaattcagtacattagtttcaacaagcagaactatgaggctatgttgtttgggactttgcaaaccaaaaatagttcattcaaactggaacattttaaataactttcataacagaatgcaatcaactgatatcattagatatctctttcaggatgcattcatttttaaatcagatgttggctttcaaacaaagggcataagcactctaacagcccttagaattgaaagactactttatgctaaaagactgttttttgactcaaagcagtctcttgtccctgttgataaatctgatgatgaattgaagaaagtaaaccttaatcatgaagtctccaatgaagatgttcttaccaaggaaacaaaaccaaaccgtatcagcagtagaaaactgtctgaggaatgtaattccctgagtgatgtgttagatgcattttcaaaagcgcccacatttcctagtagcaactatttcacagcaatgtggacaattgccaaaagactgtctgatgaccagaagcgctttgaaaaacgactgatgtttagccaccctgcatttaatcagctctgtgaacatatgatgagagaagccaagatcatgcagtataagtacctactgttcagtcttcacgccatagtgaagcttggaatccctcagaacactattttggtgcagactttgctgagggtgacccaggaacgtatcaatgagtgtgatgagatatgcctttcagttttgtcaactgttttagaggcaatggaaccatgcaagaatgttcatgttctacgaacgggattcagaatactagttgatcagcaagtttggaaaatagaagatgtcttcacattacaagttgtgatgaagtgtattggaaaagatgcaccgattgctcttaagaggaaactggagatgaaagccttgagggaattagacagattttctgttttgaatagccaacacatgtttgaagtactagctgccatgaatcaccgatctcttatactcctggatgaatgcagtaaggtggtcctagataatatccatgggtgtcctttaagaataatgatcaacatattgcagtcctgcaaagacctccagtaccataatttggatctcttcaagggacttgcagattatgtggctgcaactttcgacatctggaagttcagaaaagttctttttatcctcattttatttgaaaaccttggctttcgacctgttggtttaatggacctgtttatgaagagaatagtagaggatcctgaatccctaaacatgaaaaacattctatctattcttcatacttactcttctctcaatcatgtctacaaatgccagaacaaagaacagttcgtggaagttatggctagtgctctgactggttatcttcacactatttcttctgaaaacttattggatgcagtatattcattttgcttgatgaattactttcccctggctccttttaatcagcttctgcaaaaagacatcatcagtgagctgctgacatcagatgacatgaagaatgcttacaagctgcatactttggatacttgtctaaaacttgatgatactgtctatctgagggacatagccttgtcactcccacagctgccgcgggagctgccatcgtcacatacaaatgcaaaggtggcagaggtgctgagcagccttctgggaggtgaaggacacttctcaaaggatgtgcacttgccacacaattatcatattgattttgaaatcagaatggacactaacaggaatcaagtgctaccactttctgatgtggatacaacttctgctacagatattcaaaggttgcttacatatatttcatttgctgggctttctgaattaaaatcctaattctaaaagacttcatattaaatagcagtagtaaatctaagacttgatgtttgtatggagcctgcagcacaccaagagacttgtcatccatcaatgtactccttagaaagtgtaaatgtggacgttatggttgaatacaatggactacagtattggtcatttaatgagacagacatttttttaaaattaggttttgaagctatagttcaataaaacaatattaatataattgaaactatcaatgcagtgtagactttggacaagataatataatagtgatcataaagaataaagactcgaggcttctacaaaaatcaaatacccaataaatattttgctctaccaccaagacttttccagaggtagagaaaccgtagttttttaattaaactgtatttgtatgggttagagcacattgaagctaatcctaagttgtttctttggctcacacattacaaatagagtgtctctggggagaaatatgatgctataccatgagagaacatcctgcctcttcagtagatgcataagatcatgccatcattgcacacacccgtgggtcagttaccctttatgtaaaagctctgctacatggatcctgaccccaaggaacttgtatcttctgttaactccactggacacacacacacacataaatatgatagaaacatacaaaaaaatctgtagggatccaagctcttatctgcccatccctcttcattcacacacagttctgtgactttcacctctttctgaatgcatctagcttatttcttggccatcttttcaaccgctgtctttcctattagtgctacccatctcccctcagaagaggctttctctctgacctcattccaagatcagttttctttttcgggtactccgctattctggcataataaaataacagttgttctcagcataaagtcatgagaagtgaagaatgtgagcattcctttaaaaacataaaatttgtcttataacagccagagtataggtgaaggcagtaaggatataaatgtcttttttttttctttctttctcccagtaaacttagtatttccaaagtgccaggaacaatgaaaaaacaaattacaccttccacattttcgttatatttacagattttattttaacagtcttgcctttctcttggtgttttctttcttgtatttaaactcctatttctgttttttaaatgctgctttctctgggagatgatatgtgtaagaagagcatttactatttggtattatttacaccgttactactactggtagaataaataattatactcagatcagaaatcagcactacacagaaaacccttaaaattggtgctttcatgtctgaaaattttcctcttcaaaaatgtagccatccttaaagggaactgagaggtaactgtgtataatgttgtatatttttgatttataaagtagccttgtatagtggaatatctgcagaggccaagtaaaagaagtgaaggactaagacaggaatatcaaggattgtggtcggtggagagctcaacttggaaatctccagagaacaagaatgcagcaagactaaatagtaatatcaataactgttcttgttttgtttatttttgttttcagagtagctgtgctatgtgtttccagatctgcttattgtttgggttcaagccaccccagaggattccttgctatgaaaatgcggcatttgaatgcaatgggttttcatgtgatcttggtgagaaaaaaatgcaaatgaaatattctttaattactgatgtacattctaacagctgccaggaatcttgtggttgagactggttactaggactagaggaattgtcagcattattggaatgagtgctttagttactgttttctttgaaaaagaacattgctagtacacgatttgggttctgctcagctgattactgtcattactagagcttttacaaatgttgttctggtcagctttaatccttttttgctaagaagaagaatgcaaataatatattttcatatttaagatacacaaaaccatatttaatttccaggttatcttgaacaagggaaggaaagatgttaaagctttgttttcatggcctgtgtgaagctgttacaggatgtttgttgccagaaaaggctggatggttttaagaagatgggtctttctcttccctcttatgcttcaattttattttgtaccccacagcttctcttgaacagcctcttctgatgtttctaggtagtaggaaccttacaaatacatttatatatatgttgctgttggaatctatctaaatgccactcatttggtcctgcgcataatgtaagatgtaaacattccaagtcttctattattatactttagtattggaaatggattacgtgtggactattgagattaagatgactcctttctcttagtgggctactatttaagactttgttttttatattgctgattatatatattctaaggaagattttctcaagaaagcagtttttgcaccatttagaggacctttaaaatttgtataattttcacagttaaagctttcttaaaccctagcatgtagtcttattatgcctttaaaatatgagtagttataaggtcacatttgctttcaaaaagctattgtcctcatgttactttactatgtttggatctctaaactagctcttttgttagtatcgtctcacaaactgattattttcctctttctttggtaaggtcaataactgggagatggacaaactagagatggaagatgcagtcacatttttgaagactaaaatctattcagtagaagctcttcctgttgctgctgtaaatgtgcaaagcacacaataaagtgaaaatcaaccttttcatattaggagacatgcatttgtaaaaattaataaagatgacaagtcagttgtcaatggaattgagctatctgctaagacaaaaaatgttacctcagttcactattaaaattaattttaggagtggaagaaatgttgttactgccatttaaaaatatgctgagaaaattccagaagggttatttttccaaccacacctattccctctagtgcccagatatttgatttgtgagctgtacgtttcaccttttcatctttgatctactaaaaactggtttcttagttgtgaggtgtcacaggcaggttgatgtgggtagtagtccttgtctttggaatctgaatatttatactcctgctctaagctgttctaagacttggggttatgcctttaaatcattttcaagcattggccaaataataattggacaaagttctaaagttgtcaagtgtgtaagaattagtgaggtagctgttgaaaatgagtgaggatggtatttgtatttgtaataagcactgcaggtagagatatttcatgggttataataagagaaacacagatgagatgtagatggtaaggagtcttactgttgttggggtccttcctttctctttcttttttcccccttacccctcccacaatttcatgaagtcttttaaattaaatatatagctgaattgtgttgtgaatcagacctgaggactattttttcgattatgtgtgttcattctttgttcaaatatttgtccaaattcaactattttgttcaatatgcctgtctacctagtatttggctcgctggggatatagtgatgaataggcatggtctcttgtggaacttacagcatgggttccatgcaagttggtgttattctgcccccaagcacacagacatgcaattactagacatcttagtatgtgccgggcactgctaagtattcatttgtgtgctgccttttcatgatctgaaccctttgaggtgtagctgctattatgattctctctgtgtcttcacttcctcatctctaaaatcaggataggtatttgcccaaggctacacagaagtaggggagggctggagtttgaatgtgagctaacataggcttataagaaaatacaaaaatgggattataggcgtgacccccacccccggtccaagatggctatctcttaacacacttgtaacccatttgtgcacacaggtgtgccgtgactcactggtggatccaaaaaaagctgaagcctacatttcccagagcccctttcagcttgaattccaaatgtgacttagcttcctctatgcagatgtacctacttgaaactgggaaggccaaatgagatagaggtaatgtttctgccaacaaacagccacagagcattttatttttctagaagagcaataacagagaccccagggtgtggtgtggcaggacgaggagcatccattttgctggtggggattgtggctaaaataatgtggctctggagccagcaatgggcagcatcttcatgactttccagcttccaggctgtaagcagagatagcatctcttctggacagccagttatgtgatagtgttctgagagtcattcctggaagtcagactaaaggctgctccttcagcctttccattcatcttgtaagcaggaggcttctgtgcatggccagaaactaacaaaagcacattgtgtctaaactaggttgcagtggtttctgttatcagcaagtaaatcctgattgataaagatactacaatatatgcacatatatatgttatagaatcaataaaaattggatactttgctttaaaaattt

SEQ ID NO: 41663 - DNA, 6254 bp, Homo sapiens
gcatcgcccttataagctctgtggtatccccgagccccactcctgtatgcagggaaattagtcattctccttggtaaactttcttcaagtaagtccttcagctacagccgcgaacatatgctttttgacctttgagggaatccgtaagatctcgtgagaagcgcagcttctcggggaagctgtcatggctgctcctgtacgtagtcacggtcttgtgctctaaggaaaacgacagcacgtgttctttttcactagtagaagtgacgttggtttcatgttgacaactttgaagccatttggaagtgtttcagtggagagcaaaatgaataacaaagcgggctcctttttctggaaccttagacaattcagtacattagtttcaacaagcagaactatgaggctatgttgtttgggactttgcaaaccaaaaatagttcattcaaactggaacattttaaataactttcataacagaatgcaatcaactgatatcattagatatctctttcaggatgcattcatttttaaatcagatgttggctttcaaacaaagggcataagcactctaacagcccttagaattgaaagactactttatgctaaaagactgttttttgactcaaagcagtctcttgtccctgttgataaatctgatgatgaattgaagaaagtaaaccttaatcatgaagtctccaatgaagatgttcttaccaaggaaacaaaaccaaaccgtatcagcagtagaaaactgtctgaggaatgtaattccctgagtgatgtgttagatgcattttcaaaagcgcccacatttcctagtagcaactatttcacagcaatgtggacaattgccaaaagactgtctgatgaccagaagcgctttgaaaaacgactgatgtttagccaccctgcatttaatcagctctgtgaacatatgatgagagaagccaagatcatgcagtataagtacctactgttcagtcttcacgccatagtgaagcttggaatccctcagaacactattttggtgcagactttgctgagggtgacccaggaacgtatcaatgagtgtgatgagatatgcctttcagttttgtcaactgttttagaggcaatggaaccatgcaagaatgttcatgttctacgaacgggattcagaatactagttgatcagcaagtttggaaaatagaagatgtcttcacattacaagttgtgatgaagtgtattggaaaagatgcaccgattgctcttaagaggaaactggagatgaaagccttgagggaattagacagattttctgttttgaatagccaacacatgtttgaagtactagctgccatgaatcaccgatctcttatactcctggatgaatgcagtaaggtggtcctagataatatccatgggtgtcctttaagaataatgatcaacatattgcagtcctgcaaagacctccagtaccataatttggatctcttcaagggacttgcagattatgtggctgcaactttcgacatctggaagttcagaaaagttctttttatcctcattttatttgaaaaccttggctttcgacctgttggtttaatggacctgtttatgaagagaatagtagaggatcctgaatccctaaacatgaaaaacattctatctattcttcatacttactcttctctcaatcatgtctacaaatgccagaacaaagaacagttcgtggaagttatggctagtgctctgactggttatcttcacactatttcttctgaaaacttattggatgcagtatattcattttgcttgatgaattactttcccctggctccttttaatcagcttctgcaaaaagacatcatcagtgagctgctgacatcagatgacatgaagaatgcttacaagctgcatactttggatacttgtctaaaacttgatgatactgtctatctgagggacatagccttgtcactcccacagctgccgcgggagctgccatcgtcacatacaaatgcaaaggtggcagaggtgctgagcagccttctgggaggtgaaggacacttctcaaaggatgtgcacttgccacacaattatcatattgattttgaaatcagaatggacactaacaggaatcaagtgctaccactttctgatgtggatacaacttctgctacagatattcaaaggttgcttacatatatttcatttgctgggctttctgaattaaaatcctaattctaaaagacttcatattaaatagcagtagtaaatctaagacttgatgtttgtatggagcctgcagcacaccaagagacttgtcatccatcaatgtactccttagaaagtgtaaatgtggacgttatggttgaatacaatggactacagtattggtcatttaatgagacagacatttttttaaaattaggttttgaagctatagttcaataaaacaatattaatataattgaaactatcaatgcagtgtagactttggacaagataatataatagtgatcataaagaataaagactcgaggcttctacaaaaatcaaatacccaataaatattttgctctaccaccaagacttttccagaggtagagaaaccgtagttttttaattaaactgtatttgtatgggttagagcacattgaagctaatcctaagttgtttctttggctcacacattacaaatagagtgtctctggggagaaatatgatgctataccatgagagaacatcctgcctcttcagtagatgcataagatcatgccatcattgcacacacccgtgggtcagttaccctttatgtaaaagctctgctacatggatcctgaccccaaggaacttgtatcttctgttaactccactggacacacacacacacataaatatgatagaaacatacaaaaaaatctgtagggatccaagctcttatctgcccatccctcttcattcacacacagttctgtgactttcacctctttctgaatgcatctagcttatttcttggccatcttttcaaccgctgtctttcctattagtgctacccatctcccctcagaagaggctttctctctgacctcattccaagatcagttttctttttcgggtactccgctattctggcataataaaataacagttgttctcagcataaagtcatgagaagtgaagaatgtgagcattcctttaaaaacataaaatttgtcttataacagccagagtataggtgaaggcagtaaggatataaatgtcttttttttttctttctttctcccagtaaacttagtatttccaaagtgccaggaacaatgaaaaaacaaattacaccttccacattttcgttatatttacagattttattttaacagtcttgcctttctcttggtgttttctttcttgtatttaaactcctatttctgttttttaaatgctgctttctctgggagatgatatgtgtaagaagagcatttactatttggtattatttacaccgttactactactggtagaataaataattatactcagatcagaaatcagcactacacagaaaacccttaaaattggtgctttcatgtctgaaaattttcctcttcaaaaatgtagccatccttaaagggaactgagaggtaactgtgtataatgttgtatatttttgatttataaagtagccttgtatagtggaatatctgcagaggccaagtaaaagaagtgaaggactaagacaggaatatcaaggattgtggtcggtggagagctcaacttggaaatctccagagaacaagaatgcagcaagactaaatagtaatatcaataactgttcttgttttgtttatttttgttttcagagtagctgtgctatgtgtttccagatctgcttattgtttgggttcaagccaccccagaggattccttgctatgaaaatgcggcatttgaatgcaatgggttttcatgtgatcttggtgagaaaaaaatgcaaatgaaatattctttaattactgatgtacattctaacagctgccaggaatcttgtggttgagactggttactaggactagaggaattgtcagcattattggaatgagtgctttagttactgttttctttgaaaaagaacattgctagtacacgatttgggttctgctcagctgattactgtcattactagagcttttacaaatgttgttctggtcagctttaatccttttttgctaagaagaagaatgcaaataatatattttcatatttaagatacacaaaaccatatttaatttccaggttatcttgaacaagggaaggaaagatgttaaagctttgttttcatggcctgtgtgaagctgttacaggatgtttgttgccagaaaaggctggatggttttaagaagatgggtctttctcttccctcttatgcttcaattttattttgtaccccacagcttctcttgaacagcctcttctgatgtttctaggtagtaggaaccttacaaatacatttatatatatgttgctgttggaatctatctaaatgccactcatttggtcctgcgcataatgtaagatgtaaacattccaagtcttctattattatactttagtattggaaatggattacgtgtggactattgagattaagatgactcctttctcttagtgggctactatttaagactttgttttttatattgctgattatatatattctaaggaagattttctcaagaaagcagtttttgcaccatttagaggacctttaaaatttgtataattttcacagttaaagctttcttaaaccctagcatgtagtcttattatgcctttaaaatatgagtagttataaggtcacatttgctttcaaaaagctattgtcctcatgttactttactatgtttggatctctaaactagctcttttgttagtatcgtctcacaaactgattattttcctctttctttggtaaggtcaataactgggagatggacaaactagagatggaagatgcagtcacatttttgaagactaaaatctattcagtagaagctcttcctgttgctgctgtaaatgtgcaaagcacacaataaagtgaaaatcaaccttttcatattaggagacatgcatttgtaaaaattaataaagatgacaagtcagttgtcaatggaattgagctatctgctaagacaaaaaatgttacctcagttcactattaaaattaattttaggagtggaagaaatgttgttactgccatttaaaaatatgctgagaaaattccagaagggttatttttccaaccacacctattccctctagtgcccagatatttgatttgtgagctgtacgtttcaccttttcatctttgatctactaaaaactggtttcttagttgtgaggtgtcacaggcaggttgatgtgggtagtagtccttgtctttggaatctgaatatttatactcctgctctaagctgttctaagacttggggttatgcctttaaatcattttcaagcattggccaaataataattggacaaagttctaaagttgtcaagtgtgtaagaattagtgaggtagctgttgaaaatgagtgaggatggtatttgtatttgtaataagcactgcaggtagagatatttcatgggttataataagagaaacacagatgagatgtagatggtaaggagtcttactgttgttggggtccttcctttctctttcttttttcccccttacccctcccacaatttcatgaagtcttttaaattaaatatatagctgaattgtgttgtgaatcagacctgaggactattttttcgattatgtgtgttcattctttgttcaaatatttgtccaaattcaactattttgttcaatatgcctgtctacctagtatttggctcgctggggatatagtgatgaataggcatggtctcttgtggaacttacagcatgggttccatgcaagttggtgttattctgcccccaagcacacagacatgcaattactagacatcttagtatgtgccgggcactgctaagtattcatttgtgtgctgccttttcatgatctgaaccctttgaggtgtagctgctattatgattctctctgtgtcttcacttcctcatctctaaaatcaggataggtatttgcccaaggctacacagaagtaggggagggctggagtttgaatgtgagctaacataggcttataagaaaatacaaaaactgggctgggcacggtggctcgtgcttgtcatcccagcacttggg

SEQ ID NO: 41664 - DNA, 4238 bp, Homo sapiens
gcatcgcccttataagctctgtggtatccccgagccccactcctgtatgcagggaaattagtcattctccttggtaaactttcttcaagtaagtccttcagctacagccgcgaacatatgctttttgacctttgagggaatccgtaagatctcgtgagaagcgcagcttctcggggaagctgtcatggctgctcctgtacgtagtcacggtcttgtgctctaaggaaaacgacagcacgtgttctttttcactagtagaagtgacgttggtttcatgttgacaactttgaagccatttggaagtgtttcagtggagagcaaaatgaataacaaagcgggctcctttttctggaaccttagacaattcagtacattagtttcaacaagcagaactatgaggctatgttgtttgggactttgcaaaccaaaaatagttcattcaaactggaacattttaaataactttcataacagaatgcaatcaactgatatcattagatatctctttcaggatgcattcatttttaaatcagatgttggctttcaaacaaagggcataagcactctaacagcccttagaattgaaagactactttatgctaaaagactgttttttgactcaaagcagtctcttgtccctgttgataaatctgatgatgaattgaagaaagtaaaccttaatcatgaagtctccaatgaagatgttcttaccaaggaaacaaaaccaaaccgtatcagcagtagaaaactgtctgaggaatgtaattccctgagtgatgtgttagatgcattttcaaaagcgcccacatttcctagtagcaactatttcacagcaatgtggacaattgccaaaagactgtctgatgaccagaagcgctttgaaaaacgactgatgtttagccaccctgcatttaatcagctctgtgaacatatgatgagagaagccaagatcatgcagtataagtacctactgttcagtcttcacgccatagtgaagcttggaatccctcagaacactattttggtgcagactttgctgagggtgacccaggaacgtatcaatgagtgtgatgagatatgcctttcagttttgtcaactgttttagaggcaatggaaccatgcaagaatgttcatgttctacgaacgggattcagaatactagttgatcagcaagtttggaaaatagaagatgtcttcacattacaagttgtgatgaagtgtattggaaaagatgcaccgattgctcttaagaggaaactggagatgaaagccttgagggaattagacagattttctgttttgaatagccaacacatgtttgaagtactagctgccatgaatcaccgatctcttatactcctggatgaatgcagtaaggtggtcctagataatatccatgggtgtcctttaagaataatgatcaacatattgcagtcctgcaaagacctccagtaccataatttggatctcttcaagggacttgcagattatgtggctgcaactttcgacatctggaagttcagaaaagttctttttatcctcattttatttgaaaaccttggctttcgacctgttggtttaatggacctgtttatgaagagaatagtagaggatcctgaatccctaaacatgaaaaacattctatctattcttcatacttactcttctctcaatcatgtctacaaatgccagaacaaagaacagttcgtggaagttatggctagtgctctgactggttatcttcacactatttcttctgaaaacttattggatgcagtatattcattttgcttgatgaattactttcccctggctccttttaatcagcttctgcaaaaagacatcatcagtgagctgctgacatcagatgacatgaagaatgcttacaagctgcatactttggatacttgtctaaaacttgatgatactgtctatctgagggacatagccttgtcactcccacagctgccgcgggagctgccatcgtcacatacaaatgcaaaggtggcagaggtgctgagcagccttctgggaggtgaaggacacttctcaaaggatgtgcacttgccacacaattatcatattgattttgaaatcagaatggacactaacaggaatcaagtgctaccactttctgatgtggatacaacttctgctacagatattcaaagagtagctgtgctatgtgtttccagatctgcttattgtttgggttcaagccaccccagaggattccttgctatgaaaatgcggcatttgaatgcaatgggttttcatgtgatcttggtcaataactgggagatggacaaactagagatggaagatgcagtcacatttttgaagactaaaatctattcagtagaagctcttcctgttgctgctgtaaatgtgcaaagcacacaataaagtgaaaatcaaccttttcatattaggagacatgcatttgtaaaaattaataaagatgacaagtcagttgtcaatggaattgagctatctgctaagacaaaaaatgttacctcagttcactattaaaattaattttaggagtggaagaaatgttgttactgccatttaaaaatatgctgagaaaattccagaagggttatttttccaaccacacctattccctctagtgcccagatatttgatttgtgagctgtacgtttcaccttttcatctttgatctactaaaaactggtttcttagttgtgaggtgtcacaggcaggttgatgtgggtagtagtccttgtctttggaatctgaatatttatactcctgctctaagctgttctaagacttggggttatgcctttaaatcattttcaagcattggccaaataataattggacaaagttctaaagttgtcaagtgtgtaagaattagtgaggtagctgttgaaaatgagtgaggatggtatttgtatttgtaataagcactgcaggtagagatatttcatgggttataataagagaaacacagatgagatgtagatggtaaggagtcttactgttgttggggtccttcctttctctttcttttttcccccttacccctcccacaatttcatgaagtcttttaaattaaatatatagctgaattgtgttgtgaatcagacctgaggactattttttcgattatgtgtgttcattctttgttcaaatatttgtccaaattcaactattttgttcaatatgcctgtctacctagtatttggctcgctggggatatagtgatgaataggcatggtctcttgtggaacttacagcatgggttccatgcaagttggtgttattctgcccccaagcacacagacatgcaattactagacatcttagtatgtgccgggcactgctaagtattcatttgtgtgctgccttttcatgatctgaaccctttgaggtgtagctgctattatgattctctctgtgtcttcacttcctcatctctaaaatcaggataggtatttgcccaaggctacacagaagtaggggagggctggagtttgaatgtgagctaacataggcttataagaaaatacaaaaatgggattataggcgtgacccccacccccggtccaagatggctatctcttaacacacttgtaacccatttgtgcacacaggtgtgccgtgactcactggtggatccaaaaaaagctgaagcctacatttcccagagcccctttcagcttgaattccaaatgtgacttagcttcctctatgcagatgtacctacttgaaactgggaaggccaaatgagatagaggtaatgtttctgccaacaaacagccacagagcattttatttttctagaagagcaataacagagaccccagggtgtggtgtggcaggacgaggagcatccattttgctggtggggattgtggctaaaataatgtggctctggagccagcaatgggcagcatcttcatgactttccagcttccaggctgtaagcagagatagcatctcttctggacagccagttatgtgatagtgttctgagagtcattcctggaagtcagactaaaggctgctccttcagcctttccattcatcttgtaagcaggaggcttctgtgcatggccagaaactaacaaaagcacattgtgtctaaactaggttgcagtggtttctgttatcagcaagtaaatcctgattgataaagatactacaatatatgcacatatatatgttatagaatcaataaaaattggatactttgctttaaaaattt

SEQ ID NO: 41665 - DNA, 4277 bp, Homo sapiens
gcatcgcccttataagctctgtggtatccccgagccccactcctgtatgcagggaaattagtcattctccttggtaaactttcttcaagtaagtccttcagctacagccgcgaacatatgctttttgacctttgagggaatccgtaagatctcgtgagaagcgcagcttctcggggaagctgtcatggctgctcctgtacgtagtcacggtcttgtgctctaaggtgagtggaggacgagcttgggcttagcggcagcccgtatcacatcctagactttttacttcgaggagaagagtctcacgagttgtcctggaagaaaacgacagcacgtgttctttttcactagtagaagtgacgttggtttcatgttgacaactttgaagccatttggaagtgtttcagtggagagcaaaatgaataacaaagcgggctcctttttctggaaccttagacaattcagtacattagtttcaacaagcagaactatgaggctatgttgtttgggactttgcaaaccaaaaatagttcattcaaactggaacattttaaataactttcataacagaatgcaatcaactgatatcattagatatctctttcaggatgcattcatttttaaatcagatgttggctttcaaacaaagggcataagcactctaacagcccttagaattgaaagactactttatgctaaaagactgttttttgactcaaagcagtctcttgtccctgttgataaatctgatgatgaattgaagaaagtaaaccttaatcatgaagtctccaatgaagatgttcttaccaaggaaacaaaaccaaaccgtatcagcagtagaaaactgtctgaggaatgtaattccctgagtgatgtgttagatgcattttcaaaagcgcccacatttcctagtagcaactatttcacagcaatgtggacaattgccaaaagactgtctgatgaccagaagcgctttgagagagaagccaagatcatgcagtataagtacctactgttcagtcttcacgccatagtgaagcttggaatccctcagaacactattttggtgcagactttgctgagggtgacccaggaacgtatcaatgagtgtgatgagatatgcctttcagttttgtcaactgttttagaggcaatggaaccatgcaagaatgttcatgttctacgaacgggattcagaatactagttgatcagcaagtttggaaaatagaagatgtcttcacattacaagttgtgatgaagtgtattggaaaagatgcaccgattgctcttaagaggaaactggagatgaaagccttgagggaattagacagattttctgttttgaatagccaacacatgtttgaagtactagctgccatgaatcaccgatctcttatactcctggatgaatgcagtaaggtggtcctagataatatccatgggtgtcctttaagaataatgatcaacatattgcagtcctgcaaagacctccagtaccataatttggatctcttcaagggacttgcagattatgtggctgcaactttcgacatctggaagttcagaaaagttctttttatcctcattttatttgaaaaccttggctttcgacctgttggtttaatggacctgtttatgaagagaatagtagaggatcctgaatccctaaacatgaaaaacattctatctattcttcatacttactcttctctcaatcatgtctacaaatgccagaacaaagaacagttcgtggaagttatggctagtgctctgactggttatcttcacactatttcttctgaaaacttattggatgcagtatattcattttgcttgatgaattactttcccctggctccttttaatcagcttctgcaaaaagacatcatcagtgagctgctgacatcagatgacatgaagaatgcttacaagctgcatactttggatacttgtctaaaacttgatgatactgtctatctgagggacatagccttgtcactcccacagctgccgcgggagctgccatcgtcacatacaaatgcaaaggtggcagaggtgctgagcagccttctgggaggtgaaggacacttctcaaaggatgtgcacttgccacacaattatcatattgattttgaaatcagaatggacactaacaggaatcaagtgctaccactttctgatgtggatacaacttctgctacagatattcaaagagtagctgtgctatgtgtttccagatctgcttattgtttgggttcaagccaccccagaggattccttgctatgaaaatgcggcatttgaatgcaatgggttttcatgtgatcttggtcaataactgggagatggacaaactagagatggaagatgcagtcacatttttgaagactaaaatctattcagtagaagctcttcctgttgctgctgtaaatgtgcaaagcacacaataaagtgaaaatcaaccttttcatattaggagacatgcatttgtaaaaattaataaagatgacaagtcagttgtcaatggaattgagctatctgctaagacaaaaaatgttacctcagttcactattaaaattaattttaggagtggaagaaatgttgttactgccatttaaaaatatgctgagaaaattccagaagggttatttttccaaccacacctattccctctagtgcccagatatttgatttgtgagctgtacgtttcaccttttcatctttgatctactaaaaactggtttcttagttgtgaggtgtcacaggcaggttgatgtgggtagtagtccttgtctttggaatctgaatatttatactcctgctctaagctgttctaagacttggggttatgcctttaaatcattttcaagcattggccaaataataattggacaaagttctaaagttgtcaagtgtgtaagaattagtgaggtagctgttgaaaatgagtgaggatggtatttgtatttgtaataagcactgcaggtagagatatttcatgggttataataagagaaacacagatgagatgtagatggtaaggagtcttactgttgttggggtccttcctttctctttcttttttcccccttacccctcccacaatttcatgaagtcttttaaattaaatatatagctgaattgtgttgtgaatcagacctgaggactattttttcgattatgtgtgttcattctttgttcaaatatttgtccaaattcaactattttgttcaatatgcctgtctacctagtatttggctcgctggggatatagtgatgaataggcatggtctcttgtggaacttacagcatgggttccatgcaagttggtgttattctgcccccaagcacacagacatgcaattactagacatcttagtatgtgccgggcactgctaagtattcatttgtgtgctgccttttcatgatctgaaccctttgaggtgtagctgctattatgattctctctgtgtcttcacttcctcatctctaaaatcaggataggtatttgcccaaggctacacagaagtaggggagggctggagtttgaatgtgagctaacataggcttataagaaaatacaaaaatgggattataggcgtgacccccacccccggtccaagatggctatctcttaacacacttgtaacccatttgtgcacacaggtgtgccgtgactcactggtggatccaaaaaaagctgaagcctacatttcccagagcccctttcagcttgaattccaaatgtgacttagcttcctctatgcagatgtacctacttgaaactgggaaggccaaatgagatagaggtaatgtttctgccaacaaacagccacagagcattttatttttctagaagagcaataacagagaccccagggtgtggtgtggcaggacgaggagcatccattttgctggtggggattgtggctaaaataatgtggctctggagccagcaatgggcagcatcttcatgactttccagcttccaggctgtaagcagagatagcatctcttctggacagccagttatgtgatagtgttctgagagtcattcctggaagtcagactaaaggctgctccttcagcctttccattcatcttgtaagcaggaggcttctgtgcatggccagaaactaacaaaagcacattgtgtctaaactaggttgcagtggtttctgttatcagcaagtaaatcctgattgataaagatactacaatatatgcacatatatatgttatagaatcaataaaaattggatactttgctttaaaaattt

SEQ ID NO: 41666 - DNA, 4243 bp, Homo sapiens
gcatcgcccttataagctctgtggtatccccgagccccactcctgtatgcagggaaattagtcattctccttggtaaactttcttcaagtaagtccttcagctacagccgcgaacatatgctttttgacctttgagggaatccgtaagatctcgtgagaagcgcagcttctcggggaagctgtcatggctgctcctgtacgtagtcacggtcttgtgctctaaggtgagtggaggacgagcttgggcttagcggcagcccgtatcacatcctagactttttacttcgaggagaagagtctcacgagttgtcctggaagaaaacgacagcacgtgttctttttcactagtagaagtgacgttggtttcatgttgacaactttgaagccatttggaagtgtttcagtggagagcaaaatgaataacaaagcgggctcctttttctggaaccttagacaattcagtacattagtttcaacaagcagaactatgaggctatgttgtttgggactttgcaaaccaaaaatagttcattcaaactggaacattttaaataactttcataacagaatgcaatcaactgatatcattagatatctctttcaggatgcattcatttttaaatcagatgttggctttcaaacaaagggcataagcactctaacagcccttagaattgaaagactactttatgctaaaagactgttttttgactcaaagcagtctcttgtccctgttgataaatctgatgatgaattgaagaaagtaaaccttaatcatgaagtctccaatgaagatgttcttaccaaggaaacaaaaccaaaccgtatcagcagtagaaaactgtctgaggaatgtaattccctgagtgatgtgttagatgcattttcaaaagcgcccacatttcctagtagcaactatttcacagcaatgtggacaattgccaaaagactgtctgatgaccagaagcgctttgaaaaacgactgatgtttagccaccctgcatttaatcagctctgtgaacatatgatgagagaagccaagatcatgcagtataagtacctactgttcagtcttcacgccatagtgaagcttggaatccctcagaacactattttggtgcagactttgctgagggtgacccaggaacgtatcaatgagtgtgatgagatatgcctttcagttttgtcaactgttttagaggcaatggaaccatgcaagaatgttcatgttctacgaacgggattcagaatactagttgatcagcaagtttggaaaatagaagatgtcttcacattacaagttgtgatgaagtgtattggaaaagatgcaccgattgctcttaagaggaaactggagatgaaagccttgagggaattagacagattttctgttttgaatagccaacacatgtttgaagtactagctgccatgaatcaccgatctcttatactcctggatgaatgcagtaaggtggtcctagataatatccatgggtgtcctttaagaataatgatcaacatattgcagtcctgcaaagacctccagtaccataatttggatctcttcaagggacttgcagattatgtggctgcaactttcgacatctggaagttcagaaaagttctttttatcctcattttatttgaaaaccttggctttcgacctgttggtttaatggacctgtttatgaagagaatagtagaggatcctgaatccctaaacatgaaaaacattctatctattcttcatacttactcttctctcaatcatgtctacaaatgccagaacaaagaacagttcgtggaagttatggctagtgctctgactggttatcttcacactatttcttctgaaaacttattggatgcagtatattcattttgcttgatgaattactttcccctggctccttttaatcagcttctgcaaaaagacatcatcagtgagctgctgacatcagatgacatgaagaatgcttacaactgccatcgtcacatacaaatgcaaaggtggcagaggtgctgagcagccttctgggaggtgaaggacacttctcaaaggatgtgcacttgccacacaattatcatattgattttgaaatcagaatggacactaacaggaatcaagtgctaccactttctgatgtggatacaacttctgctacagatattcaaagagtagctgtgctatgtgtttccagatctgcttattgtttgggttcaagccaccccagaggattccttgctatgaaaatgcggcatttgaatgcaatgggttttcatgtgatcttggtcaataactgggagatggacaaactagagatggaagatgcagtcacatttttgaagactaaaatctattcagtagaagctcttcctgttgctgctgtaaatgtgcaaagcacacaataaagtgaaaatcaaccttttcatattaggagacatgcatttgtaaaaattaataaagatgacaagtcagttgtcaatggaattgagctatctgctaagacaaaaaatgttacctcagttcactattaaaattaattttaggagtggaagaaatgttgttactgccatttaaaaatatgctgagaaaattccagaagggttatttttccaaccacacctattccctctagtgcccagatatttgatttgtgagctgtacgtttcaccttttcatctttgatctactaaaaactggtttcttagttgtgaggtgtcacaggcaggttgatgtgggtagtagtccttgtctttggaatctgaatatttatactcctgctctaagctgttctaagacttggggttatgcctttaaatcattttcaagcattggccaaataataattggacaaagttctaaagttgtcaagtgtgtaagaattagtgaggtagctgttgaaaatgagtgaggatggtatttgtatttgtaataagcactgcaggtagagatatttcatgggttataataagagaaacacagatgagatgtagatggtaaggagtcttactgttgttggggtccttcctttctctttcttttttcccccttacccctcccacaatttcatgaagtcttttaaattaaatatatagctgaattgtgttgtgaatcagacctgaggactattttttcgattatgtgtgttcattctttgttcaaatatttgtccaaattcaactattttgttcaatatgcctgtctacctagtatttggctcgctggggatatagtgatgaataggcatggtctcttgtggaacttacagcatgggttccatgcaagttggtgttattctgcccccaagcacacagacatgcaattactagacatcttagtatgtgccgggcactgctaagtattcatttgtgtgctgccttttcatgatctgaaccctttgaggtgtagctgctattatgattctctctgtgtcttcacttcctcatctctaaaatcaggataggtatttgcccaaggctacacagaagtaggggagggctggagtttgaatgtgagctaacataggcttataagaaaatacaaaaatgggattataggcgtgacccccacccccggtccaagatggctatctcttaacacacttgtaacccatttgtgcacacaggtgtgccgtgactcactggtggatccaaaaaaagctgaagcctacatttcccagagcccctttcagcttgaattccaaatgtgacttagcttcctctatgcagatgtacctacttgaaactgggaaggccaaatgagatagaggtaatgtttctgccaacaaacagccacagagcattttatttttctagaagagcaataacagagaccccagggtgtggtgtggcaggacgaggagcatccattttgctggtggggattgtggctaaaataatgtggctctggagccagcaatgggcagcatcttcatgactttccagcttccaggctgtaagcagagatagcatctcttctggacagccagttatgtgatagtgttctgagagtcattcctggaagtcagactaaaggctgctccttcagcctttccattcatcttgtaagcaggaggcttctgtgcatggccagaaactaacaaaagcacattgtgtctaaactaggttgcagtggtttctgttatcagcaagtaaatcctgattgataaagatactacaatatatgcacatatatatgttatagaatcaataaaaattggatactttgctttaaaaattt

SEQ ID NO: 41667 - DNA, 2601 bp, Homo sapiens
aactacgacgcggccagcggcctgaccgatacagcggtgagcgacaccccccccccccctatccacagttcgtggaagttatggctagtgctctgactggttatcttcacactatttcttctgaaaacttattggatgcagtatattcattttgcttgatgaattactttcccctggctccttttaatcagcttctgcaaaaagacatcatcagtgagctgctgacatcagatgacatgaagaatgcttacaagctgcatactttggatacttgtctaaaacttgatgatactgtctatctgagggacatagccttgtcactcccacagctgccgcgggagctgccatcgtcacatacaaatgcaaaggtggcagaggtgctgagcagccttctgggaggtgaaggacacttctcaaaggatgtgcacttgccacacaattatcatattgattttgaaatcagaatggacactaacaggaatcaagtgctaccactttctgatgtggatacaacttctgctacagatattcaaagagtagctgtgctatgtgtttccagatctgcttattgtttgggttcaagccaccccagaggattccttgctatgaaaatgcggcatttgaatgcaatgggttttcatgtgatcttggtcaataactgggagatggacaaactagagatggaagatgcagtcacatttttgaagactaaaatctattcagtagaagctcttcctgttgctgctgtaaatgtgcaaagcacacaataaagtgaaaatcaaccttttcatattaggagacatgcatttgtaaaaattaataaagatgacaagtcagttgtcaatggaattgagctatctgctaagacaaaaaatgttacctcagttcactattaaaattaattttaggagtggaagaaatgttgttactgccatttaaaaatatgctgagaaaattccagaagggttatttttccaaccacacctattccctctagtgcccagatatttgatttgtgagctgtacgtttcaccttttcatctttgatctactaaaaactggtttcttagttgtgaggtgtcacaggcaggttgatgtgggtagtagtccttgtctttggaatctgaatatttatactcctgctctaagctgttctaagacttggggttatgcctttaaatcattttcaagcattggccaaataataattggacaaagttctaaagttgtcaagtgtgtaagaattagtgaggtagctgttgaaaatgagtgaggatggtatttgtatttgtaataagcactgcaggtagagatatttcatgggttataataagagaaacacagatgagatgtagatggtaaggagtcttactgttgttggggtccttcctttctctttcttttttcccccttacccctcccacaatttcatgaagtcttttaaattaaatatatagctgaattgtgttgtgaatcagacctgaggactattttttcgattatgtgtgttcattctttgttcaaatatttgtccaaattcaactattttgttcaatatgcctgtctacctagtatttggctcgctggggatatagtgatgaataggcatggtctcttgtggaacttacagcatgggttccatgcaagttggtgttattctgcccccaagcacacagacatgcaattactagacatcttagtatgtgccgggcactgctaagtattcatttgtgtgctgccttttcatgatctgaaccctttgaggtgtagctgctattatgattctctctgtgtcttcacttcctcatctctaaaatcaggataggtatttgcccaaggctacacagaagtaggggagggctggagtttgaatgtgagctaacataggcttataagaaaatacaaaaatgggattataggcgtgacccccacccccggtccaagatggctatctcttaacacacttgtaacccatttgtgcacacaggtgtgccgtgactcactggtggatccaaaaaaagctgaagcctacatttcccagagcccctttcagcttgaattccaaatgtgacttagcttcctctatgcagatgtacctacttgaaactgggaaggccaaatgagatagaggtaatgtttctgccaacaaacagccacagagcattttatttttctagaagagcaataacagagaccccagggtgtggtgtggcaggacgaggagcatccattttgctggtggggattgtggctaaaataatgtggctctggagccagcaatgggcagcatcttcatgactttccagcttccaggctgtaagcagagatagcatctcttctggacagccagttatgtgatagtgttctgagagtcattcctggaagtcagactaaaggctgctccttcagcctttccattcatcttgtaagcaggaggcttctgtgcatggccagaaactaacaaaagcacattgtgtctaaactaggttgcagtggtttctgttatcagcaagtaaatcctgattgataaagatactacaatatatgcacatatatatgttatagaatcaataaaaattggatactttgctttaaaaattt

SEQ ID NO: 41668 - DNA, 2435 bp, Homo sapiens
  misc_feature (31)..(31): n is a, c, g, or t
aacctttaaggctaggtacgaggccgggtgntgaaaaagaatcatcagtgagctgctgacatcagatgacatgaagaatgcttacaagctgcatactttggatacttgtctaaaacttgatgatactgtctatctgagggacatagccttgtcactcccacagctgccgcgggagctgccatcgtcacatacaaatgcaaaggtggcagaggtgctgagcagccttctgggaggtgaaggacacttctcaaaggatgtgcacttgccacacaattatcatattgattttgaaatcagaatggacactaacaggaatcaagtgctaccactttctgatgtggatacaacttctgctacagatattcaaagagtagctgtgctatgtgtttccagatctgcttattgtttgggttcaagccaccccagaggattccttgctatgaaaatgcggcatttgaatgcaatgggttttcatgtgatcttggtcaataactgggagatggacaaactagagatggaagatgcagtcacatttttgaagactaaaatctattcagtagaagctcttcctgttgctgctgtaaatgtgcaaagcacacaataaagtgaaaatcaaccttttcatattaggagacatgcatttgtaaaaattaataaagatgacaagtcagttgtcaatggaattgagctatctgctaagacaaaaaatgttacctcagttcactattaaaattaattttaggagtggaagaaatgttgttactgccatttaaaaatatgctgagaaaattccagaagggttatttttccaaccacacctattccctctagtgcccagatatttgatttgtgagctgtacgtttcaccttttcatctttgatctactaaaaactggtttcttagttgtgaggtgtcacaggcaggttgatgtgggtagtagtccttgtctttggaatctgaatatttatactcctgctctaagctgttctaagacttggggttatgcctttaaatcattttcaagcattggccaaataataattggacaaagttctaaagttgtcaagtgtgtaagaattagtgaggtagctgttgaaaatgagtgaggatggtatttgtatttgtaataagcactgcaggtagagatatttcatgggttataataagagaaacacagatgagatgtagatggtaaggagtcttactgttgttggggtccttcctttctctttcttttttcccccttacccctcccacaatttcatgaagtcttttaaattaaatatatagctgaattgtgttgtgaatcagacctgaggactattttttcgattatgtgtgttcattctttgttcaaatatttgtccaaattcaactattttgttcaatatgcctgtctacctagtatttggctcgctggggatatagtgatgaataggcatggtctcttgtggaacttacagcatgggttccatgcaagttggtgttattctgcccccaagcacacagacatgcaattactagacatcttagtatgtgccgggcactgctaagtattcatttgtgtgctgccttttcatgatctgaaccctttgaggtgtagctgctattatgattctctctgtgtcttcacttcctcatctctaaaatcaggataggtatttgcccaaggctacacagaagtaggggagggctggagtttgaatgtgagctaacataggcttataagaaaatacaaaaatgggattataggcgtgacccccacccccggtccaagatggctatctcttaacacacttgtaacccatttgtgcacacaggtgtgccgtgactcactggtggatccaaaaaaagctgaagcctacatttcccagagcccctttcagcttgaattccaaatgtgacttagcttcctctatgcagatgtacctacttgaaactgggaaggccaaatgagatagaggtaatgtttctgccaacaaacagccacagagcattttatttttctagaagagcaataacagagaccccagggtgtggtgtggcaggacgaggagcatccattttgctggtggggattgtggctaaaataatgtggctctggagccagcaatgggcagcatcttcatgactttccagcttccaggctgtaagcagagatagcatctcttctggacagccagttatgtgatagtgttctgagagtcattcctggaagtcagactaaaggctgctccttcagcctttccattcatcttgtaagcaggaggcttctgtgcatggccagaaactaacaaaagcacattgtgtctaaactaggttgcagtggtttctgttatcagcaagtaaatcctgattgataaagatactacaatatatgcacatatatatgttatagaatcaataaaaattggatactttgctttaaaaattt

SEQ ID NO: 41669 - DNA, 2517 bp, Homo sapiens
gcatcgcccttataagctctgtggtatccccgagccccactcctgtatgcagggaaattagtcattctccttggtaaactttcttcaagtaagtccttcagctacagccgcgaacatatgctttttgacctttgagggaatccgtaagatctcgtgagaagcgcagcttctcggggaagctgtcatggctgctcctgtacgtagtcacggtcttgtgctctaaggtgagtggaggacgagcttgggcttagcggcagcccgtatcacatcctagactttttacttcgaggagaagagtctcacgagttgtcctggaagaaaacgacagcacgtgttctttttcactagtagaagtgacgttggtttcatgttgacaactttgaagccatttggaagtgtttcagtggagagcaaaatgaataacaaagcgggctcctttttctggaaccttagacaattcagtacattagtttcaacaagcagaactatgaggctatgttgtttgggactttgcaaaccaaaaatagttcattcaaactggaacattttaaataactttcataacagaatgcaatcaactgatatcattagatatctctttcaggatgcattcatttttaaatcagatgttggctttcaaacaaagggcataagcactctaacagcccttagaattgaaagactactttatgctaaaagactgttttttgactcaaagcagtctcttgtccctgttgataaatctgatgatgaattgaagaaagtaaaccttaatcatgaagtctccaatgaagatgttcttaccaaggaaacaaaaccaaaccgtatcagcagtagaaaactgtctgaggaatgtaattccctgagtgatgtgttagatgcattttcaaaagcgcccacatttcctagtagcaactatttcacagcaatgtggacaattgccaaaagactgtctgatgaccagaagcgctttgaaaaacgactgatgtttagccaccctgcatttaatcagctctgtgaacatatgatgagagaagccaagatcatgcagtataagtacctactgttcagtcttcacgccatagtgaagcttggaatccctcagaacactattttggtgcagactttgctgagggtgacccaggaacgtatcaatgagtgtgatgagatatgcctttcagttttgtcaactgttttagaggcaatggaaccatgcaagaatgttcatgttctacgaacgggattcagaatactagttgatcagcaagtttggaaaatagaagatgtcttcacattacaagttgtgatgaagtgtattggaaaagatgcaccgattgctcttaagaggaaactggagatgaaagccttgagggaattagacagattttctgttttgaatagccaacacatgtttgaagtactagctgccatgaatcaccgatctcttatactcctggatgaatgcagtaaggtggtcctagataatatccatgggtgtcctttaagaataatgatcaacatattgcagtcctgcaaagacctccagtaccataatttggatctcttcaagggacttgcagattatgtggctgcaactttcgacatctggaagttcagaaaagttctttttatcctcattttatttgaaaaccttggctttcgacctgttggtttaatggacctgtttatgaagagaatagtagaggatcctgaatccctaaacatgaaaaacattctatctattcttcatacttactcttctctcaatcatgtctacaaatgccagaacaaagaacagttcgtggaagttatggctagtgctctgactggttatcttcacactatttcttctgaaaacttattggatgcagtatattcattttgcttgatgaattactttcccctggctccttttaatcagcttctgcaaaaagacatcatcagtgagctgctgacatcagatgacatgaagaatgcttacaagctgcatactttggatacttgtctaaaacttgatgatactgtctatctgagggacatagccttgtcactcccacagctgccgcgggagctgccatcgtcacatacaaatgcaaaggtggcagaggtgctgagcagccttctgggaggtgaaggacacttctcaaaggatgtgcacttgccacacaattatcatattgattttgaaatcagaatggacactaacaggaatcaagtgctaccactttctgatgtggatacaacttctgctacagatattcaaagagtagctgtgctatgtgtttccagatctgcttattgtttgggttcaagccaccccagaggattccttgctatgaaaatgcggcatttgaatgcaatgggttttcatgtgatcttggtcaataactgggagatggacaaactagagatggaagatgcagtcacatttttgaagactaaaatctattcagtagaagctcttcctgttgctgctgtaaatgtgcaaagcacacaataaagtgaaaatcaaccttt

SEQ ID NO: 41670 - DNA, 3575 bp, Homo sapiens
gcatcgcccttataagctctgtggtatccccgagccccactcctgtatgcagggaaattagtcattctccttggtaaactttcttcaagtaagtccttcagctacagccgcgaacatatgctttttgacctttgagggaatccgtaagatctcgtgagaagcgcagcttctcggggaagctgtcatggctgctcctgtacgtagtcacggtcttgtgctctaaggtgagtggaggacgagcttgggcttagcggcagcccgtatcacatcctagactttttacttcgaggagaagagtctcacgagttgtcctggaagaaaacgacagcacgtgttctttttcactagtagaagtgacgttggtttcatgttgacaactttgaagccatttggaagtgtttcagtggagagcaaaatgaataacaaagcgggctcctttttctggaaccttagacaattcagtacattagtttcaacaagcagaactatgaggctatgttgtttgggactttgcaaaccaaaaatagttcattcaaactggaacattttaaataactttcataacagaatgcaatcaactgatatcattagatatctctttcaggatgcattcatttttaaatcagatgttggctttcaaacaaagggcataagcactctaacagcccttagaattgaaagactactttatgctaaaagactgttttttgactcaaagcagtctcttgtccctgttgataaatctgatgatgaattgaagaaagtaaaccttaatcatgaagtctccaatgaagatgttcttaccaaggaaacaaaaccaaaccgtatcagcagtagaaaactgtctgaggaatgtaattccctgagtgatgtgttagatgcattttcaaaagcgcccacatttcctagtagcaactatttcacagcaatgtggacaattgccaaaagactgtctgatgaccagaagcgctttgaaaaacgactgatgtttagccaccctgcatttaatcagctctgtgaacatatgatgagagaagccaagatcatgcagtataagtacctactgttcagtcttcacgccatagtgaagcttggaatccctcagaacactattttggtgcagactttgctgagggtgacccaggaacgtatcaatgagtgtgatgagatatgcctttcagttttgtcaactgttttagaggcaatggaaccatgcaagaatgttcatgttctacgaacgggattcagaatactagttgatcagcaagtttggaaaatagaagatgtcttcacattacaagttgtgatgaagtgtattggaaaagatgcaccgattgctcttaagaggaaactggagatgaaagccttgagggaattagacagattttctgttttgaatagccaacacatgtttgaagtactagctgccatgaatcaccgatctcttatactcctggatgaatgcagtaaggtggtcctagataatatccatgggtgtcctttaagaataatgatcaacatattgcagtcctgcaaagacctccagtaccataatttggatctcttcaagggacttgcagattatgtggctgcaactttcgacatctggaagttcagaaaagttctttttatcctcattttatttgaaaaccttggctttcgacctgttggtttaatggacctgtttatgaagagaatagtagaggatcctgaatccctaaacatgaaaaacattctatctattcttcatacttactcttctctcaatcatgtctacaaatgccagaacaaagaacagttcgtggaagttatggctagtgctctgactggttatcttcacactatttcttctgaaaacttattggatgcagtatattcattttgcttgatgaattactttcccctggctccttttaatcagcttctgcaaaaagacatcatcagtgagctgctgacatcagatgacatgaagaatgcttacaagctgcatactttggatacttgtctaaaacttgatgatactgtctatctgagggacatagccttgtcactcccacagctgccgcgggagctgccatcgtcacatacaaatgcaaaggtggcagaggtgctgagcagccttctgggaggtgaaggacacttctcaaaggatgtgcacttgccacacaattatcatattgattttgaaatcagaatggacactaacaggaatcaagtgctaccactttctgatgtggatacaacttctgctacagatattcaaagagtagctgtgctatgtgtttccagatctgcttattgtttgggttcaagccaccccagaggattccttgctatgaaaatgcggcatttgaatgcaatgggttttcatgtgatcttggtgagaaaaaaatgcaaatgaaatattctttaattactgatgtacattctaacagctgccaggaatcttgtggttgagactggttactaggactagaggaattgtcagcattattggaatgagtgctttagttactgttttctttgaaaaagaacattgctagtacacgatttgggttctgctcagctgattactgtcattactagagcttttacaaatgttgttctggtcagctttaatccttttttgctaagaagaagaatgcaaataatatattttcatatttaagatacacaaaaccatatttaatttccaggttatcttgaacaagggaaggaaagatgttaaagctttgttttcatggcctgtgtgaagctgttacaggatgtttgttgccagaaaaggctggatggttttaagaagatgggtctttctcttccctcttatgcttcaattttattttgtaccccacagcttctcttgaacagcctcttctgatgtttctaggtagtaggaaccttacaaatacatttatatatatgttgctgttggaatctatctaaatgccactcatttggtcctgcgcataatgtaagatgtaaacattccaagtcttctattattatactttagtattggaaatggattacgtgtggactattgagattaagatgactcctttctcttagtgggctactatttaagactttgttttttatattgctgattatatatattctaaggaagattttctcaagaaagcagtttttgcaccatttagaggacctttaaaatttgtataattttcacagttaaagctttcttaaaccctagcatgtagtcttattatgcctttaaaatatgagtagttataaggtcacatttgctttcaaaaagctattgtcctcatgttactttactatgtttggatctctaaactagctcttttgttagtatcgtctcacaaactgattattttcctctttctttggtaaggtcaataactgggagatggacaaactagagatggaagatgcagtcacatttttgaagactaaaatctattcagtagaagctcttcctgttgctgctgtaaatgtgcaaagcacacaataaagtgaaaatcaaccttttcatattaggagacatgcatttgtaaaaattaataaagatgacaagtcagttgtcaatggaa

SEQ ID NO: 41671 - DNA, 2491 bp, Homo sapiens
gcatcgcccttataagctctgtggtatccccgagccccactcctgtatgcagggaaattagtcattctccttggtaaactttcttcaagtaagtccttcagctacagccgcgaacatatgctttttgacctttgagggaatccgtaagatctcgtgagaagcgcagcttctcggggaagctgtcatggctgctcctgtacgtagtcacggtcttgtgctctaaggtgagtggaggacgagcttgggcttagcggcagcccgtatcacatcctagactttttacttcgaggagaagagtctcacgagttgtcctggaagaaaacgacagcacgtgttctttttcactagtagaagtgacgttggtttcatgttgacaactttgaagccatttggaagtgtttcagtggagagcaaaatgaataacaaagcgggctcctttttctggaaccttagacaattcagtacattagtttcaacaagcagaactatgaggctatgttgtttgggactttgcaaaccaaaaatagttcattcaaactggaacattttaaataactttcataacagaatgcaatcaactgatatcattagatatctctttcaggatgcattcatttttaaatcagatgttggctttcaaacaaagggcataagcactctaacagcccttagaattgaaagactactttatgctaaaagactgttttttgactcaaagcagtctcttgtccctgttgataaatctgatgatgaattgaagaaagtaaaccttaatcatgaagtctccaatgaagatgttcttaccaaggaaacaaaaccaaaccgtatcagcagtagaaaactgtctgaggaatgtaattccctgagtgatgtgttagatgcattttcaaaagcgcccacatttcctagtagcaactatttcacagcaatgtggacaattgccaaaagactgtctgatgaccagaagcgctttgaaaaacgactgatgtttagccaccctgcatttaatcagctctgtgaacatatgatgagagaagccaagatcatgcagtataagtacctactgttcagtcttcacgccatagtgaagcttggaatccctcagaacactattttggtgcagactttgctgagggtgacccaggaacgtatcaatgagtgtgatgagatatgcctttcagttttgtcaactgttttagaggcaatggaaccatgcaagaatgttcatgttctacgaacgggattcagaatactagttgatcagcaagtttggaaaatagaagatgtcttcacattacaagttgtgatgaagtgtattggaaaagatgcaccgattgctcttaagaggaaactggagatgaaagccttgagggaattagacagattttctgttttgaatagccaacacatgtttgaagtactagctgccatgaatcaccgatctcttatactcctggatgaatgcagtaaggtggtcctagataatatccatgggtgtcctttaagaataatgatcaacatattgcagtcctgcaaagacctccagtaccataatttggatctcttcaagggacttgcagattatgtggctgcaactttcgacatctggaagttcagaaaagttctttttatcctcattttatttgaaaaccttggctttcgacctgttggtttaatggacctgtttatgaagagaatagtagaggatcctgaatccctaaacatgaaaaacattctatctattcttcatacttactcttctctcaatcatgtctacaaatgccagaacaaagaacagttcgtggaagttatggctagtgctctgactggttatcttcacactatttcttctgaaaacttattggatgcagtatattcattttgcttgatgaattactttcccctggctccttttaatcagcttctgcaaaaagacatcatcagtgagctgctgacatcagatgacatgaagaatgcttacaactgccatcgtcacatacaaatgcaaaggtggcagaggtgctgagcagccttctgggaggtgaaggacacttctcaaaggatgtgcacttgccacacaattatcatattgattttgaaatcagaatggacactaacaggaatcaagtgctaccactttctgatgtggatacaacttctgctacagatattcaaagagtagctgtgctatgtgtttccagatctgcttattgtttgggttcaagccaccccagaggattccttgctatgaaaatgcggcatttgaatgcaatgggttttcatgtgatcttggtcaataactgggagatggacaaactagagatggaagatgcagtcacatttttgaagactaaaatctattcagtagaagctcttcctgttgctgctgtaaatgtgcaaagcacacaataaagtgaaaatcaaccttttcatattaggagacatgcatttgtaaaaattaataaagatgacaagtcagttgtcaatggaa

SEQ ID NO: 41672 - DNA, 1935 bp, Homo sapiens
gcatcgcccttataagctctgtggtatccccgagccccactcctgtatgcagggaaattagtcattctccttggtaaactttcttcaagtaagtccttcagctacagccgcgaacatatgctttttgacctttgagggaatccgtaagatctcgtgagaagcgcagcttctcggggaagctgtcatggctgctcctgtacgtagtcacggtcttgtgctctaaggtgagtggaggacgagcttgggcttagcggcagcccgtatcacatcctagactttttacttcgaggagaagagtctcacgagttgtcctggaagaaaacgacagcacgtgttctttttcactagtagaagtgacgttggtttcatgttgacaactttgaagccatttggaagtgtttcagtggagagcaaaatgaataacaaagcgggctcctttttctggaaccttagacaattcagtacattagtttcaacaagcagaactatgaggctatgttgtttgggactttgcaaaccaaaaatagttcattcaaactggaacattttaaataactttcataacagaatgcaatcaactgatatcattagatatctctttcaggatgcattcatttttaaatcagatgttggctttcaaacaaagggcataagcactctaacagcccttagaattgaaagactactttatgctaaaagactgttttttgactcaaagcagtctcttgtccctgttgataaatctgatgatgaattgaagaaagtaaaccttaatcatgaagtctccaatgaagatgttcttaccaaggaaacaaaaccaaaccgtatcagcagtagaaaactgtctgaggaatgtaattccctgagtgatgtgttagatgcattttcaaaagcgcccacatttcctagtagcaactatttcacagcaatgtggacaattgccaaaagactgtctgatgaccagaagcgctttgaaaaacgactgatgtttagccaccctgcatttaatcagctctgtgaacatatgatgagagaagccaagatcatgcagtataagtacctactgttcagtcttcacgccatagtgaagcttggaatccctcagaacactattttggtgcagactttgctgagggtgacccaggaacgtatcaatgagtgtgatgagatatgcctttcagttttgtcaactgttttagaggcaatggaaccatgcaagaatgttcatgttctacgaacgggattcagaatactagttgatcagcaagtttggaaaatagaagatgtcttcacattacaagttgtgatgaagtgtattggaaaagatgcaccgattgctcttaagaggaaactggagatgaaagccttgagggaattagacagattttctgttttgaatagccaacacatgtttgaagtactagctgccatgaatcaccgatctcttatactcctggatgaatgcagtaaggtggtcctagataatatccatgggtgtcctttaagaataatgatcaacatattgcagtcctgcaaagacctccagtaccataatttggatctcttcaagggacttgcagattatgtggctgcaactttcgacatctggaagttcagaaaagttctttttatcctcattttatttgaaaaccttggctttcgacctgttggtttaatggacctgtttatgaagagaatagtagaggatcctgaatccctaaacatgaaaaacattctatctattcttcatacttactcttctctcaatcatgtctacaaatgccagaacaaagaacagttcgtggaagttatggctagtgctctgactggttatcttcacactatttcttctgaaaacttattggatgcagtatattcattttgcttgatgaattactttcccctggcttgccaatatccgaaggacctcgagac

SEQ ID NO: 41673 - DNA, 1286 bp, Homo sapiens
ccttacccctcccacaattttaaagacttcatgaaattgtgggaggggtaagggggaaaaaagaaagagaaaggaaggaccccaacaacagtaagactccttaccatctacatctcatctgtcttttaaattaaatatatagctgaattgtgttgtgaatcagacctgaggactattttttcgattatgtgtgttcattctttgttcaaatatttgtccaaattcaactattttgttcaatatgcctgtctacctagtatttggctcgctggggatatagtgatgaataggcatggtctcttgtggaacttacagcatgggttccatgcaagttggtgttattctgcccccaagcacacagacatgcaattactagacatcttagtatgtgccgggcactgctaagtattcatttgtgtgctgccttttcatgatctgaaccctttgaggtgtagctgctattatgattctctctgtgtcttcacttcctcatctctaaaatcaggataggtatttgcccaaggctacacagaagtaggggagggctggagtttgaatgtgagctaacataggcttataagaaaatacaaaaatgggattataggcgtgacccccacccccggtccaagatggctatctcttaacacacttgtaacccatttgtgcacacaggtgtgccgtgactcactggtggatccaaaaaaagctgaagcctacatttcccagagcccctttcagcttgaattccaaatgtgacttagcttcctctatgcagatgtacctacttgaaactgggaaggccaaatgagatagaggtaatgtttctgccaacaaacagccacagagcattttatttttctagaagagcaataacagagaccccagggtgtggtgtggcaggacgaggagcatccattttgctggtggggattgtggctaaaataatgtggctctggagccagcaatgggcagcatcttcatgactttccagcttccaggctgtaagcagagatagcatctcttctggacagccagttatgtgatagtgttctgagagtcattcctggaagtcagactaaaggctgctccttcagcctttccattcatcttgtaagcaggaggcttctgtgcatggccagaaactaacaaaagcacattgtgtctaaactaggttgcagtggtttctgttatcagcaagtaaatcctgattgataaagatactacaatatatgcacatatatatgttatagaatcaataaaaattggatactttgctttaaaaattt

SEQ ID NO: 41674 - DNA, 251 bp, Homo sapiens
aatactagttgatcagcaagtttggaaaatagaagatgtcttcacattacaagttgtgatgaagtgtattggaaaagatgcaccgattgctcttaagaggaaactggaggtaaacacatgaattttctctagtggatgagatttgaaaaaatctttcttataacctgctatcactgcctgaagtcaattttctaggaggacattgctgggcttttaggtttagcttcactaaagtgaatgaatagaagtac

SEQ ID NO: 41675 - DNA, 274 bp, Homo sapiens
agtatgactttttatttcccaaagatgctgtttattgtggactgactgtaggaattgttggtttgatactcaatcgttttattcagtacatcagttcagtggttttgcttgggtaagatagtttactatgggctcatcacctgtagtgtttttgtaattatatttcaataggaacgtatcaatgagtgtgatgagatatgcctttcagttttgtcaactgttttagaggcaatggaaccatgcaagaatgttcatgttctacgaacgggattca

SEQ ID NO: 41676 - DNA, 249 bp, Homo sapiens
ctgctcctgtacgtagtcacggtcttgtgctctaaggtgagtggaggacgagcttgggcttagcggcagcccgtatcacatcctagactttttacttcgaggagaagagtctcacgagttgtcctggaataaaggaggtgggttaatgctgggcggcccagctgcggaaggacaggctcttgaagttggttctggggtctggtgaggctggctggttgtataagatcttcctcttaagcgcaggccacg

SEQ ID NO: 41677 - DNA, 714 bp, Homo sapiens
tatagaaattttggggttatgtcttacatgttagaatctaggaagtatttaagtttgggaatgcgagaagttcaagattgagttggtcattttgaaaaccttcagaaaaggcatatttaaaagtaattttcagatatgttgtatgaaaagcatgtaggaagagatttatttttaaatcagatggaaacgtagaaatcattgtatgccctggttctcagcttaaaaaagattgcttattaacttgatacccaattcaagaattaatagaacagattttgtgagagaaagatgattgttccttttcatggaaatattctgtttcaggatatattctgttgatcaggacagttgaattgctgcttagattttttgagatctaaaaaattactattagcatactgtaattattatagagttttccctcaattttctctttttaaggttctttttatcctcattttatttgaaaaccttggctttcgacctgttggtttaatggacctgtttatgaagagaatagtagaggatcctgaatccctaaacatgaaaaacattctatctattcttcatacttactcttctctcaatcatgtctacaaatgccagaacaaagagtatgtacttgtttttttttaccttttttattgccatataacttacaaaaaaggttataaatcataagcttaatgaattattacaagtgaacacacccat

SEQ ID NO: 41678 - DNA, 1298 bp, Homo sapiens
caattggcttttaaatagtcaaacgtttataataaacatattttccaatctcgaaacgactgtcagtggtaacaatgatcaacgtaacatagatgtaacaggaacatcacgacgttcgactatacttacaggaaacacaagctacagtgaaatactatctcacgcctaccaggtctgcaaaatccagcttgggcaagggtgtcgccggccccctcttatgctggtgggggagggcgatttggtaccacccctttaggggcctaaatacagccctcgcacttctgcaccaaggaatttaacctaagaaaatagtccgacttgggcaaaaaacggtttgtacaagcaatagtcaagctagcattgttcgttataaaagacagcaaaaaccctaaatttctacaggaaaggggataaagtctggtgctataaaactccgtttccggaggaatcccacctgtatctgaatgcatggggcgctctccgagctacgttaagtataagagccccaagtaaagtaactgaccttttgcagaaacgcacgtagatgttcctgcatagactttctttgcagacccgtaagaaacgggtttccctctgccccaggggagaactgggccttggaggttaggactgggaaaaacacatcaagtcttcaccaaataccctttcaggctccttgaattttctactctgtgcacctgaacacacttttgttctcttgcaagcagttgctttgcactggaggcaatgaagacacggcggagtcccagctcgcagggagctcaggttctgacggcgtcagaggacaacacgctctggaccagcgcagcgcccaagggtcagcggcagcagcgagcagggggcacgggatgcggggaggctcttcgggaggcatgaaaggcagacgtgttccgaaacgtgagccgcgctgaggggcacggcgcacgaccggggacagaaggaagacactgcggtcgcaaagccctggccgtgcaaaggccccgtggtcagccaggagcccaggcgtcccctgctctagcgaggtttccttccgaacgtcccgtagcaccgcttaccatggaacggcgggcgctgcctcgcagccccgaccccgcggcggcccccacgggcccacgaggaactcgaggccgagggaaggagtgagagcggccggaaaggggcagggccgagccggaccggtacctggctgggtcccagcggccgccacttaccaccgaggccgcctcttcgtccacagcctgacgccagccaccgccgccgccgtctccactgccgca

SEQ ID NO: 41679 - DNA, 333 bp, Homo sapiens
caattggcttttaaatagtcaaacgtttataataaacatattttccaatctcgaaacgactgtcagtggtaacaatgatcaacgtaacatagatgtaacaggaacatcacgacgttcgactatacttacaggaaacacaagctacagtgaaatactatctcacgcctaccaggtctgcaaaatccagcttgggcaagggtgtcgccggccccctcttatgctggtgggggagggcgattacggacgaaaacatgcattgccacaacactgcctatgctcttctatatctaagaaacgcacgtttgatacataccaaaaaacgcgtcctttata

SEQ ID NO: 41680 - DNA, 315 bp, Homo sapiens
aattatgctaaatataataattagaaaaatgaactagctaaataaaattctcagtaagctggctagaaggaatagagaaaaagaggagcagccaggaatgtggaaggtagacagtattctgtaaacatctgtctcagtacagaagcgaaatcattatagctatagctctggcttcccttaagctccagaagcttggcaaaaaaaaaaaaaaaaaaaaaatcctaaatatacagtttttctcctatgaacatatttttaaggtacaaattttcatttctgtaaaagccctttgagattttataaaactgtatcttt

SEQ ID NO: 41681 - DNA, 371 bp, Homo sapiens
tgttaccactctcttcaacaaagtactggaagtcctagccacagcagtcaggcaagagaaagaaataaagttcacccaaatcagtaaagaggaagtcaaactgtcactgatgatatgatttgctgatgatatgattgtttaccttgaaaaccctaaggactcctccagaaagctcctagaactgatgaaagaattcagcaaagtttctggataaaagattaatgtacacacatcagtagctcttctgtataccaacagtgaccaagtggaggttgaaatcaagaactcaacccctttcacaatagctgcaaaaaacaaacaaacaaaaagcttaggaatatacataaccaggtgccaaaagacctctacaa

SEQ ID NO: 41682 - DNA, 3099 bp, Homo sapiens
gcgactgcgcgcgcagggcctgagcgggcgccggagggaaggggaagcggcggggtagtaacagattatgggcaacagtccttttaattaatctaccgtcatcatggctaatgaggactgtcccaaggctgctgatagtcctttttcatcagataaacatgcccaactcatcttggcccaaatcaataagatgagaaatggacagcatttctgtgatgtgcagctgcaagttggacaggaaagttttaaagctcatcggctggttttggctgccagcagtccttactttgcagctttgttcactggaggaatgaaagagtcctcaaaagatgttgtaccgattctaggaattgaagcaggaatctttcagatacttctagatttcatttacacaggtatagtgaacataggtgtgaataatgtccaggagttgattattgcagcagacatgctacagttgactgaagttgttcatctttgctgtgaatttctgaaaggacaaattgatccactgaactgcattggaatttttcagttctctgagcaaattgcctgccatgatctcttggaattctcagaaaactacattcatgtccatttcttggaggttcatagtggagaagagttcctggcacttacgaaagatcagctgatcaaaattttgcgaagtgaagagcttagcattgaggatgaataccaggtcttcttagctgcaatgcaatggattctgaaagatttgggaaaaagaagaaaacatgtggtggaagtgctagacccaattcgattccctttattacctcctcagagacttttaaagtatatagaaggagtatccgattttaatcttcgtgttgcattgcaaacacttctgaaagagtactgtgaagtatgcaaatctcccaaagagaacaagttttgtagttttctgcagacatctaaggttcgacctcggaagaaagcaagaaagtacctgtatgcagtaggtggatatactcggttgcaggggggtcgctggagtgatagcagagccctcagctgtgtagaacgttttgacacctttagccagtactggaccactgtgtcttcacttcatcaggctcgaagtgggctgggagtaacagttctgggagggatggtctacgctattggaggtgaaaaggattcaatgatttttgattgtactgaatgctatgatccagttactaaacagtggacaactgtagcttcgatgaatcatccccgctgcggcttaggagtgtgtgtgtgttatggggctatctatgctttgggtggatgggttggagctgagatagggaacaccattgaacgatttgatcctgatgaaaataaatgggaagtagttggtaacatggctgtgtcacgctactactttgggtgctgtgaaatgcaaggtttaatttatgtaattgggggcatcagcaatgaaggaatagaacttcgttcttttgaagtctatgatccactttctaagcgttggtctccacttcctccaatgggaaccaggagagcatatcttggtgtggctgcactcaatgactgcatctattctgttggaggatggaatgagacccaagatgctcttcatactgtagaaaaatattcctttgaagaggaaaagtgggttgaagttgcctcaatgaaagtgcctagagcaggcatgtgtgttgtggcagtcaatggtcttctgtatgtttctggaggtcgatcttccagccatgattttttggctccaggtaccttggactcagttgaagtttataaccctcattcagatacatggacagaaattggtaacatgatcaccagtcgttgtgaagggggcgttgctgtgctatgaaatataaagcataacagagcacaaggaacattttgaaaatgcaggacctgaccttttgcaaagcaaacatagatttggtgataagaccctctgattctgtgagttttccatgtatttggtagataaatgactaacgaggctgggcgcagtggcctcatgcctataatcccagcactttggaaggctgaggcagaaggatcacttgagcccaggaatttgaggttgtagtaagctacgatcatgccactgcactccactctgggcaacagaatgagatcctgtctcttaaagaaaaaaaataaactcaagaatgatttttctaaaaatatgagtgagaatggatatggaatatatcccaattaataaagagctcacacagatttgccaggtttactaataatagaaatgccatttatgctgtagaattctccagtttaagtgtagacaactcctattttacaaatttgtagaaattatttactagaagcttcctggcaaatagtccctttagctacttctccagtgcagtataaattgtaacataaaactttatgtgatataggaatagtgtcaatgacacagtttaaagacctctatattcacaattatatccagagcataattttccatggccatagtttgagccacagagaaagccaatgaaatagattcctacttttatttaatgccaagagttttcactagccccaaactttttattggcagcagatatcctaggaggggtgtttgggaaatatctagctattttaatagatagatacctttttgcttgatgataagtttttgcttgctcatattttttgtcttgatcctgagaatgcaagtaaggaattaataggaggttcttagtgaccagatgttgtaatgggctatacagtccagcaggcagtatgcacctagaaatttctcccttttttaggctgggcatggtggctcacgcctgtagtcccagcactttgagaggccgaggtgagacgggaagatggcttgaactcgggagttcgagactagcctgggcaacgtgatgagactccgtctctaccaaaaaatatataaaaattagccgggcgttgtggcttgtacctgtggtcccatctgcttgggaggctgaggttgcaggatcgcttgagcccaggaggtcagggctgcagtgagccgagattgtgccactgcacaccggcctgggtgacagcatgagaacctgtctcaaaaaaaaaaaa

SEQ ID NO: 41683 - DNA, 923 bp, Homo sapiens
ggtgagactaggaatttcagaaaactaggttttctgttaattctttttttctccaccttaagtagagtgattagagactacgttttcaagtgaaaatctaaggtgttgcttttgctgttttaagaaagcttctgcactgggtgcagtggctcacgcctgcaatcctaacactttgggagcctaggcaggaggattgcttgagctcagttcaagaccagcctgggcaacatagggagaccctgtctctacaaaaaattaaaaaattagcttggcatagtggtgcacaactgtagtcccagctactcaggaggctgaggtgggagaattgcttgagcccaggaggtcgaggctgcagtgagccatgaccacaccactacactctggcctgagcaagagtgagaccctgcgtttaaacaaaacaaaacaaaaacaaaaacacaccaaagctaaaagcttctctgtgatttaaaagatgtagaactagaccagcctgtccaacatggtgaaatgccacctctactaaaaatacacaccaaaaaattagttgggcatggtggcacgtgcctataatcccagctactctagagatgctgaggcaggagaatcgcttgaactcgggaggtggaggttgcggtgagccaagatcgtgccactgcactccagcctaggcgacagaatgaaactccatctcaaaaaaaaagatgtagaactagataggcctgctcattagaatatcaagatggctccagcttgacttttctttcctaatttatatgtactagtggctttattttaaatagtttcctttgaaaataatcattttgaccagctattatgtgtttggtggtaagggacaagttgttatctgtaccatgccaaatatcctaataaaaactggaaaacatgtccaacttaaaaaaaaa

SEQ ID NO: 41684 - DNA, 617 bp, Homo sapiens
ggcaaacctaagtaagagcatactgcaaagctactgcttggatgtagagggctaaattgtaggtacttctgaaactttttatagatactgactcataagtgtaatttgaaagtaccccttgacccaaacaaaactgcttctcaaaacttctcattttctccctgagaagcattctaaagaattgttctctgttcatttctaagagaaagatttactgggtgtatgatgcggttacttttaagttatttctactggccagttggagcaatatatattaaaggtcttgcatacagtaaaaaaaatttttttttgagatggaattttgctcttgttgcccaggctggagtgcaaaggcctgagatcataccactgtgttctagcctgggccatagagcaagactttgtctcaaaaaaaaataaaacaaaaaatatttggtttagtctacaactataccttccttataacttaaccatatgcatttattaggaaaagtttatgtaatgcagacaggaagctctatgttcccttctctggggcatcctgaacgtctgaagggtcacagatgtctgtgtagagatctgtaagatgtcaaagaataaagataatttatagacta

SEQ ID NO: 41685 - DNA, 527 bp, Homo sapiens
ggcaaacctaagtaagagcatactgcaaagctactgcttggatgtagagggctaaattgtaggtacttctgaaactttttatagatactgactcataagtgtaatttgaaagtaccccttgacccaaacaaaactgcttctcaaaacttctcattttctccctgagaagcattctaaagaattgttctctgttcatttctaagagaaagatttactgggtgtatgatgcggttacttttaagttatttctactggccagttggagcaatatatattaaaggtcttgcatacagtaaaaaaaaaagatgtagaactagataggcctgctcattagaatatcaagatggctccagcttgacttttctttcctaatttatatgtactagtggctttattttaaatagtttcctttgaaaataatcattttgaccagctattatgtgtttggtggtaagggacaagttgttatctgtaccatgccaaatatcctaataaaaactggaaaacatgtccaacttaaaaaaaaa

SEQ ID NO: 41686 - DNA, 2968 bp, Homo sapiens
gcgactgcgcgcgcagggcctgagcgggcgccggagggaaggggaagcggcggggtagtaacagattatgggcaacagtccttttaattaatctaccgtcatcatggctaatgaggactgtcccaaggctgctgatagtcctttttcatcagataaacatgcccaactcatcttggcccaaatcaataagatgagaaatggacagcatttctgtgatgtgcagctgcaagttggacaggaaagttttaaagctcatcggctggttttggctgccagcagtccttactttgcagctttgttcactggaggaatgaaagagtcctcaaaagatgttgtaccgattctaggaattgaagcaggaatctttcagatacttctagatttcatttacacaggtatagtgaacataggtgtgaataatgtccaggagttgattattgcagcagacatgctacagttgactgaagttgttcatctttgctgtgaatttctgaaaggacaaattgatccactgaactgcattggaatttttcagttctctgagcaaattgcctgccatgatctcttggaattctcagaaaactacattcatgtccatttcttggaggttcatagtggagaagagttcctggcacttacgaaagatcagctgatcaaaattttgcgaagtgaagagcttagcattgaggatgaataccaggtcttcttagctgcaatgcaatggattctgaaagatttgggaaaaagaagaaaacatgtggtggaagtgctagacccaattcgattccctttattacctcctcagagacttttaaagtatatagaaggagtatccgattttaatcttcgtgttgcattgcaaacacttctgaaagagtactgtgaagtatgcaaatctcccaaagagaacaagttttgtagttttctgcagacatctaaggttcgacctcggaagaaagcaagaaagtacctgtatgcagtaggtggatatactcggttgcaggggggtcgctggagtgatagcagagccctcagctgtgtagaacgttttgacacctttagccagtactggaccactgtgtcttcacttcatcaggctcgaagtgggctgggagtaacagttctgggagggatggtctacgctattggaggtgaaaaggattcaatgatttttgattgtactgaatgctatgatccagttactaaacagtggacaactgtagcttcgatgaatcatccccgctgcggcttaggagtgtgtgtgtgttatggggctatctatgctttgggtggatgggttggagctgagatagggaacaccattgaacgatttgatcctgatgaaaataaatgggaagtagttggtaacatggctgtgtcacgctactactttgggtgctgtgaaatgcaaggtttaatttatgtaattgggggcatcagcaatgaaggaatagaacttcgttcttttgaagtctatgatccactttctaagcgttggtctccacttcctccaatgggaaccaggagagcatatcttggtgtggctgcactcaatgactgcatctattctgttggaggatggaatgagacccaagatgctcttcatactgtagaaaaatattcctttgaagaggaaaagtgggttgaagttgcctcaatgaaagtgcctagagcaggcatgtgtgttgtggcagtcaatggtcttctgtatgtttctggaggtcgatcttccagccatgattttttggctccaggtaccttggactcagttgaagtttataaccctcattcagatacatggacagaaattggtaacatgatcaccagtcgttgtgaagggggcgttgctgtgctatgaaatataaagcataacagagcacaaggaacattttgaaaatgcaggacctgaccttttgcaaagcaaacatagatttggtgataagaccctctgattctgtgagttttccatgtatttggtagataaatgactaacgaggctgggcgcagtggcctcatgcctataatcccagcactttggaaggctgaggcagaaggatcacttgagcccaggaatttgaggttgtagtaagctacgatcatgccactgcactccactctgggcaacagaatgagatcctgtctcttaaagaaaaaaaataaactcaagaatgatttttctaaaaatatgagtgagaatggatatggaatatatcccaattaataaagagctcacacagatttgccaggtttactaataatagaaatgccatttatgctgtagaattctccagtttaagtgtagacaactcctattttacaaatttgtagaaattatttactagaagcttcctggcaaatagtccctttagctacttctccagtgcagtataaattgtaacataaaactttatgtgatataggaatagtgtcaatgacacagtttaaagacctctatattcacaattatatccagagcataattttccatggccatagtttgagccacagagaaagccaatgaaatagattcctacttttatttaatgccaagagttttcactagccccaaactttttattggcagcagatatcctaggaggggtgtttgggaaatatctagctattttaatagatagatacctttttgcttgatgataagtttttgcttgctcatattttttgtcttgatcctgagaatgcaagtaaggaattaataggaggttcttagtgaccagatgttgtaatgggctatacagtccagcaggcagtatgcacctagaaatttctcccttttttaggctgggcatggtggctcacgcctgtagtcccagcactttgagaggccgaggtgagacgggaagatggcttgaactcgggacccaggaggtcagggctgcagtgagccgagattgtgccactgcacaccggcctgggtgacagcatgagaacctgtctcaaaaaaaaaaaa

SEQ ID NO: 41687 - DNA, 2731 bp, Homo sapiens
gcgactgcgcgcgcagggcctgagcgggcgccggagggaaggggaagcggcggggtagtaacagattatgggcaacagtccttttaattaatctaccgtcatcatggctaatgaggactgtcccaaggctgctgatagtcctttttcatcagataaacatgcccaactcatcttggcccaaatcaataagatgagaaatggacagcatttctgtgatgtgcagctgcaagttggacaggaaagttttaaagctcatcggctggttttggctgccagcagtccttactttgcagctttgttcactggaggaatgaaagagtcctcaaaagatgttgtaccgattctaggaattgaagcaggaatctttcagatacttctagatttcatttacacaggtatagtgaacataggtgtgaataatgtccaggagttgattattgcagcagacatgctacagttgactgaagttgttcatctttgctgtgaatttctgaaaggacaaattgatccactgaactgcattggaatttttcagttctctgagcaaattgcctgccatgatctcttggaattctcagaaaactacattcatgtccatttcttggaggttcatagtggagaagagttcctggcacttacgaaagatcagctgatcaaaattttgcgaagtgaagagcttagcattgaggatgaataccaggtcttcttagctgcaatgcaatggattctgaaagatttgggaaaaagaagaaaacatgtggtggaagtgctagacccaattcgattccctttattacctcctcagagacttttaaagtatatagaaggagtatccgattttaatcttcgtgttgcattgcaaacacttctgaaagagtactgtgaagtatgcaaatctcccaaagagaacaagttttgtagttttctgcagacatctaaggttcgacctcggaagaaagcaagaaagtacctgtatgcagtaggtggatatactcggttgcaggggggtcgctggagtgatagcagagccctcagctgtgtagaacgttttgacacctttagccagtactggaccactgtgtcttcacttcatcaggctcgaagtgggctgggagtaacagttctgggagggatggtctacgctattggaggtgaaaaggattcaatgatttttgattgtactgaatgctatgatccagttactaaacagtggacaactgtagcttcgatgaatcatccccgctgcggcttaggagtgtgtgtgtgttatggggctatctatgctttgggtggatgggttggagctgagatagggaacaccattgaacgatttgatcctgatgaaaataaatgggaagtagttggtaacatggctgtgtcacgctactactttgggtgctgtgaaatgcaaggtttaatttatgtaattgggggcatcagcaatgaaggaatagaacttcgttcttttgaagtctatgatccactttctaagcgttggtctccacttcctccaatgggaaccaggagagcatatcttggtgtggctgcactcaatgactgcatctattctgttggaggatggaatgagacccaagatgctcttcatactgtagaaaaatattcctttgaagaggaaaagtgggttgaagttgcctcaatgaaagtgcctagagcaggcatgtgtgttgtggcagtcaatggtcttctgtatgtttctggaggtcgatcttccagccatgattttttggctccaggtaccttggactcagttgaagtttataaccctcattcagatacatggacagaaattggtaacatgatcaccagtcgttgtgaagggggcgttgctgtgctatgaaatataaagcataacagagcacaaggaacattttgaaaatgcaggacctgaccttttgcaaagcaaacatagatttggtgataagaccctctgattctgtgagttttccatgtatttggtagataaatgactaacgaggctgggcgcagtggcctcatgcctataatcccagcactttggaaggctgaggcagaaggatcacttgagcccaggaatttgaggttgtagtaagctacgatcatgccactgcactccactctgggcaacagaatgagatcctgtctcttaaagaaaaaaaataaactcaagaatgatttttctaaaaatatgagtgagaatggatatggaatatatcccaattaataaagagctcacacagatttgccaggtttactaataatagaaatgccatttatgctgtagaattctccagtttaagtgtagacaactcctattttacaaatttgtagaaattatttactagaagcttcctggcaaatagtccctttagctacttctccagtgcagtataaattgtaacataaaactttatgtgatataggaatagtgtcaatgacacagtttaaagacctctatattcacaattatatccagagcataattttccatggccatagtttgagccacagaggttcgagactagcctgggcaacgtgatgagactccgtctctaccaaaaaatatataaaaattagccgggcgttgtggcttgtacctgtggtcccatctgcttgggaggctgaggttgcaggatcgcttgagcccaggaggtcagggctgcagtgagccgagattgtgccactgcacaccggcctgggtgacagcatgagaacctgtctcaaaaaaaaaaaa

SEQ ID NO: 41688 - DNA, 1530 bp, Homo sapiens
ggcaaacctaagtaagagcatactgcaaagctactgcttggatgtagagggctaaattgtaggtacttctgaaactttttatagatactgactcataagtgtaatttgaaagtaccccttgacccaaacaaaactgcttctcaaaacttctcattttctccctgagaagcattctaaagaattgttctctgttcatttctaagagaaagatttactgggtgtatgatgcggttacttttaagttatttctactggccagttggagcaatatatattaaaggtcttgcatacagtaaaaaaaatttttttttgagatggaattttgctcttgttgcccaggctggagtgcaaaggcgtgatctcggctcactgcaacctccgcctcccggattcaagcgattctcctgcctcagcctcccaagtagctgggattacaggcgcccaccaccatgcctagctaatttttctgtatggggtttcaccatgttggccaggctggtctcgaactcctgacctcaggtgatccacctgccttggcctcccgaagtgctgggattacaggcatgggccagcgtgcccggctgcatacagtaaaatttaactagttgacttaaggatttgatttcccgtttcttttttttttttttagatggagtcttgccctgtcactcaggctgagatcataccactgtgttctagcctgggccatagagcaagactttgtctcaaaaaaaaataaaacaaaaaatatttggtttagtctacaactataccttccttataacttaaccatatgcatttattaggaaaagtttatgtaatgcagacaggaagctctatgttcccttctctggggcatcctgaacgtctgaagggtcacagatgtctgtgtagagatctgtaagatgtcaaagaataaagataatttatagactaagctataactcatgtgcctttactatttctagttacagagaatctgtattctgattcaaaacagatttacaaaatacttctacaactaatttctcattgtctagtagcaactgaaaatgacactttgaaggggtgtgctttgcacagctgtggcagaaatgtaatgtcaaggcagtcagtgttttaacaggtcccgaagatccctgaaaataggtgactgtaaatatgcttattattcctaggtaatgacaagattggttttgtttttgtttttgttttgagatggagtttcgctcttgttgcggtgagccaagatcgtgccactgcactccagcctaggcgacagaatgaaactccatctcaaaaaaaaagatgtagaactagataggcctgctcattagaatatcaagatggctccagcttgacttttctttcctaatttatatgtactagtggctttattttaaatagtttcctttgaaaataatcattttgaccagctattatgtgtttggtggtaagggacaagttgttatctgtaccatgccaaatatcctaataaaaactggaaaacatgtccaacttaaaaaaaaa

SEQ ID NO: 41689 - DNA, 966 bp, Homo sapiens
aaaaatacaaaaaattggcagcaggtggtggtacatgcctgtaatcccagctgctgaggaggctgaggcaggagaatcacttgaatccaggaggtggaggttgtagtgagctgagatcataccactgtgttctagcctgggccatagagcaagactttgtctcaaaaaaaaataaaacaaaaaatatttggtttagtctacaactataccttccttataacttaaccatatgcatttattaggaaaagtttatgtaatgcagacaggaagctctatgttcccttctctggggcatcctgaacgtctgaagggtcacagatgtctgtgtagagatctgtaagatgtcaaagaataaagataatttatagactaagctataactcatgtgcctttactatttctagttacagagaatctgtattctgattcaaaacagatttacaaaatacttctacaactaatttctcattgtctagtagcaactgaaaatgacactttgaaggggtgtgctttgcacagctgtggcagaaatgtaatgtcaaggcagtcagtgttttaacaggtcccgaagatccctgaaaataggtgactgtaaatatgcttattattcctaggtaatgacaagattggttttgtttttgtttttgttttgagatggagtttcgctcttgttgcggtgagccaagatcgtgccactgcactccagcctaggcgacagaatgaaactccatctcaaaaaaaaagatgtagaactagataggcctgctcattagaatatcaagatggctccagcttgacttttctttcctaatttatatgtactagtggctttattttaaatagtttcctttgaaaataatcattttgaccagctattatgtgtttggtggtaagggacaagttgttatctgtaccatgccaaatatcctaataaaaactggaaaacatgtccaacttaaaaaaaaa

SEQ ID NO: 41690 - DNA, 936 bp, Homo sapiens
ggcaaacctaagtaagagcatactgcaaagctactgcttggatgtagagggctaaattgtaggtacttctgaaactttttatagatactgactcataagtgtaatttgaaagtaccccttgacccaaacaaaactgcttctcaaaacttctcattttctccctgagaagcattctaaagaattgttctctgttcatttctaagagaaagatttactgggtgtatgatgcggttacttttaagttatttctactggccagttggagcaatatatattaaaggtcttgcatacagtaaaaaaaatttttttttgagatggaattttgctcttgttgcccaggctggagtgcaaaggcgtgatctcggctcactgcaacctccgcctcccggattcaagcgattctcctgcctcagcctcccaagtagctgggattacaggcgcccaccaccatgcctagctaatttttctgtatggggtttcaccatgttggccaggctggtctcgaactcctgacctcaggtgatccacctgccttggcctcccgaagtgctgggattacaggcatgggccagcgtgcccggctgcatacagtaaaatttaactagttgacttaaggatttgatttcccgtttcttttttttttttttagatggagtcttgccctgtcactcaggctgagatcataccactgtgttctagcctgggccatagagcaagactttgtctcaaaaaaaaataaaacaaaaaatatttggtttagtctacaactataccttccttataacttaaccatatgcatttattaggaaaagtttatgtaatgcagacaggaagctctatgttcccttctctggggcatcctgaacgtctgaagggtcacagatgtctgtgtagagatctgtaagatgtcaaagaataaagataatttatagacta

SEQ ID NO: 41691 - DNA, 502 bp, Homo sapiens
tcagcagccatagtctcgcttcagggtgtccagtgtttcgaggaggagaggggacaggggccaggtccactcccttggccctcctcttggaccccaaggccaggccggatccttttatcccgtggggagcccctgcctcggccatcgggatgaggtccctcaagtccctgcacaagcaggtcagagacccacccacatgccgttcctgggctacgccacgcgccatcccccggggctgtggacgcacccagcccccgacagacaggcgccctgagagctccgaaggcgcgatccccatccccaccagtggagaagccagaaccgcgattgttgcatctgggaaaacccagctggagccgaacggcccgtgcccccactgtaattgtgctgaaaatgtttctcaaatgacccaaattggctcttattttttctaatggccctttcaaagtattcatgaaattgatgctgtgtcataaaacaaaaataaaagatttcacagcaa

SEQ ID NO: 41692 - DNA, 411 bp, Homo sapiens
aaatagggcggcaggcccaggcaggagtcgaggctccaagcctgctgcatgctccattgtcccatgggactttgcttacaaaacacacactcaaaaataaaattactaagaatttcaagatggtgagcatagggcattacacctggagtgtggagtcctacgtgactacactggtaacatacccacaaggccctgccctaccttggtttagagacacctagccttgagcaggtggcttgacctttccaagcctcagtttcctcatctgcagataagcatgaaaatacctacttcggccaggcatcgtggctcacacttgtaatctcagcactttgggaggccaaggtgggcggatcatgaggtcaggagatcgagaccatcctggctaacatggtgaaaccccatctctac

SEQ ID NO: 41693 - DNA, 300 bp, Homo sapiens
gactctagtgcctgaaagttactatctttatttgtaagttgagccctttcctcttgtgtccttaagttatttgtgggatgatccttttgtattttgccaaatacctagttccttattaaccactcatctattgattattttagcatgcactgaggattgcttcttgtattttcttattagagatatgttattgtttgatgatgtcttttcttgtgtcatatattttattccatcttttatgtgttttcatcatttaaatatttataatctctatcaagttgttcagttttctgaagttct

SEQ ID NO: 41694 - DNA, 879 bp, Homo sapiens
gcggccgccccgagacgccggccccgctgagtgatgagaacagacgtcaaactgccttatgaatattgatgcggaggctaggctgctttcgtagagaagcagaaggaagcaagatggctgccctttaggatttgttagaaaggagacccgactgcaactgctggattgctgcaaggctgagggacgagaacgaggctggcaaacattcagcagcacaccctctcaagattgtttacttgcctttgctcctgttgagttacaacgcttggaagcaggagatgggctcagcagcagccaataggacatgatccaggaagagcagtaagggactgagctgctggtaagacagtggagacagttgacacttgtttgtcaagtatgaatttattcctaatgtaatggtaatctctctcccaaacttcaacttcaagttaccctgcaccctctcaaatacttttctttattgtctatgcttaggacacatggattagattgttaagatttgtgaatttactaaagttgtgtactgacttatgtatagctgtatttttctggagaaagatagatttttatcaattctcaatgtctatggagtttttaaaaagaggtaaggattattcaaatgtaactataaacataagaaaatgtgatatctataaccagttgttagagtatttatcgcctccattttgcttcacttgtagccacttcgtctcaatcttgttaaggaccaaataaatggtatttgtggttacttgctgatctgaaaagtgagtacctcctgcacctggctagtcagtcttgtgacaatttggtgccatagaactagcagagaactaaattatgggaatggcagatctcaggagcagctatgtgatt

SEQ ID NO: 41695 - DNA, 975 bp, Homo sapiens
gcggccgccccgagacgccggccccgctgagtgatgagaacagacgtcaaactgccttatgaatattgatgcggaggctaggctgctttcgtagagaagcagaaggaagcaagatggctgccctttaggatttgttagaaaggagacccgactgcaactgctggattgctgcaaggctgagggacgagaacgagaattcaactagagggcagccttgtggatggccccgaagcaagcctgatggaacaggatagaaccaaccatgttgagggcaacagactaagtccattcctgataccatcacctcccatttgccagacagaacctctggctacaaagctccagaatggaagcccactgcctgagagagctcatccagaagtaaatggagacaccaagtggcactctttcaaaagttattatggaataccctgtatgaagggaagccagaatagtcgtgtgagtcctgactttacacaagaaagtagagggtattccaagtgtttgcaaaatggaggaataaaacgcacagttagtgaaccttctctctctgggctccttcagatcaagaaattgaaacaagaccaaaaggctaatggagaaagacgtaacttcggggtaagccaagaaagaaatccaggtgaaagcagtcaaccaaatgtctccgatttgagtgataagaaagaatctgtgagttctgtagcccaagaaaatgcagttaaagatttcaccagtttttcaacacataactgcagtgggcctgaaaatccagagcttcagattctgaatgagcaggaggggaaaagtgctaattaccatgacaagaacattgtattacttaaaaacaaggcagtgctaatgcctaatggtgctacagtttctgcctcttccgtggaacacacacatggtgaactcctggaaaaaacactgtctcaatattatccagattgtgtttccattgcggtgcagaaaacc

SEQ ID NO: 41696 - DNA, 1121 bp, Homo sapiens
gcggccgccccgagacgccggccccgctgagtgatgagaacagacgtcaaactgccttatgaatattgatgcggaggctaggctgctttcgtagagaagcagaaggaagcaagatggctgccctttaggatttgttagaaaggagacccgactgcaactgctggattgctgcaaggctgagggacgagaacgaggctggcaaacattcagcagcacaccctctcaagattgtttacttgcctttgctcctgttgagttacaacgcttggaagcaggagatgggctcagcagcagccaataggacatgatccaggaagagcagtaagggactgagctgctgaattcaactagagggcagccttgtggatggccccgaagcaagcctgatggaacaggatagaaccaaccatgttgagggcaacagactaagtccattcctgataccatcacctcccatttgccagacagaacctctggctacaaagctccagaatggaagcccactgcctgagagagctcatccagaagtaaatggagacaccaagtggcactctttcaaaagttattatggaataccctgtatgaagggaagccagaatagtcgtgtgagtcctgactttacacaagaaagtagagggtattccaagtgtttgcaaaatggaggaataaaacgcacagttagtgaaccttctctctctgggctccttcagatcaagaaattgaaacaagaccaaaaggctaatggagaaagacgtaacttcggggtaagccaagaaagaaatccaggtgaaagcagtcaaccaaatgtctccgatttgagtgataagaaagaatctgtgagttctgtagcccaagaaaatgcagttaaagatttcaccagtttttcaacacataactgcagtgggcctgaaaatccagagcttcagattctgaatgagcaggaggggaaaagtgctaattaccatgacaagaacattgtattacttaaaaacaaggcagtgctaatgcctaatggtgctacagtttctgcctcttccgtggaacacacacatggtgaactcctggaaaaaacactgtctcaatattatccagattgtgtttccattgcggtgcagaaaacc

SEQ ID NO: 41697 - DNA, 806 bp, Homo sapiens
gcggccgccccgagacgccggccccgctgagtgatgagaacagacgtcaaactgccttatgaatattgatgcggaggctaggctgctttcgtagagaagcagaaggaagcaagatggctgccctttaggatttgttagaaaggagacccgactgcaactgctggattgctgcaaggctgagggacgagaacgaggctggcaaacattcagcagcacaccctctcaagattgtttacttgcctttgctcctgttgagttacaacgcttggaagcaggagatgggctcagcagcagccaataggacatgatccaggaagagcagtaagggactgagctgctgccctcacctttgaaaagcctgagcctctgagatgtgagatgactgctgtaaagtgaagcagcgaatttctagaggctgggttcacgcttcaggtcctctaaatcctaggtcgcttcccactactacatactaccctaaaaaatctgtaattcgcaaatttattttttgatctttttcataacttattaaatttttattgaacaaataaaaaaaataaaaaaaaattaataaagaaattaaaagaaaataaaaataaagataatttaatgaacaaatgaatttaacagtataaagattacaaaaaaaaaaaccttgtggccccctatgcccaagcggcttttaacctggagaaagttattgattgccgcccaaattgaggccactttggcaaattgcccctatagggggcctattaacattaaacgggcccgcgttttccgcgggacctggccaccggggttccccc

SEQ ID NO: 41698 - DNA, 336 bp, Homo sapiens
ccctgtgtaaatcttatttttccaaccaaatagttcaacatgttaaatttgatcctgtgctcagatagcagagaattgtaatatgtggcctcttcctttaaggatcttctaatattacctgagagtttgaatgaatacattatacattattaaaaatatacctgaaaataatatttcttttagaaaaaaatatacctgtattgcaaacttcctaggatgccttgctcactgtttttttttttttaaatctaaatcctaccagtttttcaagtcccaacttggattttatgcctgtgtagagccattcttgacagctatcgcccaagtaaatttctc

SEQ ID NO: 41699 - DNA, 649 bp, Homo sapiens
attatgggctctgaagaatttctatacatggagacactgtctttataatttgaacacattcttgagaaggcatctgactggtaaacaaagcacaatggcataggtcctggaaacattcctttcagatattttcataactgaagtacattttgccattcacagtgagtgttaagctgaaaaaaatgtggttcttttctagccatataaagtatgcttactattattttctcgaaggatgccaaaaaatgtaaaatggatgttgtggattcttcgtggggaggttagctagtttgtatatagagcctcaagaagagttgcctcagcttggtgccatcttgagtctgtccttccactagatgaggcatagcttccattagtgtcagtgcgtgtgtggagggtgaggggaagaatgatccccattaactttgtatattgtttctgatgagtcatggagcatattcactaatggttggagaattattgattgcaaggcagaggattcaagaagagctattggcatatggcattaactgtctctagacatattttttatttttaaatttgaggtagagaaatcggtttttacgtagtgtttttcatattataaaaaataaacgtttatataagcattacagatacatccttgagg

SEQ ID NO: 41700 - DNA, 396 bp, Homo sapiens
ctatgtccaagtcaacaaaaacgatttgatttccacctgcccagtcccctttatcacctgtcctcccacagtcttccccatttcagtaaatggcaccaaactccactgggcatgtaagccaaacatctaagattcacttcgagctctttcctttttctcaaccttcacagggaatccataaacaagtcctactaattctacctccaaaacagatccatttctctgcaactatgctccaggctagcagttctcaactgggagcaatttttcccccggggacattagaaaacgtctggagacatttttggttgtcatgactaggagggtgctaccagcatctagtaggtagaggtcagagatggtgctaaacatcctaaaacgcacagcacagcccca

SEQ ID NO: 41701 - DNA, 273 bp, Homo sapiens
cctctcttctacatcaggcacattagaggaaccaaaaccatactcctacaagtaagtgaggtgcccagctctcaggccacctttgcatttctgaaagtgagggtccatgcagaaaactgttacagaaacatgactggcttttaggagcacagccgtgatcattttcacagcatatgcttctccaaaagcctagacaataatgatttctattttattttattttatttttttatttttttaagacagagtctcacgctgtggctcaggctggag

SEQ ID NO: 41702 - DNA, 237 bp, Homo sapiens
tctgaaatgccttctcctgtggttgcctgttgaagtctgtctcctctccagagtcctgcccaaattacctacctctcaacaagactttcctgagatgtctcatcacaggagactcttttcctccctgaggagattatcgatgtatttatctcagaatcttccattttgagaggctgaggcaagaggattacttgaggccaggagtttgagaccagcccgggtaacatagcaaacccc

SEQ ID NO: 41703 - DNA, 409 bp, Homo sapiens
aactggcttgaaacctgtgacaattctagtcagtaaaagtctaaagctcttctcatgatttttactaattcacaagaattacaccctccagcacctagagttcaagccacctttcatgctctttgcattgtatatactggaaggaccagacaaaaatatggcagggcaccatatgccatatcaggagctgggcagtttctgccttcaaggaactcaagattaggcaaggaatgtgaaacaaaaaatgccaactatgtgccaggcagtatgctagatcctagggatactgcagtgagcaaggtaaatatggttccttggcctcaggaactatagtccatacagagtgaggataacccttaattatcagtgctcagaagtggagtcctatagggagtctcccaaccttttt

SEQ ID NO: 41704 - DNA, 641 bp, Homo sapiens
gtacattccagtttttttccagctccagcactttagattctgagccgtttcagtaaatccagcaataagctccttatttctgttatttcagaatcagtggataccatggctagtgtccactccttcgcatttctctgagaaattttcaggaagatagaaatgaacatttattaaacgtactagaaaatgtactttatgtacaatgtaccttttaatccttaccacagcctgctgaggtagggattactagcaacattgtacaaaaataaggccaggcatgattgctcacaggggtaatcccagtgctttgggaggctgtgagcccttgagcccaggagttcgagatccctctgtgcaacatagtgagacctcatctctacaaaaaataaagattaccagggtgtggtacagcaaaccaccatagcacatgtttacctgtgtaacaaacctgcacatcctgcacgtataccctggaacttaggaaaaaaaaaatattagcagtgtgtggtagtgcatgcctgtagtcccagctacttgggaagcagagggaggaggatggtgttagccaaggagtttgaggttttggtgagttgtgattgtgcctctatcctgggctatagaacaagaccctgtctcaaaca

SEQ ID NO: 41705 - DNA, 808 bp, Homo sapiens
ctaattaaactgagaacataattttacatcttcatataggctaagaaaaacttttggaagaatgatggtgatgggtttgcaggaagcagttttcgtcccctccttgggtccctgtgtgagctctggcatctttttgtggaacagcagccaaggttgaagatgaagccaaggtagcagtgaaacagccctttcgtgatgtagtgctaattggccccacagggaccattctacccaaatgagttcatcaactcaggcaacatatggtcaccaatcaaaattctaaaggttgattaaatgatttactaatatattgttttgcttgctatttatatattgacttttttaaggcaggtagagggtgaaccatccagctttattgattagttctgactctaaatgtcaaatggggaaaaaagatgaaataaattgctatagtaactattttgtgatgttggaattagctgcatttgaaaacattataaaactgaagaattcatacacggatatatgaaaaggcaattcctgataaaatacagacaggtgtctgttctagtcaatcaaaatgtaatttccccataattatgcacagagtgaaaagaacttaggaaatatttaatatgcagaggcttatcatgataactgacaactactgtaggaaatccacatctaattctcctacagaatgccaattcaagactgagctcagtaaagggctctgactcacttaagaaataacaatttactcttcattaatgaaagagcctatcatatagcctaagaaaattatttcagttagcctcaaattaga

SEQ ID NO: 41706 - DNA, 382 bp, Homo sapiens
ctaattaaactgagaacataattttacatcttcatataggctaagaaaaacttttggaagaatgatggtgatgggtttgcaggaagcagttttcgtcccctccttgggtccctgtgtgagctctggcatctttttgtggaacagcagccaaggttgaagatgaagccaagggcatcaccaaaaacttgaagatgttgagtttgaccaaataaaaaagtcgaggatattacggcatttactacactatgagtcatcatcagcttccctgctagactgcgcacttcgtaagaactgtatcttattattcgtggcatccccagcactgtacctgacacacaagagggactcggtaaatgtttgctgaataaactagtatattaat

SEQ ID NO: 41707 - DNA, 265 bp, Homo sapiens
ctaattaaactgagaacataattttacatcttcatataggctaagaaaaacttttggaagaatgatggtgatgggtttgcaggaagcagttttcgtcccctccttgggtccctgtgtgagctctggcatctttttgtggaacagcagccaaggttgaagatgaagccaagactcaccctgaattcatttttgtgcgagatccaagaaccctctcttggggtctggatgaggacctctttcctgtaacaaaaggataacttaaagc

SEQ ID NO: 41708 - DNA, 241 bp, Homo sapiens
actgcatagcaacatatggtgaaaatggactttttacagtaatactgaatagaaatacctagaatagtctctctccttatagtcctcgtaaaacctatgttataaaccttaaagacagcacaaatagtacccttcctgtgaggcaggccctggaaaaactgtatgttttctccttttcactttgaggatattacggcatttactacactatgagtcatcatcagcttccctgctagactgc

SEQ ID NO: 41709 - DNA, 416 bp, Homo sapiens
ttgaactaattacaaatcccaaaacttgtcttcgctgactcatccttcagggagtgagtgcagttagcattgtggtaaagaacatgaaagtcttcagttttaaatatccacaatttccaaatatctgtgttgtctaaatgaaccattttattaagaggtataatttagccctcttcctaaagatccatggactctccttttgtcaggttctacccctataaaattcctctagatttctgcatttaccataacagcatcggaacaattccaagcacactgaaaggaacttttgagaggttaagaacaagcttaggtgaaggagaataaccatgatggaggggaaagtagccaggagagatcgacccagtctctgtgatagggaaagggagagggctgttcaagtgacacatgtgctc

SEQ ID NO: 41710 - DNA, 433 bp, Homo sapiens
ataaccattccattaagggtccttgtagctgaaatgcaggcagggtggcccttgaatgcatatgaacccatgtgatgttgaatgtctagaatttttttttgtggagagataagagtattttctttccccacttctcccatttattgatgttggagaatcatgccagagctagtggccttgatatggctctttctcagtctcttttgagatggaattcaaatttgctatccccagatgcggtttaaaaggctggcaaagtgttgtcatcaagtgagcgatgattgtggatatgatgctaccatttgatttggggtcattggatgccctattcctgattaaggagcactgatgttatcaatgggaaaagtgttcctctggggctccttaaatatagttgcagtgtttatggggaaggggacttgtccctgtgtgt

SEQ ID NO: 41711 - DNA, 273 bp, Homo sapiens
atttatgctaaggcaccaacctgataaagaattcaaacactgaggaaactatctctccaaaactttcttctatggactgttaaatggggcttccctctggctttggactgggttcagccagtgggaaacaccagccggagactggaagacaggaggcgagagaccaagacacatgttccgccggctcctctctcccaggtcaccggggttccctgcaatcccgccaggcagccccctctggacagcagtctctccagatcccctttcctctcc

SEQ ID NO: 41712 - DNA, 812 bp, Homo sapiens
actcagcataggactcttttgagtttatcctacgtggagtttgttgacctttttatatatccatgtcttccctcaaagttggggagttttggccattatttcttcaaataagctctctgcctctttctttccggtataaagattagtgtgggggtgtctccattgttcttttttttcccctcaaacttagagctggaagaaaccttagacatcctgtgggccagaatttcatattaccttccacaaaactaacttccagagaggtcttcaggaagttggcaaattttagttacgtatttttaaagtgtctttgaacttttaagaactacatctcgttaattatatgtattcgtatatattattatccaaattttaacaaattagagtgcattggtgctttaaagtgctgtcaactactctgagaatgcaaaattcttgttttaaaatgtgtatcttacaactccttccttggatgaattagatttttttagatggagaaaccaaaatcaagtacagccataccttggagacattatggtttggttttgttttaggaacccaggctggtcttgaattcctgggctcaggcagtcctcccacctcagtctcctaaagtgctaggattacaggtgtgagccgctgcacctggcccagcatgggttcttttccataccaccacaataaagcaaatattgcaataaaagaagtcacatataaaagttctgttttcactatactctggtctattaagtgtgcagtaacatgtctaaaaaatgcacgtgtcttaattagaaaatgcttcattgctttaa

SEQ ID NO: 41713 - DNA, 599 bp, Homo sapiens
tttttttttattttcagtagagatggggtttcaccagttggccaggatggcctcaatctcctgacctcatgacccacccaccctggcctcccaaagtgctgggattatagacatgagccaccacgcccagcctaaagctcaatttttaaaggacagcacctgacttcaaaaatcctaaggttcttctctcagtgccttgagatctgccatcatttaaaacatttgtgttgaagacttttcaatcttattaaaatatttggctatattaaagtcacatgacattagccgatgataaatatttctcctccccagccctgatttatgaggaccagctagtaaatagtctctgattcaaacagtgattaaccattattcatgaagcaaaatgagcctgccatgtcatgtcataaatttaatgtaatctcatcttgtttcactttttttattcacagtttccttccaaatttcatcttctcccatctccctacaaacttcaaaagaggtgtacaaaggaacttaagagccattttctgcttacccacctctttagaaggtggggaggatgactcaggaaaatgcagtaactgactgatgctaat

SEQ ID NO: 41714 - DNA, 281 bp, Homo sapiens
ctcaaacctaaggcagtgccgactactcatggctggtttgttattctctgccctctctttcatcattccagctggccagaactacaaatatagaaatctttcacttggacgttctgcttcttggttattacatgtttccttccaaatttcatcttctcccatctccctacaaacttcaaaagaggtgtacaaaggaacttaagagccattttctgcttacccacctctttagaaggtggggaggatgactcaggaaaatgcagtaactgactgatgctaat

SEQ ID NO: 41715 - DNA, 690 bp, Homo sapiens
gacaaggtgtcgcttgtcatcctggctggagttcagtggcacgatcatggctcactgcagcctcgatctcctgggttcaagcgatcctcatgcttctcgattataggttgcacaccaccatgagccacagcgcccagcctgatgttttatttatagggtgcactcttcattgtttaaatgtctatttttagatgttgatagacctttgtaggtagtttcacccctgtctttggttctcttgcactgtttgccccatatcattctaaatttttacccaaatgggttttcaaggaccttgctcctcctgcctgtggggaagtgggttacaggttagcaatagttgaaactcccctactgtttttcccagcttagcaggggtggttggagaccagccccaatactcctgagagcccatagagacagtccctggctcagcactgaggacatcttgcaggcagggttggctgagtgttttatggagcgagcttaagaggagatgttctaaaaccagagaggaaacatttttctctgttctctgcaattcagcaggtgatatcccttcatggatttataataaacacagtcctctcattgaccaaggttgaaaaactcagaaagtttgctcagcacagatctgggagtcaggaacgtactatgtgctgtggaagacatttcaactcctctttcaag

SEQ ID NO: 41716 - DNA, 1173 bp, Homo sapiens
caaaaacattagttcacacacaaacattgttttcaagcaatggtgaactagacccctggtcaggaggtggagtaactaaggatatcacagacactctggttgcagtcaccatctcagagggggcccaccacttagatctccgcaccaagaatgccttggatcctatgtctgtgctgttagcccgctccttggaagttagacatatgaagaattggatcagagatttctatgacagtgcgggaaagcagcactgagaaacttttgattgttttcaatttcttcttttatgttcacaccaccacattcccattcactttgattttctacatgtaattaccttcttttgtttatcattagatttgatggggccaaagttgagatagaatagagggtgatgacggtaagagcaagtgtcccatgaatgtgatttcctgggttctcactgtctttgcaccacgtctaggaagaatcttcttgatagctctcccacaccatcagtggccctcataactggagtagagttcctggttgcttttcataagagggagagttactttctttgtatctctgcaagcagagatttctctttggttttgaggttgaagtgtctttggcccatttgtaagtccccatccctaccctacacaaagtaaaagcagaagatagataaaaaatgatgtaattgcagctggtaggatgtctggtgccaatccaggaagtgagagccatttcttttgtactggatttaatgactttgaactgtgctgtaaataaataatacagctggaccttaaaaaaaaaaaaaaaaaaaaaaaaataaaaaagaagaaaaaggagggggggcgaggagaaaacgggagcacgccaatgacgggcccgacactggaaattcgcccgacggcgggaacaggagctggcagaataaaacaagtatcggggggcccagtggcggccacaaataacgagaggatcaataaacaaagacacggcaccaccgacgatcttaccaacacagacgaggcgccaaacaaactccgtatgagtacataggaggaaagacaaccacacttggggagaaacaacaagcggagaacaccccaagcagataagcgccaaagaaacaagcataggaggcacaggaacaaccggggtaatacgggcaaacacacgaag

SEQ ID NO: 41717 - DNA, 793 bp, Homo sapiens
caaaaacattagttcacacacaaacattgttttcaagcaatggtgaactagacccctggtcaggaggtggagtaactaaggatatcacagacactctggttgcagtcaccatctcagagggggcccaccacttagatctccgcaccaagaatgccttggatcctatgtctgtgctgttagcccgctccttggaagttagacatatgaagaattggatcagagatttctatgacagtgcgggaaagcagcactgagaaacttttgattgttttcaatttcttcttttatgttcacaccaccacattcccattcactttgattttctacatgtaattaccttcttttgtttatcattagatttgatggggccaaagttgagatagaatagagggtgatgacggtaagagcaagtgtcccatgaatgtgatttcctgggttctcactgtctttgcaccacgtctaggaagaatcttcttgatagctctcccacaccatcagtggccctcataactggagtagagttcctggttgcttttcataagagggagagttactttctttgtatctctgcaagcagagatttctctttggttttgaggttgaagtgtctttggcccatttgtaagtccccatccctaccctacacaaagtaaaagcagaagatagataaaaaatgatgtaattgcagctggtaggatgtctggtgccaatccaggaagtgagagccatttcttttgtactggatttaatgactttgaactgtgctgtaaataaataatacagctggacctta

SEQ ID NO: 41718 - DNA, 445 bp, Homo sapiens
tttaataaaattcaacatcccttcttgacaaaaactctcaacaaactcggcatagaaggaacatactacaaaataatcaaggccatatatgacaaacccacaactacaagaaaactacaaaacactgaggaaataaatggaagggggccaggtgcagtggctcatatctgtaatcccagcagtttgggaggccatgggaggatcacttgactcaaggagtttgagaccagcctgggcaacatagtgagaacccatctctagaaaaattttaaatttttataaaaaaatttttaaagaacgaaatggaagaggacaccaaacaaaagaaaagacatctcatgctcatggattggaagaattaatactgttaaaatactgcccaaggcaatctacagattccattcaatccctatcaaaataccagtgtcattttcacagaaataga

SEQ ID NO: 41719 - DNA, 576 bp, Homo sapiens
ggggtttgtttgggaaaccgtaaggtatatatggctcagcagagggataacaaggttttttgtgtaatcaaaattcaaaggtatactgtagaatagaacaaccggaattacaactcagaataaattcttagaattactaacagaaatgtgaaaagtcctgatggagatgtagaaagcgactggggacagatataggacccttcaatcctttctttcccactgctgcggttctcagcgcagctgtccctgggacaccagacaccgtgatgtagaatgaaagcatcttgttcacccaagtgacctgctaacgtgagaattctcattttgagacattaaaaacacactttggcaggccaaggctggcagatcacttgagcccaggagttcaagaccagcctcggcaacatggtaaaacccatctctacaaaaaatacaaaagttagccagtcatggtggtgcgtgcctgtggaaggctgaggtgggaggatcacctgaccctgaggcggtcgaggctgcagtgagctgtgaacatgctactgcactccagtccgggtgacagagtgagaccctttcgca

SEQ ID NO: 41720 - DNA, 367 bp, Homo sapiens
ttctcatgaggcataattagctaggagatcttctggttacctatagtctatccattctggcacacctatttccctgagtcttttcattctaccatcactatctgccatagcaattccggcatgtaagctttctttggcataggtcatcactttttccatgcttctaggatccatcctggtagtaagattgtaccatctcctattgtccttgccaggatgttaaatcttgtattttgaaagagagattcctgccgggcgcagtggctcacacctgaaatcccggcactttgggaggccgaggcaggcggatcacaaggtcaggagttcgagaccagcctggccaacatggtgaaatcccgtctctact

SEQ ID NO: 41721 - DNA, 408 bp, Homo sapiens
taccaagccgcaaaagagcccatgtactctttggacattattggttcataaaatgtctggagatttattctagaaaacagaagtctcgtgtgttgcatgtcaagctgaactaaatcagcctggcgtgatgaactagaggactgtgtcgggacagtaggaaagaatccatgaaaaaggattgtccttggcttagggtgcaacccaactctccccacatcagccatgtggttctttctttctttctttctttttttttttttttttttgagatggagtctcgctctgtcacccaggctggagtacagtggtgcaatctcggctcactgcaacctccgcctcccaggatcaagtgattctcctgcctcagcctccccagtagctgggattacaggtgcatgccaccacacc

SEQ ID NO: 41722 - DNA, 282 bp, Homo sapiens
atcaaataggtctttttcttcatggtgatcattcttagccagggttgatttccaaggtagaaacattcacgtgtattttcttccagcatttttacagtctcaatttttacatttggacaggcagcctgtagtagctggaaaaaaatacataaataaataaatttttagatttggatctttaattcatccagaatttattctgatataagatgtcaaagaaggatctaaataattattttttttcaataattagctggttgtccttgtaccgtttatttagtc

SEQ ID NO: 41723 - DNA, 412 bp, Homo sapiens
gtgtgttcctcaaggagcctgaacacggtgattggaacagagacttcagggacagctgctgtgggagtcacagaagcaacagttcccttccatcagttccccaaagggtctgggactaccatgcttcactccagcctctcacatgctccaccttggcaggttgggcttctgtgaatttattcctcctttgtgaccaacctgattttaacttaatctcacccattagacatgacatgtccagagagaggaacattaaggagaacatggtatatttggccccaaacctaaattctcccttgagttgaacctggaaaaactaatcctgagagaggaaagaaaaaaaggaatgattgaacaatttaattaatttttaaaaattaaaaattaaagggaatatatcatttgtcataga

SEQ ID NO: 41724 - DNA, 402 bp, Homo sapiens
gatatttgatgatattgaggaattattgtgaatttttagtgtagtaatgatattgtggtttgtataaatatatttagggataatatgatgcctcagatttgctttaaaataacacaggatgaggataagtggtaggactgcaagggaaacaagactggccatgagctgataactgttgaaggtgggtactgggtatataagggctcaccacaccattctcttgatttgtgtctatttcccataataaaaagtttaaagagagagaaccgatgaaggggagggagagagtcaagcacacaataagagtgacaaacagtgccaaatcagcccacagtattaagttttcacatatttacataaatatcacctggaatgcaatattgaaattaatgtatatcacta

SEQ ID NO: 41725 - DNA, 2973 bp, Homo sapiens
ccccaaatccagtgaaagaaattctcccagtaaaagttgcttcctaactctgtttttctcagaatacctcttacctttctcaaagaaagcttcaaccaccatcatcagaaagaaggtggcctaaaaactgacacatggccagtgcccggaggggtctggaggcataagtctagatgcccagagagcatccaggcactgaactgctcagagcttgagatgaaatgacatacaagcttcagggtaaaactgtctactagcaagattacctccctcaattctaccattgcagatttcttctgaccccaaatgcaaccttacagagaatgctgaatgaggaaggccaattccttacaatgatggcagaacccccaagcgaatgccctattgaggagaaggacatcactgtatttggaattctgcctgctagtgatagctcacacatcacatcccagaatcccactcccaatgcattatttcctgaggcaagaacttaaggtcctcacctaattcctccatcacaaccattaactcttattggacaagctcctcctgtgagtggggcctgtactcacttcctcttagatcataattccatcttcaagagactgatttccagaatagtaatctttttccagcgttctctcttctccaatgccctggttgttatttttcccacctctcctaatattgatcttcttgtcttttggttagaactgcaacttcggagttgagttcatttcctattgctgctcaattcagtagcaacatagctggcttgttcccagacccaggaagtataagtcattgacagtttcctgagtggctctgccaatccataccacccttggtactgtgaaaaaggcttcttgggcagccaggtggcattgaggatggtattcagggcgctttccttctgtcatataagttgtgggatctctaccaagtgtgaaggtgaatgaggtaagggagatcagaaccatgcttcctggtttttcatacatccaaggaagaagtcctggtgtgggttgtttgacaccttctttccactttcaccttttattttttattccttcctttctacccccaaccagtcgagcaaatgagcaattttgtgtttctaatacaggatctggaagtagtgctttctaatcctcatttcctgtaggatgttcctgcactataacaagattatgttttcttccttctgcagcagctttctgcttcttgggtactactagctattgttcaattcaggtgaggcctgtgatgacatatatgtagcatgtgctctgcgctccctgcaagctgagcagatacaaccaatgcatcactgtatactcttgctgagaatgtggatgcagcctcacagatctttgcaacactccaaccagccaggaccagttgatcagaactgatcttattggtctgataaccaatcttatttgtgaactgattcatatctgtctttccactcttggttctcttgccgtagaacaaaaacagtttaggaagcataattacgaacatttaggaaccaatatgtataagtaattcggagactccaattcacctgcccctcccccatcccaggttgtggaggctcgaggaagctgacttcttaggctaaaggacaaaaaaatctctttacctccttggccattttcatgttctctgccaattactataggcagtcttcattttgcagaggtgaggtaagacttcatcttattcttcatgtaatcccaccttctaacaaaaaataaataaatatttaaattccaaggagaagtgttctttgtgtatttctagcagaaaacagatgcttaagcctaagaaggaagatccgtccatgacaaaggaaagtggaaaactgaaccagttatctgaatacttcatgccaggacagttgctattagcaactgttttgcaccttcagggctttaaaatgggctctgcagacagcatttgcatatgcaagactcagtagccaagcctccactgccaattgttgaaggcagtttcagatcgccaccttttgaggtacatttctttaagcacaagagaagtagaaatggcctttgccttgtctccagtggtttgtccctctggtgcctcagcagataccagagcttattcttatgaccatttggaagtagtcctcaaagtaaagatcaagaaaaaattggattctttttccattttctcataatagtagcctagtcaacacaagactcccataaaatatgactcactattgggagccatactattttataagcttacttcctgctgacaaaactagctttcctcaaggaaatataaaggaggggaaagtcacatagtgttaggaaaacattcctgtgttttgaatacgatgaatccataggatagagaaaaatctgcttgttctattctgagagttctctgagatatcccttcactctgcttggcatttggccattgatattcaacaggtcactgaccaagcttttctaaatttttcagagagagttacttaccaataaggtctgttcttaaacctacctagttgattttcatatctttccataaagtgtcatgattctatcatagaccctgacttaacattgtaaggactatgagtcctccattttttaattaatttttttttagcaaattaggacttcggcaggttttcctctcctaaactcattctttcctccacaggattgctttgtccatctcctgctttcatttcaagtgcataaacaaaacctcaaagggcctgggaaggtgaggcaggccagagtctgtgttctgtgttgagtgtcaagctatttgttaagaaggtctgcaacaggcctttggtgtgggctctgccagagactgttctgaacactttgcttgagatccgtgccctgtaaaatggatatgatgttttactgatgtctgtaatacatttgtaaacttccaataaaatttgaataaaagaaa

SEQ ID NO: 41726 - DNA, 3191 bp, Homo sapiens
  misc_feature (3038)..(3038): n is a, c, g, or t
  misc_feature (3085)..(3088): n is a, c, g, or t
  misc_feature (3090)..(3090): n is a, c, g, or t
  misc_feature (3108)..(3108): n is a, c, g, or t
ccccaaatccagtgaaagaaattctcccagtaaaagttgcttcctaactctgtttttctcagaatacctcttacctttctcaaagaaagcttcaaccaccatcatcagaaagaaggtggcctaaaaactgacacatggccagtgcccggaggggtctggaggcataagtctagatgcccagagagcatccaggcactgaactgctcagagcttgagatgaaatgacatacaagcttcagggtaaaactgtctactagcaagattacctccctcaattctaccattgcagatttcttctgaccccaaatgcaaccttacagagaatgctgaatgaggaaggccaattccttacaatgatggcagaacccccaagcgaatgccctattgaggagaaggacatcactgtatttggaattctgcctgctagtgatagctcacacatcacatcccagaatcccactcccaatgcattatttcctgaggcaagaacttaaggtcctcacctaattcctccatcacaaccattaactcttattggacaagctcctcctgtgagtggggcctgtactcacttcctcttagatcataattccatcttcaagagactgatttccagaatagtaatctttttccagcgttctctcttctccaatgccctggttgttatttttcccacctctcctaatattgatcttcttgtcttttggttagaactgcaacttcggagttgagttcatttcctattgctgctcaattcagtagcaacatagctggcttgttcccagacccaggaagtataagtcattgacagtttcctgagtggctctgccaatccataccacccttggtactgtgaaaaaggcttcttgggcagccaggtggcattgaggatggtattcagggcgctttccttctgtcatataagttgtgggatctctaccaagtgtgaaggtgaatgaggtaagggagatcagaaccatgcttcctggtttttcatacatccaaggaagaagtcctggtgtgggttgtttgacaccttctttccactttcaccttttattttttattccttcctttctacccccaaccagtcgagcaaatgagcaattttgtgtttctaatacaggatctggaagtagtgctttctaatcctcatttcctgtaggatgttcctgcactataacaagattatgttttcttccttctgcagcagctttctgcttcttgggtactactagctattgttcaattcaggtgaggcctgtgatgacatatatgtagcatgtgctctgcgctccctgcaagctgagcagatacaaccaatgcatcactgtatactcttgctgagaatgtggatgcagcctcacagatctttgcaacactccaaccagccaggaccagttgatcagaactgatcttattggtctgataaccaatcttatttgtgaactgattcatatctgtctttccactcttggttctcttgccgtagaacaaaaacagtttaggaagcataattacgaacatttaggaaccaatatgtataagtaattcggagactccaattcacctgcccctcccccatcccaggttgtggaggctcgaggaagctgacttcttaggctaaaggacaaaaaaatctctttacctccttggccattttcatgttctctgccaattactataggcagtcttcattttgcagaggtgaggtaagacttcatcttattcttcatgtaatcccaccttctaacaaaaaataaataaatatttaaattccaaggagaagtgttctttgtgtatttctagcagaaaacagatgcttaagcctaagaaggaagatccgtccatgacaaaggaaagtggaaaactgaaccagttatctgaatacttcatgccaggacagttgctattagcaactgttttgcaccttcagggctttaaaatgggctctgcagacagcatttgcatatgcaagactcagtagccaagcctccactgccaattgttgaaggcagtttcagatcgccaccttttgaggtacatttctttaagcacaagagaagtagaaatggcctttgccttgtctccagtggtttgtccctctggtgcctcagcagataccagagcttattcttatgaccatttggaagtagtcctcaaagtaaagatcaagaaaaaattggattctttttccattttctcataatagtagcctagtcaacacaagactcccataaaatatgactcactattgggagccatactattttataagcttacttcctgctgacaaaactagctttcctcaaggaaatataaaggaggggaaagtcacatagtgttaggaaaacattcctgtgttttgaatacgatgaatccataggatagagaaaaatctgcttgttctattctgagagttctctgagatatcccttcactctgcttggcatttggccattgatattcaacaggtcactgaccaagcttttctaaatttttcagagagagttacttaccaataaggtctgttcttaaacctacctagttgattttcatatctttccataaagtgtcatgattctatcatagaccctgacttaacattgtaaggactatgagtcctccattttttaattaatttttttttagcaaattaggacttcggcaggttttcctctcctaaactcattctttcctccacaggattgctttgtccatctcctgctttcatttcaagtgcataaacaaaacctcaaagggcctgggaaggtgaggcaggccagagtctgtgttctgtgttgagtgtcaagctatttgttaagaaggtctgcaacaggcctttggtgtgggctctgccagagactgttctgaacactttgcttgagatccgtgccctgtaaaatggatatgatgttttactgatgtctgtaatacatttgtaaacttccaataaaatttgaataaaagaaaaaaaaaaaaaaaaaaaaactcgacttttgtgaacaatagatcttttctcccctttattttgttcncttgacacttttgtgaaaattacctagcctgataaaaacattttgtnnnnanttgtataatactgttatnaaatatttataatcccagaaaatgttgtgttaaatcttgtgcaaaaacagtatattcagaataaaagtttatcatttaaagtc

SEQ ID NO: 41727 - DNA, 569 bp, Homo sapiens
gcacacaccatttttattaagcagagtggcgagagcgcagtggctgtgaggtccttccaggaccccgcttgtggacagctcccagcagctgcagctcactcccagccccagctgactcccagaccctcagtgagccctgggctggatcaaagtacagggacgatcctgtgggtgcaccccagcatggcaagcttccaggagaccctagaccctggctgggggtcaggaaggctctcgcctccgtgcttctgagtccataggaattgagtctctggccacacgaggacagaatcagctacatctgaagaacctggagctagaagatgagggcaattaagtcatgcgtctcggcaagttcattaaaatgttgacttgctaatggtcccgggtgcaatttggaatgagggtgttaacatagagacttggtctattcgggaactccctggtctgaaaatggagctgccaagcttctaatatgccctccacagactagagctccgacagatgaattattaatgccgcatcatattaattgtattgatatgttaataattaacaacaatatgcta

SEQ ID NO: 41728 - DNA, 173 bp, Homo sapiens
gagcgttcacagtcagccctctgatggtggctggtgtcatggaggtggggaaaggatgcaccagtcctgagtcaggccccataacatctccctcccctgatgaagtggccccaaggcacacaagccagtcttgtgtggggtagggttaattagcataagggtacccctaaagg

SEQ ID NO: 41729 - DNA, 447 bp, Homo sapiens
ttcccttcaacttttaagttctggggtacatgtgcaggatgtgcaggtttgttacataggtaaacgacgtgtgccatggtgattggctgcacagatcaaccaatcacctaggtcttaagcccagcatgcattagctattcttgctgtcttcctgatgctctccccaccccacccccgctgacagggtttgtgttgttccctgccatgtgtccgtataccacattttctttatccattcatccgctgatggacacttgggtcatttccaaatcttagctattgtaaatagtactgcagcaaacatgggagtgcagatatctctttgatatactgatttccttttctttcctttccagcagtgggattgctggatcatgtgacagctcgatttttctttggctttttctttacaattttactttgcctttaatttttctgaggcttact

SEQ ID NO: 41730 - DNA, 389 bp, Homo sapiens
aatttagtgtattagcctgttttcaggctgctgataaagacatacctgaaactgggcaatttacaaaagaaagaggtttaattggacttacagttccacgtggcgggggaagactcacaatcatgtcagaaggcaaggaggagcaagtcaagtctcacgtggagggcagcaggcaaagaggtaacttgtgcagggagactcccatttttcaaaaccatcagatcttgtgagacttattcactatcacaagaacaacatgagaaagacccgcccccatgatttaattacttcccacagggttcctcccagaacatgtgggaattatgggagctacaagatgagatttgggtggggacacagagccaaaccatgtcaactactaatcaaca

SEQ ID NO: 41731 - DNA, 341 bp, Homo sapiens
tatgcatagaactgcagtgattctaactaaagtgaataataattcaagaagcttaggctcttttaaaaacacactcatgaattctctatttaacatgcctcaatttagcaatttagtcaaaagtaaatattttccacctttatggtgattctgccatttccaaattcttcctcccaagtgctctcaattttgttgtgttgttttttttagaaaaaagtatcaccacagccctgttcaaatttaggtaatggctctctaaagcctccatgataacgtctgaatttctgacaaggtgcctccaagttttgttccaaattctcatctcactaatttttgtcata

SEQ ID NO: 41732 - DNA, 1206 bp, Homo sapiens
tggacttctggcctccagggctgtgagagaatacatttctgcagttttaagccacgcaatctgtgtccctgggaagcccaaatagggcgagaccttttgccaagtggtctccaagtgtcacgtcatcgaatccttctcccgggcttgtgccatagtctttccactttagagaggaggaaacggaggctctggggcacaaagccagtcagtggcggggcctgactttcaacccagcctgcatggggtcagagaacccactttccccgtggggcctgcggcctatgctaaggatgcttgttcatctctcctgggcccgggagtggttcttctggcctagaaggcaagagaagccagtctttcggtttcaaggtttcccattagtggagtcaagcaaaaatggtgtgttgcgcttcttcctgagctcagcctgtgagcacggccttaacatgctcagtggatcccaagacggcagcatggcggtgccagcctggcagccttagctccttgcagctgtgcttgtgaagggagcagtgagtggcttccctctgtgaccaccttgggtcctaagtttcactggggctgggatccatgcgtcttgcaattggctaggaatttcccgggctttccctcccttccctgttcagggcactgggtgtgaggcattgcatccgttcttctgctcacctgcttccccctaagagtgtgagctgtataaaggcaggaaccaaacaggagcctccacgtgttcccagttcaagggcagtgtcccttgtgtgtttcttcaataattcagtggatgacttattctgcacggacactgcacacactcggccctgccgtctccggagctgggaggtgtggagctggctcctgacctatttacacaccgaggagggatgtggaaaacaggaggagtcccagggctccaatgcaaagaggagcctcttcattccctctgccgtggccgtgcaagggacagcgccttgtgggattgtgtcctccacccaattatccttagcattagtttgctaaggataatggcctccagctccacccatgtccctgcaaaggacatgatctcattcctttctgtgtctgcatagtattccatggtgtatatgtaccgcgttttctttatcgagtctatcattgatgggcgcttcagttgattccatgtctttgctactgtgactcgtgctgcaatga

SEQ ID NO: 41733 - DNA, 284 bp, Homo sapiens
cataacatatgatctcaagtccatcaagttggatgttgtatctacacaaacaggacttagaaggacatgtgaaactaaattgcttgtgattgtggatggctttgttctttgcttctagtggttttcagtttcctgtaatgcacacattagcttttaaaaagtgaaggttattttttaaaacctgtaaaaaaaaaaaattccaggtgacgctacatcataaggttgagagccactggggtaagttgctgactctggtatgtagttagtatttattctaagtgcaa

SEQ ID NO: 41734 - DNA, 405 bp, Homo sapiens
gcctgaattaggagggtggaagggagagaaattctggaggacttgtgggatttggcagttgaatgctaagtatgaaagaaggagggaaaaaaaaaagttgaaggcagctttaagattttatgcctaggctaggtgtggtggcttacacctgtaatcccagcactttgggaggctgaggcgggtggatcacctgaggtcaagagtttgagaccagcctgaacactgcagtgagccatgatcaccctgctgcactctagcatgggtgacagagtgagactcaatctcaaaaagcaaacaaaaacaaaaaacaagcacaagaccagtgatagagtttcctgtggaagggaggaagacacttctttctcagataaaacagtgaaaaagagcaagatgattaaaaaaaaa

SEQ ID NO: 41735 - DNA, 681 bp, Homo sapiens
ccctctttctctggcctccctccatggctgctacctgatgtcagacttgttccagatgagcttctgtctgcactggccctctccccagctagaatggatgccacgggagactgtgaattgcagctgcctcatttgcgactgcaccccctttgcccatgctctccctctcaccccgcttccttctccctctggggtgtccagagagactcaggaaaggcaggtggatcaaggcgggggtttctaggcaacctctccactgtcatttctctcctgtcttgcagataccgggtcaagtgtgatggtgagggaggatactggtgtccctttcacagctgcgcaaaagagagcagatggaacttgaacttggccgaggctgccacccaggatggctttcaaaggacattttctaggatggcgcctcctcctctgctcccactacctccctcgagagaagggctgttctgggtttattcttgcctcccctgtaccacctctccatatctggccaattcatttgttcattcattcattcattcattcattccacacaaatctgctgagcacctcccctgtcctaggcccttgaatacagaagtgaatgagacagatatgcttcctgccctcaagctactgattgtctagggaagacagacagacaacaaacaagggaataaatacaga

SEQ ID NO: 41736 - DNA, 615 bp, Homo sapiens
ccccgactagcccgacagtccccgactagcccgacagtccccgactagcccgacagtccccgactagcccgactgcaccccctttgcccatgctctccctctcaccccgcttccttctccctctggggtgtccagagagactcaggaaaggcaggtggatcaaggcgggggtttctaggcaacctctccactgtcatttctctcctgtcttgcagataccgggtcaagtgtgatggtgagggaggatactggtgtccctttcacagctgcgcaaaagagagcagatggaacttgaacttggccgaggctgccacccaggatggctttcaaaggacattttctaggatggcgcctcctcctctgctcccactacctccctcgagagaagggctgttctgggtttattcttgcctcccctgtaccacctctccatatctggccaattcatttgttcattcattcattcattcattcattccacacaaatctgctgagcacctcccctgtcctaggcccttgaatacagaagtgaatgagacagatatgcttcctgccctcaagctactgattgtctagggaagacagacagacaacaaacaagggaataaatacaga

SEQ ID NO: 41737 - DNA, 187 bp, Homo sapiens
cctgactgaaataattctataggagctctgaaaatcaatgaaagatctataacaatcaagcaaacaaccaagacaaaaccacatctgaaatggtgggaaatttcatgcatttttagttacccttgcctcactcagtttaggggaagcaggagcctggtcagtctccaggtccctttcatgaactaag

SEQ ID NO: 41738 - DNA, 645 bp, Homo sapiens
gaaatgtagtctccttggcctgcgctctgtaggagtggcagaacagtaagagaaatgacaaagcaagaggaacctaatactcttcctcattggccttcctgtctccatctttattccttccagctcattctctacatgacactgtgaatgccaaactgtctggaggctgccatgagcggccaatttgtgatctctgctttacctgaattatttccgtgaattgtgacatcaacctcgccagataagaaagaagactgaagttcagagaggtgaagggactggctcaggggctacccctatggttgcgggagctaagattccagcccagcagcgtgatccagagcccatctgagctacccagatcttcctgctgttaaacccgtcctggggcagctcttgcctgatgggctacctgaggaacccacaggaaatcaagggaggtgcctgcaaagttgccgtggggtcacagcctgccctttggaaggggctgtttctgggctgctgtgacttcctgccattatttcctctctgttctccctctggaatgaataaagtacttctgaaaaaccatcaacccagtcgatacggaaatgctggtccctacaatagaatgctctgtggtcattaaaaagattaaaaaggtca

SEQ ID NO: 41739 - DNA, 463 bp, Homo sapiens
gatttctgatcttgtttacaacggatttggaggtggctaactatcctgaattcccacaaataagaaagaagactgaagttcagagaggtgaagggactggctcaggggctacccctatggttgcgggagctaagattccagcccagcagcgtgatccagagcccatctgagctacccagatcttcctgctgttaaacccgtcctggggcagctcttgcctgatgggctacctgaggaacccacaggaaatcaagggaggtgcctgcaaagttgccgtggggtcacagcctgccctttggaaggggctgtttctgggctgctgtgacttcctgccattatttcctctctgttctccctctggaatgaataaagtacttctgaaaaaccatcaacccagtcgatacggaaatgctggtccctacaatagaatgctctgtggtcattaaaaagattaaaaaggtca

SEQ ID NO: 41740 - DNA, 525 bp, Homo sapiens
gaaatgtagtctccttggcctgcgctctgtaggagtggcagaacagtaagagaaatgacaaagcaagaggaacctaatactcttcctcattggccttcctgtctccatctttattccttccagctcattctctacatgacactgtgaatgccaaactgtctggaggctgccatgagcggccaatttgtgatctctgctttacctgaattatttccgtgaattgtgacatcaacctcgccagatcttcctgctgttaaacccgtcctggggcagctcttgcctgatgggctacctgaggaacccacaggaaatcaagggaggtgcctgcaaagttgccgtggggtcacagcctgccctttggaaggggctgtttctgggctgctgtgacttcctgccattatttcctctctgttctccctctggaatgaataaagtacttctgaaaaaccatcaacccagtcgatacggaaatgctggtccctacaatagaatgctctgtggtcattaaaaagattaaaaaggtca

SEQ ID NO: 41741 - DNA, 377 bp, Homo sapiens
gggttcaagcgattctcctgcctctgcctcccatgtagctgggattacaggcatgattgattaaaccattggccactggtgctcaacttgaccttcagccactctccactccctggaggttggcctttgtcttttggatcctgcacctggcaccacccagattgataaactggattatctgatcttgtggcccctacccagaaactgactcagcaccagaggacagcttcgactccctttgatttcatctctaacccaaccaatcagcacttttgactcactggcaccccacccaccaagtcctccataataactctgatccctgaatgcttggggagactgatttgggtaataataaaactctggtttcccatgca

SEQ ID NO: 41742 - DNA, 283 bp, Homo sapiens
aatgatatttttttttctcaccagtcatatttaccatggtagtaaaagtcctagccagtacagttaggcaaaaataaatgaataaaatgcatatatatcgggaagagagaaattaaacttcctctattcataggagatagattctttcatgtagaaaagtgtaaagaaattataaaaaaaactcctcggaccaatcagtgagtttagcaaggttgcagggtacaaagttaatatataaaaatcgattatatgccagcagtgaacaattggagtttgaaattaa

SEQ ID NO: 41743 - DNA, 617 bp, Homo sapiens
catttcctgttcctcacgcttctctctgaaaagactgagtttcccattctccagcctccaaatgcatttcgattttattgtccccaaatgtttcttttcttttttttgtttaaccacgtccctctgcccataattcattaattcatacagcagcatgtcctgattctttttctgggccaggcacggtgctcgatccccaatggaaggaaatggaggcagacccatcttgcaggtcatcaccaggaaggagatgagactcatgtcctggagacgaataccccactggaggtgagtgaggggccttggaagcagggccagggggttccctccacacctgctgagcatctgcctctctgggagggctttgggcgttgttggggcctgtcgggcctccaaattctggctttagatgggcactctgggattcccatctggcttcacctgcctaccagctggcctgccatagcctgggccctgcctcttctctgcgctttgcagaaatcatattctcagtccttcagctgtggctcaatacatgttgttctcaaatctcatgacagtttctttaagaaatatctactgatttgaaaattcccgccttatttgaaaaaaaaaaa

SEQ ID NO: 41744 - DNA, 1096 bp, Homo sapiens
tggagctataggacctcatacttaataggaaattgacagctacagatgaccaacaacccacaggagctgatgctgcagatgaacctgctggaactcatccggaagctgcagcagaggggctgctgggcagggaaggcagccctggggctaggaggtccctggcagttgcctgctgcccagtgtgaccagaaaggcagccctgtcccaccatagccacaggcagcagaagtctgggcagagttcatcttcttgacctttggccactgccttcccagctgcccgcagggggttccccctgctgaggagagaccaggtggaccccagctgcctgtcacccttcatctgggacttgctgtcaaaccctaggatagtctcataaaggggaggctgggccagcctgctgctgtctgcttcagggccaggcagagagtgaggctgggggttctcacaccttactccaccgggcacatcccaacctgcactggggcccactcgagtgcttgttctggtctcagccgctcccttggcagctgcagcccccatgcagaagaggctcccaggcccaagctctgtgtgacccagagaaataaagatgcctcagtgtggcccgcaaaaaacacaaccacacaaacaaacgaagaaaaaacccaacaacaaacagggggagagaacaaaagacgccccaaaggggcccaagataacaagtacacaattattgtacaaggggccacaagagagaccgcgcaataacacagcgacgagacgcgccagacaataacccacgccaacaaggcaaacacgggcaaagagaacactgtggagaaacacacaccacacagcagggcgacaaattgccacacacaccacagaagataacaccgaagggaaaataaaaacccaggcgcggataacacggggacaacccaccgcaaaagctacgaagcagagaagacaacgcgcgcgccggcctgcgcctcgccattacacggccagcgagaaaataccgagggaagcagcaagagcagcgcaccgcaagcaagcgacacagcgagagacacgcgcggcacacacgcccagacgagagacccacaactac

SEQ ID NO: 41745 - DNA, 1158 bp, Homo sapiens
gggactgtcgtaaaaggggcgggacgcgccgcggtcgggatgacgtgagctgggggcgctcgtcgctgcagccggcggctagcgggcgtccgcgccatggagcgctacgcgggcgccttggaggaggtggcggacggtgcccggcagcaggagcgacactaccagctgctgtcggcgttacagagcctggtgaaggagttgcccagctcattccagcagcgcttgtcctacaccacgctgagcgacctggccctggcgcttctcgacggcaccgtgttcgaaatcgtgcaggggctactggagatccagcacctcaccgaaaagagcctgtacaaccagcgcctgcgcctacagaacgagcatcgagtgctcaggcaggcgctgcggcagaagcaccaggaagcccagcaggcctgccggccccataacctgcctgtgcttcaggcggctcagcagcgagaactagaggcggtggagcaccggatccgtgaggagcagcgggcgatggaccagaagatcgtcctggagctggaccggaaggtggctgaccagcagagcacactggagaaggcgggggtggctggcttctacgtgaccaccaacccacaggagctgatgctgcagatgaacctgctggaactcatccggaagctgcagcagaggggctgctgggcagggaaggcagccctggggctaggaggtccctggcagttgcctgctgcccagtgtgaccagaaaggcagccctgtcccaccatagccacaggcagcagaagtctgggcagagttcatcttcttgacctttggccactgccttcccagctgcccgcagggggttccccctgctgaggagagaccaggtggaccccagctgcctgtcacccttcatctgggacttgctgtcaaaccctaggatagtctcataaaggggaggctgggccagcctgctgctgtctgcttcagggccaggcagagagtgaggctgggggttctcacaccttactccaccgggcacatcccaacctgcactggggcccactcgagtgcttgttctggtctcagccgctcccttggcagctgcagcccccatgcagaagaggctcccaggcccaagctctgtgtgacccagagaaataaagatgcctcagtgtggcccgca

SEQ ID NO: 41746 - DNA, 1040 bp, Homo sapiens
gggactgtcgtaaaaggggcgggacgcgccgcggtcgggatgacgtgagctgggggcgctcgtcgctgcagccggcggctagcgggcgtccgcgccatggagcgctacgcgggcgccttggaggaggtggcggacggtgcccggcagcaggagcgacactaccagctgctgtcggcgttacagagcctggtgaaggagttgcccagctcattccagcagcgcttgtcctacaccacgctgagcgacctggccctggcgcttctcgacggcaccgtgttcgaaatcgtgcaggggctactggagatccagcacctcaccgaaaagagcctgtacaaccagcgcctgcgcctacagaacgagcatcgaggtgcgcgggggcagcgggaggaggtgccgcctcctcggggtcggcgcctcccggcagctcttggtatctgtgcagctcggctccttccttgggagtgttcggaagaggtccctaagattaacaaaatcaagggcgcagagactgagacagcgcctttttggtgaccaatgtgtccaacgagttttgttttcagttgcgcagcacccaccttcttagcagaaactccctgttcgggcttccctgtgccccagccccttccaggcctgatggccctaggcctccgtgcttggttggccggcaggctgactctggtggtagatctgactgcgttgccctccggtaattggagttctgttgacaggtgagcagcgcccttgggtagttggaggtctgttgacagctgtgcgcgcccttcagggtcagttccctctcaggcctgcagggcctcattctagttgcacatcaaattcctaagcactgtctcctgtggcgccctcccaaaccagaagagcttcccacttgagccgcatgcttcctgggcttcggagccctttcctgcaaattatatagggcaggtccccctgcaccatcagatttccacctttgctgttttatttttcccaaacttcttattttaaaagttcaaacatttggaaaaactgaaaagacagtg

SEQ ID NO: 41747 - DNA, 1496 bp, Homo sapiens
tatctggtataactattcttgttttatattttattatactggaacagctcgtgtcctcggtctcttgcctcagcgcctgggtggcttgccgcccacaccagccaccagaagctccccagccccggcccagcagctggtctggggagcggggagagggcagtctgggctcgcggttccggctgggggctgggcaccccggggcgaccacggcaggcccagatggggactccggttccaactctcctggcccagaggctctagggtggtcttgtctgtctcactccgggggcagagaggacgcagacagaccccaacaccactgctcggccgcgatggtgccttagacccaggtcctgtgggctctggcccgagacccctccctctgggaaggccggtgaccgggacagtccacctcgcaggcgcgccggcgcggagcccggacctcagcccgcaatgactcagcaagggccggtgggattctacatggtcctgcgatatccaggcgacggagtctcgcctctaaagtggcccggggagcaggaagctcattccagcagcgcttgtcctacaccacgctgagcgacctggccctggcgcttctcgacggcaccgtgttcgaaatcgtgcaggggctactggagatccagcacctcaccgaaaagagcctgtacaaccagcgcctgcgcctacagaacgagcatcgagtgctcaggcaggcgctgcggcagaagcaccaggaagcccagcaggcctgccggccccataacctgcctgtgcttcaggcggctcagcagcgagaactagaggcggtggagcaccggatccgtgaggagcagcgggcgatggaccagaagatcgtcctggagctggaccggaaggtggctgaccagcagagcacactggagaaggcgggggtggctggcttctacgtgaccaccaacccacaggagctgatgctgcagatgaacctgctggaactcatccggaagctgcagcagaggggctgctgggcagggaaggcagccctggggctaggaggtccctggcagttgcctgctgcccagtgtgaccagaaaggcagccctgtcccaccatagccacaggcagcagaagtctgggcagagttcatcttcttgacctttggccactgccttcccagctgcccgcagggggttccccctgctgaggagagaccaggtggaccccagctgcctgtcacccttcatctgggacttgctgtcaaaccctaggatagtctcataaaggggaggctgggccagcctgctgctgtctgcttcagggccaggcagagagtgaggctgggggttctcacaccttactccaccgggcacatcccaacctgcactggggcccactcgagtgcttgttctggtctcagccgctcccttggcagctgcagcccccatgcagaagaggctcccaggcccaagctctgtgtgacccagagaaataaagatgcctcagtgtggcccgca

SEQ ID NO: 41748 - DNA, 1688 bp, Homo sapiens
tatctggtataactattcttgttttatattttattatactggaacagctcgtgtcctcggtctcttgcctcagcgcctgggtggcttgccgcccacaccagccaccagaagctccccagccccggcccagcagctggtctggggagcggggagagggcagtctgggctcgcggttccggctgggggctgggcaccccggggcgaccacggcaggcccagatggggactccggttccaactctcctggcccagaggctctagggtggtcttgtctgtctcactccgggggcagagaggacgcagacagaccccaacaccactgctcggccgcgatggtgccttagacccaggtcctgtgggctctggcccgagacccctccctctgggaaggccggtgaccgggacagtccacctcgcaggcgcgccggcgcggagcccggacctcagcccgcaatgactcagcaagggccggtgggattctacatggtcctgcgatatccaggcgacggagtctcgcctctaaagtggcccggggagcaggaagctcattccagcagcgcttgtcctacaccacgctgagcgacctggccctggcgcttctcgacggcaccgtgttcgaaatcgtgcaggggctactggagatccagcacctcaccgaaaagagcctgtacaaccagcgcctgcgcctacagaacgagcatcgaggtgcgcgggggcagcgggaggaggtgccgcctcctcggggtcggcgcctcccggcagctcttggtatctgtgcagctcggctccttccttgggagtgttcggaagaggtccctaagattaacaaaatcaagggcgcagagactgagacagcgcctttttggtgaccaatgtgtccaacgagttttgttttcatgctcaggcaggcgctgcggcagaagcaccaggaagcccagcaggcctgccggccccataacctgcctgtgcttcaggcggctcagcagcgagaactagaggcggtggagcaccggatccgtgaggagcagcgggcgatggaccagaagatcgtcctggagctggaccggaaggtggctgaccagcagagcacactggagaaggcgggggtggctggcttctacgtgaccaccaacccacaggagctgatgctgcagatgaacctgctggaactcatccggaagctgcagcagaggggctgctgggcagggaaggcagccctggggctaggaggtccctggcagttgcctgctgcccagtgtgaccagaaaggcagccctgtcccaccatagccacaggcagcagaagtctgggcagagttcatcttcttgacctttggccactgccttcccagctgcccgcagggggttccccctgctgaggagagaccaggtggaccccagctgcctgtcacccttcatctgggacttgctgtcaaaccctaggatagtctcataaaggggaggctgggccagcctgctgctgtctgcttcagggccaggcagagagtgaggctgggggttctcacaccttactccaccgggcacatcccaacctgcactggggcccactcgagtgcttgttctggtctcagccgctcccttggcagctgcagcccccatgcagaagaggctcccaggcccaagctctgtgtgacccagagaaataaagatgcctcagtgtggcccgca

SEQ ID NO: 41749 - DNA, 1277 bp, Homo sapiens
gggactgtcgtaaaaggggcgggacgcgccgcggtcgggatgacgtgagctgggggcgctcgtcgctgcagccggcggctagcgggcgtccgcgccatggagcgctacgcgggcgccttggaggaggtggcggacggtgcccggcagcaggagcgacactaccagctgctgtcggcgttacagagcctggtgaaggagttgcccagctcattccagcagcgcttgtcctacaccacgctgagcgacctggccctggcgcttctcgacggcaccgtgttcgaaatcgtgcaggggctactggagatccagcacctcaccgaaaagagcctgtacaaccagcgcctgcgcctacagaacgagcatcgagtgccccgcaccttctggaatcccctggagacttgccgtgacagtggggtgggaggatggaggaggctggcgtcctccccagtgcagacacccctttggcctggctgctctgctgggttgtgctcaggcaggcgctgcggcagaagcaccaggaagcccagcaggcctgccggccccataacctgcctgtgcttcaggcggctcagcagcgagaactagaggcggtggagcaccggatccgtgaggagcagcgggcgatggaccagaagatcgtcctggagctggaccggaaggtggctgaccagcagagcacactggagaaggcgggggtggctggcttctacgtgaccaccaacccacaggagctgatgctgcagatgaacctgctggaactcatccggaagctgcagcagaggggctgctgggcagggaaggcagccctggggctaggaggtccctggcagttgcctgctgcccagtgtgaccagaaaggcagccctgtcccaccatagccacaggcagcagaagtctgggcagagttcatcttcttgacctttggccactgccttcccagctgcccgcagggggttccccctgctgaggagagaccaggtggaccccagctgcctgtcacccttcatctgggacttgctgtcaaaccctaggatagtctcataaaggggaggctgggccagcctgctgctgtctgcttcagggccaggcagagagtgaggctgggggttctcacaccttactccaccgggcacatcccaacctgcactggggcccactcgagtgcttgttctggtctcagccgctcccttggcagctgcagcccccatgcagaagaggctcccaggcccaagctctgtgtgacccagagaaataaagatgcctcagtgtggcccgca

SEQ ID NO: 41750 - DNA, 907 bp, Homo sapiens
tatctggtataactattcttgttttatattttattatactggaacagctcgtgtcctcggtctcttgcctcagcgcctgggtggcttgccgcccacaccagccaccagaagctccccagccccggcccagcagctggtctggggagcggggagagggcagtctgggctcgcggttccggctgggggctgggcaccccggggcgaccacggcaggcccagatggggactccggttccaactctcctggcccagaggctctagggtggtcttgtctgtctcactccgggggcagagaggacgcagacagaccccaacaccactgctcggccgcgatggtgccttagacccaggtcctgtgggctctggcccgagacccctccctctgggaaggccggtgaccgggacagtccacctcgcaggcgcgccggcgcggagcccggacctcagcccgcaatgactcagcaagggccggtgggattctacatggtcctgcgatatccaggcgacggagtctcgcctctaaagtggcccggggagcaggaagctcattccagcagcgcttgtcctacaccacgctgagcgacctggccctgctgaggagagaccaggtggaccccagctgcctgtcacccttcatctgggacttgctgtcaaaccctaggatagtctcataaaggggaggctgggccagcctgctgctgtctgcttcagggccaggcagagagtgaggctgggggttctcacaccttactccaccgggcacatcccaacctgcactggggcccactcgagtgcttgttctggtctcagccgctcccttggcagctgcagcccccatgcagaagaggctcccaggcccaagctctgtgtgacccagagaaataaagatgcctcagtgtggcccgca

SEQ ID NO: 41751 - DNA, 612 bp, Homo sapiens
tggagctataggacctcatacttaataggaaattgacagctacagatgaccaacaacccacaggagctgatgctgcagatgaacctgctggaactcatccggaagctgcagcagaggggctgctgggcagggaaggcagccctggggctaggaggtccctggcagttgcctgctgcccagtgtgaccagaaaggcagccctgtcccaccatagccacaggcagcagaagtctgggcagagttcatcttcttgacctttggccactgccttcccagctgcccgcagggggttccccctgctgaggagagaccaggtggaccccagctgcctgtcacccttcatctgggacttgctgtcaaaccctaggatagtctcataaaggggaggctgggccagcctgctgctgtctgcttcagggccaggcagagagtgaggctgggggttctcacaccttactccaccgggcacatcccaacctgcactggggcccactcgagtgcttgttctggtctcagccgctcccttggcagctgcagcccccatgcagaagaggctcccaggcccaagctctgtgtgacccagagaaataaagatgcctcagtgtggcccgca

SEQ ID NO: 41752 - DNA, 1076 bp, Homo sapiens
cggtccgggacatcccaaaggagccaaggctgggtaccagcccagtggcggacggtgcccggcagcaggagcgacactaccagctgctgtcggcgttacagagcctggtgaaggagttgcccagctcattccagcagcgcttgtcctacaccacgctgagcgacctggccctggcgcttctcgacggcaccgtgttcgaaatcgtgcaggggctactggagatccagcacctcaccgaaaagagcctgtacaaccagcgcctgcgcctacagaacgagcatcgagtgctcaggcaggcgctgcggcagaagcaccaggaagcccagcaggcctgccggccccataacctgcctgtgcttcaggcggctcagcagcgagaactagaggcggtggagcaccggatccgtgaggagcagcgggcgatggaccagaagatcgtcctggagctggaccggaaggtggctgaccagcagagcacactggagaaggcgggggtggctggcttctacgtgaccaccaacccacaggagctgatgctgcagatgaacctgctggaactcatccggaagctgcagcagaggggctgctgggcagggaaggcagccctggggctaggaggtccctggcagttgcctgctgcccagtgtgaccagaaaggcagccctgtcccaccatagccacaggcagcagaagtctgggcagagttcatcttcttgacctttggccactgccttcccagctgcccgcagggggttccccctgctgaggagagaccaggtggaccccagctgcctgtcacccttcatctgggacttgctgtcaaaccctaggatagtctcataaaggggaggctgggccagcctgctgctgtctgcttcagggccaggcagagagtgaggctgggggttctcacaccttactccaccgggcacatcccaacctgcactggggcccactcgagtgcttgttctggtctcagccgctcccttggcagctgcagcccccatgcagaagaggctcccaggcccaagctctgtgtgacccagagaaataaagatgcctcagtgtggcccgca

SEQ ID NO: 41753 - DNA, 1519 bp, Homo sapiens
gggactgtcgtaaaaggggcgggacgcgccgcggtcgggatgacgtgagctgggggcgctcgtcgctgcagccggcggctagcgggcgtccgcgccatggagcgctacgcgggcgccttggaggaggtggcggacggtgcccggcagcaggagcgacactaccagctgctgtcggcgttacagagcctggtgaaggagttgcccagctcattccagcagcgcttgtcctacaccacgctgagcgacctggccctggcgcttctcgacggcaccgtgttcgaaatcgtgcaggggctactggagatccagcacctcaccgaaaagagcctgtacaaccagcgcctgcgcctacagaacgagcatcgaggtgcgcgggggcagcgggaggaggtgccgcctcctcggggtcggcgcctcccggcagctcttggtatctgtgcagctcggctccttccttgggagtgttcggaagaggtccctaagattaacaaaatcaagggcgcagagactgagacagcgcctttttggtgaccaatgtgtccaacgagttttgttttcagttgcgcagcacccaccttcttagcagaaactccctgttcgggcttccctgtgccccagccccttccaggcctgatggccctaggcctccgtgcttggttggccggcaggctgactctggtggtagatctgactgcgttgccctccggtaattggagttctgttgacagtgctcaggcaggcgctgcggcagaagcaccaggaagcccagcaggcctgccggccccataacctgcctgtgcttcaggcggctcagcagcgagaactagaggcggtggagcaccggatccgtgaggagcagcgggcgatggaccagaagatcgtcctggagctggaccggaaggtggctgaccagcagagcacactggagaaggcgggggtggctggcttctacgtgaccaccaacccacaggagctgatgctgcagatgaacctgctggaactcatccggaagctgcagcagaggggctgctgggcagggaaggcagccctggggctaggaggtccctggcagttgcctgctgcccagtgtgaccagaaaggcagccctgtcccaccatagccacaggcagcagaagtctgggcagagttcatcttcttgacctttggccactgccttcccagctgcccgcagggggttccccctgctgaggagagaccaggtggaccccagctgcctgtcacccttcatctgggacttgctgtcaaaccctaggatagtctcataaaggggaggctgggccagcctgctgctgtctgcttcagggccaggcagagagtgaggctgggggttctcacaccttactccaccgggcacatcccaacctgcactggggcccactcgagtgcttgttctggtctcagccgctcccttggcagctgcagcccccatgcagaagaggctcccaggcccaagctctgtgtgacccagagaaataaagatgcctcagtgtggcccgca

SEQ ID NO: 41754 - DNA, 1642 bp, Homo sapiens
gggactgtcgtaaaaggggcgggacgcgccgcggtcgggatgacgtgagctgggggcgctcgtcgctgcagccggcggctagcgggcgtccgcgccatggagcgctacgcgggcgccttggaggaggtggcggacggtgcccggcagcaggagcgacactaccagctgctgtcggcgttacagagcctggtgaaggagttgcccagctcattccagcagcgcttgtcctacaccacgctgagcgacctggccctggcgcttctcgacggcaccgtgttcgaaatcgtgcaggggctactggagatccagcacctcaccgaaaagagcctgtacaaccagcgcctgcgcctacagaacgagcatcgagtgctcaggcaggcgctgcggcagaagcaccaggaagcccagcaggcctgccggccccataacctgcctgtgcttcaggcggctcagcagcgagaactagaggcggtggagcaccggatccgtgaggagcagcgggcgatggaccagaagatcgtcctggagctggaccggaaggtggctgaccagcagagcacactggagaaggcgggggtggctggcttctacgtgaccaccaacccacaggagctgatgctgcagatgaacctgctggaactcatccggaagctgcagcagaggggctgctgggcagggaaggcagccctggggctaggaggtccctggcagttgcctgctgcccagtgtgaccagaaaggcagccctgtcccaccatagccacaggcagcagaagtctgggcagagttcatcttcttgacctttggccactgccttcccagctgcccgcagggggttccccctgctgaggagagaccaggtggaccccagctgcctgtcacccttcatctgggacttgctgtcaaaccctaggatagtctcataaaggggaggctgggccagcctgctgctgtctgcttcagggccaggcagagagtgaggctgggggttctcacaccttactccaccgggcacatcccaacctgcactggggcccactcgagtgcttgttctggtctcagccgctcccttggcagctgcagcccccatgcagaagaggctcccaggcccaagctctgtgtgacccagagaaataaagatgcctcagtgtggcccgcaaaaaacacaaccacacaaacaaacgaagaaaaaacccaacaacaaacagggggagagaacaaaagacgccccaaaggggcccaagataacaagtacacaattattgtacaaggggccacaagagagaccgcgcaataacacagcgacgagacgcgccagacaataacccacgccaacaaggcaaacacgggcaaagagaacactgtggagaaacacacaccacacagcagggcgacaaattgccacacacaccacagaagataacaccgaagggaaaataaaaacccaggcgcggataacacggggacaacccaccgcaaaagctacgaagcagagaagacaacgcgcgcgccggcctgcgcctcgccattacacggccagcgagaaaataccgagggaagcagcaagagcagcgcaccgcaagcaagcgacacagcgagagacacgcgcggcacacacgcccagacgagagacccacaactac

SEQ ID NO: 41755 - DNA, 1122 bp, Homo sapiens
gggactgtcgtaaaaggggcgggacgcgccgcggtcgggatgacgtgagctgggggcgctcgtcgctgcagccggcggctagcgggcgtccgcgccatggagcgctacgcgggcgccttggaggaggtggcggacggtgcccggcagcaggagcgacactaccagctgctgtcggcgttacagagcctggtgaaggagttgcccagctcattccagcagcgcttgtcctacaccacgctgagcgacctggccctggcgcttctcgacggcaccgtgttcgaaatcgtgcaggggctactggagatccagcacctcaccgaaaagagcctgtacaaccagcgcctgcgcctacagaacgagcatcgagtgctcaggcaggcgctgcggcagaagcaccaggaagcccagcaggcctgccggccccataacctgcctgtgcttcaggcggctcagcagcgagaactagaggcggtggagcaccggatccgtgaggagcagcgggcgatggaccagaagatcgtcctggagctggaccggaaggtggctgaccagcagagcacactggagaaggcgggggtggctggcttctacgtgaccaccaacccacaggagctgatgctgcagatgaacctgctggaactcatccggaagctgcagcagaggggctgctgggcagggaaggcagccctggggctaggaggtccctggcagttgcctgctgcccagtgtgaccagaaaggcagccctgtcccaccatagccacaggcagcagaagtctgggcagagttcatcttcttgacctttggccactgccttcccagctgcccgcagggggttccccctgctgaggagagaccaggtggaccccagctgcctgtcacccttcatctgggacttgctgtcaaaccctaggatagtctctccagcagcgcttgtcctacaccacgctgagcgacctggccctggcgcttctcgacggcaccgtgttcgaaatcgtgcaggggctactggagatccagcacctcaccgaaaagagcctgtacaaccagcgcctgccgctacagaacgagcatcgagtgctcaggcaggcgctgcggcagaagcaccaggaagcccagcagg

SEQ ID NO: 41756 - DNA, 583 bp, Homo sapiens
ttgttaagctgagttaagtttggctcaaagtgcccattgtacttgcctaattaagtttggcccaaagcggcatccatacatagtgactgtactctaacttaatgtgtagataagttgtaagctaatgtagatatatggacttgtaaccaagcaactgagactcaaccaatcataggagccaaacccttagtcaatcctaggctgaatgctgccaaattatgcccaaataaggcaaatattgaactgcaccaatcagggaaactctgaatataattttatatgttctggttataaatacatctcaccactctggatgtggagtcactctgaacgatctttgttctgggatggtgcctacttctcaaacctttttcttggtcaaataaacttagtgaaatttaacatgtcttagttgcattttttttaaacaacattcaaagacctacaaaataggacagggaacttgtatttagactatactgtctaaatgcaacgtatttatgctagttatttgtgtgttatagagaatatagtgatattgatatactttaagtcatttatgtacatcgggaagaggaaaaaa

SEQ ID NO: 41757 - DNA, 299 bp, Homo sapiens
gagaagagttagcaggcattcgtgtggctgatggtgctgtatccgtaaatgcagctcagcagacactgtcccagaaggtcaggttgtaggctttgtgtacctcctaccatattagctgccacttcacctttttcccaatttaggaggcatatctgagagtgatgttttataggggcaaccttgaaccttactcgcttgtttttaaaagtattaatcagccacaagtatttcttctgacatcctcagaattgattgcaacataccattttggccagacacagacactaaggtgcattcca

SEQ ID NO: 41758 - DNA, 328 bp, Homo sapiens
gcatttaaaagacaagtgggagagaaactaatgaaggagctgaaaatggccaatgacactggaaaagaacgacgacagtaaagtgtcctagtagccaagggaagagagaaagcactttttaaaggatgagatgatcacttgtgtcaacttctgtcaataattaaaggagacaagggacaagatgacatccgtggatatggcaaatagccaataataatgaaagctagcatcacatctgctgcatgcttgtcacatgccaggcacaccacttcaagagttgtacaagtaagaacccatttcatccccaagaaccctaggacgtaagtgt

SEQ ID NO: 41759 - DNA, 969 bp, Homo sapiens
  misc_feature (1)..(1): n is a, c, g, or t
nttacgttttgaacagccccttccccggggtccggagcccaatcctttttcctttaaacccaaagtttctcccctttgttaaacaccagaaaccagactagagtaattaaatccctcccaatttaaggtttccagccttttcaaactatggaggatgcagcaaaagggatgcctttgatctgctgtctctggatgcacaaggagctcagagaaacaaccaggacacagaacaaaacaaagcatggagctctaatttaggggtttcagctaagcgagtcactcagcaccagcactgcacaggaggttcttacagcttcctttatgagaaagatttgttcttctgtttatagcgcacgctctgatgtggacttccagctcagaacccaggttctcgaactcatgaacgcattcagcatcccttgctatcacaaccagcttgacagaaagaccacaggccaagtgcagcagagttccagaaagtgaatgcagcaaaatacccttgctctctttgagggtatcagagccaggagggtggctgactctgatgatagaacaagagccaaatatgctcctgatgctccagtagagtggtcttcaggtgatcgagattccgagctcccaaaccaaggcaagaataaggaaactggaacaggagggcatgctgggctccagcctcccgtgacagtgaaacattgccttagaatgactgttgttaatacaattgaggaaatataacacgtaatcttgtgattaagttatacacaatttgatttaaatttagttcctggcagttgctaggtttcactctggcatactctctcagtgtggaagctgctgattcagaaagagatgttccaaagctcatgtatttcctggacacatccaagtactgaataaaatgctggttaaataaatgagttaattttccaagaaagacaccaaaaaataaaaaccgatggcgccctgaac

SEQ ID NO: 41760 - DNA, 896 bp, Homo sapiens
tcagttacactctgttgattcaaaagaaggttgtttgtccaagcttgtccaagtcagtttcaagaggctcagccaccaaaagtttcatcaaagaggaagccaaggtcatcagtaaagcctcacgagagctacctggaacgggcaggaaagaaaaatgcagataagaaaattaaaaccacagactcctgggcagcgaacaagagccttctgatcctaattcgatctggagttaagaatgaaggggatttctgtagcagtttcttttgcatagcagagctccgacttttccagcaacagcgtgtccctggaagctacacaaagtcctctttgattgcctgtgatcaaagccacgaaggctctcctgcaacatcttagcttcagaaagccaggaaaatcagaatgctgagagtatattaataattcctaaacatatttttaagggtatcagagccaggagggtggctgactctgatgatagaacaagagccaaatatgctcctgatgctccagtagagtggtcttcaggtgatcgagattccgagctcccaaaccaaggcaagaataaggaaactggaacaggagggcatgctgggctccagcctcccgtgacagtgaaacattgccttagaatgactgttgttaatacaattgaggaaatataacacgtaatcttgtgattaagttatacacaatttgatttaaatttagttcctggcagttgctaggtttcactctggcatactctctcagtgtggaagctgctgattcagaaagagatgttccaaagctcatgtatttcctggacacatccaagtactgaataaaatgctggttaaataaatgagttaattttccaagaaagacaccaaaaaataaaaaccgatggcgccctgaac

SEQ ID NO: 41761 - DNA, 1123 bp, Homo sapiens
tcagttacactctgttgattcaaaagaaggttgtttgtccaagcttgtccaagtcagtttcaagaggctcagccaccaaaagtttcatcaaagaggaagccaaggtcatcagtaaagcctcacgagagctacctggaacgggcaggaaagaaaaatgcagataagaaaattaaaaccacagactcctgggcagcgaacaagagccttctgatcctaattcgatctggagttaagaatgaaggggatttctgtagcagtttcttttgcatagcagagctccgacttttccagcaacagcgtgtccctggaagctacacaaagtcctctttgattgcctgtgatcaaagccacgaaggctctcctgcaacatcttagcttcagaaagccaggaaaatcagaatgctgagagtatattaataattcctaaacatatttttaaggttcttcaggcctgtctcagagctatggaggatgcagcaaaagggatgcctttgatctgctgtctctggatgcacaaggagctcagagaaacaaccaggacacagaacaaaacaaagcatggagctctaatttaggggtttcagctaagcgagtcactcagcaccagcactgcacaggaggttcttacagcttcctttatgagaaagatttgttcttctgtttatagggtatcagagccaggagggtggctgactctgatgatagaacaagagccaaatatgctcctgatgctccagtagagtggtcttcaggtgatcgagattccgagctcccaaaccaaggcaagaataaggaaactggaacaggagggcatgctgggctccagcctcccgtgacagtgaaacattgccttagaatgactgttgttaatacaattgaggaaatataacacgtaatcttgtgattaagttatacacaatttgatttaaatttagttcctggcagttgctaggtttcactctggcatactctctcagtgtggaagctgctgattcagaaagagatgttccaaagctcatgtatttcctggacacatccaagtactgaataaaatgctggttaaataaatgagttaattttccaagaaagacaccaaaaaataaaaaccgatggcgccctgaac

SEQ ID NO: 41762 - DNA, 760 bp, Homo sapiens
  misc_feature (1)..(1): n is a, c, g, or t
nttacgttttgaacagccccttccccggggtccggagcccaatcctttttcctttaaacccaaagtttctcccctttgttaaacaccagaaaccagactagagtaattaaatccctcccaatttaaggtttccagccttttcaaactatggaggatgcagcaaaagggatgcctttgatctgctgtctctggatgcacaaggagctcagagaaacaaccaggacacagaacaaaacaaagcatggagctctaatttaggggtttcagctaagcgagtcactcagcaccagcactgcacaggaggggtatcagagccaggagggtggctgactctgatgatagaacaagagccaaatatgctcctgatgctccagtagagtggtcttcaggtgatcgagattccgagctcccaaaccaaggcaagaataaggaaactggaacaggagggcatgctgggctccagcctcccgtgacagtgaaacattgccttagaatgactgttgttaatacaattgaggaaatataacacgtaatcttgtgattaagttatacacaatttgatttaaatttagttcctggcagttgctaggtttcactctggcatactctctcagtgtggaagctgctgattcagaaagagatgttccaaagctcatgtatttcctggacacatccaagtactgaataaaatgctggttaaataaatgagttaattttccaagaaagacaccaaaaaataaaaaccgatggcgccctgaac

SEQ ID NO: 41763 - DNA, 812 bp, Homo sapiens
tagatctcagcttaatatagctccacagaaaaaccttccctcactgccctatttaggtagcccacctgttttactctgtttctctgtcctgtttgcatcttttcataggaattacagttgaccgttgaacaattagggggctagaggtgctaccccatctacacagtcaaaattcctcatgtaacatttgactcctccaaaacttaaccatgaatagcctactattgaccagaagccttaccgatcaacagtcgattaacacatatttggcatgttgtatgtattttttactgtattcttacaataaaggaaactagagaagggacaatgttattaagacaatcataaggaagagaaaatattcttactgttcattaagtggaagtgggtcatcacaaaggtcttcatccttgtcatcttcacgctgagcaggctaacaaggagagggaacaggaagggttggtcgtgctgtcccagaggtggcacaggaggaaggaaatctgcatgtaagtgcgcctgcacagttcaaacccctgttgttgaaggaccagctgtattattactttgttatttgtttccttttaatttttctttctagaaaaattgacagcaggggccatgtctgtttggtttaatgctgtaacattccaagcacacagcaagtaagtgctctacaaatatttgttgaatccttgactcaattagacatttaccatttttttttgttgtttgttttttttagagtcagggacttgctttatccagactggagtttgtggcacaattatggctcactgaagcctcaacctcat

SEQ ID NO: 41764 - DNA, 860 bp, Homo sapiens
tagagatagggtttcaccatattgacgaggctggtctcgaactcctgaccttgtgatctgcccaccttggcctcccaaagtgctgggattacagatgtgagccactgcatccggccaactatgttttatataaaaaatacctgccaagcctatttacaattcctctttcaccccaaattactttagcgacgttctttgcacatgatatgtatcaggatttggccctttgcattttgacttcctctgcgggtatgtgtttttcttttcccttttttcgaggcctctttctcccttaattagacctgtcgggtgctctagtttcctaatttattaagttgccctcatgtatatactttctataccccaggtttttcatttgtggtccttatctgagcacacagtcttttttagcctttttatggttaagtgacctacacagatgagtcaggctaaccccaggacaaaacaagcttaaaaagatcttgaaagccaatctaagattaggtctttggacctgggacagagcaagaaagttgtttttaatcaaactatgcactctccacaaaatgaagggactaatctatactatttctgaatttggtttctttggttttatttcgcatagacaactgctaaaagtgttatattgctgaatttgttgttaccaacagtggacaatggagtgaaaatagaaaacagaattggtaaatttcaggctgttcagtgcttgtttttttttcaaatggcaaataggcataaacagactagtgatttccattagtattgttacttagttttataatactaaatccagaaatctagttctgaggcttcaaatgagaaattcttttccgagtaaa

SEQ ID NO: 41765 - DNA, 759 bp, Homo sapiens
gtcgaattaggggcactgtaaccagggtttgggttttgaagtagtgggtgttcgactttagagttgttttcctggaagcgctgatactggacttagtggaggagaacgacggtatcaatgtgtttctggatgactgcctggacaagggagttcagcttttgggagactgactgggctatgaagtgtacctttctactctgcagaggctggaaaggcaaaaatgatggctaaggcttccttgcaggagaggctgcccctccagaactagactcttccttggctttaagatgtgaagtcgagcagctggaaggacagacacctcatctgaccactgttctatggaccaaaggcaggatgagcatgccgctgatacagaagcctgagggaacacactccccactacgtccttctccaacacagcagagccaggagagtgactctggtcataggacttggtagggtcccagggtccctaggcctccacttctgagggcagcccctctggtgccaagagctctcctccaactcagggttggctgtgtctcttttcttctctgaagacagcgtcctggctccagttggaacactttcctgagatgcacttacttctcagcttctgcgatcagattatcatcaccaccaccctccagagaatttttacgcaagaagagccaaattgactctctaaatctggtgtatgggtattaaataaaattcattctcaaggctaataaaaaccacattggcattttcctctgc

SEQ ID NO: 41766 - DNA, 1183 bp, Homo sapiens
cagggttctacccggctgggtccaggcagaagtttttcctccccacctccgggtttgtcctcatcatcggtcactcccattcacagctttaagattctggaggccaagaatttgactccccccggatccatggtctgtggataccaatgttccgactggagacggggagcccgcgagacccgggtctccagggtctgcccaaggaagttgctcatgggagcagacccctagagcaggatttgaggccaggccaaagagaaccccagagatgaaaggcctcctcccactggcttggttcctggcttgtagtgtgcctgctgtgcaaggaggcttgctggacctaaaatcaatgatcgagaaggtgacagggaagaacgccctgacaaactacggcttctacggctgttactgcggctggggcggccgaggaacccccaaggatggcaccgattggtgctgttgggcgcatgaccactgctatgggcggctggaggagaagggctgcaacattcgcacacagtcctacaaatacagattcgcgtggggcgtggtcacctgcgagcccgggcccttctgccatgtgaacctctgtgcctgtgaccggaagctcgtctactgcctcaagagaaacctacggagctacaacccacagtaccaatactttcccaacatcctctgctcctaggcctccccagcgagctcctcccagaccaagacttttgttctgtttttctacaacacagagtactgactctgcctggttcctgagagaggctcctaagtcacagacctcagtctttctcgaagcttggcggacccccagggccacactgtaccctccagcgagtcccaggagagtgactctggtcataggacttggtagggtcccagggtccctaggcctccacttctgagggcagcccctctggtgccaagagctctcctccaactcagggttggctgtgtctcttttcttctctgaagacagcgtcctggctccagttggaacactttcctgagatgcacttacttctcagcttctgcgatcagattatcatcaccaccaccctccagagaatttttacgcaagaagagccaaattgactctctaaatctggtgtatgggtattaaataaaattcattctcaaggctaataaaaaccacattggcattttcctctgc

SEQ ID NO: 41767 - DNA, 988 bp, Homo sapiens
ctccaacaggaaatgccagagtggacagcatatcagatgagttctataacattccagagacagaaccccagagatgaaaggcctcctcccactggcttggttcctggcttgtagtgtgcctgctgtgcaaggaggcttgctggacctaaaatcaatgatcgagaaggtgacagggaagaacgccctgacaaactacggcttctacggctgttactgcggctggggcggccgaggaacccccaaggatggcaccgattggtgctgttgggcgcatgaccactgctatgggcggctggaggagaagggctgcaacattcgcacacagtcctacaaatacagattcgcgtggggcgtggtcacctgcgagcccgggcccttctgccatgtgaacctctgtgcctgtgaccggaagctcgtctactgcctcaagagaaacctacggagctacaacccacagtaccaatactttcccaacatcctctgctcctaggcctccccagcgagctcctcccagaccaagacttttgttctgtttttctacaacacagagtactgactctgcctggttcctgagagaggctcctaagtcacagacctcagtctttctcgaagcttggcggacccccagggccacactgtaccctccagcgagtcccaggagagtgactctggtcataggacttggtagggtcccagggtccctaggcctccacttctgagggcagcccctctggtgccaagagctctcctccaactcagggttggctgtgtctcttttcttctctgaagacagcgtcctggctccagttggaacactttcctgagatgcacttacttctcagcttctgcgatcagattatcatcaccaccaccctccagagaatttttacgcaagaagagccaaattgactctctaaatctggtgtatgggtattaaataaaattcattctcaaggctaataaaaaccacattggcattttcctctgc

SEQ ID NO: 41768 - DNA, 667 bp, Homo sapiens
cgagtggtccctgccgagtgggtccctgcgagtgggtccctgcgagcccgggcccttctgccatgtgaacctctgtgcctgtgaccggaagctcgtctactgcctcaagagaaacctacggagctacaacccacagtaccaatactttcccaacatcctctgctcctaggcctccccagcgagctcctcccagaccaagacttttgttctgtttttctacaacacagagtactgactctgcctggttcctgagagaggctcctaagtcacagacctcagtctttctcgaagcttggcggacccccagggccacactgtaccctccagcgagtcccaggagagtgactctggtcataggacttggtagggtcccagggtccctaggcctccacttctgagggcagcccctctggtgccaagagctctcctccaactcagggttggctgtgtctcttttcttctctgaagacagcgtcctggctccagttggaacactttcctgagatgcacttacttctcagcttctgcgatcagattatcatcaccaccaccctccagagaatttttacgcaagaagagccaaattgactctctaaatctggtgtatgggtattaaataaaattcattctcaaggctaataaaaaccacattggcattttcctctgc

SEQ ID NO: 41769 - DNA, 806 bp, Homo sapiens
  misc_feature (801)..(801): n is a, c, g, or t
cagggttctacccggctgggtccaggcagaagtttttcctccccacctccgggtttgtcctcatcatcggtcactcccattcacagctttaagattctggaggccaagaatttgactccccccggatccatggtctgtggataccaatgttccgactggagacggggagcccgcgagacccgggtctccagggtctgcccaaggaagttgctcatgggagcagacccctagagcaggatttgaggccaggccaaagagaaccccagagatgaaaggcctcctcccactggcttggttcctggcttgtagtgtgcctgctgtgcaaggaggcttgctggacctaaaatcaatgatcgagaaggtgacagggaagaacgccctgacaaactacggcttctacggctgttactgcggctggggcggccgaggaacccccaaggatggcaccgattggtgagctgatcgctataactgccctttaggctccaggctctgcacccatgttttcttattcaattccatatcagttctggaagatgagtattaaagtaccattttacaaataagaaaactaagcctcaaagaaattagctggcaatcccaagatctcagtggcctaaggtgtcagttggtcaactgtggcgtaacaagtggtcctcaatgtagtagcttatacagcactggtcatttactttgcttatgaatctgccatttgggtagggcttgtggggatggcttgtcgcagcttcagcttggacaactgaggctggacaatccaccttccagatggctcactcctantggct

SEQ ID NO: 41770 - DNA, 279 bp, Homo sapiens
gtaaggctggggcttcccgttcgggccattggaagagcacctgactttaagttcagctgccctagagaacagccagcctgtatcttgttgggggaggaggagttgggtgcagaactgggacgagaggagcaggattattgcagctgtatcagacccccagggtagggctgaatcatccactgggtgcaaaagtgcttgacatgcttcctttttcttgattcccccacaaaatacctgtagagtatgtttaggcttctccattttagacatcaagaaatg

SEQ ID NO: 41771 - DNA, 488 bp, Homo sapiens
cccagaccaagacttttgttctgtttttctacaacacagagtactgactctgcctggttcctgagagaggctcctaagtcacagacctcagtctttctcgaagcttggcggacccccagggccacactgtaccctccagcgagtcccaggagagtgactctggtcataggacttggtagggtcccagggtccctaggcctccacttctgagggcagcccctctggtgccaagagctctcctccaactcagggttggctgtgtctcttttcttctctgaagacagcgtcctggctccagttggaacactttcctgagatgcacttacttctcagcttctgcgatcagattatcatcaccaccaccctccagagaatttttacgcaagaagagccaaattgactctctaaatctggtgtatgggtattaaataaaattcattctcaaggctaataaaaaccacattggcattttcctctgctgtggggga

SEQ ID NO: 41772 - DNA, 868 bp, Homo sapiens
tgaaactcttgtcatctcaaaaataataataatatttacagcatcttgacagactcattaatgatgtcattaccccattttggatgaggattccaagcccctgagaggagaggcgatttactctcagacacccagcctagctataagacagaaccaggatcagaaccaaggtcattttggtgtcaaagccatgcatgttttaaaatgtttttctacaaactgtcttgttttggccacgctctcagaataggtcatgcctacaggcaggtgccattgttgaggcttgttaagagtgtagagaaaaaagaatactggcaggcattgtgcagtggactgtgcatagacgatctcatttattccattgtacggtcagattagctgaggtcaggggcaggattcgaacccatgtctccctgacagcagaactcaggtgctcatccacttgccaaccagctttccacttagatcattaggataatagctactctctcagcactaagtgctaagatctcattaaatacataccaccaggggatgaggtgagaactgttatctctgttacacatagaaggaaatggagacatgattgctttgattttgacctaaatgctctcctgccccctcaccctttgatcttccattgaggtgagattgggggagtgccgcagtgtggtcctcagaagacacaccatagatacactgttagcattggatgaaaaagaagggcttcatacctttccacagaggtcggtcctcttcaagaccatttgaatttaatgctcaaagagtttccttctctccctgagtgctcagcacccctccggccttgcagtttagcctgccttagacttagtcttgcatgtgtaaa

SEQ ID NO: 41773 - DNA, 455 bp, Homo sapiens
tgtgagtgaaatgtgtcccagaacaacaggcacttccttatccttctagcaacatggaattaagcatgacagtgttttgatatatcccaccattatcccatcactttacagttgaggaaactaggtcttaggctaaataaccttcccagttaatacataagaagagaggggacttgaaccgtaggcacaatgctatttctataatttaaggctgattgtttccccctaagggaaagtttttaagtttgcttttggtcagggtgggcatattttgacataaggcattgtctcataaggcagttaagtttcttagtctttagagttccacagtgatacttaagagctctcctctctaccatggttttatgcacagaatgtctgcttttatcagttttacatattagattgtgtttaaggtctactttgaaaaaagtttcaataagcagcaagtggtc

SEQ ID NO: 41774 - DNA, 433 bp, Homo sapiens
tctctgatgtatatcagcacccagaacaatacacagtacaatgatagtactcaaatatttgtcaaatgaatgaaaatactttttaagtaactgtataattcatatgtaaaaagtgtcataaagaaaatatccacaatactgtaagagagtaattaggagatcctgacgtagtcttgggatcttgtaaagtttcctaaggaacacctgagagctgaaggatgaacaggagttagagtgggcaaagtgcaaccataaaaagggaggggaaagatgatctcacaggtatgttttcggccaactaaaatccagagaatgacacatgggagttgagaatctgaaactgcccacacaccactgcagagtctctgtgaactccaaggtgttcaaatgcctgccctgaagacagctggtccacacctgctatctctccttc

SEQ ID NO: 41775 - DNA, 1036 bp, Homo sapiens
  misc_feature (868)..(868): n is a, c, g, or t
  misc_feature (889)..(889): n is a, c, g, or t
  misc_feature (897)..(898): n is a, c, g, or t
  misc_feature (901)..(901): n is a, c, g, or t
  misc_feature (906)..(906): n is a, c, g, or t
  misc_feature (910)..(910): n is a, c, g, or t
  misc_feature (913)..(913): n is a, c, g, or t
  misc_feature (922)..(922): n is a, c, g, or t
  misc_feature (1036)..(1036): n is a, c, g, or t
gtgccacctgggacgtacctgagcaggagccgaagcatgtggtactcacagtatggaaatgaggccatcttggtccgagacaaaaacaagctcgaggtctctagggacacagggcagtccaagttttgcacaattatgtaattccgatgtgagcacctgaacccaggaccacactttgaggaaaacagacctgagtttcattcagttgtcttgttgatttccaatccttgctggaagattttgaataatgaacgtgaagatcaaactgtggtgtaagaacccaagaagcgcagaattggcccccgaacccctcagcacagccgcggtgtgactggtgcacaggacacttcccctctagagtcccctccgtggtcagctgttgtgacatttgaattctccaggtgctgctagggacagcataggcccgggcactgctagatgcttggtttaaaccaggccaagagtaaccctcccatccccattacaaaccaccttttcaagttttttaggttttagttttttgtttttagcataaatggcggagtagcagcagcatctcaccaggagctttgtcgcattacattttgtattttgcttttttgagacggggtctcactctgttacccaggctggaatacagtggcacaatcacagctcactgtaggctctatctcctgggctcaggtgatcctcccaaactcagcctcccaggtagctgtggctccaggcgaactactgtatatagagacagggtttccctatgttgcccaggctggtctggtcttatagtcctgggctcaagcctcccagagtgctgggattacaggcatgggtcaccgcaccaagcccgcatttatattttggtccnatgtctctctggagctctggnggttcagnntgnggccnggcngtnccaccttgnaccggtgttggcttgggccgctccgtgaacggcgaggggccccaagattaccccgccggggttttgccgcgttcaaaagcctcaggggtttctaccaaaggcgctgtttcgtgn

SEQ ID NO: 41776 - DNA, 1246 bp, Homo sapiens
gtgccacctgggacgtacctgagcaggagccgaagcatgtggtactcacagtatggaaatgaggccatcttggtccgagacaaaaacaagctcgaggtctctagggacacagggcagtccaagttttgcacaattatgtaattccgatgtgagcacctgaacccaggaccacactttgaggaaaacagacctgagtttcattcagttgtcttgttgatttccaatccttgctggaagattttgaataatgaacgtgaagatcaaactgtggtgtaagaacccaagaagcgcagaattggcccccgaacccctcagcacagccgcggtgtgactggtgcacaggacacttcccctctagagtcccctccgtggtcagctgttgtgacatttgaattctccaggtgctgctagggacagcataggcccgggcactgctagatgcttggtttaaaccaggccaagagtaaccctcccatccccattacaaaccaccttttcaagttttttaggttttagttttttgtttttagcataaatggcggagtagcagcagcatctcaccaggagctttgtcgcattacattttgtattttgcttttttgagacggggtctcactctgttacccaggctggaatacagtggcacaatcacagctcactgtaggctctatctcctgggctcaggtgatcctcccaaactcagcctcccaggtagctgtggctccaggcgaactactgtatatagagacagggtttccctatgttgcccaggctggtctggtcttatagtcctgggctcaagcctcccagagtgctgggattacaggcatgggtcaccgcaccaagcccgcatttatattttgagttaccaaaatgatcatcatctgtgaagcatcatggtagcttccaagcatttgcggcccactggccagtgcatccaaaacacattcaggaaacccgagagttgtaagttgcacatgtgtggcctacagtgacttccatgtagtaacagggctgagcaaggcaggctctccaccagacttaaagcattcaaccactctgcccccaggccgacactgacatgtgttcactgtcgctgccacagctggccacctgtgttcagtctccatgaaggattcaccttctgctctcactgacatctccttggctacacaaatgtgcaggtgtctcttgtcaaagctaatttttcttttctaaataaacatcctttaatacactcctcccc

SEQ ID NO: 41777 - DNA, 349 bp, Homo sapiens
gtctcattaagttgccgaggccagaatcaaactcctggacttaagcagtcatcccacctcagcctaccaggtagctaggactgcaggtacacaccaccttgctcagtttattttactcttcagtgcattttgttatttttttctctatgccttcttttgatttcatttttttcaaaacttttttcctcttattacctctaaaatttggaaattgtaacatctatagataatcttttagttcttatctaagaagttttaatatgcataattaacttattcaaagccagaagctaatcaggatcttaatcctccaaacaatacgaagactttagaataattcaactctgat

SEQ ID NO: 41778 - DNA, 307 bp, Homo sapiens
catgagattttttgcctttttttttttaagcccatcagctatccttaatgtattttatatgtggcccaagacaattcttcttccaggatggcctggggaagccaaaagattggatacccctgatttgtaggttttcaactttaaaatatatgctataaaataagttcatttaagtaggctaggcatggtggctcatgtctgtaatcctagcactttgggaggccgaggcaggtggattgcctgagctcagcagtttgagaccagcctgggcaaaacggtgaaaccctgtctctactaaaataccaaa

SEQ ID NO: 41779 - DNA, 467 bp, Homo sapiens
ccccttgagtgacttgggtatctccttcctactcaaaggctggtttttctagaatctgggtatctgtcacaattctagaactcctctcccacagcccttttgaaaagtgatcttgggcatgtgcatcataagtcataaatctaagctaacacctttttattctaatcccactccttagaatctgtgccaaagttatgataaaaaattcagaaggccgggcgcggtggctcacgcctgtagtcctggcactttgggaggccgaggcgggtggatcacctgaggttgggagttcgagaccagcctgaccaacatggagaaaccctatctctactaaaaatacaaaattagctgggcgtggtggcacatgactgtaatctcagctactcaggaggccgaggcaggagaatcgcttgaacctgggaggtggaggttgcggtgagccgagatcgcaccattgcactccagcc

SEQ ID NO: 41780 - DNA, 467 bp, Homo sapiens
ggcaaacatatgcaaataactgaattttcaagaaatattcctggctagtagcatcttcaaaagctgactttggagaacagaatcagaaagtgaacggataaatgcgaggcacgcttttacatctggacttaacggtatcctgagcaagatgactaagatgtttatgcagcaatccagaataccctgcccccatcacaggcaataagtagcaaggctaaaaattttacttagtaaaattgactaaatatgggatcctgaaaatattcataaggcagatcagcagtccatgtgtttttgtgggattatgggctatttgaagggataagttccaattctcctctatgtcatggcatagcacctaggaacaattttggaacatggagtgacaattccttgttttcttaggtggaattaaaaaatttaagggacagtggaattaggttttttggggaactggccgaatagag

SEQ ID NO: 41781 - DNA, 746 bp, Homo sapiens
ggaaaggcagagtctggcacctggcaaggcctcctcacaggcctgactcccgtcccttcccacctccctaggcagaaccgggtggaactgcatgagaagcgacggaggcgccagccccagccagctccctgtggctcctggcaccaatcaggcctcgaggcttcctcaacaccagctttccttcccctcccattgggccctgcatccctgccttctgcaacattgtgctcctgaccctggctggctcccagccctccacagctgggccccacctcagagcctttgcatcaggtagccccagagtcagagagaaggcccccgacaaagccgcagatggagctcagccccaggaaacacctttccagagcaaggctccagctcactgtaggaccacagtcaagtctgtatccaggccgagcgacaggtgggcttgggaaccatctcactcccggcctagatcctacaccaaaaggaaaaacttccctcccacaccccttcgtcctgctctggtttcctgactgccagtggggaagcacttcttttggaagccactggaaattgagggatgagacagaaaaaaaaccaaagcaacagagaagcgctcaagtgtggaaatgtccccagccggccctccccttcccgccaggtcgggctgcatagccctggggggagcctagacctggagctgcaggaacatggcagaacctcccatccaggcagggctgagctgcagatctggagcctgg

SEQ ID NO: 41782 - DNA, 375 bp, Homo sapiens
atatatgcattcataattgaaattttggaaaatggcaaagaacataaagaaaatttaaattctttaaaccactaccacctagagttctcccattaacattttatacatatgcccacattaacattttatttctaaaatcaaaatcttattgtatatatttagaggcagcttctgctgctttttaaaaaatacagtacagtggttttcaaactcagtcccacagaaccttaaggtgctgaacctaaggtccccaggtcagggaaccaagcatgcagcattctaggcttcccaacttcccattcccttattatgtttatataccaaggttttacataggatttcttttgaaaatggttgttgctgtgtaaaaaaaaa

SEQ ID NO: 41783 - DNA, 952 bp, Homo sapiens
cctcctgaaagaagtcggaagttgcagtcattcgagattttatgtaatataagctatagtaactatgctgtggatataaattagaatatattcgtatcttttatttgcaataaatgtaaagctgaatcttagaatttcaaacggataaattttaacagcactattcccagggcttttttggtagtgatagaaaagtgtaactgttgagtttttccatattggcaatatactgccaggttcccttatggacagaatgaatcatcggctgggtgcagtggctcatgctgctaatcctcaggaagattgtaaaccttaggacgctgaggtgggtggatcgcttcagcccaggagttccaagaccagcccgggcaacatggcaaaactgcctctctacaaaaaattagcctggtttggtgacgcgcgcctgtaatcctagcctgtactcaggaggctgaggtgggaggatcgcttgagcccaggaaattgaggctgcagtgagccttgagcatgccagtgcactccagcctgggtgacagagtgagacctgtctcaaaaaaaaaaaaagaaaagaaaaagaaaaatgaatcatacgtttatactgtactccagaatccccaagtaagtttctaacacaattgtttctattgaccaagcaattttggcattttacactgaaattacagtggctgttaaatttagtctaaactgccctttaagtgttggcaaaaaggagaagaaacagtgtaatttgtaatccctcttctgtgtagctgtcattatgttgaaaattatgtattctttgtctcatctgtctgtgaaacacagagaattattacctatcttagtggtcaaaatgactttgcaaagttgtttggaatgtttattactacaaaaaattaaaattttttttacacttaaaaatgcttagtaggtttttaaaaataactttgtg

SEQ ID NO: 41784 - DNA, 323 bp, Homo sapiens
agggaagacatgttttgctttgtcacccagcctggagtgcagtggcttgatctcggctcgctgcatcctccgcctcccgggttcaagtggttcttctgcctcagcctcctgagtagctgggattacagctttagataaagtccttccaacatcttgcaacctggataacagccaagtcctattcatccctctcaacctggctcttccatgccctcctgcaaggccttccccagcccttctctgtggatgcccctcctccgttttgaagcagactggataccagccccaccccgccgccatgcttcttttatccttgcaggtgg

SEQ ID NO: 41785 - DNA, 427 bp, Homo sapiens
cctggtttcctaactcaataagcaaaacaaacagatgcaacctccaagtattttgtattcctcacctcagtgaattccccaccacttgctgagaaggccacggcagaagctgaactaatccttgactcctttttctccaatattctccctatcctgccagtcaaaagggcatataactcccagtcactgaatctcttgactcaacctctcttctttaatcccaatgccacagctttagataaagtccttccaacatcttgcaacctggataacagccaagtcctattcatccctctcaacctggctcttccatgccctcctgcaaggccttccccagcccttctctgtggatgcccctcctccgttttgaagcagactggataccagccccaccccgccgccatgcttcttttatccttgcaggtgg

SEQ ID NO: 41786 - DNA, 133 bp, Homo sapiens
cagggagggaaagggttgtggttgggagctgggggctcagccagattcccctttcagtgatttctcaggcatgaggatgacctgccttggccactgcatctgaggaaatattgcaggggagaggcagggcagg

SEQ ID NO: 41787 - DNA, 480 bp, Homo sapiens
tactagttctgaaaattctttctaagctgttgattcaaaataaaagtttatgacttttgtactgttttacctttgcacttgaaagtgcaaatataaaaataaagaaaatactctttatttcctgagaaaaagattgggggatttccattttattttaccaataatgtaaatgtatagatttcagtatattttgcagtgtactcacatcctgaagtttctaagactccattaaaaagttatgctgtttttgcagggattttttcagggcatttagttgtaaaaaaaaaatgctgaatagatgaaaaatgagtaaaatctgtgtttttttttttctttcctattcatcattgctgtttgtcctctgtgtgtaggcaaccaatttgctgttgtttcctgaggggaattcaagtcaaaaagtaatattgaattactaggaaaaggtattcctatctcaaaagaacaaagtaaaatgattcagaa

SEQ ID NO: 41788 - DNA, 387 bp, Homo sapiens
agaggacgttagacttttttctagcccagggaggaacaccagccaagacttgccttgggcattggtggtaataactgatgcatatagagggctttctttgtgccaggagttgttctaaatgctttatttcagggcctctgttcctcagcactgttgatattttaggctgggtaattctttgttggggactgttctgtgcattgtgggatgtttagcagcatctctggcccctacccactagaagctagtggtacctcctctagtccatgtcttttccattttatttcctgcatagcatttagcatagtgttttacttatgagagatgcttaataaatatgtccatttgtttgggttagatgggttcctactcatgtagtgatttctt

SEQ ID NO: 41789 - DNA, 1249 bp, Homo sapiens
gcaagaatccagcatggacgtgtctgacggtcattattggactcatatcacatcatgatgtccaagcagatctcagatattcaagattaggcccctgatcgtgtaggggttggggagggtgctgagtgagatcaccactaatgtgcaactcctagaaagaagcctttcttaaagggccagcccaggtttccagaagcaccattattgtaggtggctgggaaatagcagggaacaagacagaaaagtccttgttctcctggagtttacatgctagtaaggtaagaaagataaataagcgacctacctttagatagtgataaatgctacgaagacataaaatggcatgatgatgatggcagttgaaaaaaattgttaaattattccagcagtacaaggtgagcactggccacggcaggtcccatgacagtttatctgggagcaaatgaaacctgtttggatgactctccatattgaagcaatgatagtaaacacatagctctagccatggttctaaatgctttagatctgtgctgcccaacatggtagacactagcctcatggggacagtacattttaattccaacaaaaaatgaaaaatttctcagacacatgagccacatttcaggtgttcaatagctacatgtggccgcaacagctacagaagagtgtggtcacatctctgagcctcagttctttaaaaacagcataatcatacctatcttgctgattgtttcaagaattaagtgatcatctataagcctggcacctaaggccgcatgcggtggctcacacctgtaatcccagcactttgagaggccaaggcgggcagatcagttgaggtcaggagtttgaaaccagcctggccaacatggtgaaaccttgtctctactaaaaatacaaaaatgagccgggcgtggtggtgcacactggtagtcccagctactcaggagactgaggcaggagaatcgcttaaacccaggaggtcgaggttgcgattgcaccactgcactccagcctggtcaacaaagtgagactccatctcaaaaaaaaaagcaagcctggcagtcagacatttggtgtggctgctttattggacaacagagaatagaatatttacatcatcacagaaagttccattggacagcatctgttcagataaactcaatcttcccccacatcctaatgaggtgtagatactgcttttccattttgcagatgaggaagtaaggcacgggagttacgtgtgact

SEQ ID NO: 41790 - DNA, 1847 bp, Homo sapiens
cccaggtggggagctagcctgaaagagacagcggaaggagtttcctggactgcgctgtcgctcaccgacccgcaccaatcaccatgcagcttgccctcggacccgccccttttagggcgtgtccccagtgagtgatagacggagccgccctgccctgctcagcccagcccacgttgctgcttagattgaaatgcagaactcaagcctctttcatcggggcacagacttccttttacttcttccttttgccctctcgcctcctcctcctgggaagaagcggaggcgccggcggtcggccgggatagcaacaggccgggccactgaggcggtgcggaaagtttctgtctgggagtgcggaactggggccgggttggtgtactgctcggagcaatggagccagccttcggggaggtgaaccagctgggaggagtgttcgtgaacgggaggccgctgcccaacgccatccggcttcgcatcgtggaactggcccaactgggcatccgaccgtgtgacatcagccgccagctacgggtctcgcacggctgcgtcagcaagatcctggcgcgatacaacgagacgggctcgatcttgccaggagccatcgggggcagcaagccccgggtcactacccccaccgtggtgaaacacatccggacctacaagcagagagaccccggcatcttcgcctgggagatccgggaccgcctgctggcggacggcgtgtgcgacaagtacaatgtgccctccgtgagctccatcagccgcattctgcgcaacaagatcggcaacttggcccagcagggtcattacgactcatacaagcagcaccagccgacgccgcagccagcgctgccctacaaccacatctactcgtaccccagccctatcacggcggcggccgccaaggtgcccacgccacccggggtgcctgccatccccggttcggtggccatgccgcgcacctggccctcctcgcactccgtcaccgacatcctgggcatccgctccatcaccgaccaagtgagcgacagctccccctaccacagccccaaggtggaggagtggagcagcctgggccgcaacaacttccccgccgccgccccgcacgcggtgaacgggttggagaagggagccctggagcaggaagccaagtacggtcaggcaccaaatggtctcccagctgtgggcagttttgtgtcagcatccagcatggctccttaccctaccccagcccaagtgtcgccttacatgacctacagtgctgctccttctggttatgttgctggacatgggtggcaacatgctgggggcacctcattgtctccccacaactgtgacattccggcatcgctggcgttcaagggaatgcaggcagccagagaaggtagtcattctgtcacggcttccgcgctctgatgggaaattccgtctccagcagcttcacccgggtctccctgtctcagcacctcctcccccaattcccaggtctcacatcccacccctcctgccctccaacccttctgccttgaaagctggctgtacggactcacatcctttgtgctaatgacacttacatatttcttgccataacttttctcttgcagaaaaactgacatgactttaggatttaaaaacaagagcaacaataagcattgaatgagacatttgtgttgcccacatactgtcttaacataacaaagaaacctacacccctcaaagggtttaaggaactttacaaactagtctttggtaaaaccacatgtgtatatttattctaaatcaacctgaacttttgaaatgtgcaattgttgagattttgcaaaatcaataaaggaaaatacttatag

SEQ ID NO: 41791 - DNA, 2777 bp, Homo sapiens
cccaggtggggagctagcctgaaagagacagcggaaggagtttcctggactgcgctgtcgctcaccgacccgcaccaatcaccatgcagcttgccctcggacccgccccttttagggcgtgtccccagtgagtgatagacggagccgccctgccctgctcagcccagcccacgttgctgcttagattgaaatgcagaactcaagcctctttcatcggggcacagacttccttttacttcttccttttgccctctcgcctcctcctcctgggaagaagcggaggcgccggcggtcggccgggatagcaacaggccgggccactgaggcggtgcggaaagtttctgtctgggagtgcggaactggggccgggttggtgtactgctcggagcaatggagccagccttcggggaggtgaaccagctgggaggagtgttcgtgaacgggaggccgctgcccaacgccatccggcttcgcatcgtggaactggcccaactgggcatccgaccgtgtgacatcagccgccagctacgggtctcgcacggctgcgtcagcaagatcctggcgcgatacaacgagacgggctcgatcttgccaggagccatcgggggcagcaagccccgggtcactacccccaccgtggtgaaacacatccggacctacaagcagagagaccccggcatcttcgcctgggagatccgggaccgcctgctggcggacggcgtgtgcgacaagtacaatgtgccctccgtgagctccatcagccgcattctgcgcaacaagatcggcaacttggcccagcagggtcattacgactcatacaagcagcaccagccgacgccgcagccagcgctgccctacaaccacatctactcgtaccccagccctatcacggcggcggccgccaaggtgcccacgccacccggggtgcctgccatccccggttcggtggccatgccgcgcacctggccctcctcgcactccgtcaccgacatcctgggcatccgctccatcaccgaccaagtgagcgacagctccccctaccacagccccaaggtggaggagtggagcagcctgggccgcaacaacttccccgccgccgccccgcacgcggtgaacgggttggagaagggagccctggagcaggaagccaagtacggtcaggcaccaaatggtctcccagctgtgggcagttttgtgtcagcatccagcatggctccttaccctaccccagcccaagtgtcgccttacatgacctacagtgctgctccttctggttatgttgctggacatgggtggcaacatgctgggggcacctcattgtctccccacaactgtgacattccggcatcgctggcgttcaagggaatgcaggcagccagagaaggtagtcattctgtcacggcttccgcgctctgatgggaaattccgtctccagcagcttcacccgggtctccctgtctcagcacctcctcccccaattcccaggtctcacatcccacccctcctgccctccaacccttctgccttgaaagctggctgtacggactcacatcctttgtgctaatgacacttacatatttcttgccataacttttctcttgcagaaaaactgacatgactttaggatttaaaaacaagagcaacaataagcattgaatgagacatttgtgttgcccacatactgtcttaacataacaaagaaacctacacccctcaaagggtttaaggaactttacaaactagtctttggtaaaaccacatgtgtatatttattctaaatcaacctgaacttttgaaatgtgcaattgttgagattttgcaaaatcaataaaggaaaatacttatagaaaaaattatgctacaccctctaatcaaatatggtaaccaagtaagctttaattcatcattaggaaacaaatcaataagtgacttgtttgagtgatcctttgtttaagacatgacctattttgttgaaaaatatatgtagaacccaagcaatatctgaatctagctctccctggtgttttgacttggttccaaatacaataatgtttatattttctattagtttgtaaatacggactctggatggtgcatttgtgtcttcattccataagatattcccctcccctcagccccaccccctctctatttttttctttcttttttgcaaaggtgactttctggcaacgtctttgtctctgtttggtggtgggctgctcgggctcctggacctggacttgcccccaaattttgtgtatgcagtgaaggcttcaacatctcatgaaggacactttatttctacagcagaggacacgaaaaacagataaaacaagccagtctcccattttgtacctaatcaaacaacacacatgctaagcatataaagacaagagggtggaaaatatctgaacaagaaggctctaaaggaagtcacttagaaacttaagtttaatgtgaaatgttttgcaaagatgcttaaaatgaactttgtgttaagaaaaccactgtgaaactaaattgtcctattattgttggcttacctgtgtgttcagcaatctcagccccaaataatgttgtaatttaaagaaaatggaaaattctgctctaatgaatgtaacaatggcttgctgtgaagtttacattgttgtacagaagcatgtttcgcatgtaggtaaactggtggtggtactagaaatacaatgttatttaattttaacaaattccctttattcatttctgaaattacaggacacagtttaactcataaacctttc

SEQ ID NO: 41792 - DNA, 1614 bp, Homo sapiens
aaatggggccccatccagtatacttctagttacttgaatgctggcacagataaaacattgcgttttagttctgaaaaactatatgcccaaaggcatttttcttcttgctgatttttcttcttggactctaaagaacactccttttcaacttttctggaatgtagacaatcctgggaaaagtatatggatttattttccaccttttcttggcaccctccaactgagctttattcttttccctagcaaaggggtcctaaacccacatgcccagacaacccagacgacctgaacttttcagtgaatctatgctatcctcatatcccggaccatggctgcccctcctgccctccaacccttctgccttgaaagctggctgtacggactcacatcctttgtgctaatgacacttacatatttcttgccataacttttctcttgcagaaaaactgacatgactttaggatttaaaaacaagagcaacaataagcattgaatgagacatttgtgttgcccacatactgtcttaacataacaaagaaacctacacccctcaaagggtttaaggaactttacaaactagtctttggtaaaaccacatgtgtatatttattctaaatcaacctgaacttttgaaatgtgcaattgttgagattttgcaaaatcaataaaggaaaatacttatagaaaaaattatgctacaccctctaatcaaatatggtaaccaagtaagctttaattcatcattaggaaacaaatcaataagtgacttgtttgagtgatcctttgtttaagacatgacctattttgttgaaaaatatatgtagaacccaagcaatatctgaatctagctctccctggtgttttgacttggttccaaatacaataatgtttatattttctattagtttgtaaatacggactctggatggtgcatttgtgtcttcattccataagatattcccctcccctcagccccaccccctctctatttttttctttcttttttgcaaaggtgactttctggcaacgtctttgtctctgtttggtggtgggctgctcgggctcctggacctggacttgcccccaaattttgtgtatgcagtgaaggcttcaacatctcatgaaggacactttatttctacagcagaggacacgaaaaacagataaaacaagccagtctcccattttgtacctaatcaaacaacacacatgctaagcatataaagacaagagggtggaaaatatctgaacaagaaggctctaaaggaagtcacttagaaacttaagtttaatgtgaaatgttttgcaaagatgcttaaaatgaactttgtgttaagaaaaccactgtgaaactaaattgtcctattattgttggcttacctgtgtgttcagcaatctcagccccaaataatgttgtaatttaaagaaaatggaaaattctgctctaatgaatgtaacaatggcttgctgtgaagtttacattgttgtacagaagcatgtttcgcatgtaggtaaactggtggtggtactagaaatacaatgttatttaattttaacaaattccctttattcatttctgaaattacaggacacagtttaactcataaacctttc

SEQ ID NO: 41793 - DNA, 532 bp, Homo sapiens
cggccgccaaggtgcccacgccacccggggtgcctgccatccccggttcggtggccatgccgcgcacctggccctcctcgcactccgtcaccgacatcctgggcatccgctccatcaccgaccaaggtaggggctcagaggctgggcgtgtggatgtgcagcgtctgcccccgcactctcgcggaggtcccagtatctgcagcctcagggacactgtctttcccaccacctgaggctttttcctttggaaacgtaaggagtcttcctagggggtgttctgatctcattaacttgaaactcatgcccctggtttccttgccacacacagtcttctgcctcatctcaaactaccagacccataacatccccccatccccaacacatggttcgcattttccaccctcccccgcctctcgcgccgaggcagcctcagcccggcttgctcacttggagagtgcggccggggctggacttggggcgcagcccgggaggcccgagcctgcttggggctgccggctgcagactccgctgt

SEQ ID NO: 41794 - DNA, 342 bp, Homo sapiens
ggagagtccttataaacgttgataactgggatatctatctataagtcgatttctaaagaagacaaaccactaaaaaaaaaaggagctgttttgtttacctctttatccctattacctagctcattttttggcctatactaggtgtaacactgtgactgtaagtcagcctgtaacttgcactgtagaataccctaagaacaagaattttatgatacctgtataatttttacttactgaaccgaactatcttctcttcatgctagttatttgagttgtatttcttcataccttccaagaatttaaaaataaaagaactttaaatgagtatttgtttctatcata

SEQ ID NO: 41795 - DNA, 324 bp, Homo sapiens
cccagggataagagtgttgtgtgaaacgctccagcatcctggctgtaacattcggagattgtggttggggcgctgtggcctctcccatgagtgctgcttcgacatctccttggtcctcagcagcaaccagaagctggtggagctggacctgagtgacaacgccctcggtgacttcggaatcagacttctgtgtgtgggactgaagcacctgttgtgcaatctgaagaagctctggttggtcagctgctgcctcacatcagcatgttgtcaggatcttgcatcagtattgagcacctgccatttcctgaccagactctatgtggg

SEQ ID NO: 41796 - DNA, 3116 bp, Homo sapiens
gggggttcctgaggctggcatctggatgaggaaactgaagttgaggaatagtgaagagtttgtccaatgtcatagccccgtaatcaacgggacaaaaattttcttgctgatgggtcaagatggcatcgtgaagtggttgttcaccgtaaactgtaatacaatcctgtttatggatttgtttgcatatttttccctccatagggaaacctttcttccatggctcaggacacactcctggatcgagccaacaggagaactttctggtaagcatttggctaacttttttttttttgagatggagtcttgctgtgtcgcctaggctggagtgcagtggcgtgatcttggctcactgcagcctccacctcccgggttcaatcaattctcctacctcaacttcctgagtagctgggattacaggcgcccgccaccacacccggctcatttttgtacttttagtagagacacagttttgccatgttggccaggctggtcttgaattcctcagctcaggtgatctgcctgccttggcctctcaaagtgctgggattacaggcgtgagccactgtgcccggccttggctaacttttcaaaattaaagattttgacttgttacagtcatgtgacatttttttctttctgtttgctgagtttttgataatttatatctctcaaagtggagactttaaaaaagactcatccgtgtgccgtgttcactgcctggtatcttagtgtggaccgaagcctaaggaccctgaaaacagctgcagatgaagatggcaagcacccgctgcaagctggccaggtacctggaggacctggaggatgtggacttgaagaaatttaagatgcacttagaggactatcctccccagaagggctgcatccccctcccgaggggtcagacagagaaggcagaccatgtggatctagccacgctaatgatcgacttcaatggggaggagaaggcgtgggccatggccgtgtggatcttcgctgcgatcaacaggagagacctttatgagaaagcaaaaagagatgagccgaagtggggttcagataatgcacgtgtttcgaatcccactgtgatatgccaggaagacagcattgaagaggagtggatgggtttactggagtacctttcgagaatctctatttgtaaaatgaagaaagattaccgtaagaagtacagaaagtacgtgagaagcagattccagtgcattgaagacaggaatgcccgtctgggtgagagtgtgagcctcaacaaactctacacacgactgcgtctcatcaaggagcaccggagccagcaggagagggagcaggagcttctggccatcggcaagaccaagacgtgtgagagccccgtgagtcccattaagatggagttgctgtttgaccccgatgatgagcattctgagcctgtgcacactgtggtgttccagggggcggcagggattgggaaaacaatcctggcccggaagatgatgttggactgggcgtcggggacactctaccaagacaggtttgactatctgttctatatccactgtcgggaggtgagccttgtgacacagaggagcctgggggacctgatcatgagctgctgccccgacccaaacccacccatccacaagatcgtgagaaaaccctccagaatcctcttcctcatggacggcttcgatgagctgcaaggtgcctttgacgagcacataggaccgctctgcactgactggcataaggccgagcggggagacattctcctgagcagcctcatcagaaagaagctgcttcccgaggcctctctgctcatcaccacgagacctgtggccctggagaaactgcagcacttgctggaccatcctcggcatgtggagatcctgggtttctccgaggccaaaaggaaagagtacttcttcaagtacttctctgatgaggcccaagccagggcagccttcagtctgattcaggagaacgaggtcctcttcaccatgtgcttcatccccctggtctgctggatcgtgtgcactggactgaaacagcagatggagagtggcaagagccttgcccagacatccaagaccaccaccgcggtgtacgtcttcttcctttccagtttgctgcagccccggggagggagccaggagcacggcctctgcgcccacctctgggggctctgctctttggctgcagatggaatctggaaccagaaaatcctgtttgaggagtccgacctcaggaatcatggactgcagaaggcggatgtgtctgctttcctgaggatgaacctgttccaaaaggaagtggactgcgagaagttctacagcttcatccacatgactttccaggagttctttgccgccatgtactacctgctggaagaggaaaaggaaggaaggacgaacgttccagggagtcgtttgaagcttcccagccgagacgtgacagtccttctggaaaactatggcaaattcgaaaaggggtatttgatttttgttgtacgtttcctctttggcctggtaaaccaggagaggacctcctacttggagaagaaattaagttgcaagatctctcagcaaatcaggctggagctgctgaaatggattgaagtgaaagccaaagctaaaaagctgcagatccagcccagccagctggaattgttctactgtttgtacgagatgcaggaggaggacttcgtgcaaagggccatggactatttccccaagattgagatcaatctctccaccagaatggaccacatggtttcttccttttgcattgagaactgtcatcgggtggagtcactgtccctggggtttctccataacatgcccaaggaggaagaggaggaggaaaaggaaggccgacaccttgatatggtgcagtgtgtcctcccaagctcctctcatgctgcctgttctcatgggtaaggaaactcggcttccaggtgcttcctcctgcttcctcgccagcttcttcttggcacctgcctcctctcatctcttttcaactatcttccaaatactgttgccacagctacatcataatgccaccactgtctgtttgagactccttcatgagcaaagattgatgtatggtaggtggataaatgggatgag

SEQ ID NO: 41797 - DNA, 4187 bp, Homo sapiens
atgcactcccagcttcatctcacttcaatccactggttgatagaagtgcagtcaaagactgtcccctcctctgcaagcttttatgttctctctcctctctccctagccacgtcctgttctgttatcaacacacttactcacctcctggccttctccttctattgtctctcatccctcttccctcacaaaaacagaagcaaagagccagagccttcagtttggaggaactgaaaacattctcttctgctttctcattttgtagatgaggaaactgaagttgaggaatagtgaagagtttgtccaatgtcatagccccgtaatcaacgggacaaaaattttcttgctgatgggtcaagatggcatcgtgaagtggttgttcaccgtaaactgtaatacaatcctgtttatggatttgtttgcatatttttccctccatagggaaacctttcttccatggctcaggacacactcctggatcgagccaacaggagaactttctggtaagcatttggctaacttttttttttttgagatggagtcttgctgtgtcgcctaggctggagtgcagtggcgtgatcttggctcactgcagcctccacctcccgggttcaatcaattctcctacctcaacttcctgagtagctgggattacaggcgcccgccaccacacccggctcatttttgtacttttagtagagacacagttttgccatgttggccaggctggtcttgaattcctcagctcaggtgatctgcctgccttggcctctcaaagtgctgggattacaggcgtgagccactgtgcccggccttggctaacttttcaaaattaaagattttgacttgttacagtcatgtgacatttttttctttctgtttgctgagtttttgataatttatatctctcaaagtggagactttaaaaaagactcatccgtgtgccgtgttcactgcctggtatcttagtgtggaccgaagcctaaggaccctgaaaacagctgcagatgaagatggcaagcacccgctgcaagctggccaggtacctggaggacctggaggatgtggacttgaagaaatttaagatgcacttagaggactatcctccccagaagggctgcatccccctcccgaggggtcagacagagaaggcagaccatgtggatctagccacgctaatgatcgacttcaatggggaggagaaggcgtgggccatggccgtgtggatcttcgctgcgatcaacaggagagacctttatgagaaagcaaaaagagatgagccgaagtggggttcagataatgcacgtgtttcgaatcccactgtgatatgccaggaagacagcattgaagaggagtggatgggtttactggagtacctttcgagaatctctatttgtaaaatgaagaaagattaccgtaagaagtacagaaagtacgtgagaagcagattccagtgcattgaagacaggaatgcccgtctgggtgagagtgtgagcctcaacaaactctacacacgactgcgtctcatcaaggagcaccggagccagcaggagagggagcaggagcttctggccatcggcaagaccaagacgtgtgagagccccgtgagtcccattaagatggagttgctgtttgaccccgatgatgagcattctgagcctgtgcacactgtggtgttccagggggcggcagggattgggaaaacaatcctggcccggaagatgatgttggactgggcgtcggggacactctaccaagacaggtttgactatctgttctatatccactgtcgggaggtgagccttgtgacacagaggagcctgggggacctgatcatgagctgctgccccgacccaaacccacccatccacaagatcgtgagaaaaccctccagaatcctcttcctcatggacggcttcgatgagctgcaaggtgcctttgacgagcacataggaccgctctgcactgactggcataaggccgagcggggagacattctcctgagcagcctcatcagaaagaagctgcttcccgaggcctctctgctcatcaccacgagacctgtggccctggagaaactgcagcacttgctggaccatcctcggcatgtggagatcctgggtttctccgaggccaaaaggaaagagtacttcttcaagtacttctctgatgaggcccaagccagggcagccttcagtctgattcaggagaacgaggtcctcttcaccatgtgcttcatccccctggtctgctggatcgtgtgcactggactgaaacagcagatggagagtggcaagagccttgcccagacatccaagaccaccaccgcggtgtacgtcttcttcctttccagtttgctgcagccccggggagggagccaggagcacggcctctgcgcccacctctgggggctctgctctttggctgcagatggaatctggaaccagaaaatcctgtttgaggagtccgacctcaggaatcatggactgcagaaggcggatgtgtctgctttcctgaggatgaacctgttccaaaaggaagtggactgcgagaagttctacagcttcatccacatgactttccaggagttctttgccgccatgtactacctgctggaagaggaaaaggaaggaaggacgaacgttccagggagtcgtttgaagcttcccagccgagacgtgacagtccttctggaaaactatggcaaattcgaaaaggggtatttgatttttgttgtacgtttcctctttggcctggtaaaccaggagaggacctcctacttggagaagaaattaagttgcaagatctctcagcaaatcaggctggagctgctgaaatggattgaagtgaaagccaaagctaaaaagctgcagatccagcccagccagctggaattgttctactgtttgtacgagatgcaggaggaggacttcgtgcaaagggccatggactatttccccaagattgagatcaatctctccaccagaatggaccacatggtttcttccttttgcattgagaactgtcatcgggtggagtcactgtccctggggtttctccataacatgcccaaggaggaagaggaggaggaaaaggaaggccgacaccttgatatggtgcagtgtgtcctcccaagctcctctcatgctgcctgttctcatgggttggggcgctgtggcctctcccatgagtgctgcttcgacatctccttggtcctcagcagcaaccagaagctggtggagctggacctgagtgacaacgccctcggtgacttcggaatcagacttctgtgtgtgggactgaagcacctgttgtgcaatctgaagaagctctggttggtgaattctgccttacgtcagtctgttgttcagctttgtcctcggtactcagcactaatcagaatctcacgcacctttactgcgaggcaacactctcggagacaagggatcaaactactctgtgagggactcttgcaccccgactgcaagcttcaggtgttggaattagacaactgcaacctcacgtcacactgctgctgggatctttccacacttctgacctccagccagagcctgcgaaagctgagcctgggcaacaatgacctgggcgacctgggggtcatgatgttctgtgaagtgctgaaacagcagagctgcctcctgcagaacctggggttgtctgaaatgtatttcaattatgagacaaaaagtgcgttagaaacacttcaagaagaaaagcctgagctgaccgtcgtctttgagccttcttggtaggagtggaaacggggctgccagacgccagtgttctccggtccctccagctgggggccctcaggtggagagagctgcgatccatccaggccaagaccacagctctgtgatccttccggtggagtgtcggagaagagagcttgccgacgatgccttcctgtgcagagcttgggcatctcctttacgccagggtgaggaagacaccaggacaatgacagcatcgggtgttgttgtcatcacagcgcctcagttagaggatgttcctcttggtgacctcatgtaattagctcattcaataaagcactttctttatttttctcttctctgtctaactttctttttcctatctttttttcttctttgttctgtttacttttgctcatatcatcattcccggactgatgagcagtggggaactca

SEQ ID NO: 41798 - DNA, 3353 bp, Homo sapiens
atgcactcccagcttcatctcacttcaatccactggttgatagaagtgcagtcaaagactgtcccctcctctgcaagcttttatgttctctctcctctctccctagccacgtcctgttctgttatcaacacacttactcacctcctggccttctccttctattgtctctcatccctcttccctcacaaaaacagaagcaaagagccagagccttcagtttggaggaactgaaaacattctcttctgctttctcattttgtagatgaggaaactgaagttgaggaatagtgaagagtttgtccaatgtcatagccccgtaatcaacgggacaaaaattttcttgctgatgggtcaagatggcatcgtgaagtggttgttcaccgtaaactgtaatacaatcctgtttatggatttgtttgcatatttttccctccatagggaaacctttcttccatggctcaggacacactcctggatcgagccaacaggagaactttctggtaagcatttggctaacttttttttttttgagatggagtcttgctgtgtcgcctaggctggagtgcagtggcgtgatcttggctcactgcagcctccacctcccgggttcaatcaattctcctacctcaacttcctgagtagctgggattacaggcgcccgccaccacacccggctcatttttgtacttttagtagagacacagttttgccatgttggccaggctggtcttgaattcctcagctcaggtgatctgcctgccttggcctctcaaagtgctgggattacaggcgtgagccactgtgcccggccttggctaacttttcaaaattaaagattttgacttgttacagtcatgtgacatttttttctttctgtttgctgagtttttgataatttatatctctcaaagtggagactttaaaaaagactcatccgtgtgccgtgttcactgcctggtatcttagtgtggaccgaagcctaaggaccctgaaaacagctgcagatgaagatggcaagcacccgctgcaagctggccaggtacctggaggacctggaggatgtggacttgaagaaatttaagatgcacttagaggactatcctccccagaagggctgcatccccctcccgaggggtcagacagagaaggcagaccatgtggatctagccacgctaatgatcgacttcaatggggaggagaaggcgtgggccatggccgtgtggatcttcgctgcgatcaacaggagagacctttatgagaaagcaaaaagagatgagccgaagtggggttcagataatgcacgtgtttcgaatcccactgtgatatgccaggaagacagcattgaagaggagtggatgggtttactggagtacctttcgagaatctctatttgtaaaatgaagaaagattaccgtaagaagtacagaaagtacgtgagaagcagattccagtgcattgaagacaggaatgcccgtctgggtgagagtgtgagcctcaacaaactctacacacgactgcgtctcatcaaggagcaccggagccagcaggagagggagcaggagcttctggccatcggcaagaccaagacgtgtgagagccccgtgagtcccattaagatggagttgctgtttgaccccgatgatgagcattctgagcctgtgcacactgtggtgttccagggggcggcagggattgggaaaacaatcctggcccggaagatgatgttggactgggcgtcggggacactctaccaagacaggtttgactatctgttctatatccactgtcgggaggtgagccttgtgacacagaggagcctgggggacctgatcatgagctgctgccccgacccaaacccacccatccacaagatcgtgagaaaaccctccagaatcctcttcctcatggacggcttcgatgagctgcaaggtgcctttgacgagcacataggaccgctctgcactgactggcataaggccgagcggggagacattctcctgagcagcctcatcagaaagaagctgcttcccgaggcctctctgctcatcaccacgagacctgtggccctggagaaactgcagcacttgctggaccatcctcggcatgtggagatcctgggtttctccgaggccaaaaggaaagagtacttcttcaagtacttctctgatgaggcccaagccagggcagccttcagtctgattcaggagaacgaggtcctcttcaccatgtgcttcatccccctggtctgctggatcgtgtgcactggactgaaacagcagatggagagtggcaagagccttgcccagacatccaagaccaccaccgcggtgtacgtcttcttcctttccagtttgctgcagccccggggagggagccaggagcacggcctctgcgcccacctctgggggctctgctctttggctgcagatggaatctggaaccagaaaatcctgtttgaggagtccgacctcaggaatcatggactgcagaaggcggatgtgtctgctttcctgaggatgaacctgttccaaaaggaagtggactgcgagaagttctacagcttcatccacatgactttccaggagttctttgccgccatgtactacctgctggaagaggaaaaggaaggaaggacgaacgttccagggagtcgtttgaagcttcccagccgagacgtgacagtccttctggaaaactatggcaaattcgaaaaggggtatttgatttttgttgtacgtttcctctttggcctggtaaaccaggagaggacctcctacttggagaagaaattaagttgcaagatctctcagcaaatcaggctggagctgctgaaatggattgaagtgaaagccaaagctaaaaagctgcagatccagcccagccagctggaattgttctactgtttgtacgagatgcaggaggaggacttcgtgcaaagggccatggactatttccccaagattgagatcaatctctccaccagaatggaccacatggtttcttccttttgcattgagaactgtcatcgggtggagtcactgtccctggggtttctccataacatgcccaaggaggaagaggaggaggaaaaggaaggccgacaccttgatatggtgcagtgtgtcctcccaagctcctctcatgctgcctgttctcatgggtaaggaaactcggcttccaggtgcttcctcctgcttcctcgccagcttcttcttggcacctgcctcctctcatctcttttcaactatcttccaaatactgttgccacagctacatcataatgccaccactgtctgtttgagactccttcatgagcaaagattgatgtatggtaggtggataaatgggatgag

SEQ ID NO: 41799 - DNA, 4369 bp, Homo sapiens
atgcactcccagcttcatctcacttcaatccactggttgatagaagtgcagtcaaagactgtcccctcctctgcaagcttttatgttctctctcctctctccctagccacgtcctgttctgttatcaacacacttactcacctcctggccttctccttctattgtctctcatccctcttccctcacaaaaacagaagcaaagagccagagccttcagtttggaggaactgaaaacattctcttctgctttctcattttgtagatgaggaaactgaagttgaggaatagtgaagagtttgtccaatgtcatagccccgtaatcaacgggacaaaaattttcttgctgatgggtcaagatggcatcgtgaagtggttgttcaccgtaaactgtaatacaatcctgtttatggatttgtttgcatatttttccctccatagggaaacctttcttccatggctcaggacacactcctggatcgagccaacaggagaactttctggtaagcatttggctaacttttttttttttgagatggagtcttgctgtgtcgcctaggctggagtgcagtggcgtgatcttggctcactgcagcctccacctcccgggttcaatcaattctcctacctcaacttcctgagtagctgggattacaggcgcccgccaccacacccggctcatttttgtacttttagtagagacacagttttgccatgttggccaggctggtcttgaattcctcagctcaggtgatctgcctgccttggcctctcaaagtgctgggattacaggcgtgagccactgtgcccggccttggctaacttttcaaaattaaagattttgacttgttacagtcatgtgacatttttttctttctgtttgctgagtttttgataatttatatctctcaaagtggagactttaaaaaagactcatccgtgtgccgtgttcactgcctggtatcttagtgtggaccgaagcctaaggaccctgaaaacagctgcagatgaagatggcaagcacccgctgcaagctggccaggtacctggaggacctggaggatgtggacttgaagaaatttaagatgcacttagaggactatcctccccagaagggctgcatccccctcccgaggggtcagacagagaaggcagaccatgtggatctagccacgctaatgatcgacttcaatggggaggagaaggcgtgggccatggccgtgtggatcttcgctgcgatcaacaggagagacctttatgagaaagcaaaaagagatgagccgaagtggggttcagataatgcacgtgtttcgaatcccactgtgatatgccaggaagacagcattgaagaggagtggatgggtttactggagtacctttcgagaatctctatttgtaaaatgaagaaagattaccgtaagaagtacagaaagtacgtgagaagcagattccagtgcattgaagacaggaatgcccgtctgggtgagagtgtgagcctcaacaaactctacacacgactgcgtctcatcaaggagcaccggagccagcaggagagggagcaggagcttctggccatcggcaagaccaagacgtgtgagagccccgtgagtcccattaagatggagttgctgtttgaccccgatgatgagcattctgagcctgtgcacactgtggtgttccagggggcggcagggattgggaaaacaatcctggcccggaagatgatgttggactgggcgtcggggacactctaccaagacaggtttgactatctgttctatatccactgtcgggaggtgagccttgtgacacagaggagcctgggggacctgatcatgagctgctgccccgacccaaacccacccatccacaagatcgtgagaaaaccctccagaatcctcttcctcatggacggcttcgatgagctgcaaggtgcctttgacgagcacataggaccgctctgcactgactggcataaggccgagcggggagacattctcctgagcagcctcatcagaaagaagctgcttcccgaggcctctctgctcatcaccacgagacctgtggccctggagaaactgcagcacttgctggaccatcctcggcatgtggagatcctgggtttctccgaggccaaaaggaaagagtacttcttcaagtacttctctgatgaggcccaagccagggcagccttcagtctgattcaggagaacgaggtcctcttcaccatgtgcttcatccccctggtctgctggatcgtgtgcactggactgaaacagcagatggagagtggcaagagccttgcccagacatccaagaccaccaccgcggtgtacgtcttcttcctttccagtttgctgcagccccggggagggagccaggagcacggcctctgcgcccacctctgggggctctgctctttggctgcagatggaatctggaaccagaaaatcctgtttgaggagtccgacctcaggaatcatggactgcagaaggcggatgtgtctgctttcctgaggatgaacctgttccaaaaggaagtggactgcgagaagttctacagcttcatccacatgactttccaggagttctttgccgccatgtactacctgctggaagaggaaaaggaaggaaggacgaacgttccagggagtcgtttgaagcttcccagccgagacgtgacagtccttctggaaaactatggcaaattcgaaaaggggtatttgatttttgttgtacgtttcctctttggcctggtaaaccaggagaggacctcctacttggagaagaaattaagttgcaagatctctcagcaaatcaggctggagctgctgaaatggattgaagtgaaagccaaagctaaaaagctgcagatccagcccagccagctggaattgttctactgtttgtacgagatgcaggaggaggacttcgtgcaaagggccatggactatttccccaagattgagatcaatctctccaccagaatggaccacatggtttcttccttttgcattgagaactgtcatcgggtggagtcactgtccctggggtttctccataacatgcccaaggaggaagaggaggaggaaaaggaaggccgacaccttgatatggtgcagtgtgtcctcccaagctcctctcatgctgcctgttctcatgggttggggcgctgtggcctctcccatgagtgctgcttcgacatctccttggtcctcagcagcaaccagaagctggtggagctggacctgagtgacaacgccctcggtgacttcggaatcagacttctgtgtgtgggactgaagcacctgttgtgcaatctgaagaagctctggttggtgaattctgccttacgtcagtctgttgttcagctttgtcctcggtactcagcactaatcagaatctcacgcacctttactgcgaggcaacactctcggagacaagggatcaaactactctgtgagggactcttgcaccccgactgcaagcttcaggtgttggaattagacaactgcaacctcacgtcacactgctgctgggatctttccacacttctgacctccagccagagcctgcgaaagctgagcctgggcaacaatgacctgggcgacctgggggtcatgatgttctgtgaagtgctgaaacagcagagctgcctcctgcagaacctggggttgtctgaaatgtatttcaattatgagacaaaaagtgcgttagaaacacttcaagaagaaaagcctgagctgaccgtcgtctttgagccttcttggtaggagtggaaacggggctgccagacgccagtgttctccggtccctccagctgggggccctcaggtggagagagctgcgatccatccaggccaagaccacagctctgtgatccttccggtggagtgtcggagaagagagcttgccgacgatgccttcctgtgcagagcttgggcatctcctttacgccagggtgaggaagacaccaggacaatgacagcatcgggtgttgttgtcatcacagcgcctcagttagaggatgttcctcttggtgacctcatgtaattagctcattcaataaagcactttctttatttttctcttctctgtctaactttctttttcctatctttttttcttctttgttctgtttacttttgctcatatcatcattcccgctatctttctattaactgaccataacacagaactagttgactatatattatgttgaaattttatggcagctatttatttatttaaattttttgtaatagttttgttttctaataagaaaaatccatgctttttgtagctggttgaaaattcaggaatatgtaaaactttttggtatttaattaaattgattccttttcttaatttt

SEQ ID NO: 41800 - DNA, 197 bp, Homo sapiens
tgggtagcatcctttaagaggctttcaaaggcttgaaaccatgagtttagcacagagtttttcagaaagcttggctaagaaatgccgtaataagaaaaggctgtcctcagttgaaactgtcacctttaaagtccataataatcaaaatatgtgaaccacctatccacagacacagttgcaaataaagaattgtcatt

SEQ ID NO: 41801 - DNA, 675 bp, Homo sapiens
tagaaaggggaggcatgaataatcggccaccccttgtttagcatgtcatcaagaaataaccataaaaatgggcaactagcagcccttggggctgctctattctaaaggtttgctctattcttttgttcctttgctcccctaataaacttgctttcaccttactctgtggacttgtcctgaattctttcttgtgcaagatccaagaaccccctcttggggcctggatctggacctctttcctgtaacataataaaccaccccaaacataataaaccataaaaggtggtggtgtttactggtgaaacctttcatcatgctcataattttgtgagtcagatgggggatgtgggagcggcttaccttcatttcaatggtctccactggagtggctcatctggtcagccatggctgcgatgaagaccggggttctatgtctgggcctcgcttctgaatgttgggtacgtcagaatggcttctcctccagcacggctgtgagaactggcatgtccaagttggcttcatcacgtgtatggctggcacttcgaataggatggcgggagcagctggggacagacactagacagctctctccagtcttttcatgtggctagcttgggcctccttacagtggggtggtcttggagtaataggacttattacttgctagtcacccag

SEQ ID NO: 41802 - DNA, 520 bp, Homo sapiens
ctcatctgtaaaacaggactgacactcaccttgcaggaatactggaggtctgtactgcgctgccaacatctattcgccctcatccgtgacaagagtacccacaatttcctctgggaagctgctcctctctgattagtgtctgttcagtggttggaggttgaccctaccccagctctgagacggcctggccagcctatcctaattagcatatccctttcaccctggccacagtgattgacttagggctgggctgtgcagaggtgagcctcagctttttgggtaggaacaccaggacttggattccagtgggtttaatgctaggagggcatcaagcttgtgataactgtggccatttttgttaccataagggtagccagtctgaggatggaagccaatctacaggaaacagagctaagagatactaatgcatccctaaatcacttgagtcctggatcaaaccgttcctgaagctcctactaagctacactgttatgtgaaccaatactcttccttttgttta

SEQ ID NO: 41803 - DNA, 475 bp, Homo sapiens
agtagagacggggtttcaccgtgttagccaggatggtctcgatctcctgacctcgtgatccgcccatctcggcctcccaaagtgctgggattacaggcgtgagccaccgcgcccggccaagttcacagaatttttaatgtgttgaaggtctttagaagataaggtttttaggggatgtgcagaagtggccattcgccatcaggacttgaaggcctcgttcctgctccatagtcactggatgccttgatatccagaccccgagacacgcctgcaggtcatttcacgctggatatggggtgaggttcaagcccatccttggggtaatctggggctggatgtgtaacatcccaggccgctgcagatttctttcaagagcctccagtaacacttagttctttggagaagaaactatccaaatttcagagccagaaggatatcaacaatccatagccatgggcacccatctcaactggaa

SEQ ID NO: 41804 - DNA, 2012 bp, Homo sapiens
tcaggaagccagcctctccctaccactgagttcatgtatcttgttctctaggtctagatgtacttctatagtattctagtcttgctgcatagtattgtaatggcctgttttcttcattttctgactaattgagagctacatctaatttattcttggatcctctagacacagtagtacatggttatctggcatataataagtataggagtatttgttgagttagctagtttgttgaaggaaaaaaggcatgcacctgagaaattaactcagaatagcattagctagaaggtctgcaatatgaatggtaataaaagggattcgtaaagagagaaatatagttgacccggagtaataaaggaagacttcttttccattaaggtagaatttttttgccatctccagttttgactttgaacatatctgccctcattttatctccttgcttattggttacttcatttcatggtgatttttcctagtctcaatctctagtcattttatagacaccttgccagttcattacttttagcttcttgctttctctatcccctctctgtctgcgtgtcctgcctgttctatcacttttttcttttcctctatactgtcttcaagttctttggttttacacaaaacttaccatcaaaaacatatttgagagttccacgaagagagtccagtttactcgtgttgcagtttagatccatggatttaaatagatcagaactttagactgaatctactacatatatcttatatcaattagtttctctaaggtaaaagtagatgtcttcaaacactgtgaggttgcagagctgaggttccctaaaaccttgtatgtatcaaaatgtatgttactcattttattcatgccttggtatgtaatttgtcaaaatatcttgctgcattttcttgttgtgggagttataaaatacaattttaataactacaattgggaaaactcatcaataatgaaagacttaaaagacaaacgtgatcgtcacagttttaaaatttggttttgttttggtatttgtaatattttgttttgtgtaggtaaatacatttgattagttgattcttttcaacttactatattgttttgtgctattgtttttatagtctttaatattattaagaaaagtaaatggggctgggcttgggtagactcacgcctataatcccaacactttgggaggctgagacgggcggatcatgaggtcgagagatcgagaccatcctggccaacatggtgaaaccccgtctctactaaaatacaaaaattagccaggcatggttgcgtgcgcctgtagtcccagctacttgggaggctgaggcagaagaatcacttgaacccgggaggcagaggttgcagtgagccgagattgcgccactgcactgcagcctggcctcacagcaagattccatctcaaaaaaaaaagaaaaagaaaagaaaagtaaatggtatcttaattgttgccaattatgagctctatagcaactgatcttcccctcttctgtcctcttttttctgttacttttatatgtagccaaatgattttgattgctgcttataaaacaaagagctacttgtgaccacttcttcctattatattagtttgatgaaaacaaaatttcaaagtcatacttaactgtctttatatgtattacaaaacaagttgtctgatgacttggctaaataaaccagggctaaagactggaaggcaaaaatgaatcatagtcattcagtacatttggtatatttttttaaaaaggtgctacctgtatgcaccttgttctcattattttgctttaagataaattgtttgattttgtttattgcatttataggaacttacaaatcatttttttttctgtctttttaggacacagctgtatacagaatacattgttcactgtaccttcgtctctaattattattatccttattttgcctttgaatggatacttttttgatgaggatcaactaatggtttaatcataagaattaagag

SEQ ID NO: 41805 - DNA, 539 bp, Homo sapiens
ttttctatttttagtagagacagtgttttgccatgttggcgagaactcctgacgtcaaatgatcagcccgcatcggcatttcagagtgctggtattacaggcgtgagctatcaggcctggccctcaaaaacattctttatcatgctaaatggaaacctcgtacccaacaagcagtttctccccatttcccctcccctagcctctggcagccacctgtctgctctgtctctgggtgtgcctattctggttgtcttctgtaaagggaatcgtgcagggactgtcccttggtgactggcttcttttgctcagtgtcatgtgttcctgggtcatccgtggtatagcatgtgtcagtgcttccttttcatggctgaatagtattccactgtatggatagaccacgttttgttgatccattttcgttgatggacatttgggtgatttccattttttggctactgtgaagagtgctgtcgtgaacatttatgtacacatttctgtttgaggacatgttttcagttttcttgggtgtgtacctagga

SEQ ID NO: 41806 - DNA, 317 bp, Homo sapiens
tgagccaccacacccagcctaatttttgtatttttagcagagacggggtttcaccatattggccaggctggtcttgaactcctgacctcaggtgatctgctggccttggcctcccaaggtgctgggattacaggcatgagccactgtacccggccctcagatcttattttctatggacaccctactttgcttcagccctgaggtcccagctgccccattcaacatttttaccttccttttctgcattgtcctaacctttaggaaatctgaaccccagtagttgactgtcttctgaactaggtgaacctaatatccca

SEQ ID NO: 41807 - DNA, 906 bp, Homo sapiens
cgcatctgaccctgaggtgtccctttttcctcggtgcaggaatttatgttcaagttcacgcggagggagccctggattggactacgcagagttggggacgaattccactgggtcaacggggacccgtttgatccggacacgttcaccatcgcaggtccaggggagtgtgtcttcgtggagcccaccaggctggtgtcgacggagtgtctgatgacccggccctgggtgtgcagcaagatggcctatacttgaggtgggtggggccagaggtggccccgcccctaggcctgtgggaggtgtctggtgtctgctcaagacctgcttccagcggagccgcctgccctctgcaaggcgaagcggtgggtgcgtggcctccgccccaggcccctctcccaggccctggcgctctgagtccctggttcctggcctcctttgtctgcaggcaggtcgtgtggctcagcagttaaatcccatatgctaggtagtgtaggcatctgcccacctacacacacacacatgcataggtacacgcacgcacagacgctgtcccttctgaagctcagtgtccatcctgagccaccccacagatctctctccggccccctagaagccctctcctcactgcagccctggtgctctggggaaggaggggcattgacaggtggtttgactgttcacccagcagccccgcttccccactggtttctctcctggctgccggcggaggtaggctgggaaagcttccccctcacctaggccgggccagccccgccccgggccccagaggtcccctgcatcccccttctttgccttgcctgggttctcagcagggcccctgctgtgtccgtggtgctgttgtattggtcactaacggaataaagagttaatatctcatgtccagagaag

SEQ ID NO: 41808 - DNA, 1237 bp, Homo sapiens
tgatgcccctgccaggcttcccacagtcccctttctcattcatttagtggccacccttttacctccaggcaccaggagaggacagccacatctgcagtgtccctgcaggacgccaaagctgaggcaggggagggagccacagaaagcagagtgggactcgggctgggggggcgggcagggccgagctggtctcttccctgcagcttccaagggctgcatcaagtgcgaagcgccctgcccggaggactggctgctctacggaaggaagtgctacttcttttccgaggaacccagagactggaacacaggcaggcagtactgccacacccacgaggcggtgctggctgtgattcagagccagaaggagctggaatttatgttcaagttcacgcggagggagccctggattggactacgcagagttggggacgaattccactgggtcaacggggacccgtttgatccggacacgttcaccatcgcaggtccaggggagtgtgtcttcgtggagcccaccaggctggtgtcgacggagtgtctgatgacccggccctgggtgtgcagcaagatggcctatacttgaggtgggtggggccagaggtggccccgcccctaggcctgtgggaggtgtctggtgtctgctcaagacctgcttccagcggagccgcctgccctctgcaaggcgaagcggtgggtgcgtggcctccgccccaggcccctctcccaggccctggcgctctgagtccctggttcctggcctcctttgtctgcaggcaggtcgtgtggctcagcagttaaatcccatatgctaggtagtgtaggcatctgcccacctacacacacacacatgcataggtacacgcacgcacagacgctgtcccttctgaagctcagtgtccatcctgagccaccccacagatctctctccggccccctagaagccctctcctcactgcagccctggtgctctggggaaggaggggcattgacaggtggtttgactgttcacccagcagccccgcttccccactggtttctctcctggctgccggcggaggtaggctgggaaagcttccccctcacctaggccgggccagccccgccccgggccccagaggtcccctgcatcccccttctttgccttgcctgggttctcagcagggcccctgctgtgtccgtggtgctgttgtattggtcactaacggaataaagagttaatatctcatgtccagagaag

SEQ ID NO: 41809 - DNA, 2091 bp, Homo sapiens
  misc_feature (1)..(2): n is a, c, g, or t
nnctctgggaattgaagtttctgtggaaggaagcgtgagccgtaaccaggccaacccagaaaggctttctttctgagatttcacttccctgtcaactcttcagctcgtttcagaggcaccaaataatgtcatctgaaatgttgccagcatttattgaaacttctaatgttgacaaaaagcaaggcataaatgaagatcaagaggagagccagaagccaagattaggtgaagggtgtgaaccaatatctaaacgacaaatgaaaaaactaataaaacagaaacaatgggaagagcaacgggaactccgcaaacaaaagcgaaaagaaaaacgcaagaggaaaaaattagagcgacaatgtcaaatggaaccaaactcagatggacatgacagaaaacgtgttcgaagagatgttgttcatagcacccttcgccttattattgactgtagttttgatcacttgatggtattaaaggacattaagaaacttcataagcagattcaacgatgttacgcagaaaaccgacgggcactgcatcctgtgcagttttacttgacaagccacggaggccagctgaaaaagaacatggatgaaaatgacaaaggatgggtcaactggaaggatatccatatcaaaccagagcactatagtgaactcataaagaaagaagacctgatttaccttacgtcagattcacctaatatactgaaggaattagatgaatcaaaggcctatgtgattggaggattagtagatcacaaccatcacaagggactcacatataaacaagcgtcagattatggaatcaatcatgcacagctcccacttggaaattttgtgaagatgaatagtcgaaaagttttggcagttaatcatgtgtttgaaattattctggaatacctggaaacaagagactggcaagaagcattttttactatcttgccccaacggaaaggagctgttcccacagacaaagcctgtgaaagtgcttctcatgacaatcagtctgtcaggatggaggaaggtggatcggacagtgattccagtgaggaggaatatagcagaaatgaactagattcaccacatgaagaaaagcaggataaggaaaatcacactgaatctacagtgaactctctgccacactaatgttacctggtttccttttagtttaaggaaaaattaggagaaagtgaggtgctatatagaatattgaaattggaagaacattttattttctcttatttctgttgtgatttttaaaaacttttttttggacctaaataataataaaaaaaaaaagccctttaaactttgtaaggaaatattttttgattttgcgtaagaagatttaaatgtgtatgtgattttttttgtttttgtttttaaagcctcagtagtttctagataattttactgtattagtatattttcattttctttcattttatattctttagaatgtgccttctgacctttcagttttttaattttatagtcacatcaacatctttatgatctattgcctatatatctgtgagggcacatattcataaatatactgtcaatctatcagcatttgtgtatggtaggttaccctctatttgcagcttttatgtttaaattagttacttgaaagaatgtagtaattttaggaagaagtatcagtttgatagacttaataattcatttcttttggactatggagcgcatatctgttccttctttatgatgcctttttatggttctgaagtaattactgaagagttgagaatctctttaatgcattttcttaattcttacaatggtgataagttacttcaattataaaattgaattttgcagactaaattattttataaggctgttgctattgaaagatcaattttgtctttacctgcatttaaaatggaacagctcttagcagctgtggtttttttttccatattttttttaaatttgttggctcttaagatgaataaagtttataggtgcatctgcctcctcttctctaagaatatgcatactaatgtttgtttctataaatcaaatacacatgtgataatatgcatgtaaatacataactatcctcatc

SEQ ID NO: 41810 - DNA, 1345 bp, Homo sapiens
  misc_feature (1)..(2): n is a, c, g, or t
nnctctgggaattgaagtttctgtggaaggaagcgtgagccgtaaccaggccaacccagaaaggctttctttctgagatttcacttccctgtcaactcttcagctcggtaagtgtcctggcactggttggcgctcccccgcactatggtattctctggacgcaaaggggcgcgtgccatgcagccccctactagcaacaagggcttccgggggagaggggagcagtggtgtggaagtggtttcctgcggcgctcttgctgaaggaaatgacgtcgatgacaggcgccccccgcggcctacccagctgctccctggttcgccagagacagcttaatcccgtctctgaaatgcgtttgctggctgggagcctagaagggatagtgggcgaggctccgccccgtggtggggcgctttccgtcggcgtgtgttttggggttgccatcggcccgtagtatgtgaaaagtgagtttgcaaagaatcagtgggaaatctgtactctaaagggccggaaagcgtgttatggccctgccacttcgtggctagagaccgtgggctttacctctttaaagctgccttacctcatttttcctgcaaagggctgacgtcgctgaactctctgaaatgtagagagcccgaggggaagttgctgcaggtgctgtgagctgaggacagttttataaagatcgaagtgttacttgatttcactgaaatactttaaatttgggaatttttctacagatatgaagaggatggcaacacattacttgtcactttctgaaagaatttcatctgccccttccattcccaaccctctgcccaaaaggcttgacaactgaagtgaacaaagggcttttcgctcctccacgtttagtccgcatgtcttttagaagggcattcctggccgggcgcggtgactcacgtctgtaatccccgcacttcgggagggcagggcgggtggatcacctgaggtcaggagttcgggaccagcctgaccaacatggtgaaaccccgtctctactgaaaatacaaaattagccgggcgtggtggcgcatgccagtaatcccagctactgggggggctgaggcaggagaactacttgaacccagaaggcggaggttgcaatcagccgagattgcgccattgcactccagcctgggcaacaagagcgaaactccgtctcaaacaaacaagaaaggccgggcgcagtggctcatgcctgtaatcccagcactttgggaagccgaggcgggtggatcacgaggtcaagagatggagaccatccaggccaacgtggtgaaaccccgtctctactaaaaataacaaaaattagctgggcgtggtagc

SEQ ID NO: 41811 - DNA, 462 bp, Homo sapiens
caattaaatgacatttatttgtctaaagttttatttatattattttatggtttaactttaatcatattgattatttgagttttttaacttttttgtgcttgtaaattatctattcatgtcaaaagttgtttttcagaggcaccaaataatgtcatctgaaatgttgccagcatttattgaaacttctaatgttgacaaaaagcaaggcataaatgaagatcaagaggagagccagaagccaagattaggtgaagggtgtgaaccaatatctaaacgacaaatgaaatgttgccagcatttattgaaacttctaatgttgacaaaaagcaaggcataaatgaagatcaagaggagagccagaagccaagattaggtgaagggtgtgaaccaatatctgaacgacaaatgaaaaaaataataccacagaaacaatgggaagagcgcggaggaatcagcgagcaa

SEQ ID NO: 41812 - DNA, 3891 bp, Homo sapiens
  misc_feature (1)..(2): n is a, c, g, or t
nnctctgggaattgaagtttctgtggaaggaagcgtgagccgtaaccaggccaacccagaaaggctttctttctgagatttcacttccctgtcaactcttcagctcggtaagtgtcctggcactggttggcgctcccccgcactatggtattctctggacgcaaaggggcgcgtgccatgcagccccctactagcaacaagggcttccgggggagaggggagcagtggtgtggaagtggtttcctgcggcgctcttgctgaaggaaatgacgtcgatgacaggcgccccccgcggcctacccagctgctccctggttcgccagagacagcttaatcccgtctctgaaatgcgtttgctggctgggagcctagaagggatagtgggcgaggctccgccccgtggtggggcgctttccgtcggcgtgtgttttggggttgccatcggcccgtagtatgtgaaaatttcagaggcaccaaataatgtcatctgaaatgttgccagcatttattgaaacttctaatgttgacaaaaagcaaggcataaatgaagatcaagaggagagccagaagccaagattaggtgaagggtgtgaaccaatatctaaacgacaaatgaaaaaactaataaaacagaaacaatgggaagagcaacgggaactccgcaaacaaaagcgaaaagaaaaacgcaagaggaaaaaattagagcgacaatgtcaaatggaaccaaactcagatggacatgacagaaaacgtgttcgaagagatgttgttcatagcacccttcgccttattattgactgtagttttgatcacttgatggtattaaaggacattaagaaacttcataagcagattcaacgatgttacgcagaaaaccgacgggcactgcatcctgtgcagttttacttgacaagccacggaggccagctgaaaaagaacatggatgaaaatgacaaaggatgggtcaactggaaggatatccatatcaaaccagagcactatagtgaactcataaagaaagaagacctgatttaccttacgtcagattcacctaatatactgaaggaattagatgaatcaaaggcctatgtgattggaggattagtagatcacaaccatcacaagggactcacatataaacaagcgtcagattatggaatcaatcatgcacagctcccacttggaaattttgtgaagatgaatagtcgaaaagttttggcagttaatcatgtgtttgaaattattctggaatacctggaaacaagagactggcaagaagcattttttactatcttgccccaacggaaaggagctgttcccacagacaaagcctgtgaaagtgcttctcatgacaatcagtctgtcaggatggaggaaggtggatcggacagtgattccagtgaggaggaatatagcagaaatgaactagattcaccacatgaagaaaagcaggataaggaaaatcacactgaatctacagtgaactctctgccacactaatgttacctggtttccttttagtttaaggaaaaattaggagaaagtgaggtgctatatagaatattgaaattggaagaacattttattttctcttatttctgttgtgatttttaaaaacttttttttggacctaaataataataaaaaaaaaaagccctttaaactttgtaaggaaatattttttgattttgcgtaagaagatttaaatgtgtatgtgattttttttgtttttgtttttaaagcctcagtagtttctagataattttactgtattagtatattttcattttctttcattttatattctttagaatgtgccttctgacctttcagttttttaattttatagtcacatcaacatctttatgatctattgcctatatatctgtgagggcacatattcataaatatactgtcaatctatcagcatttgtgtatggtaggttaccctctatttgcagcttttatgtttaaattagttacttgaaagaatgtagtaattttaggaagaagtatcagtttgatagacttaataattcatttcttttggactatggagcgcatatctgttccttctttatgatgcctttttatggttctgaagtaattactgaagagttgagaatctctttaatgcattttcttaattcttacaatggtgataagttacttcaattataaaattgaattttgcagactaaattattttataaggctgttgctattgaaagatcaattttgtctttacctgcatttaaaatggaacagctcttagcagctgtggtttttttttccatattttttttaaatttgttggctcttaagatgaataaagtttataggtgcatctgcctcctcttctctaagaatatgcatactaatgtttgtttctataaatcaaatacacatgtgataatatgcatgtaaatacataactatcctcatcatgtatggctctcagttcttaattgatgataacatgattgaattgccatatatctgtattacttgtgtgaatggttgtgttgaacacgctaagaacaatttgaattttattaagtacaaaaatccttaacgtttgtatgggaacattggcaagaaagaatagtgtgaaagggaactgttttagtttcctatcagtaattgtacatgcagttaaatgtttaaggtaaaatgattggtctctgtcacagctaaaagatttcagtagccttcattgagtttgggtaaaataagttgctgttcttttgtcttctttttaatatataaaagttatatttaaaaagtatataacatactatatatgttacatactaacatatatatacacaacagaaagtttattggatttagtactgatatttactgtctatttttgttactttgttcttagtaatctattatagttacctattttaaggtaaggtctgtaggcaagatatgtaagtaaagacaagccctacaattttaaaataacaaagcttatgtcttaagttgtattttttcaaaggttcatgtttttctgagtaaatgtggtttattagcatgaaatattatgccttttacttaaattattttatgtaaaatagggcactgtttaattatgaaagggggaaaatcattccaaataagagtttaatttttattaattataaaaaactctgtattagtttcctagatgtgctagaacaaattaccacaaactgggtggctttaaacaacagaaatttattctcttaacagttccagagactaaatgtccagactcaccaatgtcccagtgccatgcttcctccttaggccctaggaaagaatacttcctagcctcttcctggcttttggtggttgccagcaatccctgctgttccttagcctatagtggcttgactccaatctcagttttgttgtcaagtggtcttctaccctgtcttctatgtttgtatccgtgtccaaactctttttctagggagaccagcactggattagagttcaccatgatccaatatgacctcatcttgactacatccgcaaagaccctgtctccaaataaggtcacatttacagggtaccatgtgttaggatttgacatatcttttgggggacacaattctacccactacaggcccatatcttatctaggatgttggtggcaagaaggtgaagattactacctcttttgatataactagtttctgaggtatttaaaaatttggttttaaaaatattaagctttttgctcatttgcatgtatacttttctctcaacattgttttggtttatttaggttatttgttaaaacttcagtaaatactaaagttacttgtattagaacataataaaagtagagaattaaactacctaaataaatgcatcaaaaaatatatgtctgct

SEQ ID NO: 41813 - DNA, 4081 bp, Homo sapiens
  misc_feature (1)..(2): n is a, c, g, or t
nnctctgggaattgaagtttctgtggaaggaagcgtgagccgtaaccaggccaacccagaaaggctttctttctgagatttcacttccctgtcaactcttcagctcggtaagtgtcctggcactggttggcgctcccccgcactatggtattctctggacgcaaaggggcgcgtgccatgcagccccctactagcaacaagggcttccgggggagaggggagcagtggtgtggaagtggtttcctgcggcgctcttgctgaaggaaatgacgtcgatgacaggcgccccccgcggcctacccagctgctccctggttcgccagagacagcttaatcccgtctctgaaatgcgtttgctggctgggagcctagaagggatagtgggcgaggctccgccccgtggtggggcgctttccgtcggcgtgtgttttggggttgccatcggcccgtagtatgtgaaaagtgagtttgcaaagaatcagtgggaaatctgtactctaaagggccggaaagcgtgttatggccctgccacttcgtggctagagaccgtgggctttacctctttaaagctgccttacctcatttttcctgcaaagggctgacgtcgctgaactctctgaaatgtagagagcccgaggggaagttgctgcagtttcagaggcaccaaataatgtcatctgaaatgttgccagcatttattgaaacttctaatgttgacaaaaagcaaggcataaatgaagatcaagaggagagccagaagccaagattaggtgaagggtgtgaaccaatatctaaacgacaaatgaaaaaactaataaaacagaaacaatgggaagagcaacgggaactccgcaaacaaaagcgaaaagaaaaacgcaagaggaaaaaattagagcgacaatgtcaaatggaaccaaactcagatggacatgacagaaaacgtgttcgaagagatgttgttcatagcacccttcgccttattattgactgtagttttgatcacttgatggtattaaaggacattaagaaacttcataagcagattcaacgatgttacgcagaaaaccgacgggcactgcatcctgtgcagttttacttgacaagccacggaggccagctgaaaaagaacatggatgaaaatgacaaaggatgggtcaactggaaggatatccatatcaaaccagagcactatagtgaactcataaagaaagaagacctgatttaccttacgtcagattcacctaatatactgaaggaattagatgaatcaaaggcctatgtgattggaggattagtagatcacaaccatcacaagggactcacatataaacaagcgtcagattatggaatcaatcatgcacagctcccacttggaaattttgtgaagatgaatagtcgaaaagttttggcagttaatcatgtgtttgaaattattctggaatacctggaaacaagagactggcaagaagcattttttactatcttgccccaacggaaaggagctgttcccacagacaaagcctgtgaaagtgcttctcatgacaatcagtctgtcaggatggaggaaggtggatcggacagtgattccagtgaggaggaatatagcagaaatgaactagattcaccacatgaagaaaagcaggataaggaaaatcacactgaatctacagtgaactctctgccacactaatgttacctggtttccttttagtttaaggaaaaattaggagaaagtgaggtgctatatagaatattgaaattggaagaacattttattttctcttatttctgttgtgatttttaaaaacttttttttggacctaaataataataaaaaaaaaaagccctttaaactttgtaaggaaatattttttgattttgcgtaagaagatttaaatgtgtatgtgattttttttgtttttgtttttaaagcctcagtagtttctagataattttactgtattagtatattttcattttctttcattttatattctttagaatgtgccttctgacctttcagttttttaattttatagtcacatcaacatctttatgatctattgcctatatatctgtgagggcacatattcataaatatactgtcaatctatcagcatttgtgtatggtaggttaccctctatttgcagcttttatgtttaaattagttacttgaaagaatgtagtaattttaggaagaagtatcagtttgatagacttaataattcatttcttttggactatggagcgcatatctgttccttctttatgatgcctttttatggttctgaagtaattactgaagagttgagaatctctttaatgcattttcttaattcttacaatggtgataagttacttcaattataaaattgaattttgcagactaaattattttataaggctgttgctattgaaagatcaattttgtctttacctgcatttaaaatggaacagctcttagcagctgtggtttttttttccatattttttttaaatttgttggctcttaagatgaataaagtttataggtgcatctgcctcctcttctctaagaatatgcatactaatgtttgtttctataaatcaaatacacatgtgataatatgcatgtaaatacataactatcctcatcatgtatggctctcagttcttaattgatgataacatgattgaattgccatatatctgtattacttgtgtgaatggttgtgttgaacacgctaagaacaatttgaattttattaagtacaaaaatccttaacgtttgtatgggaacattggcaagaaagaatagtgtgaaagggaactgttttagtttcctatcagtaattgtacatgcagttaaatgtttaaggtaaaatgattggtctctgtcacagctaaaagatttcagtagccttcattgagtttgggtaaaataagttgctgttcttttgtcttctttttaatatataaaagttatatttaaaaagtatataacatactatatatgttacatactaacatatatatacacaacagaaagtttattggatttagtactgatatttactgtctatttttgttactttgttcttagtaatctattatagttacctattttaaggtaaggtctgtaggcaagatatgtaagtaaagacaagccctacaattttaaaataacaaagcttatgtcttaagttgtattttttcaaaggttcatgtttttctgagtaaatgtggtttattagcatgaaatattatgccttttacttaaattattttatgtaaaatagggcactgtttaattatgaaagggggaaaatcattccaaataagagtttaatttttattaattataaaaaactctgtattagtttcctagatgtgctagaacaaattaccacaaactgggtggctttaaacaacagaaatttattctcttaacagttccagagactaaatgtccagactcaccaatgtcccagtgccatgcttcctccttaggccctaggaaagaatacttcctagcctcttcctggcttttggtggttgccagcaatccctgctgttccttagcctatagtggcttgactccaatctcagttttgttgtcaagtggtcttctaccctgtcttctatgtttgtatccgtgtccaaactctttttctagggagaccagcactggattagagttcaccatgatccaatatgacctcatcttgactacatccgcaaagaccctgtctccaaataaggtcacatttacagggtaccatgtgttaggatttgacatatcttttgggggacacaattctacccactacaggcccatatcttatctaggatgttggtggcaagaaggtgaagattactacctcttttgatataactagtttctgaggtatttaaaaatttggttttaaaaatattaagctttttgctcatttgcatgtatacttttctctcaacattgttttggtttatttaggttatttgttaaaacttcagtaaatactaaagttacttgtattagaacataataaaagtagagaattaaactacctaaataaatgcatcaaaaaatatatgtctgct

SEQ ID NO: 41814 - DNA, 3177 bp, Homo sapiens
aagaaaaattgtatgtatatagtcatcccttctgcttattccattcctttaagatcatagaatggccatagacaattttaataactttgctttaaaaattgaactctgtgataggacattaagaaacttcataagcagattcaacgatgttacgcagaaaaccgacgggcactgcatcctgtgcagttttacttgacaagccacggaggccagctgaaaaagaacatggatgaaaatgacaaaggatgggtcaactggaaggatatccatatcaaaccagagcactatagtgaactcataaagaaagaagacctgatttaccttacgtcagattcacctaatatactgaaggaattagatgaatcaaaggcctatgtgattggaggattagtagatcacaaccatcacaagggactcacatataaacaagcgtcagattatggaatcaatcatgcacagctcccacttggaaattttgtgaagatgaatagtcgaaaagttttggcagttaatcatgtgtttgaaattattctggaatacctggaaacaagagactggcaagaagcattttttactatcttgccccaacggaaaggagctgttcccacagacaaagcctgtgaaagtgcttctcatgacaatcagtctgtcaggatggaggaaggtggatcggacagtgattccagtgaggaggaatatagcagaaatgaactagattcaccacatgaagaaaagcaggataaggaaaatcacactgaatctacagtgaactctctgccacactaatgttacctggtttccttttagtttaaggaaaaattaggagaaagtgaggtgctatatagaatattgaaattggaagaacattttattttctcttatttctgttgtgatttttaaaaacttttttttggacctaaataataataaaaaaaaaaagccctttaaactttgtaaggaaatattttttgattttgcgtaagaagatttaaatgtgtatgtgattttttttgtttttgtttttaaagcctcagtagtttctagataattttactgtattagtatattttcattttctttcattttatattctttagaatgtgccttctgacctttcagttttttaattttatagtcacatcaacatctttatgatctattgcctatatatctgtgagggcacatattcataaatatactgtcaatctatcagcatttgtgtatggtaggttaccctctatttgcagcttttatgtttaaattagttacttgaaagaatgtagtaattttaggaagaagtatcagtttgatagacttaataattcatttcttttggactatggagcgcatatctgttccttctttatgatgcctttttatggttctgaagtaattactgaagagttgagaatctctttaatgcattttcttaattcttacaatggtgataagttacttcaattataaaattgaattttgcagactaaattattttataaggctgttgctattgaaagatcaattttgtctttacctgcatttaaaatggaacagctcttagcagctgtggtttttttttccatattttttttaaatttgttggctcttaagatgaataaagtttataggtgcatctgcctcctcttctctaagaatatgcatactaatgtttgtttctataaatcaaatacacatgtgataatatgcatgtaaatacataactatcctcatcatgtatggctctcagttcttaattgatgataacatgattgaattgccatatatctgtattacttgtgtgaatggttgtgttgaacacgctaagaacaatttgaattttattaagtacaaaaatccttaacgtttgtatgggaacattggcaagaaagaatagtgtgaaagggaactgttttagtttcctatcagtaattgtacatgcagttaaatgtttaaggtaaaatgattggtctctgtcacagctaaaagatttcagtagccttcattgagtttgggtaaaataagttgctgttcttttgtcttctttttaatatataaaagttatatttaaaaagtatataacatactatatatgttacatactaacatatatatacacaacagaaagtttattggatttagtactgatatttactgtctatttttgttactttgttcttagtaatctattatagttacctattttaaggtaaggtctgtaggcaagatatgtaagtaaagacaagccctacaattttaaaataacaaagcttatgtcttaagttgtattttttcaaaggttcatgtttttctgagtaaatgtggtttattagcatgaaatattatgccttttacttaaattattttatgtaaaatagggcactgtttaattatgaaagggggaaaatcattccaaataagagtttaatttttattaattataaaaaactctgtattagtttcctagatgtgctagaacaaattaccacaaactgggtggctttaaacaacagaaatttattctcttaacagttccagagactaaatgtccagactcaccaatgtcccagtgccatgcttcctccttaggccctaggaaagaatacttcctagcctcttcctggcttttggtggttgccagcaatccctgctgttccttagcctatagtggcttgactccaatctcagttttgttgtcaagtggtcttctaccctgtcttctatgtttgtatccgtgtccaaactctttttctagggagaccagcactggattagagttcaccatgatccaatatgacctcatcttgactacatccgcaaagaccctgtctccaaataaggtcacatttacagggtaccatgtgttaggatttgacatatcttttgggggacacaattctacccactacaggcccatatcttatctaggatgttggtggcaagaaggtgaagattactacctcttttgatataactagtttctgaggtatttaaaaatttggttttaaaaatattaagctttttgctcatttgcatgtatacttttctctcaacattgttttggtttatttaggttatttgttaaaacttcagtaaatactaaagttacttgtattagaacataataaaagtagagaattaaactacctaaataaatgcatcaaaaaatatatgtctgct

SEQ ID NO: 41815 - DNA, 3536 bp, Homo sapiens
  misc_feature (1)..(2): n is a, c, g, or t
nnctctgggaattgaagtttctgtggaaggaagcgtgagccgtaaccaggccaacccagaaaggctttctttctgagatttcacttccctgtcaactcttcagctcgtttcagaggcaccaaataatgtcatctgaaatgttgccagcatttattgaaacttctaatgttgacaaaaagcaaggcataaatgaagatcaagaggagagccagaagccaagattaggtgaagggtgtgaaccaatatctaaacgacaaatgaaaaaactaataaaacagaaacaatgggaagagcaacgggaactccgcaaacaaaagcgaaaagaaaaacgcaagaggaaaaaattagagcgacaatgtcaaatggaaccaaactcagatggacatgacagaaaacgtgttcgaagagatgttgttcatagcacccttcgccttattattgactgtagttttgatcacttgatggtattaaaggacattaagaaacttcataagcagattcaacgatgttacgcagaaaaccgacgggcactgcatcctgtgcagttttacttgacaagccacggaggccagctgaaaaagaacatggatgaaaatgacaaaggatgggtcaactggaaggatatccatatcaaaccagagcactatagtgaactcataaagaaagaagacctgatttaccttacgtcagattcacctaatatactgaaggaattagatgaatcaaaggcctatgtgattggaggattagtagatcacaaccatcacaagggactcacatataaacaagcgtcagattatggaatcaatcatgcacagctcccacttggaaattttgtgaagatgaatagtcgaaaagttttggcagttaatcatgtgtttgaaattattctggaatacctggaaacaagagactggcaagaagcattttttactatcttgccccaacggaaaggagctgttcccacagacaaagcctgtgaaagtgcttctcatgacaatcagtctgtcaggatggaggaaggtggatcggacagtgattccagtgaggaggaatatagcagaaatgaactagattcaccacatgaagaaaagcaggataaggaaaatcacactgaatctacagtgaactctctgccacactaatgttacctggtttccttttagtttaaggaaaaattaggagaaagtgaggtgctatatagaatattgaaattggaagaacattttattttctcttatttctgttgtgatttttaaaaacttttttttggacctaaataataataaaaaaaaaaagccctttaaactttgtaaggaaatattttttgattttgcgtaagaagatttaaatgtgtatgtgattttttttgtttttgtttttaaagcctcagtagtttctagataattttactgtattagtatattttcattttctttcattttatattctttagaatgtgccttctgacctttcagttttttaattttatagtcacatcaacatctttatgatctattgcctatatatctgtgagggcacatattcataaatatactgtcaatctatcagcatttgtgtatggtaggttaccctctatttgcagcttttatgtttaaattagttacttgaaagaatgtagtaattttaggaagaagtatcagtttgatagacttaataattcatttcttttggactatggagcgcatatctgttccttctttatgatgcctttttatggttctgaagtaattactgaagagttgagaatctctttaatgcattttcttaattcttacaatggtgataagttacttcaattataaaattgaattttgcagactaaattattttataaggctgttgctattgaaagatcaattttgtctttacctgcatttaaaatggaacagctcttagcagctgtggtttttttttccatattttttttaaatttgttggctcttaagatgaataaagtttataggtgcatctgcctcctcttctctaagaatatgcatactaatgtttgtttctataaatcaaatacacatgtgataatatgcatgtaaatacataactatcctcatcatgtatggctctcagttcttaattgatgataacatgattgaattgccatatatctgtattacttgtgtgaatggttgtgttgaacacgctaagaacaatttgaattttattaagtacaaaaatccttaacgtttgtatgggaacattggcaagaaagaatagtgtgaaagggaactgttttagtttcctatcagtaattgtacatgcagttaaatgtttaaggtaaaatgattggtctctgtcacagctaaaagatttcagtagccttcattgagtttgggtaaaataagttgctgttcttttgtcttctttttaatatataaaagttatatttaaaaagtatataacatactatatatgttacatactaacatatatatacacaacagaaagtttattggatttagtactgatatttactgtctatttttgttactttgttcttagtaatctattatagttacctattttaaggtaaggtctgtaggcaagatatgtaagtaaagacaagccctacaattttaaaataacaaagcttatgtcttaagttgtattttttcaaaggttcatgtttttctgagtaaatgtggtttattagcatgaaatattatgccttttacttaaattattttatgtaaaatagggcactgtttaattatgaaagggggaaaatcattccaaataagagtttaatttttattaattataaaaaactctgtattagtttcctagatgtgctagaacaaattaccacaaactgggtggctttaaacaacagaaatttattctcttaacagttccagagactaaatgtccagactcaccaatgtcccagtgccatgcttcctccttaggccctaggaaagaatacttcctagcctcttcctggcttttggtggttgccagcaatccctgctgttccttagcctatagtggcttgactccaatctcagttttgttgtcaagtggtcttctaccctgtcttctatgtttgtatccgtgtccaaactctttttctagggagaccagcactggattagagttcaccatgatccaatatgacctcatcttgactacatccgcaaagaccctgtctccaaataaggtcacatttacagggtaccatgtgttaggatttgacatatcttttgggggacacaattctacccactacaggcccatatcttatctaggatgttggtggcaagaaggtgaagattactacctcttttgatataactagtttctgaggtatttaaaaatttggttttaaaaatattaagctttttgctcatttgcatgtatacttttctctcaacattgttttggtttatttaggttatttgttaaaacttcagtaaatactaaagttacttgtattagaacataataaaagtagagaattaaactacctaaataaatgcatcaaaaaatatatgtctgct

SEQ ID NO: 41816 - DNA, 3557 bp, Homo sapiens
  misc_feature (69)..(69): n is a, c, g, or t
  misc_feature (73)..(73): n is a, c, g, or t
aaagaaaaaaaaaaacaaaaaacacgcaagaaaccaaaccgaaaaacccgaagaagaaaacagataacnaagncaacccaaaaaagcattctttcaaaaaatcacttccctgtcaacacttcaactcgtttcagaggcaccaaataatgtcatctgaaatgttgccagcatttattgaaacttctaatgttgacaaaaagcaaggcataaatgaagatcaagaggagagccagaagccaagattaggtgaagggtgtgaaccaatatctaaacgacaaatgaaaaaactaataaaacagaaacaatgggaagagcaacgggaactccgcaaacaaaagcgaaaagaaaaacgcaagaggaaaaaattagagcgacaatgtcaaatggaaccaaactcagatggacatgacagaaaacgtgttcgaagagatgttgttcatagcacccttcgccttattattgactgtagttttgatcacttgatggtattaaaggacattaagaaacttcataagcagattcaacgatgttacgcagaaaaccgacgggcactgcatcctgtgcagttttacttgacaagccacggaggccagctgaaaaagaacatggatgaaaatgacaaaggatgggtcaactggaaggatatccatatcaaaccagagcactatagtgaactcataaagaaagaagacctgatttaccttacgtcagattcacctaatatactgaaggaattagatgaatcaaaggcctatgtgattggaggattagtagatcacaaccatcacaagggactcacatataaacaagcgtcagattatggaatcaatcatgcacagctcccacttggaaattttgtgaagatgaatagtcgaaaagttttggcagttaatcatgtgtttgaaattattctggaatacctggaaacaagagactggcaagaagcattttttactatcttgccccaacggaaaggagctgttcccacagacaaagcctgtgaaagtgcttctcatgacaatcagtctgtcaggatggaggaaggtggatcggacagtgattccagtgaggaggaatatagcagaaatgaactagattcaccacatgaagaaaagcaggataaggaaaatcacactgaatctacagtgaactctctgccacactaatgttacctggtttccttttagtttaaggaaaaattaggagaaagtgaggtgctatatagaatattgaaattggaagaacattttattttctcttatttctgttgtgatttttaaaaacttttttttggacctaaataataataaaaaaaaaaagccctttaaactttgtaaggaaatattttttgattttgcgtaagaagatttaaatgtgtatgtgattttttttgtttttgtttttaaagcctcagtagtttctagataattttactgtattagtatattttcattttctttcattttatattctttagaatgtgccttctgacctttcagttttttaattttatagtcacatcaacatctttatgatctattgcctatatatctgtgagggcacatattcataaatatactgtcaatctatcagcatttgtgtatggtaggttaccctctatttgcagcttttatgtttaaattagttacttgaaagaatgtagtaattttaggaagaagtatcagtttgatagacttaataattcatttcttttggactatggagcgcatatctgttccttctttatgatgcctttttatggttctgaagtaattactgaagagttgagaatctctttaatgcattttcttaattcttacaatggtgataagttacttcaattataaaattgaattttgcagactaaattattttataaggctgttgctattgaaagatcaattttgtctttacctgcatttaaaatggaacagctcttagcagctgtggtttttttttccatattttttttaaatttgttggctcttaagatgaataaagtttataggtgcatctgcctcctcttctctaagaatatgcatactaatgtttgtttctataaatcaaatacacatgtgataatatgcatgtaaatacataactatcctcatcatgtatggctctcagttcttaattgatgataacatgattgaattgccatatatctgtattacttgtgtgaatggttgtgttgaacacgctaagaacaatttgaattttattaagtacaaaaatccttaacgtttgtatgggaacattggcaagaaagaatagtgtgaaagggaactgttttagtttcctatcagtaattgtacatgcagttaaatgtttaaggtaaaatgattggtctctgtcacagctaaaagatttcagtagccttcattgagtttgggtaaaataagttgctgttcttttgtcttctttttaatatataaaagttatatttaaaaagtatataacatactatatatgttacatactaacatatatatacacaacagaaagtttattggatttagtactgatatttactgtctatttttgttactttgttcttagtaatctattatagttacctattttaaggtaaggtctgtaggcaagatatgtaagtaaagacaagccctacaattttaaaataacaaagcttatgtcttaagttgtattttttcaaaggttcatgtttttctgagtaaatgtggtttattagcatgaaatattatgccttttacttaaattattttatgtaaaatagggcactgtttaattatgaaagggggaaaatcattccaaataagagtttaatttttattaattataaaaaactctgtattagtttcctagatgtgctagaacaaattaccacaaactgggtggctttaaacaacagaaatttattctcttaacagttccagagactaaatgtccagactcaccaatgtcccagtgccatgcttcctccttaggccctaggaaagaatacttcctagcctcttcctggcttttggtggttgccagcaatccctgctgttccttagcctatagtggcttgactccaatctcagttttgttgtcaagtggtcttctaccctgtcttctatgtttgtatccgtgtccaaactctttttctagggagaccagcactggattagagttcaccatgatccaatatgacctcatcttgactacatccgcaaagaccctgtctccaaataaggtcacatttacagggtaccatgtgttaggatttgacatatcttttgggggacacaattctacccactacaggcccatatcttatctaggatgttggtggcaagaaggtgaagattactacctcttttgatataactagtttctgaggtatttaaaaatttggttttaaaaatattaagctttttgctcatttgcatgtatacttttctctcaacattgttttggtttatttaggttatttgttaaaacttcagtaaatactaaagttacttgtattagaacataataaaagtagagaattaaactacctaaataaatgcatcaaaaaatatatgtctgct

SEQ ID NO: 41817 - DNA, 520 bp, Homo sapiens
  misc_feature (1)..(2): n is a, c, g, or t
nnctctgggaattgaagtttctgtggaaggaagcgtgagccgtaaccaggccaacccagaaaggctttctttctgagatttcacttccctgtcaactcttcagctcgtttcagaggcaccaaataatgtcatctgaaatgttgccagcatttattgaaacttctaatgttgacaaaaagcaaggcataaatgaagatcaagaggagagccagaagccaagattaggtgaagggtgtgaaccaatatctaaacgacaaatgaaaaaactaataaaacagaaacaatgggaagagcaacgggaactccgcaaacaaaagcgaaaagaaaaacgcaagaggaaaaaattagagcgacaatgtcaaatggaaccaaactcagatggacatgacagaaaacgtgttcgaagagatgttgttcatagcacccttcgccttattattgactgtagttttgatcacttgatggtattaaaggtatcatgaatcattgtcagaaaaatcttgtatgtgaattaggtcga

SEQ ID NO: 41818 - DNA, 265 bp, Homo sapiens
attgattaagttgaagagcggcgattacatctgtgctgagtgcaacagtagttcaggggctgacttttcaaatcccaacctcctgagttacagactctcttaaatagacttccttaatttccggatgcacttcttgaaattcccaattcttttcaaaattcctgggaaattacaaaggagatgagggtgggggtggggaattatggccgagatttcatcttgtcaggcaaactacctttttgtatgtctgattcctcagttttta

SEQ ID NO: 41819 - DNA, 1775 bp, Homo sapiens
ggaaaaaaagttaaggatacagttgaccgttcgataatgtagcccactgttgaccagaagccctacccacaacataaacaggcaataacacatattttgtatgtgtattatatagtatattcttaacaataaagtaaactagagaaaagaacatgtatcaagaaaatcataaggaagagaaaacacatttacagtactgtactgtatttattggtaccatacatttatgttgctgtttacaagatgaagcatctgtctgaaatggccagcagctacagctgtacctatctactgtacatatcaagcaagtcactttattcttataatgtctatgacttctttctttgaaagcgcttccatcatcactgttggcacttcatatgggtctcatggtgttaaggtttacggcattgcactagacacaatgaaaactacacaagagggccgggcacggtggctcacgcctgtaatcccagcactttgggaggccgaggcgggcggatcatgaggtcaggagattgagaccatcctggctaacacagtgaaaccctgtctctattaaaaataaaaaaattagccaggcatggtggcacgtgcctgtaatcccagctaatcgggaggctgaggcaggagaatcgctttttcccagaaggcgtaggttgcagtgagccgagatcgtgccactgcactccagcctggatgatagagggagactctgtcgcaaaaaaaaagaaaagaaaaagaaaagaaaagaaaaacacacaagagccgtgagagagatagcttttgattgcaatacacaatttactggagagatgagctgatcatacagagatgattagtgtcacacagtgttttaaacagattcttgcaaccctggagttcactgcagtagcaacagaagttagctatgagattttaacagtagtatagtatgtactacagttaatattaggtagctatgatttaatgctgcatctttgcatttgtttacatttatcttgactacaagtggtattatgtctggtcttaaggtttgtgtgcatatgttttgatgaattttaactttttataataggtttgtgtatattttatggcagtaaatgataaaacagactaatctacatatattttatgtagtcatgacataaacctaactttttcttaactttttgatatttctagtctatgtgtttcatctgcaggttttttcaaattgttgaaatctctgaaaaattttattgaaaaaaaatccatatatgtaagtggacccacacatttcaaacctgtgttcaagggtcagctgtgtaaataattttcctcaaaattaaagtggaaaaggagagttactactagtagaaagtagaactgtacccttgggcaggggtgtgtgtgtgtagttaaagatcaatttaacttaaaaggtcttggttagagaataaaactggcccttattagctttaatttacatgaaaaatgaaaaattttaggccaggcacagtggctcaggcctgtaatcccttaactttgggagaccaaggggagtggatcacttgaggtcaggagttcaagacagcctggccaacatgctgactcacccttccctactgaaaatacaaaagttagccaggcgcagtggccatccctacagtgctagctactcgggaggctgaggcaggagaattgcttgaacccgggaggcaaggttgcggtgagctgagatcgcaccactgcactccagactgggtgacagagcgagactccatctcaaaaaa

SEQ ID NO: 41820 - DNA, 1439 bp, Homo sapiens
  misc_feature (1222)..(1222): n is a, c, g, or t
ggaaaaaaagttaaggatacagttgaccgttcgataatgtagcccactgttgaccagaagccctacccacaacataaacaggcaataacacatattttgtatgtgtattatatagtatattcttaacaataaagtaaactagagaaaagaacatgtatcaagaaaatcataaggaagagaaaacacatttacagtactgtactgtatttattggtaccatacatttatgttgctgtttacaagatgaagcatctgtctgaaatggccagcagctacagctgtacctatctactgtacatatcaagcaagtcactttattcttataatgtctatgacttctttctttgaaagcgcttccatcatcactgttggcacttcatatgggtctcatggtgttaaggtttacggcattgcactagacacaatgaaaactacacaagagggccgggcacggtggctcacgcctgtaatcccagcactttgggaggccgaggcgggcggatcatgaggtcaggagattgagaccatcctggctaacacagtgaaaccctgtctctattaaaaataaaaaaattagccaggcatggtggcacgtgcctgtaatcccagctaatcgggaggctgaggcaggagaatcgctttttcccagaaggcgtaggttgcagtgagccgagatcgtgccactgcactccagcctggatgatagagggagactctgtcgcaaaaaaaaagaaaaagaaaaaagaaaattatatagaaataaaattccagctattccaaaactgcaccttgaatacaggtacagaattgctaaaaccgtgtaccattttgtagttttagcatgcttttgtgtaactgcatctggtgtttgatcctcatgagagccctgttaaggaagggtacatattattgtcctcattttccttcgaaaacacatcagagtttgtattttgactgtcagcattcaaatacaagtcttttatttataaaattttggtctttatactgtggctaaaaatcttaaatcacttgtcatgatttgaaatggtttataccgattttttttgacatttatacacacatacacatatttttaaattgtctataataaaatcatgctcatctttgaaaaaatattaggagtactacagtggatacctacatacttgctattcagcatacctggttttttgtttgttttttgagacagtcttctctgtgntccaggttggagtgcagtggcacgatctcagctcattgcaacctccgtctctactaaaaatacaaaaattagccgggcatggtggtgcgcgcctgtagtcccagctacacgggaggctgaggcaggagaatggcgtgaacccgggaggcagagcttgcagtgagccgagatcgcaccactgcactccagcctgggcgacagagcgaaactccgtctc

SEQ ID NO: 41821 - DNA, 1051 bp, Homo sapiens
ggaaaaaaagttaaggatacagttgaccgttcgataatgtagcccactgttgaccagaagccctacccacaacataaacaggcaataacacatattttgtatgtgtattatatagtatattcttaacaataaagtaaactagagaaaagaacatgtatcaagaaaatcataaggaagagaaaacacatttacagtactgtactgtatttattggtaccatacatttatgttgctgtttacaagatgaagcatctgtctgaaatggccagcagctacagctgtacctatctactgtacatatcaagcaagtcactttattcttataatgtctatgacttctttctttgaaaagtgctgggattacaggttgtgagccactgcacctggcctgtttttaaattcacataaatatgttttatatttttcattagggagaagaaggttgtgtctacaatttttaagacattggggagatttagatgccagtagtaacttaaaagagaaataattgcaaattctttttcctcttgagtatactttcatttaaggtacagtgttctgtaagttacttttaccgttaaacttcttaatgttgcttattgtttgtcttacatttttaggttggatttttcttaagtcacatgtctaataaaaaaaacccttaaatacctcatttattcgtcttcgttagtgaatgcattgttgtacatattagatttttctctttagataactcagcttcccctattaagtgccacatgtattacaaaattttatttatgttttattgtttaataaactcttgagaactagatacattttaatcatttgtaatacttacattttctaaaacacttcatttttccctggtttcttcaacaaagagatgcatgtagtacaaggatagctttacctgtgttagaagattgtttcacacatttacatcaactgcatagtcctgtttttgttgggccctaatgccagcatcactttttgctactgctgtttctgccttaaaggcaatatgcctctgtctagtttgctgattctg

SEQ ID NO: 41822 - DNA, 1626 bp, Homo sapiens
acttcggagagagaatgtagaatggaggaggtgaggaatttaactaatagagatgctttttctaacaggcagaaattagagaaatggatcaaaagatttaaacattgattacatataaacgagtttcctttttttctacatagcacacaggtgctcaacatttaatgaataatataacagatactgtcttaaaagtttaaaaacaggatttgtacttaatcctaaattcctcttatcacacaccagaaaataatttggattttatttacaaactacatccaaatactcttaaggaaagagtgtcatttagcttggagtagggactgactggggtctaagtgttggaaattaaattctgccattcagtccaacctcaaaggtgttccaggcaaggagttttgcaaggactagaaaccctttcacacttgaagtgcaggtgttggctgaaagaatagagggacatttcacaaacacagaacacggctcccctacaggaaagggatggagacagctacctttgctcttgctctcacattctctgtcctcatggactttcttctctgtttccctctgcctatctatctgcctggttctcttgcttctcctggccaaccagctttctcattagtgcatatgtagctgaaaaatccacccctcaagaacccactccacacaacctttccttttcagtacccaccacgctctgactagcatctctgtgatgcctaaggcaaatttttgaggatctgattggtttagttcatctgcctatgggtgagccaccctggggtcaggtgcctgtccaatcacctgttaccaaggaggcagggccgtgtcatttaagcatggccccatggactgaccctttcagcagggacttttattgggggctggtacccagaagaaggagcatgagtgggcaagaccttcaaaaagaacctactacacactggaactgactagtactcctgggatgccatgccacgcagcagccagcactcggagagcagtcccctggatactaccacacagagaaaaggggcatcttcacttgcacatcaggtgagggtgcacacacttgaaactctgctagactggccagagctgccccagccacttctcaccccaccaccagttattgatacagccgctgggtctaggaagcgatttctgaacaaggcccagttagcacaatgtcttgctcagcagacaataaatacttgtaaattgaattgcatgatcttagctcaggtgctactaatgtggctcacggccacacacttgcatggataagaaaaccaatgagcccctcaacagagtcttttgaaacaaaattggtttcaagtgaaacttacattattttttggctgtgaccttctgaatataataacttagtgtcctgagaattgaaaggcctcttgatttcttaggtgaactgttacagaatcctagcctgtggtaaatgctaaaatgtaaggtgtttctgagcaaggaatatttaggaaatataattgtgccacacacacattactttagaagatatgcagttgctctgattctgcaggtttaaaaaaaatgggaagtttgtgatatggcagaatctgtctccattggtcaaaccatact

SEQ ID NO: 41823 - DNA, 310 bp, Homo sapiens
tcaaggtggagcccactgaggtgaaggaaggagctgtgagggacacctgcatcctgctgcagaaatgtctgccccccgccttgtcccaccgcagctctatctcacagttggagaagcagaagcaaagcaacctgtcctggaccatgcagcctggtcctctgtttccagagccagaggtctttgtgctctgaaacaaagacagtgaccccattaacccactggcacttactgtgtgccaggcactcagcctgtgttgtctcattgcagcacagagcagccctgggaatggaagcagtgtcatcattcccat

SEQ ID NO: 41824 - DNA, 221 bp, Homo sapiens
taatggagaaagaatttaagagagctttgttttggtaaagatttggggaaatgttcagaaaatggttatagaacgacaccgtgcttaataaataacattttgaaatgggaaaaacaaatatgctgtaacataaagccaacttacctagatttgttattatatgggtcatatatatagcatatatatatagtttctaatttgagaaagaatttttaaaatca

SEQ ID NO: 41825 - DNA, 595 bp, Homo sapiens
tttgggcagtctgttcacaaatattttagaggaagacctgcggaagcaattatgcattgagcttttctacttgctgattgtacctattaaatattttatattcagtcaagagcttaatcatattttttgccagtccgatttgtggtttttgaattttttgtgttacttttatgcctttaacagttctgtgctttccaggtaggcactattttggtgctgccatgctgatgattattattataattattaactgctattaatcagtgagtgtacagtagagcctgtaccaagtgcctttgtaacttgtacaccatgtacataagcatcatctcattgactcatgtaattctctaatgcttgctgcgacactggctgcttgttccacagtgtggttattctccttcctttttcttctgtgtctgctccctggcgccttgcattgggcaggatgccacattgctgctgtggctgaactggcagttctcagaaatggtcctggggggtagcagggaacaactgcagtggctgtgatgctcactggcaggaagagcaggcagaggagtaaaccttcccctggtttctttgcaaaaaaaaa

SEQ ID NO: 41826 - DNA, 717 bp, Homo sapiens
aagtgcccccggacggttacagaggacacttaagtggtttgcaaagcctgtggtaggggaggagggtgtagaagggccaaaccacggaacttagttttattcatttatataaagcagcactccgattctttttgcgcggcctgaaatgcatgtgaccagagaagtaattaacaaaacaatgtcaacttctaaaaccgagacattacttagatgataaggcgcagcaactcggtgaatctgtacaaaccttggaaaaaaaacacattagtctatgggaccttccagttttctcatgctcctttccagctactaacctctcctaaagggaacaaccactttttggatttgattcccaggcctcgctttcaccgggaaattatcgttgcttgtaaaacagaagaagccgggaaggcaggcagggggagctgctactttacactctgtgctttgggatagcaaaatcccgcatttaagcaatccgaggaaacgagcaaatagacctccctcgcctctccgagcacactcaacagttccggttgcaaaatgtttgcctcctgggcttcccagcgtcccgttagttgttctatttacacataattagatacttaatggagagagaaactagaagttgaggcgttcctccaggctgtattgtaaagtatgaagtgaaatccaaaatgaaatggtaatgttagaaagcaacctcattaaaaaaaa

SEQ ID NO: 41827 - DNA, 422 bp, Homo sapiens
agttgtccccctcattggaagttctgggctcattgatttgtcccttgtggaattttatgctgtgccttggcatatgtttgccgaaataaaacccaactaaaagtggttcatactgcaagttgattttttttatcttgcataataagtctagaaataaggtggctctggggttgattaacattgtggctgacttacatcatcagggactcaagttttcaaaaatctgttctgccagagtaccttgggtatttcccttcatgggcagaaaatggcagcagtgtatgttccagatacagagggttgggattagctcttctgacttgtggaaactgtgaaatatttcctacaattaatcccagtcttgagtgagtttctcttgtgctcccatgtccaaaattaagggatcagctcttaaacttatc

SEQ ID NO: 41828 - DNA, 289 bp, Homo sapiens
ggctcaaattcagtcattatgtgtgaacttgatttataccagatttgtatatcttgctgccaatttttctatttctgctttttctgatgaaatatacccaatgttaaacaagttaatcaagtacaacaaatctagccaccaattacctgttcgtggcattgctatatgcacagtttcaccagtgtctggcgtggaatggaggatacctgtatattcatgtatgcctatataggcccttcctgtgtacaaacagtagagcaagttaactttaaatatgttaaaattatat

SEQ ID NO: 41829 - DNA, 168 bp, Homo sapiens
gaccctgtatcccaccggagactaagttagcacagtatttaacaagcaacagtttgtgaggacaaggctaaggggtggcctgtcacatctccgtcctcaggaggacgctgaatagagggaagataaaacagaatggatttcaactggacataaggaacttctgtagcc

SEQ ID NO: 41830 - DNA, 1966 bp, Homo sapiens
atgttcccccgcccgctgaccccgctggcggccccaaatggcgccgagcccctgggccgggcgctgaggcgggcccctctgggcagggcccgggcggggctgggtgggccgcccctgctgctgccgtccatgctgatgtttgcggtgatcgtggcctccagcgggctgctgctcatgatcgagcggggcatcctggccgagatgaagcccctgcccctgcacccgcccggccgcgagggcacagcctggcgcgggaaagcccccaagcctgggggcctgtccctcagggctggggacgcggacttgcaagtgcggcaggacgtccggaacaggaccctgcgggcggtgtgcggacagccaggcatgccccgggacccctgggacttgccggtggggcagcggcgcaccctgctgcgccacatcctcgtaagtgaccgttaccgcttcctctactgctacgtccccaaggtggcctgctctaactggaagcgggtgatgaaggtgctggcaggcgtcctggacagcgtggacgtccgcctcaagatggaccaccgcagtgacctggtgttcctggccgacctgcggcctgaggagattcgctaccgcctgcagcactactttaagttcctgtttgtgcgggagcccttggaacgcctcctctctgcctaccgcaacaagtttggcgagatccgagagtaccagcaacgctatggggctgagatagtgaggcggtacagggctggagcggggcccagccctgcaggcgacgatgtcacattccccgagttcctgagatacctggtggatgaggaccctgagcgcatgaatgagcattggatgcccgtgtaccacctgtgccagccttgtgccgtgcactatgactttgtgggctcctatgagaggctggaggctgatgcaaatcaggtgctggagtgggtacgggcaccacctcacgtccgatttccagctcgccaggcctggtaccggccagccagccccgaaagcctgcattaccacttgtgcagtgccccccgggccctgctgcaggatgtgctgcctaagtatatcctggacttctccctctttgcctacccactgcctaatgtcaccaaggaggcgtgtcagcagtgaccatgggtgtggggccagcagctggtggggactggtttcaacgccagctttctgtgcttctgcctgtcattcggagaaactctggctctggggcttggggcttctcaggatcctggatggcagagactgccctcagaagttccttgtccagggtgggcacccacagtgactcagaggacagggctaggcaggagacctgctgctcctcattggggggatctcttggggggcagacaccagtttgccaatgaagcaacacatctgatctaaagactggctccagaccccgggctgccaggattatgcagtccacttggtctaccttaatttaacctgtggccaaactcagagatggtaccagccaggggcaagcatgaccagagccagggaccctgtggctctgatcccccatttatccaccccatgtgcctcaggactagagtgagcaatcataccttataaatgacttttgtgcctttctgctccagtctcaaaatttcctacacctgccagttctttacatttttccaaggaaaggaaaacggaagcagggttcttgcctggtagctccaggacccagctctgcaggcacccaaagaccctctgtgcccagcctcttccttgagttctcggaacctcctccctaattctcccttccttccccacaaggcctttgaggttgtgactgtggctggtatatctggctgccatttttctgatgcatttatttaaaatttgtactttttgatagaacccttgtaagggctttgttttcctaatagctgactttttaataaagcagttttatatataaaaaaagcatttctgtgatttc

SEQ ID NO: 41831 - DNA, 1262 bp, Homo sapiens
ccacaagaatcatcttccttgtactataacccttgagtagatgacacctgcctttggcaagacttggaggagagacacatgctggtcatttgaccaatttccagtctcctacctgggaccctggggctattcccttactttttgtcataggcattaatagtcaaatagtgggatagagccaacaggtatgattataatatatatgttgtatttgaaaattaggctctgaaaaggagatattaatgtggtgtacttatgtatttcatactttaataatgaagtgaccttatctctccaaaatgtagccactgttaactgctatttatgtattattcactgagtatattactatctttgtattttctacaaagatttatcagcacaattgtgagaaatcttcaaaaccttttagggttccaattaagttggtaataatgatgcacttggcaattgtttataaagggatcattttagaaaaaggaggaaagtattttttccctcttcaaagtgtgacttgtagtcttcacctggattttttttttttctgtttaacccagtagggctttgttctcaatgcagaatctcctgtgacccttgacattttaagggattaattttacaagtcccattaataaaacttgttccttcttactctatactaaataccttcttttccttattatacagctcatacatacccatatctaaaattatttttgttcaaactccaattatcttataggatttaagatgctatttaattgggtaagtctggcccacaccaagataggtgataaaatggtgaaacctcagagttaaacaggctaccctgttgagggtgatctatttggaaaggaaaagaaggttatgataggctgtgaaaacttggaaggaagttaagtcagatgggatgtttgagggtgagggaaaagaaagaatatgtttggtaagagcaaaggagagcccattctataactttaggtgagagctgatatctatcagggtttgaatatagctcctacaaatcattctgcaataattcatctacacgtttgagcactccaactaaattttaattacctcaaaggtagggacttgatcttactcaatattgtatcccaagacttgctgggggcactggctcacaactgtaatcccagcactttaggaggccgaggtgggaggatcagttgagcccaggaattcaagaccagcctgggcaacatagtgagacccatctgtaccaaaaaaaaaaaaaaaac

SEQ ID NO: 41832 - DNA, 239 bp, Homo sapiens
taacaattaacattgctcccatgaaagaaaagctcaggatttgacagcttcactgccgaatttttccaaacatttaaagaactaaataccagttctactcagactattccaaaaaattgaagagaagggaatgcttccaaattcattctacaaggtcattagtatactgacaccaaaactagacaaatatacaacaaaaaagaaaaccacaggctaacatccctgataatcttagatgc

SEQ ID NO: 41833 - DNA, 418 bp, Homo sapiens
ttttctgctgtggcaaggacaaatgcatgcagcagattgacttagggtgtgactggctggccagcgccgtccgcatctcgaactcacctggacacatggacaccaggcgtccgctggcaactctctttattctgggtcctgtgctggtcattgcatttgcaggataaagctgccctctcagaagaggtcctcatgtttagaaagtgtattttagctgtgctggtcattgcatgtgcaggataaaacttctgccctctcagaagaggtccttgtgtttagaaagcgtatttcagctgcctctgggccctcacaccccgtcatgtattcacttccttccatgtgacctctgcccaatgtcaactgtttttggcatcttcacatatattttggattctgtgggttttatctgttttcctaa

SEQ ID NO: 41834 - DNA, 243 bp, Homo sapiens
ctgatgccatgcttgttaagaattcatgatttgccttatagattgactctaccagataattagaggtcattagatgattcttcccccttaaaacaacattcgtatgaataaaacaaaacacagcacagtgaaaataatagaacacaagaatgaaattgttttcaaataataacctcctgatcccacaggtaatagatcacaatcaaatcaaatctgattatatatttctgactccttggagga

SEQ ID NO: 41835 - DNA, 550 bp, Homo sapiens
cctctgtgtgaactagtcacctctgtgtccccaacccttgaacacagtatgttactcagccagtgctcttggtaaaaatgaatgtgaggttttaaaacagcagtgtgccagtatttgttttcttggagtaatcaaagtaatattctgactaatgtttagttgaattttggataaagctcaaaataagcattggattcccgtagctttgggtttctaaaccctggaagtaatgaatgtgacaaatgtgagacaggatattagagttaatagtgggtaatcattccattatttgtgatccactgcacatctgctacactgtacatgttagatgctacagtgacacagagctatggatcttgcctcaaaaaagcttatggatgagtagctaaggtcagcagataatggtgacaatgcagaatagaaaggggtcagaggccgagtatggtaactcatgcctgtaatcccagcacttcgggaggccaaggtgaaaagagtgcttgagcccaggagttcaagtccaacctggacaacatggtaagacgcatctctc

SEQ ID NO: 41836 - DNA, 329 bp, Homo sapiens
gccagcccggctgcagcatcccctcggcacacatccatctggtgctgcctccgtgccccctcctgtcacctgatgctcgtgctcctgaatcttcacacgcgtgctccgtgcagccacctcactggctccctgggaagggtgacaatgtctcacgcctgtcagaatgcacctctctgtgcactgaatattccaacacagaatcattcctctgtgatgatttatgctttgcgctgtagaattggaataaagaaaaagtgaatttagacattacagccatcaggctgaagctgggtaattgcattagggaattaaatgagagcatttgagct

SEQ ID NO: 41837 - DNA, 417 bp, Homo sapiens
aaaaaaccctggaagaaaatctaggcaatgccattcaggacacaggcacaggaaggatttcatgacgaaaatgccaaaagcaattgcaacaaaagcaaaaattgataaatgagatttaattaaactgaaaagcttatgcacagcaaaagaaactatcatcagagtgaacagacaaccctacagaatgggagaaaaattttgcagtctatccatccaacaaaggataatagtggagaagacccaagaactcccaggaagaagagagaaagaagtgtgatttaaaatggcctggaactattccgtagcagtactggaagctagaaagcaacggggctttccgagccagggggaaattgaatccctgaatagactagaaatgtgttgtgaaattgaggcaataatatcctaccaagtaaa

SEQ ID NO: 41838 - DNA, 750 bp, Homo sapiens
agcattccagctttccagatatgcagagataatacattggctatcagctacttggcttggcctattccgtgtttaaaatcttggactctttgctagtttttacagatcagaatttttcacgtattaatccagttttcctagcttctcttgaagaatttttggagatctcttcatactgagccttcattagcccaggacagtactgctgtagcagttcatatattttttcgcttcccaggcctgtgttattcacttaagttcatagcctggtccctgcagggttgtacccgagcacagctacttagatgtcctgaatgtattaccggttaaatggaggtttcaaagaacctgctgtttttggccctgtgctcttgataacagagtgtttgagggacaactttcacatttgagtttttccaaaattaaaggttgtagaagagtcacagtatctattgtcaaaaagaaaagaatttaaaaaggcagcaattgccaggatacttcatttgagcaatgatattttccagtggaaagtcacatcttaagggttaatgccccttaactgttggccgtatttgaaaacaaaccaagctaaaaacaagagacactgacatgttgtatgacggtgtggtgtggatgttgtgtttattttagtcctgagatctagttgtaacttccttgatttctgtatgtagccacggagcaccattacctgtcaccattacctgaatggctatactgcttgctttcatt

SEQ ID NO: 41839 - DNA, 489 bp, Homo sapiens
gtagcataacctcattcttcttggacatggaacaagaacttgagacccaccgaatgtgggcatgaaaaaggctatagcatcccctttggggcttcagggtcactggcatcccttttcaagtgccaccacattccccttgttgggatgccaacgcacagggcggaggcaggtcaaggcacccccagccttggccccagctgtgggctgagtgtggatcctgtggtgaacacggggtccagttagagtacaagcccaggtgtggcctggctcatcgaatggccagggtgcctcctgttgtgacccagggctgagtgaggctcaggtatgtgttttgccagctgtggatatatccagctggccaagcagcactgaaaaaatcctgcgtcactgccacttgcttgcagggtcataatggaaatcagagagtgcatcttttaagggagctcaggtaaagcatgtcctccagtgccagccaagtttcagtcagaa

SEQ ID NO: 41840 - DNA, 389 bp, Homo sapiens
tggtcatttcttaaaaatttaaacatacaccaatcataggacccagacggtgcacttctgggtatttacccaacagaaatgagagcaagtgtctctacaaatatttgtacacaaatgttcatagcagcttttttaggaatagccccaaactggaaacaacccaaatatggtataatcatacaacagaatgcttctcagcagtaaaaaggaacagactaaagacacactatgtaaatggatcacaaaatcatcatgctgagtgaaagaagcaagcaagaaagaaaagagtacatactgtatgagtccgctgacatgaaattattttaaaaacgcaaactattgtatacagacagaaagtaagcgagactctaactctacaaaaataaaaa

SEQ ID NO: 41841 - DNA, 291 bp, Homo sapiens
gatgactctgataggtagttacgacttgagaaccagtgtggtaagttatatgaagtaagatagcaaacactggaacaactagctgtatctagctgaatatacaaattttagtggattttaagttctgaaatacaatagcattatgtccatctgatgtgttaactcttgtgcctcctctcatgttcttccacgccagatcaaaacgttacattaaataaatgcagaaactaatacattattcaagtactaataaatttattcagaaatgcacacactgccgggcgtggtggc

SEQ ID NO: 41842 - DNA, 267 bp, Homo sapiens
ccttctgtctggaatgttcttccccagatacccaaatgtccaactgcctgtgcaacttcaggtcttcatgcatatgccaccttctcagaggggcctgcccctccatcactgtcccctctactcctgacacccctttccctgctccacttgcccacatatcatactatgtaaaattaatgcactgctttttttcttttctttctttttttttttttttgagacagcatctcactctgtcacccaggctggagtgcagtggtgcaatct

SEQ ID NO: 41843 - DNA, 902 bp, Homo sapiens
cctctctcccacccacttcagtctttcttttcctccttcacaccctcctcttctgtctctctgcaacccctcctggtgatctctgagtctctgagcacctccgccttcctctcccactgcctctttctccccctcatcctctgggactcacattccctaaatactaatggcagggatttgctgtgccccatggctcagttaagttctgctccccagctctgccatcatctgcctttgcctgaaggtaccaggatggctctctgcaaggattcccaccaggaatgccaaagccagagacttagggaccaaaggacccagaagggagatctgaaaaattcctgcttaggggcgggtcctggaggctctgatttttctgggtattgagggacccaaactcaaccagattccaaatgccagacgattgtgagtagatacagctggtgagagggtgctctggagacgcctgcagaaaagagaggaaactggcccagcctcctagagacacttctgagtacggctcggtcctgagcctgacggcagtccaggctgtagctgcctttgccaggacatgtgataaaggcccgcagatccttgatcaaggtgtcagccactttgtcggagctcctggaaagggcttctctttccttcatggacattctccaggttggtagtggttctggcgggggaattttctgtgcctctggtcactcatgtgtctatcccccctgagtttgtatgccagttcttttaaactagcgttgggatcatggacagtgctcttatcttccctaagcctcagtgtcctcatctataaaacgggcataataatatacctactgaataaaataatgtatgtgaagtgcttcacactgtgctcagcacattgttaaatgttcaataaa

SEQ ID NO: 41844 - DNA, 298 bp, Homo sapiens
taaagagtttttggggtctggaagcctcttgtgctttatttcactcaaatagctcttgcaggatatcagatttcagttcagtgccctctgcccttaaaaacaaaaacaaaatctggaggtcttctctctactcgcttactacaaggcctctcccagcccttggtcccagagtaacttgagccttctccaatagttggtctgccagtgagacatgatgatgtagtagtttagtcctggttctgccagtcttgtccttgggcgagtgatttcttcctcagcttagggtcaggaagaaagg

SEQ ID NO: 41845 - DNA, 536 bp, Homo sapiens
aatttacaaatacgtaatccgtgaataataagaaatgctaattggacgctatgtttgccaggtgcatagcaattttgatttgttgtatcttctattgaaaggactgttttgtcattacaaatcgttactcagttttttgttgttgttgttgttgttgttttttatacaagaatctcactctgtcacccaggctggagtgcagtggcgcgatctcagctcactgcaacctccgcctcccaggtccaaacgattctcctgcctcagcctcctgagtagctaggattacaggcactcaccaccacacccggctaatttttgtatttttaatagagatggggtttcaccacgttggtcaggctggtctcaaactcctgacctcgtgatccgcctgcctcggcctcccaaagtgctaggattacaggcatgagccaccgcacccggcccgttactcattttttatacctctttcttaccttaaagtctactgtatatgatagtaatgcagtcatatcaactatcttttggttttgattata

SEQ ID NO: 41846 - DNA, 366 bp, Homo sapiens
gatttatgaaaaggtgcctgcctaatcttggtacacttcctgattgtggtttcagcaatgtggagagttcaattatttctaagtgaccaaaaaagcagaaccacagactctattggccatcctaactcacaccttatctctactattctctacctttctccctcctagaatcattatttactctgtgtttttgcacccaagagcataaacggtgcttgggacagtgaaattgggtaaggctgtgtacattcaatttgctcctgatcctcttccactcctttttctccatctttcaaaacccagtttagcacctcacacccattaggatggcaaatacataaataaaataagtgttggtgaagatgt

SEQ ID NO: 41847 - DNA, 339 bp, Homo sapiens
tataaggagctcacagcctagatctcttgcatgctcagttcacaatagggttcacactcctatgagaatctaatgccactgctgatgtgacaggaggagctcaggcgataatgctgtcttgcctgctgctcacctcctgctgtgcggcccagttccaaacaggccatggactggtagttgttcgtgggctgggggttggggacccctgccataaaatactattcagccaggcatgatggctcatgcctataatcccagcgctttgggaggttgaggcaggaggattgcttgaagccaagagtgtgaaaccagcctaggcagtgtactaagaccccacct

SEQ ID NO: 41848 - DNA, 590 bp, Homo sapiens
cctccgcgcaacatttgtatttttttaaagccagagaggaagctttgccttgccacaggctgtgaacctcttgagagctaggcagagacgctggaacttctttgggtcctgtggattctagaacattgctctgagagtggggtcccaaatatttgccccattgagatttttcacattttaaaggttacacatttcttcactagcatgttgctgataacctagaagagttgatcattttattttgcatgtataccttgtgattgctttcaagaaaaattaaatatgggatggactaaagttacgtattaaagatcttaattcagcttttaacttgattttgtttagctttgtttagatttaatttattaaacatcagaaaaaagaagccaaaagccagattgtttatagtgaaagaagaatgaagacttgaaatagtacccagataatttagggtaaagttggtctttgtccgaaaatactctgctgagggcaaaaaaacttctttagagtcaatttgtttttcagtgtattaggtttttttaaatttttaaatgataactttgaaaataattgtacacaaaagaaaaaaa

SEQ ID NO: 41849 - DNA, 487 bp, Homo sapiens
ggatttcagaggaaaaagaggcccatggggaggggggagcagacagcagctcatccaggccaggagaatgaccactcactgcttggaaccagaaaaagaagggggaccagaaacaggaggtgagggagggaagggcctgctcctgtctctgggactccctgattcaactctggaaacagtccttaaggatttgctgcagagcaggagctacttaaaggctaattttaaaaatcggtgagccctttagtcacccctcagaagggtggaagggtggacagtgaccagggaaggtgccctactagaccatccacgtccctcatgatgtgtttatccattttgagtctggagcagattgcagctcggggacttaaagttagagcctgattcaaagtaatgtagggttggcaacccaagtgtccatcgacaggtgaatgataagcaaaatgcggtgtatccagacaatggaatattactcagcctttaaaag

SEQ ID NO: 41850 - DNA, 321 bp, Homo sapiens
tatctagcaggcgtggtggcaaacacctgtagtctcagctactagggagcctaaggcaggaggatcgtttgaggccaggcattctgggccgtagtgtgctatgccgatcaggtgttcacactaagttcggcatcaatatggtgacctcctgggagcggggcaccaccagatttgctaaggaagggtgaaccagcccaggtcggaaatggagcaggtcataagtaactcctgtgctgatcagtagtgggatcgtgcctgtgaatagctgctgcattccagcctgggcaacatagtgagacctcatctcttactaaaaaaaaa

SEQ ID NO: 41851 - DNA, 276 bp, Homo sapiens
aagtgataccaattctacacagtctctttcagaaaaaattaggagagaacactttccaacttatttttttaggtcagcattaccccggtgcaaaaccaaagtaagccaacacaagaaaaaaagtctacaaatccatattcctcatgaactctagacacaaaaatcctcagtaaaaagtaagtaaattgagcaatatataaaaaggataatacatcaagaccaagttggttttatcccaggaatgcaaggctgagtctacatttgaaaatttattag

SEQ ID NO: 41852 - DNA, 436 bp, Homo sapiens
aaaatgtaaataaatctaaatagatcttgactaaagttctagtccaactaaaccatcattaaaataataataattgagagtacacccctaaaggaccctactagtggatgcaattcaggaaaaacaaagttgaactcagaaggaaggagtgaaaccgggcgtggtggctcacgcctgtaatcccagcactttgggaggccaaggcaggcagatcacaaggtcaggagtttgagaccagactgacaaatatggtgaaaccccatctctactaaagtaaatacaaaaattagcagggcgtggtggtgcgcgtctgtagtcccagctactcgggaggctgaggcagaagaattgcttgaacccgggaggtggaggttgcagtgagccgagatcgtgccactgcactccagcttgggtgacagagtgagactctttctca

SEQ ID NO: 41853 - DNA, 403 bp, Homo sapiens
ctgactcagaagtctggtgtgttctgtcagcattcatgaaaccgtgaaagctaacgtgttagtttgcaaacataacaaaatatgattcatcacagttctccacgctcactagctgggcgtccctacacgagttttttaacctctcttagctgcagtttcccttctttatattataaaggggacggtggtgtgtatgtacccgccccatagcttcgtcttggggttaagtaagactgtaaaatccctaccacactggactcttcccaggacttccctttccctctttgaactctgccagagactattctgcatttgaggcctggcgatgctgggcaggggcgggtatgggtgaagcacagggtgggccgcggctggcgggtttggtgcagaaacgggctgtggc

SEQ ID NO: 41854 - DNA, 431 bp, Homo sapiens
atatgtattagattttttaacagacaaaataaaaccttatcaataaatcaccttttcattgttaattctttagtggtattagtgctgctctaataattcaaccttggatcagagaaaaagccaaataaaaagttataaaattaattagtttatttatttatgttcatgctcatggaaaatcagtataagatagagagaagagcttggactctggattgcaaatacatggttttgaaacccaggaacaccacttgggcaattaatggaatgatcattaccttaatttatcctttgtacaatgaggataataaggtcacctaactcacagggatgcttatagaatcaaatgacttaaagtgcttagaagagtgctttgcatgcagtaaattcccactacatgctggctgttgttattattattattatcccca

SEQ ID NO: 41855 - DNA, 655 bp, Homo sapiens
ctgctgcttgtcctgggacttcattttgagaatgactgctcgatttagaacttttgtcattcttatctcctctttcctcttaatctccctttctcatcctcctcctaatctgctgagagctaagaacacaaagatatcttttagtacctctttttttttttctttttttttaaatgagaaaaaggctttgagtcaaggacttgaattgtttcctgtgaataaggtacatgagctttatattatcctttggctgaggctagtatcacttcatttctggttaatgtctgtgttctgaataactagagttattgttgaattcatgaatataggagttgccgatgcttagtcatgaataaatctgggaaacggattccttccaccttggtaatgttagtgagacaaaatataaattagttactataacttttagtttttcaaaatacttaggaaatgagtagcataagtactgtggctgtttaaaatataaaaccctcaagcagagttccatggatggaaaaaaaaaacaaccctatggttctggaactagtaatcagatatcttttatttacatgttacactttaatatgtatgtttttaaattgttacaaaaaaatcaactaaattgttcacatgagaacatgtcctggcaaaaaaa

SEQ ID NO: 41856 - DNA, 953 bp, Homo sapiens
tgcctcggcctcccaaagtgctgggattacaggcatgagccaccgcgcctggcaaaattgtgtattcttaaaatgaaaaactatacagaaatgaaaatgaacaaactgctatatatgagtatggccaaatctcaaaaaacattgtagaatgaaaaaagctggaccaaaataatgtacactttatatgtccttccatgttccatttatgtaaaagttcagaaatagaaaaaaactaatctactgttagcattcaagatagtggttctctttgggaaggttggagggggcttcctgttactgttaatgtactatttctcgacctgtgagatgtttgtgatggatgatgtgtttattttgtgataattcctggagttgtacattttctatatgtgtgttatattttaaaaagtaaaagaacaaaacaaaacgaaaaaaacaggctaggtgcagtagctcatgcttgttattccaacactttgggatgccggcacggcagatcacttgagcccaggagttcaagaccaggagttcgagaccagcctgggcaacatggcaaaaccgcatctctacccaaaaaaaagaaaaagataaattagccagacgtggtggtgtgcgcctatagtcccaagctacttaggaggctgaggtgggaggatcacttgaggtgagccatgatcgtgccactacactccacactgatttgaggtttgctgaaaccagtggttacatatttctctctggaagggggtggacgagaatggctgttactacgagggctatgtgctgattgaagagtatacaatgagcgatctctataggtctgtttgctcgtaggcagatggagcttgttataattatgcctcatagggatagtacaaggaaggggtatggctatgtgctctgtcagggggcttgagaatggtgtgaggcgggggatccgtgtagagactgtc

SEQ ID NO: 41857 - DNA, 917 bp, Homo sapiens
tgcctcggcctcccaaagtgctgggattacaggcatgagccaccgcgcctggcaaaattgtgtattcttaaaatgaaaaactatacagaaatgaaaatgaacaaactgctatatatgagtatggccaaatctcaaaaaacattgtagaatgaaaaaagctggaccaaaataatgtacactttatatgtccttccatgttccatttatgtaaaagttcagaaatagaaaaaaactaatctactgttagcattcaagatagtggttctctttgggaaggttggagggggcttcctgttactgttaatgtactatttctcgacctgtgagatgtttgtgatggatgatgtgtttattttgtgataattcctggagttgtacattttctatatgtgtgttatattttaaaaagtaaaagaacaaaacaaaacgaaaaaaacaggctaggtgcagtagctcatgcttgttattccaacactttgggatgccggcacggcagatcacttgagcccaggagttcaagaccaggagttcgagaccagcctgggcaacatggcaaaaccgcatctctacccaaaaaaaagaaaaagataaattagccagacgtggtggtgtgcgcctatagtcccaagctacttaggaggctgaggtgggaggatcacttgaggtgagccatgatcgtgccactacactccacactgatttgaggtttgctgaaaccagtggttacatatttctctctggaaggaagtggggtaagagcacctgagatacggagaactgatttcatcatatttttcatttcatggtatacttttgtgactaacttgtatgaagccctgctttattttattctcctttatctctcgtcttcatccaattccctttccctcacagttgtccatttgaatatgtctaat

SEQ ID NO: 41858 - DNA, 294 bp, Homo sapiens
taccatgaaatgaaaaatatgatgaaatcagttctccgtatctcaggtgctcttaccccactacactccacactgatttgaggtttgctgaaaccagtggttacatatttctctctggaaggaagtggggtaagagcacctgagatacggagaactgatttcatcatatttttcatttcatggtatacttttgtgactaacttgtatgaagccctgctttattttattctcctttatctctcgtcttcatccaattccctttccctcacagttgtccatttgaatatgtctaat

SEQ ID NO: 41859 - DNA, 446 bp, Homo sapiens
ttaacttcttcatctttacgatctcattttggataaatgctgtaacagattttctgcgtatttgatttgttttatccacacagctctggtttttgtttttaacttgtggttaacagctagtctttgttgttgttgttgttgttgttgttgagattgcggcctgggcaactgagcgagactttgtctcaaaaaaaaggaaagaaaaatttttaaaaaagtttatcattcagttatcatgtctatattttctttcaatagatttttggagtttactatggatattgtaacaaaaacaggggtataggaagcgtacagcaccttcaaaaaatttttaatttaaattactttctcactacctagttcagtgatttggtttttaaccagtaaaaaataaggcagtttccaggcagggcataatagaaaagaaaaaaaatacaatttaaaaa

SEQ ID NO: 41860 - DNA, 983 bp, Homo sapiens
gagctgagattgtgccattgcactccagcttgggcaacaaaagcgaaacttcatctcaaaaaacaaaaaaagaagtccgggcgcggtggctcacgcctgtaatcccagcactttggtaggccaaggcgggtggatcatgaggtcaggagttcaagaccagcctggcctagatggtgaaaccctgtctctactaaaaatacaaatattagctgggcatggtggcatgcacctgtaatctcagctactcagaagtctgatgcaggagaattgctaaaacccgggagggagaggttgcagtgagctgagatcgtgccactgtactctagcctgggtgacagagcaagactccatctcgaaagagagaaagaaaaaagaaattcctcagggaagtacctcggcttatttcgtaaagaggtactgaaggaagcagaggcacgtggaggacttccccacctcgtgcagctatttgggccgtggcgtctgaaatttattatttcacagtcacccctttgatgacgttggcagtggactgcagtcatctgtttaggcctttccatggcccacatcagtgccagtatttctgtttgttgcacatttgatttccttgttgttggcatttagaaggccccctgttttccagatcgcatcatgggcatggaccacagagattgcgtcttgtgagtctgcagaaacagtcaaggccttgtactctcttaggcccagggctcaggttaatgcagattttcccagccgtctgtgctgaagtccctgcggggaggctcctggctggtttcccgtaggttgtcaactacacgtgctgcccttcattggcctcttttcgtgaagctcctgcctcccacaaacgatgtctccctttcttcttgaaccacatctctgttattgaaactctagaagtcggctgggtgtggtggatcatgtctgtaatcccagcactttgggaggccgaggcggggggatcacct

SEQ ID NO: 41861 - DNA, 532 bp, Homo sapiens
caaaaaaccaaggctccgactggacttgtcttctgatttctggctgttctaacttcaaactcatgaacaggagccatagttggacctctaatgcctcccaacgatcactctctaggtcctaatctgttacccttgacaatgacttcttttctctcaaacctctagcacctcctcctcgtcctcacttagctgttcctcccattttactgagcaaatagcaccccaaaaagagcttccagcagctcccaccaccgcatttacccatccctgcctccgtctacatccctgtaccctggatctactgtgctcctaactgtggcctccctcctagttgtcatgactttctccggggtgcttagcaccgtctaccacaccacatgttgtattatttgcttattgtctgtcttcccattagaatggaagctccatgagggcagaggttttattcatttgtttactgctatgttcctgcactgagaacaatgcctgggatgcaggaggtactcactaaatgtttcgtgggtaaacgact

SEQ ID NO: 41862 - DNA, 438 bp, Homo sapiens
agcgagcattaccacttgagctccgcctcctgtcagatcagcaggggcattagattctcataggagcgtgaacctgttgtaaactgcacatgtgagggatctaggttgcacacttcttatgagaatctaatgcctgatgatgtgaggcaaaacagtttcatcctgaaaccatcccccaactcaaccccaatttgtggaaaaatcgtgttccgcaaaactggtccctggtgccaaaaaggttggagactactgctctaggtatcccctactctagcacttaccattctgtattgtactagtttgttttcttggcttttgcctacatcagatcctgagtttcttgagggcatgaactgagtcatctttaattccctagttcggctctgtcatgggttagacagtgtttatagagaggataaatgacataggatagttgaa

SEQ ID NO: 41863 - DNA, 453 bp, Homo sapiens
ctttaacacataagtgttatcaattgtacgtatacaatcttctagtcactcccatttttgacagagtcaaagtcaaagtccatatgatggccccctagacccagagtgatctggccccccacccgctcacccaagcacacacgccctgtggtctctctccctcctgtccggtcactgcagcgacacaagcctccttgcagttgcttggacacaccaggcccatgcccacctcaggacctttgcatgtacctcttcctcagccaggaaagctccttccccagaaatccaaggggatcgcacgcttacctgccactggtcatcatccaaatatcacctatcataagagcttcccgactgccctacacatggatgtacaatccccacacagcattcttcatcccctcggagacttatttttctccaaaatttttatcaccacccagcacagataca

SEQ ID NO: 41864 - DNA, 237 bp, Homo sapiens
gaatatgagacagattgtgctcacagagccttgaagagtgtgacagtatttgagggccacgctgttgtcttagagtgaagtgaggagaacctgcactggtttggtagtcatgggaatggaaggaggaaagaaatgtgaaagctcatcggtggcagagtcaaaatggcttggtctttgtagtcaacgattaagtgagaaggaggaattactggctgacttagaagaagtaaaaaacgt

SEQ ID NO: 41865 - DNA, 761 bp, Homo sapiens
aaatatgatcatagctagtgggcttaccttggcagtacttagactgtgtatcctttgaagtgtccttatctagggatggtttccatgaaaaccatacaggttttctaaatgacacagtctgggtaactgcctagcttatgtaatcatgtgaggggttaataatctctagggtgtagttacactgatgacttttcaaggttcccagggcctgaccaaaattttggcttctcttaatacaaagtggcacctggaattttagctctgtgtacatgatattgggccccaaatgggtttctgtgggatgcaaccccagaaagggtactctgatagtactggagaaggtttactgcttgtcctgtcatcgtagttcatgtttttttccccaaggccaaagattgggctgggattggggtggtagtgtatttgaatgatgctggagataaccaaagccaacagtctttgccagagctgggctggtggtatttaactgtctttgagttaaatgtaaagtttttaataaatacccagaatccattaactgctggaggggtaaagtgaagctctgttgtaaaataaagctgattcccattatgcgtggtcctgtatacacaggctgtgggtgaccattatggaaccaaaaaatacttatttgttattttgtgctatagaataggaacttcaggggtggatacctatgctgtcaggaatgcttgttataagaattaattaaaacactttgcttaattattaaaaaaaaaaaa

SEQ ID NO: 41866 - DNA, 512 bp, Homo sapiens
atgttgaataagtgaagagaaaataggagaactgcattctaatcttatcttggccactgacaggaataaagttgacttttaggctatcaaacaaacattttcttttcttttcttgttttattttctttatctttttcttttttttgcgacggcatcttgctctgttgcccagctggagtacacttgcgcaatctcggctcattgcaacctctgcccccagggactcaagcgattctcccacctcagcttcccgagtagctgggactactggtgtgtgtcatcatgcctggctaatttttgtatttttagtagagatggggtttcactatgttgggccagggctggtctcggactttctgacctcagatgatccacctgcctcggtctcccaaactgctgggattacaggcgtgagctaccacgcccagcccacacgaacatgaaaaaaaaaagctaactcagttttctcacctgtaacatgaagaagtggccatttaaaaaataatagttga

SEQ ID NO: 41867 - DNA, 664 bp, Homo sapiens
taccagaccactaacacagctgcattacattgtctactcagtgttgctgactatatataatgtgtatagttcagtgacattgccaaaagatgtcctgaagaatctcaggtaactggcaataggttggtttttcagtctgtttacttccaggaatggattctttaacaaattatccatgtgagatagaactcattatgaatgataaagatatttctaaggtaaacctatggttaagaaataatatttaactccaaatacgaaaggatgcttgactaaggcataatttatgtacacagtagcttttgttcctcaagcaatgaagtatacgtgaattctgcacctagccgtaattagctttaaaaagccaattacggctgggtgcagtggctcacacctgtaatcccagcactttgagaagctgaagtgggaagattgcctgaacccaggaattcagtacctatctgtgcaacatagtgagaccctgtctctaaaacaattttttttaattaactgggcatggtagcacatgcctgtgattccagctacttggaaggctgaggtgggtggatcacttgagcccaggaggtcaaggctgcagtgagctgtgatcactccactgcactccagtctgggtgacagagtgagaccgtgtcaccgaaaaaaa

SEQ ID NO: 41868 - DNA, 426 bp, Homo sapiens
acccacacaggctggccaaaattgtataaccgcaccacctcattagaaatgctatttgtgttacacaacagccaccacccggttacaaacagttactgcatgcctctattatggtttccttaacatcaatctgtagcaggtttctccatggcaggctggatagtctattgtagaaaccaagcagctgctgagaatacgtctcaaacctgcactaagaaggaaaattaaaacctatctttgtaaacccttcagttcagatgaataagtccacccatgctgcttccagctcagtgaaaagggagattaattttactacctggtaagtttccatttccccaatcagggcccaaagacaattgttttcaaagctcaaaaaatttcagatctcaaggtaggagttcatcattaaaaggtaggcaaagccaa

SEQ ID NO: 41869 - DNA, 423 bp, Homo sapiens
gatatctcagtctctagtcaagcgtggtttatggtgccaaataagtgccaggtgaactcactacatctgacaaaatctcaaggaaccaagtttaccagataatatttatgattatgtgaaaaagactgaggaaatcactcaagtgatccatcatacagcacctccagttccaaagaatactgacttacttcagctgtactggtctggagctgcacattcttttcagacaactcttgttccagtgactcttctcctgtaacagagcctccttcttagaaactatggcctcccgtttctttaagtctgcttccagctcctctaattcttggcgttggttcagaactttctctacttcttcatctaaccatttcttttgctcatccaatttctacattaaaattaaaaaaaaagttacttgttttt

SEQ ID NO: 41870 - DNA, 437 bp, Homo sapiens
ccatccctaggagtgagattactgggtcacatagtatctctaagtttagccttttgaggaactacaagatggttatccaaagcgattgcaccattttccaatttcaccagcagtgtatgaaggtcccaatttctccacctcctcccacacatttcttattatgtttttctgattatagccatcctagtggggagtggggagtggtttacaaccagaatcaagtagtgtattaaacagaatacctgactagatctcaatttcttattttccaggtgactcttctcctgtaacagagcctccttcttagaaactatggcctcccgtttctttaagtctgcttccagctcctctaattcttggcgttggttcagaactttctctacttcttcatctaaccatttcttttgctcatccaatttctacattaaaattaaaaa

SEQ ID NO: 41871 - DNA, 1159 bp, Homo sapiens
ctcgccccactgcccgcctcgagagggttttttcccaggccccgcaccctcacgccgtgcgacctggactcccacggcgggacccgggctcacacctcttcctgctgcggggcggagtcgccgccgctccgggtctttgtccccgcctccgagacccccgcgcgcccccagcacttccggccgcgggagccaagggttcgtgccgggcagcgtctcccggggccaggtcgcctcctgccgggacccgggcgcgctgcagccgcggagccgggtgccccgccctcttcccgccggcggcggagtcgctgccgctccgggttcccgtccccgcctccgagacccccgcgcgcctcctccaggcgagctgcggggcgggaagggtccggccaccgtgggccgctgccagccgcggggctgccgagggccgcgggcacggggcgctggctccgggtctggcggccgctgatgggagtcggagcccgggcgggcgagcggcggcgcggcggccaccatggggaacaagcagaccatcttcaccgaagagcagctagacaactaccaggctgcattcgcgattctatgagctggcccccaacctcgtcccaatggactacaggaagagccccatcgtccacgtgcccatgagcctcatcatccagatgccagagctccgggagaatcccttcaaagaaaggatcgtggcggcgttttccgaggatggtgaggggaacctcactttcaacgactttgtggacatgttttccgtgctctgcgagtcggctccccgagagctcaaggcaaactatgccttcaagatctatgacttcaacactgacaacttcatctgcaaggaggacctggagctgacgctggcccggctcactaagtcagagctggatgaggaggaggtggtgcttgtgtgcgacaaggtcattgaggaggctgacttggacggtgacggcaagctgggctttgctgacttcgagggctcttgctcctgtctctgcctctgggtcatgagtaccaccctgcctgcctccccaacaccgtggaatcctcactggtgtgctgtccacagatttgtgaactcctggtagtaaaacacttttgcatccctttgctctccatgtatgctaatgttaggaaatgtttgagggta

SEQ ID NO: 41872 - DNA, 1744 bp, Homo sapiens
ctcgccccactgcccgcctcgagagggttttttcccaggccccgcaccctcacgccgtgcgacctggactcccacggcgggacccgggctcacacctcttcctgctgcggggcggagtcgccgccgctccgggtctttgtccccgcctccgagacccccgcgcgcccccagcacttccggccgcgggagccaagggttcgtgccgggcagcgtctcccggggccaggtcgcctcctgccgggacccgggcgcgctgcagccgcggagccgggtgccccgccctcttcccgccggcggcggagtcgctgccgctccgggttcccgtccccgcctccgagacccccgcgcgcctcctccaggcgagctgcggggcgggaagggtccggccaccgtgggccgctgccagccgcggggctgccgagggccgcgggcacggggcgctggctccgggtctggcggccgctgatgggagtcggagcccgggcgggcgagcggcggcgcggcggccaccatggggaacaagcagaccatcttcaccgaagagcagctagacaactaccaggctgcattcgcgattctatgagctggcccccaacctcgtcccaatggactacaggaagagccccatcgtccacgtgcccatgagcctcatcatccagatgccagagctccgggagaatcccttcaaagaaaggatcgtggcggcgttttccgaggatggtgaggggaacctcactttcaacgactttgtggacatgttttccgtgctctgcgagtcggctccccgagagctcaaggcaaactatgccttcaagatctatgacttcaacactgacaacttcatctgcaaggaggacctggagctgacgctggcccggctcactaagtcagagctggatgaggaggaggtggtgcttgtgtgcgacaaggtcattgaggaggctgacttggacggtgacggcaagctgggctttgctgacttcgaggacatgattgccaaggcccctgacttcctcagcactttccacatccggatctgaggacactgccgaggctgtaggggcctagaagtccaccatcctgccctgcagtcacatgggtgtggcctccaagctccccaggaaagcagtggcagcctctggggtttacaccacaaatatatcctgtggccctttcagcaaaaaaaaaaccttaaccaggaagggggcctgtgaaggttaggacccttcccacagccccgctgtggtccagccccgggacccatggcctctctccaggccctccgcaccccgccccatgccccagtcctttcctactccagaaatgctccccacccccccaagagggaaaagcagataacccaacaggaggtggtggggtctgacgtgtccaagtgctggcagacaccctggtcacccaggacagagcggaaaaaaaaaaaagaggtcagggttttaacgagctatgcaatctttttccaaaacccaaggttgggctgcttcccacccctgcctgttccccttctcccggcctccttcacaatgtgaagctgtgggtgcagtgggcccaagggctcttgctcctgtctctgcctctgggtcatgagtaccaccctgcctgcctccccaacaccgtggaatcctcactggtgtgctgtccacagatttgtgaactcctggtagtaaaacacttttgcatccctttgctctccatgtatgctaatgttaggaaatgtttgagggta

SEQ ID NO: 41873 - DNA, 1667 bp, Homo sapiens
ctcgccccactgcccgcctcgagagggttttttcccaggccccgcaccctcacgccgtgcgacctggactcccacggcgggacccgggctcacacctcttcctgctgcggggcggagtcgccgccgctccgggtctttgtccccgcctccgagacccccgcgcgcccccagcacttccggccgcgggagccaagggttcgtgccgggcagcgtctcccggggccaggtcgcctcctgccgggacccgggcgcgctgcagccgcggagccgggtgccccgccctcttcccgccggcggcggagtcgctgccgctccgggttcccgtccccgcctccgagacccccgcgcgcctcctccaggcgagctgcggggcgggaagggtccggccaccgtgggccgctgccagccgcggggctgccgagggccgcgggcacggggcgctggctccgggtctggcggccgctgatgggagtcggagcccgggcgggcgagcggcggcgcggcggccaccatggggaacaagcagaccatcttcaccgaagagcagctagacaactaccaggactgcaccttcttcaataagaaggacatcctcaagagaatcccttcaaagaaaggatcgtggcggcgttttccgaggatggtgaggggaacctcactttcaacgactttgtggacatgttttccgtgctctgcgagtcggctccccgagagctcaaggcaaactatgccttcaagatctatgacttcaacactgacaacttcatctgcaaggaggacctggagctgacgctggcccggctcactaagtcagagctggatgaggaggaggtggtgcttgtgtgcgacaaggtcattgaggaggctgacttggacggtgacggcaagctgggctttgctgacttcgaggacatgattgccaaggcccctgacttcctcagcactttccacatccggatctgaggacactgccgaggctgtaggggcctagaagtccaccatcctgccctgcagtcacatgggtgtggcctccaagctccccaggaaagcagtggcagcctctggggtttacaccacaaatatatcctgtggccctttcagcaaaaaaaaaaccttaaccaggaagggggcctgtgaaggttaggacccttcccacagccccgctgtggtccagccccgggacccatggcctctctccaggccctccgcaccccgccccatgccccagtcctttcctactccagaaatgctccccacccccccaagagggaaaagcagataacccaacaggaggtggtggggtctgacgtgtccaagtgctggcagacaccctggtcacccaggacagagcggaaaaaaaaaaaagaggtcagggttttaacgagctatgcaatctttttccaaaacccaaggttgggctgcttcccacccctgcctgttccccttctcccggcctccttcacaatgtgaagctgtgggtgcagtgggcccaagggctcttgctcctgtctctgcctctgggtcatgagtaccaccctgcctgcctccccaacaccgtggaatcctcactggtgtgctgtccacagatttgtgaactcctggtagtaaaacacttttgcatccctttgctctccatgtatgctaatgttaggaaatgtttgagggta

SEQ ID NO: 41874 - DNA, 1232 bp, Homo sapiens
ggacaactaccaggacagcaccttcttcaactgaagaaggacatcctcaagctgcattcgcgattctatgagctggcccccaacctcgtcccaatggactacaggaagagccccatcgtccacgtgcccatgagcctcatcatccagatgccagagctccgggagaatcccttcaaagaaaggatcgtggcggcgttttccgaggatggtgaggggaacctcactttcaacgactttgtggacatgttttccgtgctctgcgagtcggctccccgagagctcaaggcaaactatgccttcaagatctatgacttcaacactgacaacttcatctgcaaggaggacctggagctgacgctggcccggctcactaagtcagagctggatgaggaggaggtggtgcttgtgtgcgacaaggtcattgaggaggctgacttggacggtgacggcaagctgggctttgctgacttcgaggacatgattgccaaggcccctgacttcctcagcactttccacatccggatctgaggacactgccgaggctgtaggggcctagaagtccaccatcctgccctgcagtcacatgggtgtggcctccaagctccccaggaaagcagtggcagcctctggggtttacaccacaaatatatcctgtggccctttcagcaaaaaaaaaaccttaaccaggaagggggcctgtgaaggttaggacccttcccacagccccgctgtggtccagccccgggacccatggcctctctccaggccctccgcaccccgccccatgccccagtcctttcctactccagaaatgctccccacccccccaagagggaaaagcagataacccaacaggaggtggtggggtctgacgtgtccaagtgctggcagacaccctggtcacccaggacagagcggaaaaaaaaaaaagaggtcagggttttaacgagctatgcaatctttttccaaaacccaaggttgggctgcttcccacccctgcctgttccccttctcccggcctccttcacaatgtgaagctgtgggtgcagtgggcccaagggctcttgctcctgtctctgcctctgggtcatgagtaccaccctgcctgcctccccaacaccgtggaatcctcactggtgtgctgtccacagatttgtgaactcctggtagtaaaacacttttgcatccctttgctctccatgtatgctaatgttaggaaatgtttgagggta

SEQ ID NO: 41875 - DNA, 1794 bp, Homo sapiens
ctcgccccactgcccgcctcgagagggttttttcccaggccccgcaccctcacgccgtgcgacctggactcccacggcgggacccgggctcacacctcttcctgctgcggggcggagtcgccgccgctccgggtctttgtccccgcctccgagacccccgcgcgcccccagcacttccggccgcgggagccaagggttcgtgccgggcagcgtctcccggggccaggtcgcctcctgccgggacccgggcgcgctgcagccgcggagccgggtgccccgccctcttcccgccggcggcggagtcgctgccgctccgggttcccgtccccgcctccgagacccccgcgcgcctcctccaggcgagctgcggggcgggaagggtccggccaccgtgggccgctgccagccgcggggctgccgagggccgcgggcacggggcgctggctccgggtctggcggccgctgatgggagtcggagcccgggcgggcgagcggcggcgcggcggccaccatggggaacaagcagaccatcttcaccgaagagcagctagacaactaccaggactgcaccttcttcaataagaaggacatcctcaaatggggaaaccgaggctcagagggatttggtcactcctccagggtcacacaggctgtccacagtctggctccggggccctcctgcttatcctgcacccacagtgattgctgtgtgtgttttcttcaggagaatcccttcaaagaaaggatcgtggcggcgttttccgaggatggtgaggggaacctcactttcaacgactttgtggacatgttttccgtgctctgcgagtcggctccccgagagctcaaggcaaactatgccttcaagatctatgacttcaacactgacaacttcatctgcaaggaggacctggagctgacgctggcccggctcactaagtcagagctggatgaggaggaggtggtgcttgtgtgcgacaaggtcattgaggaggctgacttggacggtgacggcaagctgggctttgctgacttcgaggacatgattgccaaggcccctgacttcctcagcactttccacatccggatctgaggacactgccgaggctgtaggggcctagaagtccaccatcctgccctgcagtcacatgggtgtggcctccaagctccccaggaaagcagtggcagcctctggggtttacaccacaaatatatcctgtggccctttcagcaaaaaaaaaaccttaaccaggaagggggcctgtgaaggttaggacccttcccacagccccgctgtggtccagccccgggacccatggcctctctccaggccctccgcaccccgccccatgccccagtcctttcctactccagaaatgctccccacccccccaagagggaaaagcagataacccaacaggaggtggtggggtctgacgtgtccaagtgctggcagacaccctggtcacccaggacagagcggaaaaaaaaaaaagaggtcagggttttaacgagctatgcaatctttttccaaaacccaaggttgggctgcttcccacccctgcctgttccccttctcccggcctccttcacaatgtgaagctgtgggtgcagtgggcccaagggctcttgctcctgtctctgcctctgggtcatgagtaccaccctgcctgcctccccaacaccgtggaatcctcactggtgtgctgtccacagatttgtgaactcctggtagtaaaacacttttgcatccctttgctctccatgtatgctaatgttaggaaatgtttgagggta

SEQ ID NO: 41876 - DNA, 1194 bp, Homo sapiens
ctcgccccactgcccgcctcgagagggttttttcccaggccccgcaccctcacgccgtgcgacctggactcccacggcgggacccgggctcacacctcttcctgctgcggggcggagtcgccgccgctccgggtctttgtccccgcctccgagacccccgcgcgcccccagcacttccggccgcgggagccaagggttcgtgccgggcagcgtctcccggggccaggtcgcctcctgccgggacccgggcgcgctgcagccgcggagccgggtgccccgccctcttcccgccggcggcggagtcgctgccgctccgggttcccgtccccgcctccgagacccccgcgcgcctcctccaggcgagctgcggggcgggaagggtccggccaccgtgggccgctgccagccgcggggctgccgagggccgcgggcacggggcgctggctccgggtctggcggccgctgatgggagtcggagcccgggcgggcgagcggcggcgcggcggccaccatggggaacaagcagaccatcttcaccgaagagcagctagacaactaccaggactgcaccttcttcaataagaaggacatcctcaagctgcattcgcgattctatgagctggcccccaacctcgtcccaatggactacaggaagagccccatcgtccacgtgcccatgagcctcatcatccagatgccagagctccgggagaatcccttcaaagaaaggatcgtggcggcgttttccgaggatggtgaggggaacctcactttcaacgactttgtggacatgttttccgtgctctgcgagtcggctccccgagagctcaaggcaaactatgccttcaagatctatgacttcaacactgacaacttcatctgcaaggaggacctggagctgacgctggcccggctcactaagtcagagctggatgaggaggaggtggtgcttgtgtgcgacaaggtcattgaggaggctgacttggacggtgacggcaagctgggctttgctgacttcgagggctcttgctcctgtctctgcctctgggtcatgagtaccaccctgcctgcctccccaacaccgtggaatcctcactggtgtgctgtccacagatttgtgaactcctggtagtaaaacacttttgcatccctttgctctccatgtatgctaatgttaggaaatgtttgagggta

SEQ ID NO: 41877 - DNA, 1131 bp, Homo sapiens
tgctgccactacaggggccgggcttgggcagggcagagcagggcaggccgggatgttggggctgaggcccctatcactcgctatttgtgagcagtggtgtgcggccaggaagcaggaggtcacgttcaagccacccttgccctagacgtgtgactggcctttgtcccctgcagggggaaggttgaagacctgggggccccttcagtgataagtgggggcagaactccctgggcaccgctgttcctccgtcttcccccagtgttgattacctgcatccactatgcagggttccctaatgaggcactgtccagcatggggctggggcctgctgtgcttttccctgaggagcctttacctgcccgacccagggcctctcaccctctcttgccctttctctctttctagcactttccacatccggatctgaggacactgccgaggctgtaggggcctagaagtccaccatcctgccctgcagtcacatgggtgtggcctccaagctccccaggaaagcagtggcagcctctggggtttacaccacaaatatatcctgtggccctttcagcaaaaaaaaaaccttaaccaggaagggggcctgtgaaggttaggacccttcccacagccccgctgtggtccagccccgggacccatggcctctctccaggccctccgcaccccgccccatgccccagtcctttcctactccagaaatgctccccacccccccaagagggaaaagcagataacccaacaggaggtggtggggtctgacgtgtccaagtgctggcagacaccctggtcacccaggacagagcggaaaaaaaaaaaagaggtcagggttttaacgagctatgcaatctttttccaaaacccaaggttgggctgcttcccacccctgcctgttccccttctcccggcctccttcacaatgtgaagctgtgggtgcagtgggcccaagggctcttgctcctgtctctgcctctgggtcatgagtaccaccctgcctgcctccccaacaccgtggaatcctcactggtgtgctgtccacagatttgtgaactcctggtagtaaaacacttttgcatccctttgctctccatgtatgctaatgttaggaaatgtttgagggta

SEQ ID NO: 41878 - DNA, 1779 bp, Homo sapiens
ctcgccccactgcccgcctcgagagggttttttcccaggccccgcaccctcacgccgtgcgacctggactcccacggcgggacccgggctcacacctcttcctgctgcggggcggagtcgccgccgctccgggtctttgtccccgcctccgagacccccgcgcgcccccagcacttccggccgcgggagccaagggttcgtgccgggcagcgtctcccggggccaggtcgcctcctgccgggacccgggcgcgctgcagccgcggagccgggtgccccgccctcttcccgccggcggcggagtcgctgccgctccgggttcccgtccccgcctccgagacccccgcgcgcctcctccaggcgagctgcggggcgggaagggtccggccaccgtgggccgctgccagccgcggggctgccgagggccgcgggcacggggcgctggctccgggtctggcggccgctgatgggagtcggagcccgggcgggcgagcggcggcgcggcggccaccatggggaacaagcagaccatcttcaccgaagagcagctagacaactaccaggactgcaccttcttcaataagaaggacatcctcaagctgcattcgcgattctatgagctggcccccaacctcgtcccaatggactacaggaagagccccatcgtccacgtgcccatgagcctcatcatccagatgccagagctccgggagaatcccttcaaagaaaggatcgtggcggcgttttccgaggatggtgaggggaacctcactttcaacgactttgtggacatgttttccgtgctctgcgagtcggctccccgagagctcaaggcaaactatgccttcaagatctatgacttcaacactgacaacttcatctgcaaggaggacctggagctgacgctggcccggctcactaagtcagagctggatgaggaggaggtggtgcttgtgtgcgacaaggtcattgaggaggctgacttggacggtgacggcaagctgggctttgctgacttcgaggacatgattgccaaggcccctgacttcctcagcactttccacatccggatctgaggacactgccgaggctgtaggggcctagaagtccaccatcctgccctgcagtcacatgggtgtggcctccaagctccccaggaaagcagtggcagcctctggggtttacaccacaaatatatcctgtggccctttcagcaaaaaaaaaaccttaaccaggaagggggcctgtgaaggttaggacccttcccacagccccgctgtggtccagccccgggacccatggcctctctccaggccctccgcaccccgccccatgccccagtcctttcctactccagaaatgctccccacccccccaagagggaaaagcagataacccaacaggaggtggtggggtctgacgtgtccaagtgctggcagacaccctggtcacccaggacagagcggaaaaaaaaaaaagaggtcagggttttaacgagctatgcaatctttttccaaaacccaaggttgggctgcttcccacccctgcctgttccccttctcccggcctccttcacaatgtgaagctgtgggtgcagtgggcccaagggctcttgctcctgtctctgcctctgggtcatgagtaccaccctgcctgcctccccaacaccgtggaatcctcactggtgtgctgtccacagatttgtgaactcctggtagtaaaacacttttgcatccctttgctctccatgtatgctaatgttaggaaatgtttgagggta

SEQ ID NO: 41879 - DNA, 1873 bp, Homo sapiens
ctcgccccactgcccgcctcgagagggttttttcccaggccccgcaccctcacgccgtgcgacctggactcccacggcgggacccgggctcacacctcttcctgctgcggggcggagtcgccgccgctccgggtctttgtccccgcctccgagacccccgcgcgcccccagcacttccggccgcgggagccaagggttcgtgccgggcagcgtctcccggggccaggtcgcctcctgccgggacccgggcgcgctgcagccgcggagccgggtgccccgccctcttcccgccggcggcggagtcgctgccgctccgggttcccgtccccgcctccgagacccccgcgcgcctcctccaggcgagctgcggggcgggaagggtccggccaccgtgggccgctgccagccgcggggctgccgagggccgcgggcacggggcgctggctccgggtctggcggccgctgatgggagtcggagcccgggcgggcgagcggcggcgcggcggccaccatggggaacaagcagaccatcttcaccgaagagcagctagacaactaccaggactgcaccttcttcaataagaaggacatcctcaagtagatccgattgctccccaggacacagctcctgcattcccacattgaggccgagtgggcagcccaccctattcagtcaccttgctttttataggctgcattcgcgattctatgagctggcccccaacctcgtcccaatggactacaggaagagccccatcgtccacgtgcccatgagcctcatcatccagatgccagagctccgggagaatcccttcaaagaaaggatcgtggcggcgttttccgaggatggtgaggggaacctcactttcaacgactttgtggacatgttttccgtgctctgcgagtcggctccccgagagctcaaggcaaactatgccttcaagatctatgacttcaacactgacaacttcatctgcaaggaggacctggagctgacgctggcccggctcactaagtcagagctggatgaggaggaggtggtgcttgtgtgcgacaaggtcattgaggaggctgacttggacggtgacggcaagctgggctttgctgacttcgaggacatgattgccaaggcccctgacttcctcagcactttccacatccggatctgaggacactgccgaggctgtaggggcctagaagtccaccatcctgccctgcagtcacatgggtgtggcctccaagctccccaggaaagcagtggcagcctctggggtttacaccacaaatatatcctgtggccctttcagcaaaaaaaaaaccttaaccaggaagggggcctgtgaaggttaggacccttcccacagccccgctgtggtccagccccgggacccatggcctctctccaggccctccgcaccccgccccatgccccagtcctttcctactccagaaatgctccccacccccccaagagggaaaagcagataacccaacaggaggtggtggggtctgacgtgtccaagtgctggcagacaccctggtcacccaggacagagcggaaaaaaaaaaaagaggtcagggttttaacgagctatgcaatctttttccaaaacccaaggttgggctgcttcccacccctgcctgttccccttctcccggcctccttcacaatgtgaagctgtgggtgcagtgggcccaagggctcttgctcctgtctctgcctctgggtcatgagtaccaccctgcctgcctccccaacaccgtggaatcctcactggtgtgctgtccacagatttgtgaactcctggtagtaaaacacttttgcatccctttgctctccatgtatgctaatgttaggaaatgtttgagggta

SEQ ID NO: 41880 - DNA, 1857 bp, Homo sapiens
ctcgccccactgcccgcctcgagagggttttttcccaggccccgcaccctcacgccgtgcgacctggactcccacggcgggacccgggctcacacctcttcctgctgcggggcggagtcgccgccgctccgggtctttgtccccgcctccgagacccccgcgcgcccccagcacttccggccgcgggagccaagggttcgtgccgggcagcgtctcccggggccaggtcgcctcctgccgggacccgggcgcgctgcagccgcggagccgggtgccccgccctcttcccgccggcggcggagtcgctgccgctccgggttcccgtccccgcctccgagacccccgcgcgcctcctccaggcgagctgcggggcgggaagggtccggccaccgtgggccgctgccagccgcggggctgccgagggccgcgggcacggggcgctggctccgggtctggcggccgctgatgggagtcggagcccgggcgggcgagcggcggcgcggcggccaccatggggaacaagcagaccatcttcaccgaagagcagctagacaactaccaggactgcaccttcttcaataagaaggacatcctcaagctgcattcgcgattctatgagctggcccccaacctcgtcccaatggactacaggaagagccccatcgtccacgtgcccatgagcctcatcatccagatgccagagctccggggatcttgtccaaatgccaattcaggctcagtacatgtggagtagagtcaggattctgcttttcgagcaagttcccaggagaatcccttcaaagaaaggatcgtggcggcgttttccgaggatggtgaggggaacctcactttcaacgactttgtggacatgttttccgtgctctgcgagtcggctccccgagagctcaaggcaaactatgccttcaagatctatgacttcaacactgacaacttcatctgcaaggaggacctggagctgacgctggcccggctcactaagtcagagctggatgaggaggaggtggtgcttgtgtgcgacaaggtcattgaggaggctgacttggacggtgacggcaagctgggctttgctgacttcgaggacatgattgccaaggcccctgacttcctcagcactttccacatccggatctgaggacactgccgaggctgtaggggcctagaagtccaccatcctgccctgcagtcacatgggtgtggcctccaagctccccaggaaagcagtggcagcctctggggtttacaccacaaatatatcctgtggccctttcagcaaaaaaaaaaccttaaccaggaagggggcctgtgaaggttaggacccttcccacagccccgctgtggtccagccccgggacccatggcctctctccaggccctccgcaccccgccccatgccccagtcctttcctactccagaaatgctccccacccccccaagagggaaaagcagataacccaacaggaggtggtggggtctgacgtgtccaagtgctggcagacaccctggtcacccaggacagagcggaaaaaaaaaaaagaggtcagggttttaacgagctatgcaatctttttccaaaacccaaggttgggctgcttcccacccctgcctgttccccttctcccggcctccttcacaatgtgaagctgtgggtgcagtgggcccaagggctcttgctcctgtctctgcctctgggtcatgagtaccaccctgcctgcctccccaacaccgtggaatcctcactggtgtgctgtccacagatttgtgaactcctggtagtaaaacacttttgcatccctttgctctccatgtatgctaatgttaggaaatgtttgagggta

SEQ ID NO: 41881 - DNA, 988 bp, Homo sapiens
ggcccttgggttaccccggcccccccggggaattacgggatggcaactatgccttcaagatctatgacttcaacactgacaacttcatctgcaaggaggacctggagctgacgctggcccggctcactaagtcagagctggatgaggaggaggtggtgcttgtgtgcgacaaggtcattgaggaggctgacttggacggtgacggcaagctgggctttgctgacttcgaggacatgattgccaaggcccctgacttcctcagcactttccacatccggatctgaggacactgccgaggctgtaggggcctagaagtccaccatcctgccctgcagtcacatgggtgtggcctccaagctccccaggaaagcagtggcagcctctggggtttacaccacaaatatatcctgtggccctttcagcaaaaaaaaaaccttaaccaggaagggggcctgtgaaggttaggacccttcccacagccccgctgtggtccagccccgggacccatggcctctctccaggccctccgcaccccgccccatgccccagtcctttcctactccagaaatgctccccacccccccaagagggaaaagcagataacccaacaggaggtggtggggtctgacgtgtccaagtgctggcagacaccctggtcacccaggacagagcggaaaaaaaaaaaagaggtcagggttttaacgagctatgcaatctttttccaaaacccaaggttgggctgcttcccacccctgcctgttccccttctcccggcctccttcacaatgtgaagctgtgggtgcagtgggcccaagggctcttgctcctgtctctgcctctgggtcatgagtaccaccctgcctgcctccccaacaccgtggaatcctcactggtgtgctgtccacagatttgtgaactcctggtagtaaaacacttttgcatccctttgctctccatgtatgctaatgttaggaaatgtttgagggta

SEQ ID NO: 41882 - DNA, 739 bp, Homo sapiens
ccgcccgtagaaaagatggctgctgtgcaagttgtcggttcgtggccttccgtgcagccgcgggaggcaccgcgggaagcaatccctgagcgaggcaatgggtttcgcctcttgtctgccaggctctgcgccctgcgcccggatgacagcagctccgcccgcaccgagatccacctgctcttcgatcagctcatctccgagaactacagcgagggcagtggcgtggccccggaggacgttagtgctcttcttgtccaggcttgccgactggtacctcttaatcagaatcatcttgtcagcaaagtgagccagcttatccaccatttacttaacagattacaggtaattgttgatgaacagcacttggatttcctgttggcatatactatttcggctattcatcagtgtagttcctggacacacagggaaattcttcaagccctggcagctctggtgtactgcaatggctccaaatgtcaaaagtacctcccagagctgctaggcaacaccggactcttaatgaagttgagtgacttggctcagtctgatcctgaagtcaggagagctgcagtacattgtatggcaaacttatgtctcagtgtgccaggacagccgtatttggaggagccctaccaaaatgtctgtttccaagcttttctgactattttacagtctccaaaatcatctgatatggatgatatcacattttgcatggtaagtggactatcattgacgtagt

SEQ ID NO: 41883 - DNA, 671 bp, Homo sapiens
ccgcccgtagaaaagatggctgctgtgcaagttgtcggttcgtggccttccgtgcagccgcgggaggcaccgcgggaagcaatccctgagcgaggcaatgggtttcgcctcttgtctgccaggctctgcgccctgcgcccggatgacagcagctccgcccgcaccgagatccacctgctcttcgatcagctcatctccgagaactacagcgagggcagtggcgtggccccggagagacaaggtctcactctgtcatccagactggagtgcagcagcaagatcatagctcactgtgacctaaaactcctgggctcaagccatcctcccacctcagcctcccaagaagctgggactacataccaccatatccagctaatttttttaaaaaagttttttctgtagagatggagtctcactatgttgcccaagctggtcttggactcctgggctcaagcagtcctcccgctttgacctccggaagaactgggattaggtgtgagccactgtgcctggctttttccttcttttttagcacatgctgtttttgtgctatcacttcatttttttccttcctgcctcacattttctttccccattttgaatgtgaatatttacttttattttcccatttggctgtgttttgaggatcttcacttgactaataagtattt

SEQ ID NO: 41884 - DNA, 821 bp, Homo sapiens
ccgcccgtagaaaagatggctgctgtgcaagttgtcggttcgtggccttccgtgcagccgcgggaggcaccgcgggaagcaatccctgagcgaggcaatgggtttcgcctcttgtctgccaggctctgcgccctgcgcccggatgacagcagctccgcccgcaccgagatccacctgctcttcgatcagctcatctccgagaactacagcgagggcagtggcgtggccccggaggacgttagtgctcttcttgtccaggcttgccgactggtacctcttaatcagaatcatcttgtcagcaaagtgagccagcttatccaccatttacttaacagattacagtacctcccagagctgctaggcaacaccggactcttaatgaagttgagtgacttggctcagtctgatcctgaagtcaggagagctgcagtacattgtatggcaaacttatgtctcagtgtgccaggacagccgtatttggaggagccctaccaaaatgtctgtttccaagcttttctgactattttacagtctccaaaatcatctgatatggatgatatcacattttgcatgttattgcaaaatgcattaaaaggtatacagtcacttctaaatggtgggagaatgaaactaacacagactgatgaacttggagcacttttagctgtgctaaagaaattcatgtttcacggactccctggactaaacatagagatgcccacggtgttatacccaactccgcttcctcagtatgatgggcgaacacctatcaaaccacagcaatcagaatccagtgcttctcgaccaactttgaatacatt

SEQ ID NO: 41885 - DNA, 774 bp, Homo sapiens
gcgggttgggcggggggcgctgccgcccaaggcccgaggcagcggcgcgggatcggccaaagcaccggccgccagttcggcgggtctggagagaggggacctcaagcagccagtggagcaaccagcctgggagccttcgacgtaggcgctgtgggcgaaggaaaaggcctggcctgctgcctcttctcttgcagcaaaatccgctgctgtgaaggagctggtaggcggacgctctgtagataagagaatccctgatctgcctgggcatcatcttgctctttatgacctgcttggctgccactgtgtagggcctgcttaaagtcctttgcactctcagcattcccctcaagttcaaggacaagcttctcattatggcaggcataaaactctttataattcgtcctccactctcccagctcagggctccagctgttgtctcacacttccttgaagttccctctgctgagtcgcccttgtgcctgaccaacttacttactaaaataaaaatcccaatttctttccagtcatgtgtgcccaagggcgagttatttaacttttctgagctttcctcagtaaaacgaagctacatatcttgcaaggatgtgatattaaagttatgatattgtaaaacaggtgccacggtgcttggcctagggtgagccttcaacctagaacataccactgtccccatgcaccttgctcacacacccaatcccagacttttcttttgtagtcacctcagttatcacctcattaaataacctgattacccca

SEQ ID NO: 41886 - DNA, 451 bp, Homo sapiens
gtattggacttacagaggtgaatcaaagaggggccttcgtgaggctcatgtgattaagggaatgaaccacataactatttcaaagcaaataaaattagactttggatctggaatttaatttaatccaaatcattttataaatgaataagccgacatccaggcacattaagtgacttgaccaaagtcactcagctattcagtggcagacacaggacagagccaaacctccactgctggtctgttgcagcatgtttcatacatgttcctataagatctggacattctttgcaacatcctcagagaccatctggaaagggaaagaccgagatcatggaatgtgaggccctcaatcctgcttcagtcagagcaggtccttaattatgtggattgcatattcaatctccagggaaagatctgtttgaacaatatgacctgttctattttatatgag

SEQ ID NO: 41887 - DNA, 492 bp, Homo sapiens
aaattatccgggtgtggtggtgcatgcctgtagtcccagctacttgggaggctgaggcaggagaattgcttgaacctgggaggcggaggctgcagtgagctgagattatgcctgtctttggtaaaaacaaaacaaaacaaaacaaaaaaccaccaaaaatttttttttaattttaaaaaagacaagaaataaaaagtcagtccacttactgatagagaattgtagttgaaactagtgctttgaggtacaatacccttcattcacttagtattctgccttcatagcctgatggctagctgtccctgggtaaattttgtaacttctatgaacctcactttcttcaaatgcaaagtgaggctaatagttctgactttactgggctgttgggagcattaaataaaataatgtgtatgaagcacttatactttaacttcagtaaatatttgttgaagaataaataatttagcctgaacttcaatatataatgtggaa

SEQ ID NO: 41888 - DNA, 5311 bp, Homo sapiens
attcttactcatttgtgtttattcttggacttatcctgacataatggggtttttttaattatagattcacactgcatttattcatcacccctgtcctctcatccataactcaaatttactaccagcaacacaaaatacaaagatgtgtccagtttcactacagctcttcgcgtttacaagtgtcgagcgcttgctttcggaacgcccttgtgattggccgagccaatgccagtgacatcaaccaacttacttttgattggaaggctggttgctgggactgtagcgtttgcaggaagtcacttaactgtttgggagctggaaaaccgaagctgaagttctcttttgccataggaacgagcgcaactgactaggaaagatgtgtcccaaagctccgcaagctggaacgtgagccaggaggcccggaccggccacgggaccgcgaggcactccgaaagtgtgcggctgccccttccctgcctcccagctgttacccttttaaatgtcagtgttcgaggctgtaggggtagcacgaggcagcgaaacggaacagtcggattggccgcacgcctcagttctagacgcacctctccaccgaaggccgttctgactggcagggggagaaagtaaacagagttgaatcaccctccccactggccaattggagggggtttggtttgtgacgtgatgggattctgcgaaattgttactgagcaagagaatgccggaacggtgcggaccggccggagcaggggttcagaagccgtcagtggactcgggaaaaagtgtctcttagacctggcgctcggcgggaccctcgccacccgcgtcggggtgatcgggtgaatgtcctggggctttggctcgacggcgaggcggccgagggcgtgcacctctcttgcagtttcctctcccagcgcctcgggggcgttttcagtcgaataaacttgcgaccgccacgtgtggcatctttccaagggagccggctcagaggggccggcgcgcccgtcgggggatcgcggccggcgcggggcaggggcggcggctagaggcggcggcgcggcggagcccggggccgtggatgctgcgtgcggaggcgctgccggttacgtaaagatgaggggctgaggtcgcctcggcgctcctgcgagtcggaagcgccccgcgcccccgcccccttggccgccgcgccgtgccgcgccgcgccgcgctcgtcgtccgaggccagggcagggcgagccgaacctccgcagccaccgccaagtttgtccgcgccgcctgggctgccgtcgcccgcaccatgtccgcggccgcctacatggacttcgtggctgcccagtgtctggtttccatttcgaaccgcgctgcggtgccggagcatggggtcgctccggacgccgagcggctgcgactacctgagcgcgaggtgaccaaggagcacggtgacccgggggacacctggaaggattactgcacactggtcaccatcgccaagagcttgttggacctgaacaagtaccgacccatccagaccccctccgtgtgcagcgacagtctggaaagtccagatgaggatatgggatccgacagcgacgtgaccaccgaatctgggtcgagtccttcccacagcccggaggagagacaggatcctggcagcgcgcccagcccgctctccctcctccatcctggagtggctgcgaaggggaaacacgcctccgaaaagaggcacaagtgcccctacagtggctgtgggaaagtctatggaaaatcctcccatctcaaagcccattacagagtgcatacaggtgaacggccctttccctgcacgtggccagactgccttaaaaagttctcccgctcagacgagctgacccgccactaccggacccacactggggaaaagcagttccgctgtccgctgtgtgagaagcgcttcatgaggagtgaccacctcacaaagcacgcccggcggcacaccgagttccaccccagcatgatcaagcgatcgaaaaaggcgctggccaacgctttgtgaggtgctgcccgtggaagccagggagggatggaccccgaaaggacaaaagtactcccaggaaacagacgcgtgaaaactgagccccagaagaggcacacttgacggcacaggaagtcactgctctttggtcaatattctgattttcctctccctgcattgtttttaaaaagcacattgtagcctaagatcaaagtcaacaacactcggtccccttgaagaggcaactctctgaacccgtctctgactgttggagggaaggcaaatgcttttgggttttttggtttttgtttttgtttttttttctccttttatttttttgcgggggagggtagggagtgggtgggggggagggggtaaggccaagactggggtagaattttaaagattcaacactggtgtacatatgtccgctgggtgagttgacctgtggcctcgcacagtgattctgggccctttatgcttgctgtctctcagaattgttttcttaccttttaatgtaatgacgagtgtgcttcagtttgtttagcaaaaccactctcttgaatcacgttaacttttgagattaaaaaaaaaaacgccatagcacagctgtctttatgcaagcaagagcacatctactccagcatgatctgtcatctaaagacttgaaaacaaaaaacagttacttatagtcaatgggtaagcagagtctgaatttatactaatcaagacaaacctttgaaaggttacactaagtacagaacttttaaaccttgctttgtatgagttgtactttttgaacataagctgcacttttattttctaatgcagaggatgaataagttaaatacatgctttgaggatagaagcagatgttctgtttggcaccacgttataatctgcttattttacaatatacacgtttccctaagaaatcatggcagagatgtgagggcagaatatacacaacagatgctgaaggagaaggagggtagtgttttgcaaaagaaaaagaaaagaaccaacagaattttaactctattaacttttccaaattttcctatgcttttagttaacatcattattgtatcctaatgccactaggggagagagcttttgactctgttgggttttatttgaatgtgtgcataacagtaatgagatctggaaacacctattttttggggaaaaaggtttgttggtctccttcctgtgttcctacaaaactcccactctcaggtgcaagagttatgtagaaggaaagggagctgaaataggaacagaaaaatcaacccctataactagtgaacaccaagggaaaataccacaatgatttcagaggagactctgcaaaatcgtcccttgtggagaatgcaggcaacatggaatactacgaatgaaatcacatcactgtatcttttacatcaatagcctcaccactaatatatcttgtatctaggtgtctataatggctgaaaccactacatccatctatgccatttacctgaaaacttaactgtggcctttatgaggccagaaaagtgaactgagttttcgtagttaagacctcaaatgaggggagtcagcagtgatcatgggggaaatgtttacattttttttttcttcagaagtaacgctttctgatgattttatctgatatttaaaacagggagctatggtgcactctagtttatacttgcgctctgaaatgtgtaaacatagggtgcctacctatttcacctgacccatactcgtttctgattcagaatcagtgtgggctcctgcagtgggcgcgggtcacggctgactccaacttccaatacaacagccatcactagcacagtgtttttttgtttaaccaacgtagttgtattagtagttctataaagagaactgcttttaacattagggactgggagcagtccatgggataaaaaggaaagtgttttctcacgagaaaacatgtcaggaaaaataaagaacactttctacctctgtttcagatttttgaaacacttattttaaaccaaattttaatttctgtgtccaaaataagttttaaggacatctgttcttccatacgaaataggttaggctgcctatttctcactgagctcatggaatggttctgcttatgatactctgcacgctgccttttagtgagtgaggagtttggggttgcctagcaacttgctaacttgtaaaaagtcatctttccctcacagaaagaaacgaaagaaagcaaagcaaagtcagtgaaagacaatctttatagtttcaggagtaaatctaaatgtggcttttgtcaagcacttagatggatataaatgcagcaacttgttttaaaaaaatgcacaatttacttcccaaaaaagttgttacttgccttttcaagttgttgacaaacacacatttgatattctcttatatgttatagtaatgtaacgtataaactcaagcctttttattctttgtgattaaatcctgttttaaaatgtcacaaaacaggaaccagcattctaattagatttactatatcaagatatggttcaaataggactactagagttcattgaacactaaaactatgaaacaattactttttatattaaaaagaccatggatttaacttatgaaaatccaaatgcaggatagtaatttttgtttacttttttaaccaaactgaatttttgaaagactattgcaggtgtttaaaaagaaagaaaagttgttttatctaatactgtaagtagttgtcatattctggaaaatttaatagttttagagttaagatatctcctctctttggttagggaagaagaaagcccttcaccattgtggaatgatgccctggctttaaggtttagctccacatcatgcttctcttgagaattctatttggtagttacaattacagaaactgattagtttgtcagtttgcagatagatttagcacagtactcatcactcggatagattgagatgttctttcacatcagatgatctgtaacactgtaagatactgatctttacaactgtttaatcagttttatttttgtacagtattagtgacctaagttattttgctgtcccgtttttgtaaatcaaatgaaattataaaagaggattctgacagtaggtattttgtacatatgtatatatgttgtccaaataaaaataataaatgataaagaaaacaattcttaaaaatgtaatccattcaattgagtatcatggcagggccatagtccctctactctcttggggggggatggggacctatgattatccttaaatagt

SEQ ID NO: 41889 - DNA, 4979 bp, Homo sapiens
  misc_feature (4904)..(4904): n is a, c, g, or t
attcttactcatttgtgtttattcttggacttatcctgacataatggggtttttttaattatagattcacactgcatttattcatcacccctgtcctctcatccataactcaaatttactaccagcaacacaaaatacaaagatgtgtccagtttcactacagctcttcgcgtttacaagtgtcgagcgcttgctttcggaacgcccttgtgattggccgagccaatgccagtgacatcaaccaacttacttttgattggaaggctggttgctgggactgtagcgtttgcaggaagtcacttaactgtttgggagctggaaaaccgaagctgaagttctcttttgccataggaacgagcgcaactgactaggaaagatgtgtcccaaagctccgcaagctggaacgtgagccaggaggcccggaccggccacgggaccgcgaggcactccgaaagtgtgcggctgccccttccctgcctcccagctgttacccttttaaatgtcagtgttcgaggctgtaggggtagcacgaggcagcgaaacggaacagtcggattggccgcacgcctcagttctagacgcacctctccaccgaaggccgttctgactggcagggggagaaagtaaacagagttgaatcaccctccccactggccaattggagggggtttggtttgtgacgtgatgggattctgcgaaattgttactgagcaagagaatgccggaacggtgcggaccggccggagcaggggttcagaagccgtcagtggactcgggaaaaagtgtctcttagacctggcgctcggcgggaccctcgccacccgcgtcggggtgatcgggtgaatgtcctggggctttggctcgacggcgaggcggccgagggcgtgcacctctcttgcagtttcctctcccagcgcctcgggggcgttttcagtcgaataaacttgcgaccgccacgtgtggcatctttccaagggagccggctcagaggggccggcgcgcccgtcgggggatcgcggccggcgcggggcaggggcggcggctagaggcggcggcgcggcggagcccggggccgtggatgctgcgtgcggaggcgctgccggttacgtaaagatgaggggctgaggtcgcctcggcgctcctgcgagtcggaagcgccccgcgcccccgcccccttggccgccgcgccgtgccgcgccgcgccgcgctcgtcgtccgaggccagggcagggcgagccgaacctccgcagccaccgccaagtttgtccgcgccgcctgggctgccgtcgcccgcaccatgtccgcggccgcctacatggacttcgtggctgcccagtgtctggtttccatttcgaaccgcgctgcggtgccggagcatggggtcgctccggacgccgagcggctgcgactacctgagcgcgaggtgaccaaggagcacggtgacccgggggacacctggaaggattactgcacactggtcaccatcgccaagagcttgttggacctgaacaagtaccgacccatccagaccccctccgtgtgcagcgacagtctggaaagtccagatgaggatatgggatccgacagcgacgtgaccaccgaatctgggtcgagtccttcccacagcccggaggagagacaggatcctggcagcgcgcccagcccgctctccctcctccatcctggagtggctgcgaaggggaaacacgcctccgaaaagaggcacaagtgcccctacagtggctgtgggaaagtctatggaaaatcctcccatctcaaagcccattacagagtgcatacaggtgaacggccctttccctgcacgtggccagactgccttaaaaagttctcccgctcagacgagctgacccgccactaccggacccacactggggaaaagcagttccgctgtccgctgtgtgagaagcgcttcatgaggagtgaccacctcacaaagcacgcccggcggcacaccgagttccaccccagcatgatcaagcgatcgaaaaaggcgctggccaacgctttgtgaggtgctgcccgtggaagccagggagggatggaccccgaaaggacaaaagtactcccaggaaacagacgcgtgaaaactgagccccagaagaggcacacttgacggcacaggaagtcactgctctttggtcaatattctgattttcctctccctgcattgtttttaaaaagcacattgtagcctaagatcaaagtcaacaacactcggtccccttgaagaggcaactctctgaacccgtctctgactgttggagggaaggcaaatgcttttgggttttttggtttttgtttttgtttttttttctccttttatttttttgcgggggagggtagggagtgggtgggggggagggggtaaggccaagactggggtagaattttaaagattcaacactggtgtacatatgtccgctgggtgagttgacctgtggcctcgcacagtgattctgggccctttatgcttgctgtctctcagaattgttttcttaccttttaatgtaatgacgagtgtgcttcagtttgtttagcaaaaccactctcttgaatcacgttaacttttgagattaaaaaaaaaaacgccatagcacagctgtctttatgcaagcaagagcacatctactccagcatgatctgtcatctaaagacttgaaaacaaaaaacagttacttatagtcaatgggtaagcagagtctgaatttatactaatcaagacaaacctttgaaaggttacactaagtacagaacttttaaaccttgctttgtatgagttgtactttttgaacataagctgcacttttattttctaatgcagaggatgaataagttaaatacatgctttgaggatagaagcagatgttctgtttggcaccacgttataatctgcttattttacaatatacacgtttccctaagaaatcatggcagagatgtgagggcagaatatacacaacagatgctgaaggagaaggagggtagtgttttgcaaaagaaaaagaaaagaaccaacagaattttaactctattaacttttccaaattttcctatgcttttagttaacatcattattgtatcctaatgccactaggggagagagcttttgactctgttgggttttatttgaatgtgtgcataacagtaatgagatctggaaacacctattttttggggaaaaaggtttgttggtctccttcctgtgttcctacaaaactcccactctcaggtgcaagagttatgtagaaggaaagggagctgaaataggaacagaaaaatcaacccctataactagtgaacaccaagggaaaataccacaatgatttcagaggagactctgcaaaatcgtcccttgtggagaatgcaggcaacatggaatactacgaatgaaatcacatcactgtatcttttacatcaatagcctcaccactaatatatcttgtatctaggtgtctataatggctgaaaccactacatccatctatgccatttacctgaaaacttaactgtggcctttatgaggccagaaaagtgaactgagttttcgtagttaagacctcaaatgaggggagtcagcagtgatcatgggggaaatgtttacattttttttttcttcagaagtaacgctttctgatgattttatctgatatttaaaacagggagctatggtgcactctagtttatacttgcgctctgaaatgtgtaaacatagggtgcctacctatttcacctgacccatactcgtttctgattcagaatcagtgtgggctcctgcagtgggcgcgggtcacggctgactccaacttccaatacaacagccatcactagcacagtgtttttttgtttaaccaacgtagttgtattagtagttctataaagagaactgcttttaacattagggactgggagcagtccatgggataaaaaggaaagtgttttctcacgagaaaacatgtcaggaaaaataaagaacactttctacctctgtttcagatttttgaaacacttattttaaaccaaattttaatttctgtgtccaaaataagttttaaggacatctgttcttccatacgaaataggttaggctgcctatttctcactgagctcatggaatggttctgcttatgatactctgcacgctgccttttagtgagtgaggagtttggggttgcctagcaacttgctaacttgtaaaaagtcatctttccctcacagaaagaaacgaaagaaagcaaagcaaagtcagtgaaagacaatctttatagtttcaggagtaaatctaaatgtggcttttgtcaagcacttagatggatataaatgcagcaacttgttttaaaaaaatgcacaatttacttcccaaaaaagttgttacttgccttttcaagttgttgacaaacacacatttgatattctcttatatgttatagtaatgtaacgtataaactcaagcctttttattctttgtgattaaatcctgttttaaaatgtcacaaaacaggaaccagcattctaattagatttactatatcaagatatggttcaaataggactactagagttcattgaacactaaaactatgaaacaattactttttatattaaaaagaccatggatttaacttatgaaaatccaaatgcaggatagtaatttttgtttacttttttaaccaaactgaatttttgaaagactattgcaggtgtttaaaaagaaagaaaagttgttttatctaatactgtaagtagttgtcatattctggaaaatttaatagttttagagttaagatatctcctctctttggttagggaagaagaaagcccttcaccattgtggaatgatgccctggctttaaggtttagctccacatcatgcttctcttggatcnattgcggtcccctcccaccgccgttgccgggcgcaattaaccgaccccacggagaggggggccacaacgtgccgg

SEQ ID NO: 41890 - DNA, 5151 bp, Homo sapiens
attcttactcatttgtgtttattcttggacttatcctgacataatggggtttttttaattatagattcacactgcatttattcatcacccctgtcctctcatccataactcaaatttactaccagcaacacaaaatacaaagatgtgtccagtttcactacagctcttcgcgtttacaagtgtcgagcgcttgctttcggaacgcccttgtgattggccgagccaatgccagtgacatcaaccaacttacttttgattggaaggctggttgctgggactgtagcgtttgcaggaagtcacttaactgtttgggagctggaaaaccgaagctgaagttctcttttgccataggaacgagcgcaactgactaggaaagatgtgtcccaaagctccgcaagctggaacgtgagccaggaggcccggaccggccacgggaccgcgaggcactccgaaagtgtgcggctgccccttccctgcctcccagctgttacccttttaaatgtcagtgttcgaggctgtaggggtagcacgaggcagcgaaacggaacagtcggattggccgcacgcctcagttctagacgcacctctccaccgaaggccgttctgactggcagggggagaaagtaaacagagttgaatcaccctccccactggccaattggagggggtttggtttgtgacgtgatgggattctgcgaaattgttactgagcaagagaatgccggaacggtgcggaccggccggagcaggggttcagaagccgtcagtggactcgggaaaaagtgtctcttagacctggcgctcggcgggaccctcgccacccgcgtcggggtgatcgggtgaatgtcctggggctttggctcgacggcgaggcggccgagggcgtgcacctctcttgcagtttcctctcccagcgcctcgggggcgttttcagtcgaataaacttgcgaccgccacgtgtggcatctttccaagggagccggctcagaggggccggcgcgcccgtcgggggatcgcggccggcgcggggcaggggcggcggctagaggcggcggcgcggcggagcccggggccgtggatgctgcgtgcggaggcgctgccggttacgtaaagatgaggggctgaggtcgcctcggcgctcctgcgagtcggaagcgccccgcgcccccgcccccttggccgccgcgccgtgccgcgccgcgccgcgctcgtcgtccgaggccagggcagggcgagccgaacctccgcagccaccgccaagtttgtccgcgccgcctgggctgccgtcgcccgcaccatgtccgcggccgcctacatggacttcgtggctgcccagtgtctggtttccatttcgaaccgcgctgcggtgccggagcatggggtcgctccggacgccgagcggctgcgactacctgagcgcgaggtgaccaaggagcacggtgacccgggggacacctggaaggattactgcacactggtcaccatcgccaagagcttgttggacctgaacaagtaccgacccatccagaccccctccgtgtgcagcgacagtctggaaagtccagatgaggatatgggatccgacagcgacgtgaccaccgaatctgggtcgagtccttcccacagcccggaggagagacaggatcctggcagcgcgcccagcccgctctccctcctccatcctggagtggctgcgaaggggaaacacgcctccgaaaagaggcacaagtgcccctacagtggctgtgggaaagtctatggaaaatcctcccatctcaaagcccattacagagtgcatacaggtgaacggccctttccctgcacgtggccagactgccttaaaaagttctcccgctcagacgagctgacccgccactaccggacccacactggggaaaagcagttccgctgtccgctgtgtgagaagcgcttcatgaggagtgaccacctcacaaagcacgcccggcggcacaccgagttccaccccagcatgatcaagcgatcgaaaaaggcgctggccaacgctttgtgaggtgctgcccgtggaagccagggagggatggaccccgaaaggacaaaagtactcccaggaaacagacgcgtgaaaactgagccccagaagaggcacacttgacggcacaggaagtcactgctctttggtcaatattctgattttcctctccctgcattgtttttaaaaagcacattgtagcctaagatcaaagtcaacaacactcggtccccttgaagaggcaactctctgaacccgtctctgactgttggagggaaggcaaatgcttttgggttttttggtttttgtttttgtttttttttctccttttatttttttgcgggggagggtagggagtgggtgggggggagggggtaaggccaagactggggtagaattttaaagattcaacactggtgtacatatgtccgctgggtgagttgacctgtggcctcgcacagtgattctgggccctttatgcttgctgtctctcagaattgttttcttaccttttaatgtaatgacgagtgtgcttcagtttgtttagcaaaaccactctcttgaatcacgttaacttttgagattaaaaaaaaaaacgccatagcacagctgtctttatgcaagcaagagcacatctactccagcatgatctgtcatctaaagacttgaaaacaaaaaacagttacttatagtcaatgggtaagcagagtctgaatttatactaatcaagacaaacctttgaaaggttacactaagtacagaacttttaaaccttgctttgtatgagttgtactttttgaacataagctgcacttttattttctaatgcagaggatgaataagttaaatacatgctttgaggatagaagcagatgttctgtttggcaccacgttataatctgcttattttacaatatacacgtttccctaagaaatcatggcagagatgtgagggcagaatatacacaacagatgctgaaggagaaggagggtagtgttttgcaaaagaaaaagaaaagaaccaacagaattttaactctattaacttttccaaattttcctatgcttttagttaacatcattattgtatcctaatgccactaggggagagagcttttgactctgttgggttttatttgaatgtgtgcataacagtaatgagatctggaaacacctattttttggggaaaaaggtttgttggtctccttcctgtgttcctacaaaactcccactctcaggtgcaagagttatgtagaaggaaagggagctgaaataggaacagaaaaatcaacccctataactagtgaacaccaagggaaaataccacaatgatttcagaggagactctgcaatcactgtatcttttacatcaatagcctcaccactaatatatcttgtatctaggtgtctataatggctgaaaccactacatccatctatgccatttacctgaaaacttaactgtggcctttatgaggccagaaaagtgaactgagttttcgtagttaagacctcaaatgaggggagtcagcagtgatcatgggggaaatgtttacattttttttttcttcagaagtaacgctttctgatgattttatctgatatttaaaacagggagctatggtgcactctagtttatacttgcgctctgaaatgtgtaaacatagggtgcctacctatttcacctgacccatactcgtttctgattcagaatcagtgtgggctcctgcagtgggcgcgggtcacggctgactccaacttccaatacaacagccatcactagcacagtgtttttttgtttaaccaacgtagttgtattagtagttctataaagagaactgcttttaacattagggactgggagcagtccatgggataaaaaggaaagtgttttctcacgagaaaacatgtcaggaaaaataaagaacactttctacctctgtttcagatttttgaaacacttattttaaaccaaattttaatttctgtgtccaaaataagttttaaggacatctgttcttccatacgaaataggttaggctgcctatttctcactgagctcatggaatggttctgcttatgatactctgcacgctgccttttagtgagtgaggagtttggggttgcctagcaacttgctaacttgtaaaaagtcatctttccctcacagaaagaaacgaaagaaagcaaagcaaagtcagtgaaagacaatctttatagtttcaggagtaaatctaaatgtggcttttgtcaagcacttagatggatataaatgcagcaacttgttttaaaaaaatgcacaatttacttcccaaaaaagttgttacttgccttttcaagttgttgacaaacacacatttgatattctcttatatgttatagtaatgtaacgtataaactcaagcctttttattctttgtgattaaatcctgttttaaaatgtcacaaaacaggaaccagcattctaattagatttactatatcaagatatggttcaaataggactactagagttcattgaacactaaaactatgaaacaattactttttatattaaaaagaccatggatttaacttatgaaaatccaaatgcaggatagtaatttttgtttacttttttaaccaaactgaatttttgaaagactattgcaggtgtttaaaaagaaagaaaagttgttttatctaatactgtaagtagttgtcatattctggaaaatttaatagttttagagttaagatatctcctctctttggttagggaagaagaaagcccttcaccattgtggaatgatgccctggctttaaggtttagctccacatcatgcttctcttgagaattctatttggtagttacaattacagaaactgattagtttgtcagtttgcagatagatttagcacagtactcatcactcggatagattgagatgttctttcacatcagatgatctgtaacactgtaagatactgatctttacaactgtttaatcagttttatttttgtacagtattagtgacctaagttattttgctgtcccgtttttgtaaatcaaatgaaattataaaagaggattctgacagtaggtattttgtacatatgtatatatgttgtccaaataaaaataataaatgataaaga

SEQ ID NO: 41891 - DNA, 5151 bp, Homo sapiens
attcttactcatttgtgtttattcttggacttatcctgacataatggggtttttttaattatagattcacactgcatttattcatcacccctgtcctctcatccataactcaaatttactaccagcaacacaaaatacaaagatgtgtccagtttcactacagctcttcgcgtttacaagtgtcgagcgcttgctttcggaacgcccttgtgattggccgagccaatgccagtgacatcaaccaacttacttttgattggaaggctggttgctgggactgtagcgtttgcaggaagtcacttaactgtttgggagctggaaaaccgaagctgaagttctcttttgccataggaacgagcgcaactgactaggaaagatgtgtcccaaagctccgcaagctggaacgtgagccaggaggcccggaccggccacgggaccgcgaggcactccgaaagtgtgcggctgccccttccctgcctcccagctgttacccttttaaatgtcagtgttcgaggctgtaggggtagcacgaggcagcgaaacggaacagtcggattggccgcacgcctcagttctagacgcacctctccaccgaaggccgttctgactggcagggggagaaagtaaacagagttgaatcaccctccccactggccaattggagggggtttggtttgtgacgtgatgggattctgcgaaattgttactgagcaagagaatgccggaacggtgcggaccggccggagcaggggttcagaagccgtcagtggactcgggaaaaagtgtctcttagacctggcgctcggcgggaccctcgccacccgcgtcggggtgatcgggtgaatgtcctggggctttggctcgacggcgaggcggccgagggcgtgcacctctcttgcagtttcctctcccagcgcctcgggggcgttttcagtcgaataaacttgcgaccgccacgtgtggcatctttccaagggagccggctcagaggggccggcgcgcccgtcgggggatcgcggccggcgcggggcaggggcggcggctagaggcggcggcgcggcggagcccggggccgtggatgctgcgtgcggaggcgctgccggttacgtaaagatgaggggctgaggtcgcctcggcgctcctgcgagtcggaagcgccccgcgcccccgcccccttggccgccgcgccgtgccgcgccgcgccgcgctcgtcgtccgaggccagggcagggcgagccgaacctccgcagccaccgccaagtttgtccgcgccgcctgggctgccgtcgcccgcaccatgtccgcggccgcctacatggacttcgtggctgcccagtgtctggtttccatttcgaaccgcgctgcggtgccggagcatggggtcgctccggacgccgagcggctgcgactacctgagcgcgaggtgaccaaggagcacggtgacccgggggacacctggaaggattactgcacactggtcaccatcgccaagagcttgttggacctgaacaagtaccgacccatccagaccccctccgtgtgcagcgacagtctggaaagtccagatgaggatatgggatccgacagcgacgtgaccaccgaatctgggtcgagtccttcccacagcccggaggagagacaggatcctggcagcgcgcccagcccgctctccctcctccatcctggagtggctgcgaaggggaaacacgcctccgaaaagaggcacaagtgcccctacagtggctgtgggaaagtctatggaaaatcctcccatctcaaagcccattacagagtgcatacaggtgaacggccctttccctgcacgtggccagactgccttaaaaagttctcccgctcagacgagctgacccgccactaccggacccacactggggaaaagcagttccgctgtccgctgtgtgagaagcgcttcatgaggagtgaccacctcacaaagcacgcccggcggcacaccgagttccaccccagcatgatcaagcgatcgaaaaaggcgctggccaacgctttgtgaggtgctgcccgtggaagccagggagggatggaccccgaaaggacaaaagtactcccaggaaacagacgcgtgaaaactgagccccagaagaggcacacttgacggcacaggaagtcactgctctttggtcaatattctgattttcctctccctgcattgtttttaaaaagcacattgtagcctaagatcaaagtcaacaacactcggtccccttgaagaggcaactctctgaacccgtctctgactgttggagggaaggcaaatgcttttgggttttttggtttttgtttttgtttttttttctccttttatttttttgcgggggagggtagggagtgggtgggggggagggggtaaggccaagactggggtagaattttaaagattcaacactggtgtacatatgtccgctgggtgagttgacctgtggcctcgcacagtgattctgggccctttatgcttgctgtctctcagaattgttttcttaccttttaatgtaatgacgagtgtgcttcagtttgtttagcaaaaccactctcttgaatcacgttaacttttgagattaaaaaaaaaaacgccatagcacagctgtctttatgcaagcaagagcacatctactccagcatgatctgtcatctaaagacttgaaaacaaaacaaacctttgaaaggttacactaagtacagaacttttaaaccttgctttgtatgagttgtactttttgaacataagctgcacttttattttctaatgcagaggatgaataagttaaatacatgctttgaggatagaagcagatgttctgtttggcaccacgttataatctgcttattttacaatatacacgtttccctaagaaatcatggcagagatgtgagggcagaatatacacaacagatgctgaaggagaaggagggtagtgttttgcaaaagaaaaagaaaagaaccaacagaattttaactctattaacttttccaaattttcctatgcttttagttaacatcattattgtatcctaatgccactaggggagagagcttttgactctgttgggttttatttgaatgtgtgcataacagtaatgagatctggaaacacctattttttggggaaaaaggtttgttggtctccttcctgtgttcctacaaaactcccactctcaggtgcaagagttatgtagaaggaaagggagctgaaataggaacagaaaaatcaacccctataactagtgaacaccaagggaaaataccacaatgatttcagaggagactctgcaaaatcgtcccttgtggagaatgcaggcaacatggaatactacgaatgaaatcacatcactgtatcttttacatcaatagcctcaccactaatatatcttgtatctaggtgtctataatggctgaaaccactacatccatctatgccatttacctgaaaacttaactgtggcctttatgaggccagaaaagtgaactgagttttcgtagttaagacctcaaatgaggggagtcagcagtgatcatgggggaaatgtttacattttttttttcttcagaagtaacgctttctgatgattttatctgatatttaaaacagggagctatggtgcactctagtttatacttgcgctctgaaatgtgtaaacatagggtgcctacctatttcacctgacccatactcgtttctgattcagaatcagtgtgggctcctgcagtgggcgcgggtcacggctgactccaacttccaatacaacagccatcactagcacagtgtttttttgtttaaccaacgtagttgtattagtagttctataaagagaactgcttttaacattagggactgggagcagtccatgggataaaaaggaaagtgttttctcacgagaaaacatgtcaggaaaaataaagaacactttctacctctgtttcagatttttgaaacacttattttaaaccaaattttaatttctgtgtccaaaataagttttaaggacatctgttcttccatacgaaataggttaggctgcctatttctcactgagctcatggaatggttctgcttatgatactctgcacgctgccttttagtgagtgaggagtttggggttgcctagcaacttgctaacttgtaaaaagtcatctttccctcacagaaagaaacgaaagaaagcaaagcaaagtcagtgaaagacaatctttatagtttcaggagtaaatctaaatgtggcttttgtcaagcacttagatggatataaatgcagcaacttgttttaaaaaaatgcacaatttacttcccaaaaaagttgttacttgccttttcaagttgttgacaaacacacatttgatattctcttatatgttatagtaatgtaacgtataaactcaagcctttttattctttgtgattaaatcctgttttaaaatgtcacaaaacaggaaccagcattctaattagatttactatatcaagatatggttcaaataggactactagagttcattgaacactaaaactatgaaacaattactttttatattaaaaagaccatggatttaacttatgaaaatccaaatgcaggatagtaatttttgtttacttttttaaccaaactgaatttttgaaagactattgcaggtgtttaaaaagaaagaaaagttgttttatctaatactgtaagtagttgtcatattctggaaaatttaatagttttagagttaagatatctcctctctttggttagggaagaagaaagcccttcaccattgtggaatgatgccctggctttaaggtttagctccacatcatgcttctcttgagaattctatttggtagttacaattacagaaactgattagtttgtcagtttgcagatagatttagcacagtactcatcactcggatagattgagatgttctttcacatcagatgatctgtaacactgtaagatactgatctttacaactgtttaatcagttttatttttgtacagtattagtgacctaagttattttgctgtcccgtttttgtaaatcaaatgaaattataaaagaggattctgacagtaggtattttgtacatatgtatatatgttgtccaaataaaaataataaatgataaaga

SEQ ID NO: 41892 - DNA, 5150 bp, Homo sapiens
attcttactcatttgtgtttattcttggacttatcctgacataatggggtttttttaattatagattcacactgcatttattcatcacccctgtcctctcatccataactcaaatttactaccagcaacacaaaatacaaagatgtgtccagtttcactacagctcttcgcgtttacaagtgtcgagcgcttgctttcggaacgcccttgtgattggccgagccaatgccagtgacatcaaccaacttacttttgattggaaggctggttgctgggactgtagcgtttgcaggaagtcacttaactgtttgggagctggaaaaccgaagctgaagttctcttttgccataggaacgagcgcaactgactaggaaagatgtgtcccaaagctccgcaagctggaacgtgagccaggaggcccggaccggccacgggaccgcgaggcactccgaaagtgtgcggctgccccttccctgcctcccagctgttacccttttaaatgtcagtgttcgaggctgtaggggtagcacgaggcagcgaaacggaacagtcggattggccgcacgcctcagttctagacgcacctctccaccgaaggccgttctgactggcagggggagaaagtaaacagagttgaatcaccctccccactggccaattggagggggtttggtttgtgacgtgatgggattctgcgaaattgttactgagcaagagaatgccggaacggtgcggaccggccggagcaggggttcagaagccgtcagtggactcgggaaaaagtgtctcttagacctggcgctcggcgggaccctcgccacccgcgtcggggtgatcgggtgaatgtcctggggctttggctcgacggcgaggcggccgagggcgtgcacctctcttgcagtttcctctcccagcgcctcgggggcgttttcagtcgaataaacttgcgaccgccacgtgtggcatctttccaagggagccggctcagaggggccggcgcgcccgtcgggggatcgcggccggcgcggggcaggggcggcggctagaggcggcggcgcggcggagcccggggccgtggatgctgcgtgcggaggcgctgccggttacgtaaagatgaggggctgaggtcgcctcggcgctcctgcgagtcggaagcgccccgcgcccccgcccccttggccgccgcgccgtgccgcgccgcgccgcgctcgtcgtccgaggccagggcagggcgagccgaacctccgcagccaccgccaagtttgtccgcgccgcctgggctgccgtcgcccgcaccatgtccgcggccgcctacatggacttcgtggctgcccagtgtctggtttccatttcgaaccgcgctgcggtgccggagcatggggtcgctccggacgccgagcggctgcgactacctgagcgcgaggtgaccaaggagcacggtgacccgggggacacctggaaggattactgcacactggtcaccatcgccaagagcttgttggacctgaacaagtaccgacccatccagaccccctccgtgtgcagcgacagtctggaaagtccagatgaggatatgggatccgacagcgacgtgaccaccgaatctgggtcgagtccttcccacagcccggaggagagacaggatcctggcagcgcgcccagcccgctctccctcctccatcctggagtggctgcgaaggggaaacacgcctccgaaaagaggcacaagtgcccctacagtggctgtgggaaagtctatggaaaatcctcccatctcaaagcccattacagagtgcatacaggtgaacggccctttccctgcacgtggccagactgccttaaaaagttctcccgctcagacgagctgacccgccactaccggacccacactggggaaaagcagttccgctgtccgctgtgtgagaagcgcttcatgaggagtgaccacctcacaaagcacgcccggcggcacaccgagttccaccccagcatgatcaagcgatcgaaaaaggcgctggccaacgctttgtgaggtgctgcccgtggaagccagggagggatggaccccgaaaggacaaaagtactcccaggaaacagacgcgtgaaaactgagccccagaagaggcacacttgacggcacaggaagtcactgctctttggtcaatattctgattttcctctccctgcattgtttttaaaaagcacattgtagcctaagatcaaagtcaacaacactcggtccccttgaagaggcaactctctgaacccgtctctgactgttggagggaaggcaaatgcttttgggttttttggtttttgtttttgtttttttttctccttttatttttttgcgggggagggtagggagtgggtgggggggagggggtaaggccaagactggggtagaattttaaagattcaacactggtgtacatatgtccgctgggtgagttgacctgtggcctcgcacagtgattctgggccctttatgcttgctgtctctcagaattgttttcttaccttttaatgtaatgacgagtgtgcttcagtttgtttagcaaaaccactctcttgaatcacgttaacttttgagattaaaaaaaaaaacgccatagcacagctgtctttatgcaagcaagagcacatctactccagcatgatctgtcatctaaagacttgaaaacaaaaaacagttacttatagtcaatgggtaagcagagtctgaatttatactaatcaagacaaacctttgaaaggttacactaagtacagaacttttaaaccttgctttgtatgagttgtactttttgaacataagctgcacttttattttctaatgcagaggatgaataagttaaatacatgctttgaggatagaagcagatgttctgtttggcaccacgttataatctgcttattttacaatatacacgtttccctaagaaatcatggcagagatgtgagggcagaatatacacaacagatgctgaaggagaaggagggtagtgttttgcaaaagaaaaagaaaagaaccaacagaattttaactctattaacttttccaaattttcctatgcttttagttaacatcattattgtatcctaatgccactaggggagagagcttttgactctgttgggttttatttgaatgtgtgcataacagtaatgagatctggaaacacctattttttggggaaaaaggtttgttggtctccttcctgtgttcctacaaaactcccactctcaggtgcaagagttatgtagaaggaaagggagctgaaataggaacagaaaaatcaacccctataactagtgaacaccaagggaaaataccacaatgatttcagaggagactctgcaaaatcgtcccttgtggagaatgcaggcaacatggaatactacgaatgaaatcacatcactgtatcttttacatcaatagcctcaccactaatatatcttgtatctaggtgtctataatggctgaaaccactacatccatctatgccatttacctgaaaacttaactgtggcctttatgaggccagaaaagtgaactgagttttcgtagttaagacctcaaatgaggggagtcagcagtgatcatgggggaaatgtttacattttttttttcttcagaagtaacgctttctgatgattttatctgatatttaaaacagggagctatggtgcactctagtttatacttgcgctctgaaatgtgtaaacatagggtgcctacctatttcacctgacccatactcgtttctgattcagaatcagtgtgggctcctgcagtgggcgcgggtcacggctgactccaacttccaatacaacagccatcactagcacagtgtttttttgtttaaccaacgtagttgtattagtagttctataaagagaactgcttttaacattagggactgggagcagtccatgggataaaaaggaaagtgttttctcacgagaaaacatgtcaggaaaaataaagaacactttctacctctgtttcagatttttgaaacacttattttaaaccaaattttaatttctgtgtccaaaataagttttaaggacatctgttcttccatacgaaataggttaggctgcctatttctcactgagctcatggaatggttctgcttatgatactctgcacgctgccttttagtgagtgaggagtttggggttgcctagcaacttgctaacttgtaaaaagtcatctttccctcacagaaagaaacgaaagaaagcaaagcaaagtcagtgaaagacaatctttatagtttcaggagtaaatctaaatgtggcttttgtcaagcacttagatggatataaatgcagcaacttgttttaaaaaaatgcacaatttacttcccaaaaaagttgttacttgccttttcaagttgttgacaaacacacatttgatattctcttatatgttatagtaatgtaacgtataaactcaagcctttttattctttgtgattaaatcctgttttaaaatgtcacaaaacaggaaccagcattctaattagatttactatatcaagatatggttcaaataggactactagagttcattgaacactaaaactatgaaacaattactttttatattaaaaagaccatggatttaacttatgaaaatccaaatgcaggatagtaatttttgtttacttttttaaccaaactgaatttttgaaagactattgcaggtgtttaaaaagaaagaaaagttgttttatctaatactgtaagtagttgtcatattctggaagcccttcaccattgtggaatgatgccctggctttaaggtttagctccacatcatgcttctcttgagaattctatttggtagttacaattacagaaactgattagtttgtcagtttgcagatagatttagcacagtactcatcactcggatagattgagatgttctttcacatcagatgatctgtaacactgtaagatactgatctttacaactgtttaatcagttttatttttgtacagtattagtgacctaagttattttgctgtcccgtttttgtaaatcaaatgaaattataaaagaggattctgacagtaggtattttgtacatatgtatatatgttgtccaaataaaaataataaatgataaaga

SEQ ID NO: 41893 - DNA, 2681 bp, Homo sapiens
attcttactcatttgtgtttattcttggacttatcctgacataatggggtttttttaattatagattcacactgcatttattcatcacccctgtcctctcatccataactcaaatttactaccagcaacacaaaatacaaagatgtgtccagtttcactacagctcttcgcgtttacaagtgtcgagcgcttgctttcggaacgcccttgtgattggccgagccaatgccagtgacatcaaccaacttacttttgattggaaggctggttgctgggactgtagcgtttgcaggaagtcacttaactgtttgggagctggaaaaccgaagctgaagttctcttttgccataggaacgagcgcaactgactaggaaagatgtgtcccaaagctccgcaagctggaacgtgagccaggaggcccggaccggccacgggaccgcgaggcactccgaaagtgtgcggctgccccttccctgcctcccagctgttacccttttaaatgtcagtgttcgaggctgtaggggtagcacgaggcagcgaaacggaacagtcggattggccgcacgcctcagttctagacgcacctctccaccgaaggccgttctgactggcagggggagaaagtaaacagagttgaatcaccctccccactggccaattggagggggtttggtttgtgacgtgatgggattctgcgaaattgttactgagcaagagaatgccggaacggtgcggaccggccggagcaggggttcagaagccgtcagtggactcgggaaaaagtgtctcttagacctggcgctcggcgggaccctcgccacccgcgtcggggtgatcgggtgaatgtcctggggctttggctcgacggcgaggcggccgagggcgtgcacctctcttgcagtttcctctcccagcgcctcgggggcgttttcagtcgaataaacttgcgaccgccacgtgtggcatctttccaagggagccggctcagaggggccggcgcgcccgtcgggggatcgcggccggcgcggggcaggggcggcggctagaggcggcggcgcggcggagcccggggccgtggatgctgcgtgcggaggcgctgccggttacgtaaagatgaggggctgaggtcgcctcggcgctcctgcgagtcggaagcgccccgcgcccccgcccccttggccgccgcgccgtgccgcgccgcgccgcgctcgtcgtccgaggccagggcagggcgagccgaacctccgcagccaccgccaagtttgtccgcgccgcctgggctgccgtcgcccgcaccatgtccgcggccgcctacatggacttcgtggctgcccagtgtctggtttccatttcgaaccgcgctgcggtgccggagcatggggtcgctccggacgccgagcggctgcgactacctgagcgcgaggtgaccaaggagcacggtgacccgggggacacctggaaggattactgcacactggtcaccatcgccaagagcttgttggacctgaacaagtaccgacccatccagaccccctccgtgtgcagcgacagtctggaaagtccagatgaggatatgggatccgacagcgacgtgaccaccgaatctgggtcgagtccttcccacagcccggaggagagacaggatcctggcagcgcgcccagcccgctctccctcctccatcctggagtggctgcgaaggggaaacacgcctccgaaaagaggcacaagtgcccctacagtggctgtgggaaagtctatggaaaatcctcccatctcaaagcccattacagagtgcatacaggtgaacggccctttccctgcacgtggccagactgccttaaaaagttctcccgctcagacgagctgacccgccactaccggacccacactggggaaaagcagttccgctgtccgctgtgtgagaagcgcttcatgaggagtgaccacctcacaaagcacgcccggcggcacaccgagttccaccccagcatgatcaagcgatcgaaaaaggcgctggccaacgctttgtgaggtgctgcccgtggaagccagggagggatggaccccgaaaggacaaaagtactcccaggaaacagacgcgtgaaaactgagccccagaagaggcacacttgacggcacaggaagtcactgctctttggtcaatattctgattttcctctccctgcattgtttttaaaaagcacattgtagcctaagatcaaagtcaacaacactcggtccccttgaagaggcaactctctgaacccgtctctgactgttggagggaaggcaaatgcttttgggttttttggtttttgtttttgtttttttttctccttttatttttttgcgggggagggtagggagtgggtgcctttatatccaccccctcaacccattaaattacctagtaccactgactttacgtgccctcagcgacaacgtctgcgatacactaatcaacttcctcttaacgatgttaaccagtctctcccccttcgtatgccccaccaccctctacaaacttactatgccctcaagctgttctcccactacctaaaatttgcccgacaatcgcagtttacctccaattcccgcaaactatcctactcgcgtctcgctttctttggagttgacacctcacatcccccctccccctcctcgccttttaaactagcct

SEQ ID NO: 41894 - DNA, 5205 bp, Homo sapiens
attcttactcatttgtgtttattcttggacttatcctgacataatggggtttttttaattatagattcacactgcatttattcatcacccctgtcctctcatccataactcaaatttactaccagcaacacaaaatacaaagatgtgtccagtttcactacagctcttcgcgtttacaagtgtcgagcgcttgctttcggaacgcccttgtgattggccgagccaatgccagtgacatcaaccaacttacttttgattggaaggctggttgctgggactgtagcgtttgcaggaagtcacttaactgtttgggagctggaaaaccgaagctgaagttctcttttgccataggaacgagcgcaactgactaggaaagatgtgtcccaaagctccgcaagctggaacgtgagccaggaggcccggaccggccacgggaccgcgaggcactccgaaagtgtgcggctgccccttccctgcctcccagctgttacccttttaaatgtcagtgttcgaggctgtaggggtagcacgaggcagcgaaacggaacagtcggattggccgcacgcctcagttctagacgcacctctccaccgaaggccgttctgactggcagggggagaaagtaaacagagttgaatcaccctccccactggccaattggagggggtttggtttgtgacgtgatgggattctgcgaaattgttactgagcaagagaatgccggaacggtgcggaccggccggagcaggggttcagaagccgtcagtggactcgggaaaaagtgtctcttagacctggcgctcggcgggaccctcgccacccgcgtcggggtgatcgggtgaatgtcctggggctttggctcgacggcgaggcggccgagggcgtgcacctctcttgcagtttcctctcccagcgcctcgggggcgttttcagtcgaataaacttgcgaccgccacgtgtggcatctttccaagggagccggctcagaggggccggcgcgcccgtcgggggatcgcggccggcgcggggcaggggcggcggctagaggcggcggcgcggcggagcccggggccgtggatgctgcgtgcggaggcgctgccggttacgtaaagatgaggggctgaggtcgcctcggcgctcctgcgagtcggaagcgccccgcgcccccgcccccttggccgccgcgccgtgccgcgccgcgccgcgctcgtcgtccgaggccagggcagggcgagccgaacctccgcagccaccgccaagtttgtccgcgccgcctgggctgccgtcgcccgcaccatgtccgcggccgcctacatggacttcgtggctgcccagtgtctggtttccatttcgaaccgcgctgcggtgccggagcatggggtcgctccggacgccgagcggctgcgactacctgagcgcgaggtgaccaaggagcacggtgacccgggggacacctggaaggattactgcacactggtcaccatcgccaagagcttgttggacctgaacaagtaccgacccatccagaccccctccgtgtgcagcgacagtctggaaagtccagatgaggatatgggatccgacagcgacgtgaccaccgaatctgggtcgagtccttcccacagcccggaggagagacaggatcctggcagcgcgcccagcccgctctccctcctccatcctggagtggctgcgaaggggaaacacgcctccgaaaagaggcacaagtgcccctacagtggctgtgggaaagtctatggaaaatcctcccatctcaaagcccattacagagtgcatacaggtgaacggccctttccctgcacgtggccagactgccttaaaaagttctcccgctcagacgagctgacccgccactaccggacccacactggggaaaagcagttccgctgtccgctgtgtgagaagcgcttcatgaggagtgaccacctcacaaagcacgcccggcggcacaccgagttccaccccagcatgatcaagcgatcgaaaaaggcgctggccaacgctttgtgaggtgctgcccgtggaagccagggagggatggaccccgaaaggacaaaagtactcccaggaaacagacgcgtgaaaactgagccccagaagaggcacacttgacggcacaggaagtcactgctctttggtcaatattctgattttcctctccctgcattgtttttaaaaagcacattgtagcctaagatcaaagtcaacaacactcggtccccttgaagaggcaactctctgaacccgtctctgactgttggagggaaggcaaatgcttttgggttttttggtttttgtttttgtttttttttctccttttatttttttgcgggggagggtagggagtgggtgggggggagggggtaaggccaagactggggtagaattttaaagattcaacactggtgtacatatgtccgctgggtgagttgacctgtggcctcgcacagtgattctgggccctttatgcttgctgtctctcagaattgttttcttaccttttaatgtaatgacgagtgtgcttcagtttgtttagcaaaaccactctcttgaatcacgttaacttttgagattaaaaaaaaaaacgccatagcacagctgtctttatgcaagcaagagcacatctactccagcatgatctgtcatctaaagacttgaaaacaaaaaacagttacttatagtcaatgggtaagcagagtctgaatttatactaatcaagacaaacctttgaaaggttacactaagtacagaacttttaaaccttgctttgtatgagttgtactttttgaacataagctgcacttttattttctaatgcagaggatgaataagttaaatacatgctttgaggatagaagcagatgttctgtttggcaccacgttataatctgcttattttacaatatacacgtttccctaagaaatcatggcagagatgtgagggcagaatatacacaacagatgctgaaggagaaggagggtagtgttttgcaaaagaaaaagaaaagaaccaacagaattttaactctattaacttttccaaattttcctatgcttttagttaacatcattattgtatcctaatgccactaggggagagagcttttgactctgttgggttttatttgaatgtgtgcataacagtaatgagatctggaaacacctattttttggggaaaaaggtttgttggtctccttcctgtgttcctacaaaactcccactctcaggtgcaagagttatgtagaaggaaagggagctgaaataggaacagaaaaatcaacccctataactagtgaacaccaagggaaaataccacaatgatttcagaggagactctgcaaaatcgtcccttgtggagaatgcaggcaacatggaatactacgaatgaaatcacatcactgtatcttttacatcaatagcctcaccactaatatatcttgtatctaggtgtctataatggctgaaaccactacatccatctatgccatttacctgaaaacttaactgtggcctttatgaggccagaaaagtgaactgagttttcgtagttaagacctcaaatgaggggagtcagcagtgatcatgggggaaatgtttacattttttttttcttcagaagtaacgctttctgatgattttatctgatatttaaaacagggagctatggtgcactctagtttatacttgcgctctgaaatgtgtaaacatagggtgcctacctatttcacctgacccatactcgtttctgattcagaatcagtgtgggctcctgcagtgggcgcgggtcacggctgactccaacttccaatacaacagccatcactagcacagtgtttttttgtttaaccaacgtagttgtattagtagttctataaagagaactgcttttaacattagggactgggagcagtccatgggataaaaaggaaagtgttttctcacgagaaaacatgtcaggaaaaataaagaacactttctacctctgtttcagatttttgaaacacttattttaaaccaaattttaatttctgtgtccaaaataagttttaaggacatctgttcttccatacgaaataggttaggctgcctatttctcactgagctcatggaatggttctgcttatgatactctgcacgctgccttttagtgagtgaggagtttggggttgcctagcaacttgctaacttgtaaaaagtcatctttccctcacagaaagaaacgaaagaaagcaaagcaaagtcagtgaaagacaatctttatagtttcaggagtaaatctaaatgtggcttttgtcaagcacttagatggatataaatgcagcaacttgttttaaaaaaatgcacaatttacttcccaaaaaagttgttacttgccttttcaagttgttgacaaacacacatttgatattctcttatatgttatagtaatgtaacgtataaactcaagcctttttattctttgtgattaaatcctgttttaaaatgtcacaaaacaggaaccagcattctaattagatttactatatcaagatatggttcaaataggactactagagttcattgaacactaaaactatgaaacaattactttttatattaaaaagaccatggatttaacttatgaaaatccaaatgcaggatagtaatttttgtttacttttttaaccaaactgaatttttgaaagactattgcaggtgtttaaaaagaaagaaaagttgttttatctaatactgtaagtagttgtcatattctggaaaatttaatagttttagagttaagatatctcctctctttggttagggaagaagaaagcccttcaccattgtggaatgatgccctggctttaaggtttagctccacatcatgcttctcttgagaattctatttggtagttacaattacagaaactgattagtttgtcagtttgcagatagatttagcacagtactcatcactcggatagattgagatgttctttcacatcagatgatctgtaacactgtaagatactgatctttacaactgtttaatcagttttatttttgtacagtattagtgacctaagttattttgctgtcccgtttttgtaaatcaaatgaaattataaaagaggattctgacagtaggtattttgtacatatgtatatatgttgtccaaataaaaataataaatgataaaga

SEQ ID NO: 41895 - DNA, 5151 bp, Homo sapiens
attcttactcatttgtgtttattcttggacttatcctgacataatggggtttttttaattatagattcacactgcatttattcatcacccctgtcctctcatccataactcaaatttactaccagcaacacaaaatacaaagatgtgtccagtttcactacagctcttcgcgtttacaagtgtcgagcgcttgctttcggaacgcccttgtgattggccgagccaatgccagtgacatcaaccaacttacttttgattggaaggctggttgctgggactgtagcgtttgcaggaagtcacttaactgtttgggagctggaaaaccgaagctgaagttctcttttgccataggaacgagcgcaactgactaggaaagatgtgtcccaaagctccgcaagctggaacgtgagccaggaggcccggaccggccacgggaccgcgaggcactccgaaagtgtgcggctgccccttccctgcctcccagctgttacccttttaaatgtcagtgttcgaggctgtaggggtagcacgaggcagcgaaacggaacagtcggattggccgcacgcctcagttctagacgcacctctccaccgaaggccgttctgactggcagggggagaaagtaaacagagttgaatcaccctccccactggccaattggagggggtttggtttgtgacgtgatgggattctgcgaaattgttactgagcaagagaatgccggaacggtgcggaccggccggagcaggggttcagaagccgtcagtggactcgggaaaaagtgtctcttagacctggcgctcggcgggaccctcgccacccgcgtcggggtgatcgggtgaatgtcctggggctttggctcgacggcgaggcggccgagggcgtgcacctctcttgcagtttcctctcccagcgcctcgggggcgttttcagtcgaataaacttgcgaccgccacgtgtggcatctttccaagggagccggctcagaggggccggcgcgcccgtcgggggatcgcggccggcgcggggcaggggcggcggctagaggcggcggcgcggcggagcccggggccgtggatgctgcgtgcggaggcgctgccggttacgtaaagatgaggggctgaggtcgcctcggcgctcctgcgagtcggaagcgccccgcgcccccgcccccttggccgccgcgccgtgccgcgccgcgccgcgctcgtcgtccgaggccagggcagggcgagccgaacctccgcagccaccgccaagtttgtccgcgccgcctgggctgccgtcgcccgcaccatgtccgcggccgcctacatggacttcgtggctgcccagtgtctggtttccatttcgaaccgcgctgcggtgccggagcatggggtcgctccggacgccgagcggctgcgactacctgagcgcgaggtgaccaaggagcacggtgacccgggggacacctggaaggattactgcacactggtcaccatcgccaagagcttgttggacctgaacaagtaccgacccatccagaccccctccgtgtgcagcgacagtctggaaagtccagatgaggatatgggatccgacagcgacgtgaccaccgaatctgggtcgagtccttcccacagcccggaggagagacaggatcctggcagcgcgcccagcccgctctccctcctccatcctggagtggctgcgaaggggaaacacgcctccgaaaagaggcacaagtgcccctacagtggctgtgggaaagtctatggaaaatcctcccatctcaaagcccattacagagtgcatacaggtgaacggccctttccctgcacgtggccagactgccttaaaaagttctcccgctcagacgagctgacccgccactaccggacccacactggggaaaagcagttccgctgtccgctgtgtgagaagcgcttcatgaggagtgaccacctcacaaagcacgcccggcggcacaccgagttccaccccagcatgatcaagcgatcgaaaaaggcgctggccaacgctttgtgaggtgctgcccgtggaagccagggagggatggaccccgaaaggacaaaagtactcccaggaaacagacgcgtgaaaactgagccccagaagaggcacacttgacggcacaggaagtcactgctctttggtcaatattctgattttcctctccctgcattgtttttaaaaagcacattgtagcctaagatcaaagtcaacaacactcggtccccttgaagaggcaactctctgaacccgtctctgactgttggagggaaggcaaatgcttttgggttttttggtttttgtttttgtttttttttctccttttatttttttgcgggggagggtagggagtgggtgggggggagggggtaaggccaagactggggtagaattttaaagattcaacactggtgtacatatgtccgctgggtgagttgacctgtggcctcgcacagtgattctgggccctttatgcttgctgtctctcagaattgttttcttaccttttaatgtaatgacgagtgtgcttcagtttgtttagcaaaaccactctcttgaatcacgttaacttttgagattaaaaaaaaaaacgccatagcacagctgtctttatgcaagcaagagcacatctactccagcatgatctgtcatctaaagacttgaaaacaaaaaacagttacttatagtcaatgggtaagcagagtctgaatttatactaatcaagacaaacctttgaaaggttacactaagtacagaacttttaaaccttgctttgtatgagttgtactttttgaacataagctgcacttttattttctaatgcagaggatgaataagttaaatacatgctttgaggatagaagcagatgttctgtttggcaccacgttataatctgcttattttacaatatacacgtttccctaagaaatcatggcagagatgtgagggcagaatatacacaacagatgctgaaggagaaggagggtagtgttttgcaaaagaaaaagttagttaacatcattattgtatcctaatgccactaggggagagagcttttgactctgttgggttttatttgaatgtgtgcataacagtaatgagatctggaaacacctattttttggggaaaaaggtttgttggtctccttcctgtgttcctacaaaactcccactctcaggtgcaagagttatgtagaaggaaagggagctgaaataggaacagaaaaatcaacccctataactagtgaacaccaagggaaaataccacaatgatttcagaggagactctgcaaaatcgtcccttgtggagaatgcaggcaacatggaatactacgaatgaaatcacatcactgtatcttttacatcaatagcctcaccactaatatatcttgtatctaggtgtctataatggctgaaaccactacatccatctatgccatttacctgaaaacttaactgtggcctttatgaggccagaaaagtgaactgagttttcgtagttaagacctcaaatgaggggagtcagcagtgatcatgggggaaatgtttacattttttttttcttcagaagtaacgctttctgatgattttatctgatatttaaaacagggagctatggtgcactctagtttatacttgcgctctgaaatgtgtaaacatagggtgcctacctatttcacctgacccatactcgtttctgattcagaatcagtgtgggctcctgcagtgggcgcgggtcacggctgactccaacttccaatacaacagccatcactagcacagtgtttttttgtttaaccaacgtagttgtattagtagttctataaagagaactgcttttaacattagggactgggagcagtccatgggataaaaaggaaagtgttttctcacgagaaaacatgtcaggaaaaataaagaacactttctacctctgtttcagatttttgaaacacttattttaaaccaaattttaatttctgtgtccaaaataagttttaaggacatctgttcttccatacgaaataggttaggctgcctatttctcactgagctcatggaatggttctgcttatgatactctgcacgctgccttttagtgagtgaggagtttggggttgcctagcaacttgctaacttgtaaaaagtcatctttccctcacagaaagaaacgaaagaaagcaaagcaaagtcagtgaaagacaatctttatagtttcaggagtaaatctaaatgtggcttttgtcaagcacttagatggatataaatgcagcaacttgttttaaaaaaatgcacaatttacttcccaaaaaagttgttacttgccttttcaagttgttgacaaacacacatttgatattctcttatatgttatagtaatgtaacgtataaactcaagcctttttattctttgtgattaaatcctgttttaaaatgtcacaaaacaggaaccagcattctaattagatttactatatcaagatatggttcaaataggactactagagttcattgaacactaaaactatgaaacaattactttttatattaaaaagaccatggatttaacttatgaaaatccaaatgcaggatagtaatttttgtttacttttttaaccaaactgaatttttgaaagactattgcaggtgtttaaaaagaaagaaaagttgttttatctaatactgtaagtagttgtcatattctggaaaatttaatagttttagagttaagatatctcctctctttggttagggaagaagaaagcccttcaccattgtggaatgatgccctggctttaaggtttagctccacatcatgcttctcttgagaattctatttggtagttacaattacagaaactgattagtttgtcagtttgcagatagatttagcacagtactcatcactcggatagattgagatgttctttcacatcagatgatctgtaacactgtaagatactgatctttacaactgtttaatcagttttatttttgtacagtattagtgacctaagttattttgctgtcccgtttttgtaaatcaaatgaaattataaaagaggattctgacagtaggtattttgtacatatgtatatatgttgtccaaataaaaataataaatgataaaga

SEQ ID NO: 41896 - DNA, 5151 bp, Homo sapiens
attcttactcatttgtgtttattcttggacttatcctgacataatggggtttttttaattatagattcacactgcatttattcatcacccctgtcctctcatccataactcaaatttactaccagcaacacaaaatacaaagatgtgtccagtttcactacagctcttcgcgtttacaagtgtcgagcgcttgctttcggaacgcccttgtgattggccgagccaatgccagtgacatcaaccaacttacttttgattggaaggctggttgctgggactgtagcgtttgcaggaagtcacttaactgtttgggagctggaaaaccgaagctgaagttctcttttgccataggaacgagcgcaactgactaggaaagatgtgtcccaaagctccgcaagctggaacgtgagccaggaggcccggaccggccacgggaccgcgaggcactccgaaagtgtgcggctgccccttccctgcctcccagctgttacccttttaaatgtcagtgttcgaggctgtaggggtagcacgaggcagcgaaacggaacagtcggattggccgcacgcctcagttctagacgcacctctccaccgaaggccgttctgactggcagggggagaaagtaaacagagttgaatcaccctccccactggccaattggagggggtttggtttgtgacgtgatgggattctgcgaaattgttactgagcaagagaatgccggaacggtgcggaccggccggagcaggggttcagaagccgtcagtggactcgggaaaaagtgtctcttagacctggcgctcggcgggaccctcgccacccgcgtcggggtgatcgggtgaatgtcctggggctttggctcgacggcgaggcggccgagggcgtgcacctctcttgcagtttcctctcccagcgcctcgggggcgttttcagtcgaataaacttgcgaccgccacgtgtggcatctttccaagggagccggctcagaggggccggcgcgcccgtcgggggatcgcggccggcgcggggcaggggcggcggctagaggcggcggcgcggcggagcccggggccgtggatgctgcgtgcggaggcgctgccggttacgtaaagatgaggggctgaggtcgcctcggcgctcctgcgagtcggaagcgccccgcgcccccgcccccttggccgccgcgccgtgccgcgccgcgccgcgctcgtcgtccgaggccagggcagggcgagccgaacctccgcagccaccgccaagtttgtccgcgccgcctgggctgccgtcgcccgcaccatgtccgcggccgcctacatggacttcgtggctgcccagtgtctggtttccatttcgaaccgcgctgcggtgccggagcatggggtcgctccggacgccgagcggctgcgactacctgagcgcgaggtgaccaaggagcacggtgacccgggggacacctggaaggattactgcacactggtcaccatcgccaagagcttgttggacctgaacaagtaccgacccatccagaccccctccgtgtgcagcgacagtctggaaagtccagatgaggatatgggatccgacagcgacgtgaccaccgaatctgggtcgagtccttcccacagcccggaggagagacaggatcctggcagcgcgcccagcccgctctccctcctccatcctggagtggctgcgaaggggaaacacgcctccgaaaagaggcacaagtgcccctacagtggctgtgggaaagtctatggaaaatcctcccatctcaaagcccattacagagtgcatacaggtgaacggccctttccctgcacgtggccagactgccttaaaaagttctcccgctcagacgagctgacccgccactaccggacccacactggggaaaagcagttccgctgtccgctgtgtgagaagcgcttcatgaggagtgaccacctcacaaagcacgcccggcggcacaccgagttccaccccagcatgatcaagcgatcgaaaaaggcgctggccaacgctttgtgaggtgctgcccgtggaagccagggagggatggaccccgaaaggacaaaagtactcccaggaaacagacgcgtgaaaactgagccccagaagaggcacacttgacggcacaggaagtcactgctctttggtcaatattctgattttcctctccctgcattgtttttaaaaagcacattgtagcctaagatcaaagtcaacaacactcggtccccttgaagaggcaactctctgaacccgtctctgactgttggagggaaggcaaatgcttttgggttttttggtttttgtttttgtttttttttctccttttatttttttgcgggggagggtagggagtgggtgggggggagggggtaaggccaagactggggtagaattttaaagattcaacactggtgtacatatgtccgctgggtgagttgacctgtggcctcgcacagtgattctgggccctttatgcttgctgtctctcagaattgttttcttaccttttaatgtaatgacgagtgtgcttcagtttgtttagcaaaaccactctcttgaatcacgttaacttttgagattaaaaaaaaaaacgccatagcacagctgtctttatgcaagcaagagcacatctactccagcatgatctgtcatctaaagacttgaaaacaaaaaacagttacttatagtcaatgggtaagcagagtctgaatttatactaatcaagacaaacctttgaaaggttacactaagtacagaacttttaaaccttgctttgtatgagttgtactttttgaacataagctgcacttttattttctaatgcagaggatgaataagttaaatacatgctttgaggatagaagcagatgttctgtttggcaccacgttataatctgcttattttacaatatacacgtttccctaagaaatcatggcagagatgtgagggcagaatatacacaacagatgctgaaggagaaggagggtagtgttttgcaaaagaaaaagaaaagaaccaacagaattttaactctattaacttttccaaattttcctatgcttttagttaacatcattattgtatcctaatgccactaggggagagagcttttgactctgttgggttttatttgaatgtgtgcataacagtaatgagatctggaaacacctattttttggggaaaaaggtttgttggtctccttcctgtgttcctacaaaactcccactctcaggtgcaagagttatgtagaaggaaagggagctgaaataggaacagaaaaatcaacccctataactagtgaacaccaagggaaaataccacaatgatttcagaggagactctgcaaaatcgtcccttgtggagaatgcaggcaacatggaatactacgaatgaaatcacatcactgtatcttttacatcaatagcctcaccactaatatatcttgtatctaggtgtctataatggctgaaaccactacatccatctatgccatttacctgaaaacttaactgtggcctttatgaggccagaaaagtgaactgagttttcgtagttaagacctcaaatgaggggagtcagcagtgatcatgggggaaatgtttacattttttttttcttcagaagtaacgctttctgatgattttatctgatatttaaatagggtgcctacctatttcacctgacccatactcgtttctgattcagaatcagtgtgggctcctgcagtgggcgcgggtcacggctgactccaacttccaatacaacagccatcactagcacagtgtttttttgtttaaccaacgtagttgtattagtagttctataaagagaactgcttttaacattagggactgggagcagtccatgggataaaaaggaaagtgttttctcacgagaaaacatgtcaggaaaaataaagaacactttctacctctgtttcagatttttgaaacacttattttaaaccaaattttaatttctgtgtccaaaataagttttaaggacatctgttcttccatacgaaataggttaggctgcctatttctcactgagctcatggaatggttctgcttatgatactctgcacgctgccttttagtgagtgaggagtttggggttgcctagcaacttgctaacttgtaaaaagtcatctttccctcacagaaagaaacgaaagaaagcaaagcaaagtcagtgaaagacaatctttatagtttcaggagtaaatctaaatgtggcttttgtcaagcacttagatggatataaatgcagcaacttgttttaaaaaaatgcacaatttacttcccaaaaaagttgttacttgccttttcaagttgttgacaaacacacatttgatattctcttatatgttatagtaatgtaacgtataaactcaagcctttttattctttgtgattaaatcctgttttaaaatgtcacaaaacaggaaccagcattctaattagatttactatatcaagatatggttcaaataggactactagagttcattgaacactaaaactatgaaacaattactttttatattaaaaagaccatggatttaacttatgaaaatccaaatgcaggatagtaatttttgtttacttttttaaccaaactgaatttttgaaagactattgcaggtgtttaaaaagaaagaaaagttgttttatctaatactgtaagtagttgtcatattctggaaaatttaatagttttagagttaagatatctcctctctttggttagggaagaagaaagcccttcaccattgtggaatgatgccctggctttaaggtttagctccacatcatgcttctcttgagaattctatttggtagttacaattacagaaactgattagtttgtcagtttgcagatagatttagcacagtactcatcactcggatagattgagatgttctttcacatcagatgatctgtaacactgtaagatactgatctttacaactgtttaatcagttttatttttgtacagtattagtgacctaagttattttgctgtcccgtttttgtaaatcaaatgaaattataaaagaggattctgacagtaggtattttgtacatatgtatatatgttgtccaaataaaaataataaatgataaaga

SEQ ID NO: 41897 - DNA, 5204 bp, Homo sapiens
attcttactcatttgtgtttattcttggacttatcctgacataatggggtttttttaattatagattcacactgcatttattcatcacccctgtcctctcatccataactcaaatttactaccagcaacacaaaatacaaagatgtgtccagtttcactacagctcttcgcgtttacaagtgtcgagcgcttgctttcggaacgcccttgtgattggccgagccaatgccagtgacatcaaccaacttacttttgattggaaggctggttgctgggactgtagcgtttgcaggaagtcacttaactgtttgggagctggaaaaccgaagctgaagttctcttttgccataggaacgagcgcaactgactaggaaagatgtgtcccaaagctccgcaagctggaacgtgagccaggaggcccggaccggccacgggaccgcgaggcactccgaaagtgtgcggctgccccttccctgcctcccagctgttacccttttaaatgtcagtgttcgaggctgtaggggtagcacgaggcagcgaaacggaacagtcggattggccgcacgcctcagttctagacgcacctctccaccgaaggccgttctgactggcagggggagaaagtaaacagagttgaatcaccctccccactggccaattggagggggtttggtttgtgacgtgatgggattctgcgaaattgttactgagcaagagaatgccggaacggtgcggaccggccggagcaggggttcagaagccgtcagtggactcgggaaaaagtgtctcttagacctggcgctcggcgggaccctcgccacccgcgtcggggtgatcgggtgaatgtcctggggctttggctcgacggcgaggcggccgagggcgtgcacctctcttgcagtttcctctcccagcgcctcgggggcgttttcagtcgaataaacttgcgaccgccacgtgtggcatctttccaagggagccggctcagaggggccggcgcgcccgtcgggggatcgcggccggcgcggggcaggggcggcggctagaggcggcggcgcggcggagcccggggccgtggatgctgcgtgcggaggcgctgccggttacgtaaagatgaggggctgaggtcgcctcggcgctcctgcgagtcggaagcgccccgcgcccccgcccccttggccgccgcgccgtgccgcgccgcgccgcgctcgtcgtccgaggccagggcagggcgagccgaacctccgcagccaccgccaagtttgtccgcgccgcctgggctgccgtcgcccgcaccatgtccgcggccgcctacatggacttcgtggctgcccagtgtctggtttccatttcgaaccgcgctgcggtgccggagcatggggtcgctccggacgccgagcggctgcgactacctgagcgcgaggtgaccaaggagcacggtgacccgggggacacctggaaggattactgcacactggtcaccatcgccaagagcttgttggacctgaacaagtaccgacccatccagaccccctccgtgtgcagcgacagtctggaaagtccagatgaggatatgggatccgacagcgacgtgaccaccgaatctgggtcgagtccttcccacagcccggaggagagacaggatcctggcagcgcgcccagcccgctctccctcctccatcctggagtggctgcgaaggggaaacacgcctccgaaaagaggcacaagtgcccctacagtggctgtgggaaagtctatggaaaatcctcccatctcaaagcccattacagagtgcatacaggtgaacggccctttccctgcacgtggccagactgccttaaaaagttctcccgctcagacgagctgacccgccactaccggacccacactggggaaaagcagttccgctgtccgctgtgtgagaagcgcttcatgaggagtgaccacctcacaaagcacgcccggcggcacaccgagttccaccccagcatgatcaagcgatcgaaaaaggcgctggccaacgctttgtgaggtgctgcccgtggaagccagggagggatggaccccgaaaggacaaaagtactcccaggaaacagacgcgtgaaaactgagccccagaagaggcacacttgacggcacaggaagtcactgctctttggtcaatattctgattttcctctccctgcattgtttttaaaaagcacattgtagcctaagatcaaagtcaacaacactcggtccccttgaagaggcaactctctgaacccgtctctgactgttggagggaaggcaaatgcttttgggttttttggtttttgtttttgtttttttttctccttttatttttttgcgggggagggtagggagtgggtgggggggagggggtaaggccaagactggggtagaattttaaagattcaacactggtgtacatatgtccgctgggtgagttgacctgtggcctcgcacagtgattctgggccctttatgcttgctgtctctcagaattgttttcttaccttttaatgtaatgacgagtgtgcttcagtttgtttagcaaaaccactctcttgaatcacgttaacttttgagattaaaaaaaaaaacgccatagcacagctgtctttatgcaagcaagagcacatctactccagcatgatctgtcatctaaagacttgaaaacaaaaaacagttacttatagtcaatgggtaagcagagtctgaatttatactaatcaagacaaacctttgaaaggttacactaagtacagaacttttaaaccttgctttgtatgagttgtactttttgaacataagctgcacttttatttcctcttgctgagtttgtctcttttaattcctttcttactcttaaccctttttttcttttctcccctccttccttctcttccttattttacaatatacacgtttccctaagaaatcatggcagagatgtgagggcagaatatacacaacagatgctgaaggagaaggagggtagtgttttgcaaaagaaaaagaaaagaaccaacagaattttaactctattaacttttccaaattttcctatgcttttagttaacatcattattgtatcctaatgccactaggggagagagcttttgactctgttgggttttatttgaatgtgtgcataacagtaatgagatctggaaacacctattttttggggaaaaaggtttgttggtctccttcctgtgttcctacaaaactcccactctcaggtgcaagagttatgtagaaggaaagggagctgaaataggaacagaaaaatcaacccctataactagtgaacaccaagggaaaataccacaatgatttcagaggagactctgcaaaatcgtcccttgtggagaatgcaggcaacatggaatactacgaatgaaatcacatcactgtatcttttacatcaatagcctcaccactaatatatcttgtatctaggtgtctataatggctgaaaccactacatccatctatgccatttacctgaaaacttaactgtggcctttatgaggccagaaaagtgaactgagttttcgtagttaagacctcaaatgaggggagtcagcagtgatcatgggggaaatgtttacattttttttttcttcagaagtaacgctttctgatgattttatctgatatttaaaacagggagctatggtgcactctagtttatacttgcgctctgaaatgtgtaaacatagggtgcctacctatttcacctgacccatactcgtttctgattcagaatcagtgtgggctcctgcagtgggcgcgggtcacggctgactccaacttccaatacaacagccatcactagcacagtgtttttttgtttaaccaacgtagttgtattagtagttctataaagagaactgcttttaacattagggactgggagcagtccatgggataaaaaggaaagtgttttctcacgagaaaacatgtcaggaaaaataaagaacactttctacctctgtttcagatttttgaaacacttattttaaaccaaattttaatttctgtgtccaaaataagttttaaggacatctgttcttccatacgaaataggttaggctgcctatttctcactgagctcatggaatggttctgcttatgatactctgcacgctgccttttagtgagtgaggagtttggggttgcctagcaacttgctaacttgtaaaaagtcatctttccctcacagaaagaaacgaaagaaagcaaagcaaagtcagtgaaagacaatctttatagtttcaggagtaaatctaaatgtggcttttgtcaagcacttagatggatataaatgcagcaacttgttttaaaaaaatgcacaatttacttcccaaaaaagttgttacttgccttttcaagttgttgacaaacacacatttgatattctcttatatgttatagtaatgtaacgtataaactcaagcctttttattctttgtgattaaatcctgttttaaaatgtcacaaaacaggaaccagcattctaattagatttactatatcaagatatggttcaaataggactactagagttcattgaacactaaaactatgaaacaattactttttatattaaaaagaccatggatttaacttatgaaaatccaaatgcaggatagtaatttttgtttacttttttaaccaaactgaatttttgaaagactattgcaggtgtttaaaaagaaagaaaagttgttttatctaatactgtaagtagttgtcatattctggaaaatttaatagttttagagttaagatatctcctctctttggttagggaagaagaaagcccttcaccattgtggaatgatgccctggctttaaggtttagctccacatcatgcttctcttgagaattctatttggtagttacaattacagaaactgattagtttgtcagtttgcagatagatttagcacagtactcatcactcggatagattgagatgttctttcacatcagatgatctgtaacactgtaagatactgatctttacaactgtttaatcagttttatttttgtacagtattagtgacctaagttattttgctgtcccgtttttgtaaatcaaatgaaattataaaagaggattctgacagtaggtattttgtacatatgtatatatgttgtccaaataaaaataataaatgataaaga

SEQ ID NO: 41898 - DNA, 430 bp, Homo sapiens
tttatgtttccaacggcctcagagtcccttgagaaaactggtctttcaacttttccttgtaaaccctctttctacagataaagtccttcagaagtctgcaaggtcatattagggaccagtttctccaacttacactttgctcctcctcgctttccccaagacacagttttctgttcttcaccagaaacccttacacaaattaacttatacatcccagagttaggctcaagttattgatgcacttgctcaatgtgtacacatacacagatatacacatatttatcttaaccacttgtatgcatatgtgtttgtgtctatttctttaaacaaggtagggttatgtagtgatgactagaatatgagaaaaatatgtgtaatgaaaaaacattctaatatgtaatgctgtcaaaagcttacagataattccatc

SEQ ID NO: 41899 - DNA, 428 bp, Homo sapiens
atctcgctcgctctgtcacccaggctggagtgcagtggtgtgatcatggcttactgcagcctcaaactccttggctcaaataacccttccacctcagcctcctgagtaggtggaactatagacacacaccaccatgcctgctaattattttttattgtagagatgggggtcttgctatgttgcccaggctgacctcaaactcctggcctcaagcaattctcccacctcatcctcccaaagtgctgagattacaagtgtaagccactgcattcggcctccagctttcttttgattagtgtttgtgtggtctttcaatctatctccttatgtttcagtgttttagatatgccaccatatgcagcatagagctggattctaaaaaatccaatctaacaatatgtattttaaatagcacacatagactttta

SEQ ID NO: 41900 - DNA, 366 bp, Homo sapiens
ataaaggcaattcaaagattaacaattatttttgtatatactacataataaagccaaagaaatacactaacaaattttaaaaacatttaaaaccaatggttgattcaatgcctttgtagttttcctcttggttttactgatcacttttggtaactttcctctttttctattcaaggttctgggtggggtaatttttaggggcttgaaatatataatcttgatattggaaacatttccaattctcctcttccctgccacataacatgctgtcttagtgaacacttctaaacaaatttgaacccacgaagacccaagggcatcattatggacctcagttgttatgaattctggatagagcagatgagg

SEQ ID NO: 41901 - DNA, 410 bp, Homo sapiens
tctacaagccagaaggcctaacagtaagagttagaatcctagtcagactgcctaggttcaaatcccggttccagcagttcactgtgggaccttggacaagttattgacctgagattgttacctcatgttactcaggaagtaaatggaaatgctaatagcacccactggagggccatggtgaggattatttgagacaatgcaagcaaagcagttagcacagtgccccgcacacaataggagctggtacttgttagcaactgctgatcttgtggccccaacattgctccttcatcccctgttctctagatccaggactcaaaccatgtgttctggaactaattcctggaaataatagaccagaaatatgtatagtgagtgactatgaaaacaagactagctgggtgtggtgg

SEQ ID NO: 41902 - DNA, 1252 bp, Homo sapiens
gaactctggaaactgcatattttctcacacaataattgaatcatactttgaaactattgtaaattgactagagtactcggtctaggccaccccttgcccttgaagagctcagaatagcagagtgtgggagaataactttgattgtatgtttgtggtgcctgaggaaactatctcaaagtactcacggatcatacccttacacaggccccactgtgagctacagcaagacaagccccccaaagcatgagcacaaacaggggtgctcaccctgctctgtccttcaccaaactgcatcactttggaatgcagcagctggagctataactaatatctgaagctaccacaattgccttaaattgtattcttagcaatgagttaagcttactgccttcacttagcaaatatttgtcagtgcgcgatgtgtaccaggcaccatgatagacaggtagacactgtgtagacaaggtaaaatagcccatttgtattcctgacattatctgtttgtcgataaaatttgtcactaattggctttgcttttttgtttcccaccaaaaactgaacttgtagaattgagttatttatgttgcaggcagtatcactttaatagtactcacacttatttaagcttggaaaataatattttaccaattctttgatactttgtggtcccttaaatttaaccatctctgggacctatgttggagtgcagtggctcaatcatagctcactgcagcctactgggtagctgggactataggcacgcattaccacactctgctaattttttcactttttgaagagacacggtctccctatattgcccagcctggtctccaactcccggactcaagcgatcctcccgcctcagcctctcaaagtgctgggattacaggggtgatctaccacccagccccaccttcttgaggagttaggtttcaccttggagatcagtgcttcttatctataaaatttccctggagagctatgatgaggtttggaaacctggacttaaaacaatttttttcccccagatattcttaggatagctcgattcactgtcataacaatgtttggagactatacatatatataggtacgtatacattctcttctcaaaagaagcttcatgacttccatcaatttctgggtaacctctgacctctctaatatgagaaaactacatcagtaaatgagtggccttcaaatacatttacaaataattcacaggcaaaactgttttacatcacatagc

SEQ ID NO: 41903 - DNA, 424 bp, Homo sapiens
ggccaggagggcagaggcacactccatcttcgtgctcctcacaggccctgcctccctgcctgctaaggacacagggaagggggtccccacctcagtgcctgcctcccttccctgtgcctgtgtacctggcagtcacagccacctggcgtgtcccagaaaccaaccggctgacctcatctcctgcccggccccacctccattggctttggcttttggcgtttgtgctgcccgaccctttctcctgtccggatgcgcagggcagggcctgagccgtcgagctgcacccacagcaggctgcctttggtgactcaccgggtgaacgggggcattgcgaggcatcccctccctgggtttggctcctgcccacggggctgacagtagaaatcacaggctgtgagacagctggagcccagctctgcttgaa

SEQ ID NO: 41904 - DNA, 554 bp, Homo sapiens
cccccagccccccacgtctcgttctggaccaggaaccccctccccaacaaccgcgcagcaagtggcgactctgggagctgaactggagtggagctcgaagtggctggggcgggcaaagactcccgcttcactctgggacacaactgggacggcgcttcaacctctgcctgcaggcgtgcttctcgcgcgcaccagcaagctctctatccacctcgcctgggcctttgcagcgccctgccgcccaggctccagcgcctctactaccctagccccttctcaacacgcggctctgccttcttccccagtaccactgcactgccgaaaataagcccggagactaaggcaccttgtagggaagagaaggacatctgtatctccaagcttatccaagcaaaggcctccagagtccctcccatggcccgaaacacctccctctgaccgaagagcgtcctttctttccgccgcctcctggactcatcctaaatagggcagacccgggctaaaccagtgatttttttccatgaatacgaagaaccccgattgcactttgcgaa

SEQ ID NO: 41905 - DNA, 1531 bp, Homo sapiens
cccaagttccacattagatcacgcagtgtagggtgtagtggatgctgagactctgcccagatatccctcccaggactaagatgctcatttcccccagtggctgggtgtgtcggttgctgatggctccagccatcttctctaaggattatccttgtatataccttctgtatcatgccccccaggttgagattcaaaaaacaaacatccacagttttttcataacattctgctgtgtcccttcccagttaagtcactaaaagatgactgtcgactgccgtaaattagttttacctatgttcttaaaattttaacaattgaattactcagtatgtactcttttgtcttctttctctcaataaagtgcctatgagattcatctaccttgttccatgtgtcagtagttcataatttttattgttgtctagtatccccttgtatcaatgcactacaatttatttatccattctcctattgagggacatttgtgttgtttccagttgttggatatatgcattgtcaatctcttcaatcagtctgtggcttgtcttttcactttcctggtgatgtcttttaatagtcttattttaattaagttaaacatttttttcttttatgattatcttttgttttgtctcttcaagaactcttttcctacacctgaggctttaaaagatactgatggccaggactcactcagaccaattaaatcaggattatgggcatttttaaaaaaagcttctcaggtgatcctaaagtataactagatttgagaaccagaagactcagactgtgagcttcttgagggtagaaattgtgactgcttgtttatacagctcaggactcaatgctggacaccgtggtgcttcataatcaccgggtgatttttgatgaatttaattcatctctccaagatcatctcaaattccatgttttctaagaatccttcacattattaccaataggtcttattctcagaatattttgccctataagtgtttcttaattgctgttattagtccattttcacactactatacagaactacctgagactgggtaacttataaagaaaagaggtctaattgactcacagttccacctggctggggaggcctcaggaaacttacaatcatggcggaagtcaaaggggaagcaatacatgccttacatggcacaggagagagagtgcaaagtgggaggtgccacacacttttaaaccatcagatctcgtgagaactcactcatgagccatcactagggcgatggtactaaacaattagaaaccacccccatgatctaatcacttcccaccaggccccaccttcaacacgtgggaattacagtttgagatgagatttgggtggggagacagagccaaaccatatcaattgctttaagtatttacaccttctctccccaatcaatttgcaaaactgttaggataaagaatgtttacgggaagcccttattgtctctttctcctgtttctatgaggagatttggctccaatctctggaaggaatattatcttt

SEQ ID NO: 41906 - DNA, 1476 bp, Homo sapiens
cccaagttccacattagatcacgcagtgtagggtgtagtggatgctgagactctgcccagatatccctcccaggactaagatgctcatttcccccagtggctgggtgtgtcggttgctgatggctccagccatcttctctaaggattatccttgtatatactcataacattctgctgtgtcccttcccagttaagtcactaaaagatgactgtcgactgccgtaaattagttttacctatgttcttaaaattttaacaattgaattactcagtatgtactcttttgtcttctttctctcaataaagtgcctatgagattcatctaccttgttccatgtgtcagtagttcataatttttattgttgtctagtatccccttgtatcaatgcactacaatttatttatccattctcctattgagggacatttgtgttgtttccagttgttggatatatgcattgtcaatctcttcaatcagtctgtggcttgtcttttcactttcctggtgatgtcttttaatagtcttattttaattaagttaaacatttttttcttttatgattatcttttgttttgtctcttcaagaactcttttcctacacctgaggctttaaaagatactgatggccaggactcactcagaccaattaaatcaggattatgggcatttttaaaaaaagcttctcaggtgatcctaaagtataactagatttgagaaccagaagactcagactgtgagcttcttgagggtagaaattgtgactgcttgtttatacagctcaggactcaatgctggacaccgtggtgcttcataatcaccgggtgatttttgatgaatttaattcatctctccaagatcatctcaaattccatgttttctaagaatccttcacattattaccaataggtcttattctcagaatattttgccctataagtgtttcttaattgctgttattagtccattttcacactactatacagaactacctgagactgggtaacttataaagaaaagaggtctaattgactcacagttccacctggctggggaggcctcaggaaacttacaatcatggcggaagtcaaaggggaagcaatacatgccttacatggcacaggagagagagtgcaaagtgggaggtgccacacacttttaaaccatcagatctcgtgagaactcactcatgagccatcactagggcgatggtactaaacaattagaaaccacccccatgatctaatcacttcccaccaggccccaccttcaacacgtgggaattacagtttgagatgagatttgggtggggagacagagccaaaccatatcaattgctttaagtatttacaccttctctccccaatcaatttgcaaaactgttaggataaagaatgtttacgggaagcccttattgtctctttctcctgtttctatgaggagatttggctccaatctctggaaggaatattatcttt

SEQ ID NO: 41907 - DNA, 372 bp, Homo sapiens
ttttcgacatggagtcttgctctgtcgcccaggctggagtgcagcggtgtgatctcagcttaccacaacctccacctcccgggttcaagtgattctcccacgtcaacctcccgagtagctgggattaccaggcacccgccaccacacctggctacttttttggtatttttttttagtagagaaagggtttcaccatgttggtcaggctggtcttgaactcctgacctcaggcgatccgctgcctcagcctcccagagtgctgggatgacaggcttgagcccccgcgcccggcccctactttctgtctcagggtctgtgccttacttcagactcataccatgtctcttctggactcttgccttgtagtcgacg

SEQ ID NO: 41908 - DNA, 351 bp, Homo sapiens
tcgcccgcccctgtcttttcggggtcgagtccgagggggaagaggtttgttaatacgttcgccatgtgctacgatcttgggacgaactgagccacgagcgtggctttgagggccgtccgaacgctgcaggccggccaggtccctgggcgtccaggcctggcctacgcaccactttgtcccttagcgtttaaaggtttcttcccgaatctcaggccctcagctacctgcaggtttcgtcgcgagccggctgcaagttttgaacctaagtaaacctcaatccggagggcctagcggtaaggtgggcgctgtgtctattgaggtgcttagcaataaagaaaggtagtgagttga

SEQ ID NO: 41909 - DNA, 995 bp, Homo sapiens
  misc_feature (403)..(403): n is a, c, g, or t
tcgcccgcccctgtcttttcggggtcgagtccgagggggaagaggtttgttaatacgttcgccatgtgctacgatcttgggacgaactgagccacgagcgtggctttgagggccgtccgaacgctgcaggccggccaggtccctgggcgtccaggcctggcctacgcaccactttgtcccttagcgtttaaaggtttcttcccgaatctcaggccctcagctacctgcaggtttcgtcgcgagccggctgcaagttttgaacctaagtaaacctcaatccggagggcctagcggtaaggtgggcgctgtgtctattgaggtgcttagcaataaagaaaggtagtgagttgaaaaaaaaaaaacaaaaaaaaaaaaaaaaaaaaacacaaaaaaaaaaaacaanacacacaaccaccaccccacaacaaacaacacaaaaaaacaaccacagacacacacgacgggggaccaaaacaacaagaacgaagagggcagaacgagcacaggaaaaagaacagaaaacctacaagcgaggagcacaaacggggggacagaaaagaggagagacgaaacaacagcaagagaagaagaagcgaaacacaggaaagaagaagaaagccacacaacccacagagaggagggaagggaaccgagccgaagagacagatgcccaccgatagcgaaacagagccgatagcgagggagaaaacagcaaccgccgagcagggcagctggagcggaacatgaccgacaacacagcacccagagacagtcgacaacaaagcacactacgagtggaccaacgcaaccacggacaaagagcgacgcggaacgcgcgccaacgcccggcagcgccccgagacagagcgcggcgcgacaaccagcggcgaaaaagaggcacgagccgtcggacgtgggaacgaccaggcacggaggcgaacagcgaacgtcgtggtgccacacgcacaagcgagggcagaagacacgaggcgcag

SEQ ID NO: 41910 - DNA, 571 bp, Homo sapiens
tcgcccgcccctgtcttttcggggtcgagtccgagggggaagaggtttgttaatacgttcgccatgtgctacgatcttgggacgaactgagccacgagcgtggctttgagggccgtccgaacgctgcaggccggccaggtccctgggcgtccaggcctggcctacgcaccactttgtcccttagcgtttaaaggtttcttcccgaatctcaggccctcagctacctgcaggtaagactgggccgggcttgggttcccttattctcccagtctgtgatgaattgctttgacttctgacacctcgtatgaaaactgcacgtgcagtctgattatttagcaagactgaggcttgagggtgcgcactcctgacggggagctgagagtggaaacaggtgttgcccgaaacgaaggagtggggacttaatgtctgtattttggcgctgactttcaggtttcgtcgcgagccggctgcaagttttgaacctaagtaaacctcaatccggagggcctagcggtaaggtgggcgctgtgtctattgaggtgcttagcaataaagaaaggtagtgagttga

SEQ ID NO: 41911 - DNA, 214 bp, Homo sapiens
ctactaaatgcaggccgcgtcgaccgaatctcaggccctcagctacctgcaggtttcgtcgcgagccggctgcaagttttgaacctaagtaaacctcaatccggagggcctagcggtaaggtgggcgctgtgtctattgaggtgcttagcaataaagaaaggtagtgagttgaaataaagacagtaaagtcgaccggccgcgaatttagtagta

SEQ ID NO: 41912 - DNA, 173 bp, Homo sapiens
ctactaaatgcaggccgcgtcgaccgaatctcaggccctcagctacctgcaggtttcgtcgcgagccggctgcaagttttgaacctaagtaaacctcaatccggagggcctagcggtaaggtgggcgctgtgtctattgaggtgcttagcaataaagaaaggtagtgagttga

SEQ ID NO: 41913 - DNA, 446 bp, Homo sapiens
gggactggccatcctgctcctctcccctctgcaaagtggacagagctcctccccttcctgctgtgtgttgcccgttttgaaatcttactcccatccccaaagtatgcttttggataccaggtgaaggggaaggatggtgatggtggggaacagctgttttaatttgcctcaggcctatgaatctccctacctgaaccccagcttgccatagagtctaactggtccgtggtcagaaggtgggctccatagctgtctgggggttggggctccctcccccatttctgagcattcccagggtttgggagtctgcttatgattctctgccagaggcacggccaccagccctgagtgtgggaaacaatggggacagatgggttggttcaaggcctttgggcagctggtggtgggtcttggagagctgggaaccccttcctagggaggctgga

SEQ ID NO: 41914 - DNA, 379 bp, Homo sapiens
aagatttagtgaaatccaggggaaaagcctaattcacacaaacatatttcaaataaacccccccaataatcactggcacatatgccttgactcttattgttggtgtttcttggaaatctgtgtgtgtgtgtgttttttttttctgcagaagtaaaaagcatctttaggtttaggtctgtttttgttttgggtttgtggagggctggtgaaggaccttttttttagacaataatagaaatatattcatgtggcctggtgcagtggctcacgcccgtaatcctaatactttgggaggccgaggtgggcggatcgtttgaagtcagaagttcgagaccagcctggccaacatggtgaaaccccgtctctactaaaaatacaa

SEQ ID NO: 41915 - DNA, 383 bp, Homo sapiens
gttttttatatgaaatctgcatggccccttctttgtgtggggggttggagatggggagggcattgacagaagggttggagatcaagctttagagggacttggaacagatgggcacatcacctctctggggcccctgaatttgagagctctgctcccagccttttcccaccaggggagctcatgactggctgtcttctactgtgtgctccagtttatctccaagggtcaagcaaccccaccttgagagctccctacctaggctcatgtgaaaagcaaaggactatgtgatgaggatgaatggatacagcgtttgacctgctagggtgaggcaagtgaattgagaagttcctgactttcctcattgccaactagtcatgttcctc

SEQ ID NO: 41916 - DNA, 389 bp, Homo sapiens
gaatagtgaaatttcacctgatttaaggaaagcctaaatggttaaatgttaaacaatgtgtttttaccatgtataacatcacctaattatttgaatccaaccctttgttttaatacatgagtgagttgacccatatatttagttttagtatactcatcaccccataaatttctgttgatgatataagcattacgtgtgatataggctgtggactggtatttacatatgcttcaaaatttcaatactcatgctaggaaattgcttggtctatgcttttttgccttggtgtgactttttgccttaagtattattattatctttattatggcataaagcagtattttatacactaactccttttatttatttatttttgagaccctgtctca

SEQ ID NO: 41917 - DNA, 501 bp, Homo sapiens
gaagttccacaggtgattttgatgtgtgagccgtggttgaaagccacagctggactgcgttggaagggaaatggaggtcagcttaggccagttggttcacatggaaatcaacaaaaccagcgtggctttgaaggatgtataattctgttactctttgttggacccacacaactcagcagttgaaatttattattagtttttttttctcctgcgttttcatctcctaatttgggctccccttcatatagagcttttggaagcaagtaagaattcaagttcatcaggcacattttcactacacctggcagaacatattaaggtgttgtgttttataaaatccagccagaaactataggtggtctccagctccacacacttagcaaggcccctgctcaactccccacccaaccccagttttccagtccttcctgcgttcaccagaggcacagtcaggatcaccttagacgctgagttcagaaatggagaaggaatacagttaaa

SEQ ID NO: 41918 - DNA, 704 bp, Homo sapiens
taaatttatgtggctatttgactatttgtcttagaccagccttttgctcattccagtaaccacacataccacatagttcactgatgcaaatcctctgcgatgaacaggagatggggacagaaaaaataaatggcgatattttaagggtttagagcactctgaatgttcattcagacaatgcttgccccaaattctaatctccctctgattttgttccattttgtaatgaagactttgggaagtggtgagaggtcctgggcagtgggggaaacagggtacagccctgtggaccactgaatggactgtcttgagttgacagcattacttttgggtcagcatgacagagttctgctggctttcaccaccagcagctctgtgatcttgggtaagtcaccacaccttttgcagccttaatttgcttatctgtatttcaaagagtcctgctggatgagtatttctccaagtcctgccaatcaccatcacctagagcttgttaaaaaatgtggcctctggcctaaaagcaatggcaacaaaagccaaaatagacaaacgggatctaactaaactaaagagcttctgcacagcaaaagaaactaccatcagagtgaataggcaacctacagaatgggagaaaatttttgcaatctacccatctgacaaagggctaatatccgaatctacaaagaacttaaataaatttacaa

SEQ ID NO: 41919 - DNA, 426 bp, Homo sapiens
ggagacattttagcatatatgaattttctaaaaatatagttttatttgtaaaaattgctttgctttacatcataaaagtttgtcattacatatctattaattgctacaactggataatattttgtgataattagagatatagcagttatagaggggtgctattagcaaatggattcaagattaaataaaagagatatgtgtatggatatagaactgattcagaagcaagaaccatccacttaaatattcatgctgtttcattcctgttatgttggaactgcagaaactataggcctatggaaacgggcctaaccttagtagattttccatgtcctaattttcttaaagttgagaactcttcagccagatagaactgccttttgcattcagtccttgatataaaaagaagttcttagtagaaatgtc

SEQ ID NO: 41920 - DNA, 512 bp, Homo sapiens
tctcttcttcggcctcttgaacctggtgccgtccccattggagtcagtaggggtttggcacaatactgtgctctcccgtgcctcagcctcctcatcaggctatgggccactttgagacagaactagccttcgaagggagcagtgcaggcagcaccccacgtgggctgtgaggcagctgggcttcacagagttcctggtagcattcgaggctcttcctgtcagccctgcagcctggagctgagacagtatccttttcagttggggtcccactatgagcatctgtttgtcattggtggtggccgtgcactgtaattctcttctgcgaagtgatagttgttgtgacttgctatttctgtgccctgtgtggccagtggagccccacatgttccctgaagagccctggccctttcatacaactggacttggatcctcccacgcacacagtaggttgtccagttccttcatactcctccagcctgggtgacagagtgagatccgtctcaaaaaaaaaa

SEQ ID NO: 41921 - DNA, 354 bp, Homo sapiens
gacatactaccctgtacagttattatacatgacatacatagcatacacattacacactctccataaaatatttctactggaaagaaaagtaaactgtaaaataatgcctatgtctaaggttacttagacataacaagagttcatgacaagagatctttgtaaactttattgacttttcaaaaatgttttctttgttattaaattaggattacaaatttgttaaatatctttggctaattttcaagattaaaaatttttaaatatacacttgaacaaacatgtcctggagaagcaaattaaggtacaaaataaagggcagtttatagataatgcatctcatttcaatagaacttt

SEQ ID NO: 41922 - DNA, 377 bp, Homo sapiens
atggggagagcaacaggaggttcacaaaacagagcagatcagggatggctgctctggtcttccgggatgtgcagggccaccaaccctttctggccccttcccccgcatgtcctcctgatgctcctccctgcctctgccccgagctctgggccctctctgtcctcctctcctgccagttcacccctgatgatattcctatttaaaaataaatcactgcagtctttaattgcagactaaataattgcttcattttatttaaatgtggctcttggaggctctggaaacaattagaagaaaacatagggcagtgctgggtgcatgttttcaagcatataatttttttttgttattatcataccgacgttcgtaggatctgg

SEQ ID NO: 41923 - DNA, 278 bp, Homo sapiens
aattcagattgaactgggtgtcttatatttttatttgataaatctggcaaccctacatcaagacaaaatagcctgcgcccaggcagcaatttatctgatttttctttaaataactgcccaaagcactccaagagagctagcttcacatctagttgcttatacagtatatacagaacataagtatttcaaccttgcaaaacttagcacattttatgcatcatatcttactactattgtattagtaatatctgtttaatatacctaagtctgtttagccc

SEQ ID NO: 41924 - DNA, 448 bp, Homo sapiens
tagtagtcaaaaatagaaacaacctatatgtctgtcaatgatgattgtgtaaataaagtgtgatatatttatacaatggaattttattcagtgatgaaaatgaatgaagtactgatacaacctggaagacccttgaacacattgttaagtgaaagaagtaagtcagaaaagactatttattgtattgattttgcttatatgaaatgtccagaataggcaaatccatagaaaatagattcgtctttccaaaggttggtggatggttgggaagaaataaggggtaattgttaaaagggtactgtgtttctttttggggtaatgaaaaggttctaaagttgattgtggttatgtttggacaactgtgaatatactgaaaaccagggaattgtatgtactttaaaccagtcagttgtatggtatgtcgattatatcttaattaggctgttag

SEQ ID NO: 41925 - DNA, 304 bp, Homo sapiens
gagaccgaggcaggagactcgcttgaactctggaggcagaggttgcagtgagcagagattccaccactgcactccagcctgggcagaaaagggagaccctatctcaaaaaaagtaataataataaagaaagaaagaaagaaaggaaataaataaataaaagaaaagcagggtcccctgcttagcaggggtttatggttttgatgggggaaacaaggaaagcaacaagcaatagaggggatcccagggaatcatgggtacacagaggtgggacattctacttagactgcagaggaaggcaaccag

SEQ ID NO: 41926 - DNA, 244 bp, Homo sapiens
ctaatggggtcataccctatactcagaggccaagaagaatctaactaacaggccttgctaagttccccccaggctattaccattaggttatatccccttctttttcctccacaactatctacttcattcatcagacttagcagaaacatagaattttccctgggactttgagtcttcatttctgaagactcatgtgtcatgtaaaattttggttaaatacatttattatgcttttctctcgtta

SEQ ID NO: 41927 - DNA, 865 bp, Homo sapiens
ttggagcgttcgtgtcctgcgccgcgttggtgtgtttcgtccccactgtgcctgtaggagggcaccgggtccccgtctatcctacttcatggctgaggaagctaaggcacagagtggccccgtcctgcgcccagggctctgcgttggcacagggcagagctgggctgtgaatcagggccgccttgtctcttgctgtggtgtgaggctgtgggagactcaggaatgaggcacagccaggtgcccagtgcccgtgggacccgcctccccacagtggggtggcgccgctcacacctggtaatttcacgctgggggaggccttggttcctatagcccatctcgaatcacctggatcccagggctatctctggggaacatctcctctccatcacgactactgtctttttcaccagcattttctatcctaaaatcagactcctcagctgagggccctccaggaccgcccttccccagctggaggtaaccagatttctcgtgtatgctaggaagttccccttctggtcacacctcaatatttcctgctgctggtgggaactgcaggtgcttgtacttgtcaccttctccccgtcctctctcgtcagttcccttggatgctggacacgggagccacctgggcgaggggagcccatccaagtggctgtgcgtcgggaagagtctgcccaggactgggctagaccagaacttagaattaaggagtggtggccaggcttggtggctcacacctgcaatcccagcactttgggaggccgaggcgggtggatagcttgagcctaggagtttgagaacagccaacatggcgaaactctgtctcttaaaaaataaataaaaacattagccaggtgtggtg

SEQ ID NO: 41928 - DNA, 168 bp, Homo sapiens
aaccaattcccactgcctcccttgtgaccagttgggtcatgcccccacccttctgtgccctagtcctggtccttggaacacctgagtcatgtcacttctctgcgtcaaccctctagtggctctccccattcactcagagtgaaaagcagagtccttgaaatggccagc

SEQ ID NO: 41929 - DNA, 683 bp, Homo sapiens
ggatcgactgatcacagagtcttggttttaatctaggtgtaccacttactggctgttaacagtgtgtcttagttaattcctgagtttgtatcttatttttcagcataatttttaggaaaagcactttgtaaactatgaagtgctatagaatattggttatgatgagggcctcggacttactggtataatccagaccttctcatgggtttattttccttgtttagttgctgtgtttttgatttcttcttttttcacagtatgacttaccctccatcccatgccctcctccagagttctctactccctctcagatggcagctcttcaaatctttgtttatgtactgatgggacaaggctcaagcacccacttcttctctttcagctgttacatttgaacagctttctagatcatatttctctaggacttctatgtttaatagtgggcatttcaaggtttagttttgaatcaggttgacagggcagtggttttgttcttaataacaaaatcactttaggataattagaaccgtatagcaatttaaccttcaaatcacactacttttggctggtcgcagtggctcatgcctgttatcttagcactttgggaagctgaggtgggaggatcactcaagcccaggagtttgagaccagcttggtcaacacagcaagaccctgtttcttta

SEQ ID NO: 41930 - DNA, 459 bp, Homo sapiens
gtgaatgaatgaataagtgaatgattgcagagttctatacagaatcaaggacaaattcccacagcatgccatgaaatgttcatttttaggctgatttaaacctgatcatctcagaactttggttgcagttaagtcattggttcattcactttgtcatttatccacctatttattctatacaggagtcatttctttatttgtttctttgtaaaatttattgagtacttaaaatgctgcaaagtcactgaggtaaaggctatggggaaagacaaaggccacgatggaggtatagaaaaaatgctttcaggattcagagaagcaaaatcatttccatagctcagagaggatgatggtggtgggagttaacatggatgagtgaagggggtagtagtgggcaaacgttttccttctttaattttaattggatcaattaaataaataaatttgatttgggccttg

SEQ ID NO: 41931 - DNA, 446 bp, Homo sapiens
ataaaaccaagtaaatgtaactgtagctggctagacttcttgtagcagagaacaggactaggctcaccatgtgaaactgggtgaagatagaaagtgtcaggaaaaattacaaaagacttcgaaatggataaaaaagattagtgggtgtcctgtctagctttaccatcctggttatctccagaggctttgcaactctcaaagacagtaaattctgaaaaaccggtaatagtgccaatgattcttgctcacaaaagtgcaattgacttgtgtctggtgaaatgtaatggattatggtattggagatagaccagttttttaaatctgtttgtaaattcatttcaacatttctttatgcatataaacatgtgcttctttgaaacaactgtaacatcttaccggttccctcattagttaatgaattaaataaaatatttgacaagcatgga

SEQ ID NO: 41932 - DNA, 751 bp, Homo sapiens
gtggggctgagacttcgcgtcttaacaagctgctctcagttgatgctgatcctcatggtccaatgtatgacaatgctgttgaatgtgcctcttcatttcagcacactgccttcaggcagggaatgggccactcctggcaccctgcacattttagcatttgtttcctgtctctccccactagaatgcaagctgcagaggaattgtatccgtagcacctggcttcgcagaccaagagcaagtcggcacaccaggacaggcactcgcatgggtgcccagaagtttcaagatctgaccttggagagaccaggtccgggaggctgccgggaagtctccatcacaccggcctcagccgagtcacaggaacgcaggctctgccatgcccagaagcctgagatgcaacttcaaggacaacgggagccagaacgcttgacctcacacggaaggtgactcctaaccaccaccacacttgacgtagcaccagcacacggagattaggcctacaccaatggctaattgagaccatgcatcactattaaggcatcttcagcaaaaggaactatggaagttctgcatgaaacatagacacctgttagaaaaggaactaaatttcaaaccgggaatgtggtgttgaatcacagcaaagtgtccagaaggaactcccaaagtactgttttccaaaatatagaatgatatagaagattgttttaggtggaattcctggaaataaatttttaaatgttaaaatttgact

SEQ ID NO: 41933 - DNA, 389 bp, Homo sapiens
ggctggagtgcagtgatgtgatatcccctcactgtaacgtctgcctctcaggttcaagtgagtctcctgcctcagtctcccgagtagctgtgactacaggcgtacaccatcacacccagctaatttttgtatatttagtagagatggggtttcgccatcttggccaggctggtcttgaactcctgacctcaagtgaaccacctaccttggcttcccaaagtgctgggattacaggtgtgagccactgtgcctggcctcaagccagggcttttgggcttcaaagccatattaatcatcatcatacggggtccccataactctcccatcacatccaaagaatttcagctattctcacctagtttagaaactaacccactctccgggttaaa

SEQ ID NO: 41934 - DNA, 435 bp, Homo sapiens
tgatccgcccacctcggcctcccaaagtgctgggattacaggcgtaagctaccatgcccagccaagtattctattcttaatgaacacatatatgcataatatatctattttttataatatatatatttagaattgaatgtcagagtacatatcagtgttggaggaagggaataaggaggaagcacagaaagtaaaaaggaaaaataggcaccaaaaaagatttggagaatggcagatggccaaggagatgcagctgggaagtgcctcttccatggagaggaacataatatctagtaaaccttcacattttaaacagatcttttgagagaaaacactgaaagttgacacagaggtgacacagacaccatggttgaagagggaagaaatggggcagtctgctcagagtcactagacaccaggactggcccatatacc

SEQ ID NO: 41935 - DNA, 431 bp, Homo sapiens
ctcgatgcaaaaggcaatattaaaagagaatgaaaagaacacaatggatactagaaaacaaaaagtaatgtgtattcaacttatcaataataaatgttaatgaatttaatcaggcagagactatcagattggattaaaaatacattccaactctatgttatctatgctcccatagataacacactttaggctcaaagacacagatagattaaaaggatacaaaaagaaatagtgcaaacaattgccataagaaagctggactggctatactagtgtcagacaaagtagactttaagacaaaaatgctcctagagatagagacattttataatgataaaaaggttaacccatcaaaaagatataacagttgtaaacatatgtatgaacttaacagtatcaaaacacagaaagcaaaaactgacagaaatgga

SEQ ID NO: 41936 - DNA, 497 bp, Homo sapiens
tctgcccgcctcggcctcccaaagtgctgggattacaggtgtgagccatcgtgcccggcctgggattatatttttaaatggaaactacaccctgtatgagtgacttttaagccagagactgaggtgcattagttggttataattaatatagttgcctgcaatcagcatttgaagaaaatgaagtagaattaaaaatcagtaggctgggcctaatgggttatgcttctaatcccagcactttgggaggcctaggcaggaggattgcttgacgtcaggagtttaacatcatcttgagcaacatagtaagatgctatcaaaaaaataaaataaaatagatatgcatggtggcatgtgcctgtagtcctagctactcaagcagctgaatgagatgtgctgtgggaggatcgcttcagcctgggaggtagatgctgcagtgggttacgatagtaccactgcactccagcctgggtaacagaatgagacgctgtcctaaaaca

SEQ ID NO: 41937 - DNA, 320 bp, Homo sapiens
atcaagcatttatccagactttcctatatacaatataccttaaggtaggcagatagttgatacagggaaattataagtaatccaactaacccataaagaaggaaaaatagaattataaaagtaacattttataaccccttaacctctaatgaaatgctgtaattatctaggcaataattataattactaatttaaaaaaattaaaaagaggtaaacagacttgtgatggaaatttacatcacccataaagtatttttgacaaaacaatttgatctagcctttttgttgctagtcaccaaatatgtcccacctctcctcag

SEQ ID NO: 41938 - DNA, 228 bp, Homo sapiens
gctaagtcaatggattctccctgaaagagggacacagctctgctgataccttgattttagcagggtaagacctatttcatacttcttaactacagtggtgtaagtttttttaggctgccccatttgtggcaatttgttataacagccatagaaaatgaatataaggagcatttgctccttatagtacagtgagtataaatcagcctgacttacaacctgttgatctgg

SEQ ID NO: 41939 - DNA, 330 bp, Homo sapiens
tagagtatcagcagagcaggcgacactgtgcttgggtaggcttttaccatgctgttcttcacactggaaattggtcagagtgttgctgtttattagctatacctaggaatttaatgatgtatcctttttctagtgatttaaatggacataattgcaggaaaggttggtaattcagcaagaagattacttagaaaacttttagaattggtttcatgatgctagggacatttctgatttctgtccatggtggcataggacatccatatgaagttgtagctatcacaacatgcatcttttaatctggagactgagaaaatattctgcctggtg

SEQ ID NO: 41940 - DNA, 480 bp, Homo sapiens
ctctattaaaaatacaaaaattagctgggtgtggtggtatgtgcctgtaatcccagcaactcgggaggctgaggcaggagaatcgcttgaacccaagaggcagagattgcagtgagccgagatcacgccattgcactccagcctggcgacagaacaagacttcatttcaaaaaaaaaaaaggaagaaacaagggctcagacacgtgacaaagtgacagagggagggttatggggtgggggaggcttatcttggggtaacttgtaagctgaggtctgaaggatgaatagaaacgtcctctatcggctggtcatgggattgcacacctgtaacccgggagctccgggaggcccaggcaggaggactgcttgagtccaggagttcaagaccagcctgggcaatatagcaagatcccatctctactaaattaaaaaaaaaattttttttaaagaaacctcttctatcccgtcacttctgtaatc

SEQ ID NO: 41941 - DNA, 413 bp, Homo sapiens
aaacaaagctggctttgccccagcctcagtggttctgattaattcagtaggtctggggtggagcctgagaatttgcatttctactaagttcccaagtgacactaattctgtctgtggaccatactttaaaaaccagctgggtgtggtggctcaccctgtaatgccaacacttggggaggctgacatgggaggattgcttgaggccagaatttcaagaccagcctgggcagcatagcaagaccccatctctaaaaaaaaaaaaaatagccaggcacggtatacctgtagacctaactactcaggaggctgaaaatttagagcccctttcaagaccctaggaggagggctagcaattagatcacatggtttatataaaatgattttgcaaaaggaagataaattttgtattctta

SEQ ID NO: 41942 - DNA, 400 bp, Homo sapiens
tgaagctgtggttttaaaatatacactcaaaaatgttggctcggcacccacgaggcccaggaggttgtccagatgcactgggtctggggctgctcccagcagcctttcagtgcccccgcccccaccgctggcctttggggatagatggaatgggcaggagttgctgtaagagactggtccaaccacaggcaagcttctggccaaatattttaaattcgactctgagaaactagcaggaatcttgttctggtggcttcccaagcacacactcagggatcagaacctgcagaagcagaattcccagtttcagataaaatgttcattcatctccaatatgcagtgctggtccccatcgcccttccatccatgctgaaagtgtgtgcagcacggtacttaggga

SEQ ID NO: 41943 - DNA, 284 bp, Homo sapiens
caggtacagtctgtcatggcagactgtcaaagggaaatcctccgaccccttgtgcttcctgggtgaggcgatgccccacccagcttcggctcaccctccgtggcctccacccactgtccaaccagtcccagtgagatgaaccaggtacctcaattggaaatgcagaaatcacttgtcttctgcattggtcatgttgggagctgcagaccggagctgttcctatttggccatcatggaatggaaggtgatttttttttaactgtttaatcagccctgcatttctg

SEQ ID NO: 41944 - DNA, 643 bp, Homo sapiens
ttctatggcatatagaggccttaacaaataatacccaaaaggccctaaatgatagctgcatggctatctctttgctaaacaatgaggactcacgtataagaaaaaccatgctgcaaaattgtatggcgttagatatgctcactgcagcccaaggtggaacctttgccacaatcaaaactgaattttggatttatatcttagaggaatcaaatgacaaaacctgacttatgactgacataaaaacccagataaccaacctgtcagatccaaagcccttacgaatcgactagttgagtggtttgtttggatcctggggaacttggtggcagaagctattgctcataataggaatcataataataatttgtgttctgtcctgtttttttacttaggttgtcgtaatggtatgtgcttgcaactaagacaatgtgcaactgagaagtctagagtaatggttgcccaaagaagtgctctaactgaggaggcagtagcatagcctgaaccaacttccaggtgcagaacagaggacagaaatcaaagtcatctctctgctcacctgagacaaacacatatctgactgcttcttctgccatattgtctatgttgtcttatgttaaaataaagattcactgagccagacaaa

SEQ ID NO: 41945 - DNA, 519 bp, Homo sapiens
ctttcctttttgttcagtcctaaatttttaaaatgaaagtaacgtattatttctcttgatagatactgtcatgagagtacgtagatatgacctattgctaaaagtctagaatgtaatatccaaactgtgttccttttggagcatctcaggaagccataacgctggagatgcattctaacaagtgagctaaacactcgagggcacatgtccacttattttaggcaaaaaagtactattgaatcgacttattcaaataatgaagtctaagtctcagtttttctttattttctagactactgcctgaattcttgtttctctttttctaacagactctatgtattttcatattttcattgagaaatcgttttttgaaggcttactgttgtctggtactggattagatggggtaaggaggtgtaaggaactagacactcccatcccccactctcaccgcccatacacaaataatccccatacctaaaagatttacagaaacttactaaatctttctgcagttgc

SEQ ID NO: 41946 - DNA, 439 bp, Homo sapiens
tcccagctacttgggaggctgaggcaggagaatggcgtgaacccgggaggcggagcttgcagtgagccgagatcccgccactgcactccagcctgggcgacagagcgagactccgtctcaaaaaaaaaaaaaaaaaaaaaaaaaaaaaaaaaaaaaaaaaaaaaaaagaggccatttaaaaagcaatgaaataatattaaattaaatcatgaatatttattaaagaatgtgtacatttgaatatacatgtttgagttaaagtgcattcagtaaatcacttttatttttacaccatcaaccgagagctctccatgaaagcttttactccacgtacttcatctcttcttgaggtattacgtcttctgcatcatcttatgcaaccattcacaggaagaacattgctacaatgtttgcattatctttttggtcccacaagcca

SEQ ID NO: 41947 - DNA, 438 bp, Homo sapiens
tgaacatttcctcaaattattttctgattttgctttgctcagttgtctttagtgctaggttttgggacccagagcgttaacagtctttcctaaggagtcctgactagcactgtagtgcttaagaagaacaaaggtgttgggggggtgtctgttagagggcggcagagccccttctcatccctcagcccattcagttcccatgaccactctgggagggggaggtgttttcagatgaggaccctgagattctaaaggttgtgggatttgccacagtcacctctcaggtaagggcgcaactgcgaccgactgtttcgggtttcctgccttcacagtctgggttctttccaccacagcgcgatagaaccctgtcattgcaccagtaattgtttgctttctctggacttgttttgggaccctcagctccataagggatgttag

SEQ ID NO: 41948 - DNA, 575 bp, Homo sapiens
ggggtggggagggggctagatgctcggggtccaggcctgtgaacagtagcagttgtttcatactgaggtggacaaactctgtaaagggccaagtcgtgaatattttcatctttgcaggccataaagctgactgcagctacccagttctgctgggtagcgtccataggcaatgcatacataaagcagtggggctgtgtttcaataaagctttgtttatggacaccaaaatttgaaccttatgtaattttcacagatcacaaaatattaattttttaaccacttaaaatgtaaaaaccaggccaagcatgatggctcacgcctataacctctgcactttagaaggccaaggcaggaaaatcacttgaggccaggagttcgagacgagcctgggaaacatagccagacctcatctcttaaaaaaaaaaaaaaaaaaaaaaaattagctgggtgcagtgcacctgtaccccacctactcgaggtgagaggatcacctgaccccaggaggttgaggctgcagtgagccatgatcacaccactgtactccagcctgggcaacaaagtgaaaccctgtctca

SEQ ID NO: 41949 - DNA, 347 bp, Homo sapiens
tctccagccaattcccctcctctgaagaagggtggaatttaaagggtgttggtagagaagcctgcatcctgaattgttttggtttttgtgatactggtttctacttctgaggcccaaagaaaaggaaaatcacttgaggccaggagttcgagacgagcctgggaaacatagccagacctcatctcttaaaaaaaaaaaaaaaaaaaaaaaattagctgggtgcagtgcacctgtaccccacctactcgaggtgagaggatcacctgaccccaggaggttgaggctgcagtgagccatgatcacaccactgtactccagcctgggcaacaaagtgaaaccctgtctca

SEQ ID NO: 41950 - DNA, 1680 bp, Homo sapiens
aggaagctcccacagtgagagaaattacaagcagtctctgacgggggctggtcctctctgtggcctttagtagggtgatcctcttgggtggaggtggcagtaattcttggctgccttcccagtgtgggcagcatcttgcctaagctcaccacagaatacgtgtttgtccaaatgttacactacaagccatatagtgtggactgcttgcttttcattaatgggttctcagtcttcccattgtctctctttgtaggtattttcccccaggtcatggattgatgtctaactccaaatcaatttttaagcttaaatttcaacaaagaaagtgcttataaccacttgtcatcctcaattatccattgtgaggaggtggatgtaagatgacttctggaggccagtacttcctaatgattaagagcccacgctctagagtcaaaatgatgtaggcacaaatcctggcttccccacttattgtgtgatcttcagcaagttactcacctcggctttctcatctatacaattatgagtacctatctcaaagggttgctatgagcattaaatgagttaatgaacataaagcattcatcacttaccatgcttggcacatggtaagtgctcagcaaatgttaattgttgctagatctattgtgggcaatgatatttacacttcttggacaaaattggtttgatggtgccttagaggttaggatgtttctagatcaacgctggaagaaccaggatcaaagtgtggtctgggagtcaaagtcatgaatgaaaatgaagcaagccagaacctcatcagtggtgtccatgaatctgaaggtacagatgagggttggacctggagtctcaaaagagaagggtcagaaaactgaaactcaacatgtgtccagcactattcagttttatctcataatcaagcctccaaaatccaaacacattgtcagcatctgctttgaaggtaagcattgcaggtaggatgaggcaacccaaagatggcattgagaaagaggcagagcctcttggacactgtgcctggtgagtgtgggttggtgggggaaaggcaggtgatcattctgatacagggccttggggttaactagttttagttgtcctgtgacacttttgggaaagtcttcaaacctttgtgagatttaattccttatcaataaaatgtgggtaataaaaatatcaccccatagggttttttgtaaagatcaagtgaaactagctttgtaaactatcaactatcataaaaatataaagattcataattataaaaaaaaaggttggtcctatttctttaaaaattggtgcatacttccatttttttaaaggtgagtagatgtgaatgaaaattaaagtgcttattcagaaagcataaatggcttagccagaaattgggtttgacagtaaatgttgaacattatgccttgggaacttaagattctcagaatgctgcctcatccagccttgagtcctactttcttaaaacccaatcaatcccgttttcagtagattcctccacacacctcatgtccatttgctgtctggctcggctgaatcattgaaatgagtaataggcactgaaatgaaagacaccatatgaatcttgtaaaacctgaaaagaaacaagtgcgagacagtgaacagtcctggtgagtctgagaactggcagaa

SEQ ID NO: 41951 - DNA, 1626 bp, Homo sapiens
aggaagctcccacagtgagagaaattacaagcagtctctgacgggggctggtcctctctgtggcctttagtagggtgatcctcttgggtggaggtggcagtaattcttggctgccttcccagtgtgggcagcatcttgcctaagctcaccacagaatacgtgtttgtccaaatgttacactacaagccatatagtgtggactgcttgcttttcattaatgggttctcagtcttcccattgtctctctttgtaggtattttcccccaggtcatggattgatgtctaactccaaatcaatttttaagcttaaatttcaacaaagaaagtgcttataaccacttgtcatcctcaattatccattgtgaggaggtggatgtaagatgacttctggaggccagtacttcctaatgattaagagcccacgctctagagtcaaaatgatgtaggcacaaatcctggcttccccacttattgtgtgatcttcagcaagttactcacctcggctttctcatctatacaattatgagtacctatctcaaagggttgctatgagcattaaatgagttaatgaacataaagcattcatcacttaccatgcttggcacatggtaagtgctcagcaaatgttaattgttgctagatctattgtgggcaatgatatttacacttcttggacaaaattggtttgatggtgccttagaggttaggatgtttctagatcaacgctggaagaaccaggatcaaagtgtggtctgggagtcaaagtcatgaatgaaaatgaagcaagccagaacctcatcagtggtgtccatgaatctgaaggtacagatgagggttggacctggagtctcaaatctcataatcaagcctccaaaatccaaacacattgtcagcatctgctttgaaggtaagcattgcaggtaggatgaggcaacccaaagatggcattgagaaagaggcagagcctcttggacactgtgcctggtgagtgtgggttggtgggggaaaggcaggtgatcattctgatacagggccttggggttaactagttttagttgtcctgtgacacttttgggaaagtcttcaaacctttgtgagatttaattccttatcaataaaatgtgggtaataaaaatatcaccccatagggttttttgtaaagatcaagtgaaactagctttgtaaactatcaactatcataaaaatataaagattcataattataaaaaaaaaggttggtcctatttctttaaaaattggtgcatacttccatttttttaaaggtgagtagatgtgaatgaaaattaaagtgcttattcagaaagcataaatggcttagccagaaattgggtttgacagtaaatgttgaacattatgccttgggaacttaagattctcagaatgctgcctcatccagccttgagtcctactttcttaaaacccaatcaatcccgttttcagtagattcctccacacacctcatgtccatttgctgtctggctcggctgaatcattgaaatgagtaataggcactgaaatgaaagacaccatatgaatcttgtaaaacctgaaaagaaacaagtgcgagacagtgaacagtcctggtgagtctgagaactggcagaa

SEQ ID NO: 41952 - DNA, 216 bp, Homo sapiens
agtgatggaaacaggaggtgcatgactatattagtttgctaaggctgcaaataacaaattaccaaaaattcagtggctgaaaatagaaatttattgtcatacggttctggaaaccagaagaagatcaaggtgtcagcgcagccatgctccctctgatggctctaggggagaaggcttccttgttcttttccacctcctggtggctccaggcctctt

SEQ ID NO: 41953 - DNA, 507 bp, Homo sapiens
agaatgtctttgaaatgtgaaggcaaacttaagtattgaaaactattttgtcctccagtcttacttgaatctccttcctgatgtggcccttccgtttgctacatcctgagtataattttaatttattaaaaaaatggctgcactagctggaagaagccagctaaattgcagatggtgtgagaggtttgtttaccaacccaataaacttagtggctcaagacttttgaaaggatcttgagaaacaatggctctcttcctatactctgagctagaatggccattgtcaggtacataagttgatttaatcttcagattcagcctaagccttaagctgaatttttgctgtggagccttttcttaatttctctaatgtttaaaatagccagtcaattctctaccttttttttttttaactttcctaccttgtttggagggtttatcagatttagctcagaaatatgatgtgagccatgaatgtcattttaaatttttttatgttaaggtaag

SEQ ID NO: 41954 - DNA, 406 bp, Homo sapiens
cctgctcagtctgtatcaggcccgggatgaaatcgtcacttagacgctcaggggtcctcccacccatctggccaacacaaacctgccagcatagcactgagtggaaggttccagtgcacccacaggcctggctgttaaaatgtccggcctctccagaggacaggttaagttcacactgagaaagcctggctctctccagctagcctgaattaaagtgagaaggatgagcacagcacctgtggaaatggcgctggaaagcaagtgtacctagggaactgcctctgggccaccgaagtgcgccggcccagtgttctcagacaacccaggaggagtcctccatctggccacttcccacccgttaggccccgaggggacaccaggttggtgagacccggaccccaccagc

SEQ ID NO: 41955 - DNA, 402 bp, Homo sapiens
ctcagaaggacagtgtccacattcatcctgaccaccagctccatctacgagagagagcccaaagctgccccctgggcgatggagtcacaccgctgctggcctcttgggagtactcacttggacagaactgcaacgaagccatgcctgaattgaagggtgtgggtctcgttggccaaagaccgtctttcattggaactaggaataagagtgttagttcatagcacacctgctttgtacatagcaagtgcttcttaaaaagggcttcgctctgttgcccaggcaggagtgcagtgttgcagtgagccgagatcacgccacagcactccagcctgggcgacagagcgagactgtctcaaaaaataaataaataaataaaaggctttcagagataagcaaaaaaaa

SEQ ID NO: 41956 - DNA, 429 bp, Homo sapiens
agccaggagaacttggcccacaaatccctgtggatgctacttaccttgagccctcctggctttcctgggttatgtttctttcctgatctgctttccgtaggggcaggtgaccttctaatatcttccactcaaggccagctcgtgttggccctctgccccttcttccgtctggtgttcttgttatcagaccccaaagtcatatgggctacctattttcagcacctctttctttcagccccctagtaatcatgagtccctctccagagaactctggacaagtcctggaggggctggaagtgcatctgagcagagcatccccacgagcttgatgggctcctcctttgttcccatccccagtcccaactatccagttctagccagacaccacagtctccccacaggttagttgtttctcctgagagcttttat

SEQ ID NO: 41957 - DNA, 265 bp, Homo sapiens
aggcgtaggttgcggtgagctgagatcgcgcgttgcactccagcctggacaaacaagagcgagactccacctcaaaaaaaaaaaaaaaaaaggttagaatgagatgactggtcatggcattctagttgttgtccctgcacataaccattttgtattccatactgaacggaccagtgtgtgccatgcctgtgctagcatgcggttaagataaggctactttctttagatgagagatgtcacaagaacacaggaaagtcacagaagc

SEQ ID NO: 41958 - DNA, 429 bp, Homo sapiens
caaggctggagcaaggcacagctcactctgacaagataaactgcaagaaatgtgagaggcgacaagagaaggaaaaggcagaatgcccttatctggagacctggcttagaccacacccattccatgacgccaccccggattgcccctttcctgtgctttcagagcccaccagcccttctcagcctccaaggacacaggacatcagctcagggccttgaaggagccctagtcagcgtggtcctgagtcaccaagtctgtcaaggccaacaggactgagacctccacaaactgacgctgaagtctaaggacctttttccttgttccaccccactgcgcctcagatgtttccaggagtttctgaaggtcatgttaactagaatttactcttaaaaccaaagacacagaaataaacgttaagcatagtaaatg

SEQ ID NO: 41959 - DNA, 544 bp, Homo sapiens
caaggctggagcaaggcacagctcactctgacaagataaactgcaagaaatgtgagaggcgacaagagaaggaaaaggcagaatgcccttatctggagacctggcttagaccacacccattccatgacgccaccccggattgcccctttcctgtgctttcagagcccaccagcccttctcagcctccaaggatggacaggacctgataatgaacagaatgtcaggatggggacactgaaggaactcgagaatgacttctgtgttagaagcctcaccacaagacagaagatgctgcccttacccaggacacaggacatcagctcagggccttgaaggagccctagtcagcgtggtcctgagtcaccaagtctgtcaaggccaacaggactgagacctccacaaactgacgctgaagtctaaggacctttttccttgttccaccccactgcgcctcagatgtttccaggagtttctgaaggtcatgttaactagaatttactcttaaaaccaaagacacagaaataaacgttaagcatagtaaatg

SEQ ID NO: 41960 - DNA, 501 bp, Homo sapiens
tgagtatatgagccacagtaaggcgaggatggggggataccagcaggggctactgcaggagtctgggagtgaggcagtgggagctgcagccaggggaggggccacagaaggagagcaggggactaacctgaggtcaccttgggggaggatggacaggacctgataatgaacagaatgtcaggatggggacactgaaggaactcgagaatgacttctgtgttagaagcctcaccacaagacagaagatgctgcccttacccaggacacaggacatcagctcagggccttgaaggagccctagtcagcgtggtcctgagtcaccaagtctgtcaaggccaacaggactgagacctccacaaactgacgctgaagtctaaggacctttttccttgttccaccccactgcgcctcagatgtttccaggagtttctgaaggtcatgttaactagaatttactcttaaaaccaaagacacagaaataaacgttaagcatagtaaatg

SEQ ID NO: 41961 - DNA, 692 bp, Homo sapiens
tgagtatatgagccacagtaaggcgaggatggggggataccagcaggggctactgcaggagtctgggagtgaggcagtgggagctgcagccaggggaggggccacagaaggagagcaggggactaacctgaggtcaccttgggggaggatggacaggacctgataatgaacagaatgtcaggatggggacactgaaggaactcgagaatgacttctgtgttagaagcctcaccacaagacagaagatgctgcccttacccaggtaggatgatgggggcagtgagggggaaaagctctggagggcagatgtgagcagtacagagtctgaatgtttcctttagagaggatgctgagcctggccatgatggctcatgcctgtattcccagcactttgggaggccgaggcagatggatcacctgaggtcaggagttcaaaaccagcctggccaacatggtgaaaccccatctctactaaaaatacaaaaattagctgggcgtggtggcgggtgcctgtaatcccagctacttgggaggctgaggcaggagaatcacttgaacctaggaggcggaagttgcagtgagctgaaatcgcgccatcgcactccagctagggcaacaggggcaagactccatcttaaaaaaagaaaaaagagagaggatgttgagtgctgtcagggcggcaggatgagttc

SEQ ID NO: 41962 - DNA, 293 bp, Homo sapiens
tatgagccacagtaaggcgaggatggggggataccagcaggggctactgcaggagtctgggagtgaggcagtgggagctgcagccaggggaggggccacagaaggagagcaggggactaacctgaggtcaccttgggggaggatggacaggacctgataatgaacagaatgtcaggatggggacactgaaggaactcgagaatgacttctgtgttagaagcctcaccacaagacagaagatgctgcccttacccaggtaggatgatgggggcagtgagggggaaaagctctgg

SEQ ID NO: 41963 - DNA, 379 bp, Homo sapiens
gttgcccacgctggtctcaaactcctggccttaacaattctcctgcttcagccaccccaaatgctaggattacaagtacaagttaccatgcctagcctatgcccattttatgaataaaaatatgtaaataatgtacccaagtttctccagctgaatccagctgtctgatccaagagccctgatgaacacgtcaatcttctgccctctgctgtggggtcttccttaactacaccagacaaaaatccattcctcttttctctacttgttcctctgtttcaggtttcttgaaagttaatatggatacaaacctcctaggatcttgttaaagtatagattctgattcaatgggactggggtgcagcctgagaatttgcgtttc

SEQ ID NO: 41964 - DNA, 488 bp, Homo sapiens
tagaggagggaaaggccgtggcgtccgctccctccgcggctcatggcgacgacgcttggcacatccgggaccctcaggccgctgcagtcgcgtcgccggctgctcgggccccagccccggccgctgtggtgactccgccgcgccttgccgtcgcccccgtcccgcccgccgccccagccgccagggacatgtctaacctcggaggccgtaggaacgggcctgtcgaagtgcgcctgacatggacatgtcacccccattttaggaaaacttgtatttggtttgaaaaggaattgaaatcacgacgttatcctaccttcaccatttacccctgataaattgtccacgtttatatttggacacaatctgggagcaatatggaggatggactggaatgggagccatgaagactggttttaggataactggttaagaagattcaacagcagccatcgttcagattttttttcttgtttgaacatttatttcca

SEQ ID NO: 41965 - DNA, 409 bp, Homo sapiens
aactatgtgctcatacaaactttagagcaaactttctcttactctccccaccctcccccttcctttttctaaatggaaaataatgtccggaggggttgctagatagaagactacacttacaaagtgtttatgattccaggcgcatgaaatctttaacattacaggtacatttttgcttacagtgccatttttggtattcttacatggacatgtcacccccattttaggaaaacttgtatttggtttgaaaaggaattgaaatcacgacgttatcctaccttcaccatttacccctgataaattgtccacgtttatattccgatgagtggtgagaaagataattttccgtagaggatttgtgtgtgcgtgcacgtgtacgaataaactgtaattatgtttgtccacacta

SEQ ID NO: 41966 - DNA, 994 bp, Homo sapiens
atgttggccaggctggtcttgaactcccaacctcaggtaatccgctggcctcggcctcccaaagtgctaggattataggcgtgagccaccgtgcctggcaaacaaatgagttctaaggaacacactctgtcttctactgtaaagtatggtaaaaacacaatcctcttaaaatgctcatcaatgtgctttgtagtggtcaattttatttaataggatcaaacatgatgtattaaaaatgttgtaacaatatgtcagaaagacaattagctttttaaagtttggtgtaaatagatgaatagccatcttgacatcccttgaaaagaaatcccctttgatgagatgtttctttgtaattccaataagaaagatctcagtttttcattaccatttgcccagtgcaaatgcactatttccagtcattcaacaaattcaacagcactgatggctttcctaagtgctgggacacatcagatttcaacttgtgtcaaattgccaatttatgttatatgcccgttttttgggggtttcgttttaatctaaaggcagcaagtgagggccaagtacagaggtttgctgtctttgcaaagctaccttgagagcattgtaacttagcaggtgattgagttgtctactaagtggtgctctttatgtctcagataatgctgccagatttatctttctgaatcatagatgtgatcacatcggagtctgctcaaagccttggccgcatacagggtatggtctaaacactgctgacattcagagcttgctgttccggtgccaatactcctttctagacatttctgcccttctcttcaccccttcatgggcctcacctcccccatcagctcttcactgtctcccggcatacccatcaacatttaatgtacatctgtagtgaggtgagaagcacttacaccctgtgatcaggcagatctggtttgagttctgcctctcccttttcctagctaggtgaccttgggcaaggaacttc

SEQ ID NO: 41967 - DNA, 940 bp, Homo sapiens
atgttggccaggctggtcttgaactcccaacctcaggtaatccgctggcctcggcctcccaaagtgctaggattataggcgtgagccaccgtgcctggcaaacaaatgagttctaaggaacacactctgtcttctactgtaaagtatggtaaaaacacaatcctcttaaaatgctcatcaatgtgctttgtagtggtcaattttatttaataggatcaaacatgatgtattaaaaatgttgtaacaatatgtcagaaagacaattagctttttaaagtttggtgtaaatagatgaatagccatcttgacatccatctcagtttttcattaccatttgcccagtgcaaatgcactatttccagtcattcaacaaattcaacagcactgatggctttcctaagtgctgggacacatcagatttcaacttgtgtcaaattgccaatttatgttatatgcccgttttttgggggtttcgttttaatctaaaggcagcaagtgagggccaagtacagaggtttgctgtctttgcaaagctaccttgagagcattgtaacttagcaggtgattgagttgtctactaagtggtgctctttatgtctcagataatgctgccagatttatctttctgaatcatagatgtgatcacatcggagtctgctcaaagccttggccgcatacagggtatggtctaaacactgctgacattcagagcttgctgttccggtgccaatactcctttctagacatttctgcccttctcttcaccccttcatgggcctcacctcccccatcagctcttcactgtctcccggcatacccatcaacatttaatgtacatctgtagtgaggtgagaagcacttacaccctgtgatcaggcagatctggtttgagttctgcctctcccttttcctagctaggtgaccttgggcaaggaacttc

SEQ ID NO: 41968 - DNA, 327 bp, Homo sapiens
ctgggcgatagagcaagactcagtcttggaaaaaaaaaaaaaataagaaattatttatagccttgaagaatattacagggacacgtggcagatctaaataagaatcgtctattcaataacgtcactgtctcatgttaaactgcatgatgatgacaatgacactgtagttctgcaggcggacatccctgttcttaagagctgactgctggaggccaggtacggtggctcacggctgtaatcccaggacatttggaggccgaggcagggggattgcttgaacccaggagtttgagatcagcctaggcaacatggtgacaccctgtctct

SEQ ID NO: 41969 - DNA, 359 bp, Homo sapiens
tatttttttttttgagatggagtctcactctgtcactcaggctcgagtgcagtggcgcaatctctctcaccgcaacctctgcctcctgggctcaagcaattctccagccttgggaacagagtaaaactctgtctaaaaaaaaaataataaaagagtctgaggcaggagcatcacttgaggccatgcattcaggaccccatctctacaaaataaaaaaattactagcatggtggcatgcacctgtcatcccagctactcaggaagtgggaggattgctagagcccaggagtcgaggctgcagtgagcaatgactgcgccactgcactccagcctgagtgacagaacaagatcgtatctca

SEQ ID NO: 41970 - DNA, 591 bp, Homo sapiens
tcatgtctgtactactttatttttataaatacacattttccactcgtaactaaaaactgtgattgaaaatcatcccgtgtcacagtgtctcacgcctgtaatcccaacactgtaagaggcagaggatttgggaggctgaggtgagcggatcacttgaggtcaagagttcaagaccagcctggccaacacggtgaaaccccatctctactaaaaacacaaaaattagccacgcgtggcggtgcacgcctataatcccagctactcgggagactgaggcaggagaatcacttgaacctgggatgcattgcagtgagctgagattgcaccactgcactccagccttgggaacagagtaaaactctgtctaaaaaaaaaataataaaagagtctgaggcaggagcatcacttgaggccatgcattcaggaccccatctctacaaaataaaaaaattactagcatggtggcatgcacctgtcatcccagctactcaggaagtgggaggattgctagagcccaggagtcgaggctgcagtgagcaatgactgcgccactgcactccagcctgagtgacagaacaagatcgtatctca

SEQ ID NO: 41971 - DNA, 925 bp, Homo sapiens
tttaagaatagctaggttgtattaaaacatgtaagctactttaagtgataaatcaatagctaaagttttctcctaactttaagtctggtaaatatctctcaggaatggaagtgtcaatgagtagtcagtattactatactcttgtttgtaagaatatattttccttattgttggagtctccagaggttattggaaggaataaaaaaggacatgttttctaacgaaactctcaaattcattatctacttcatgagaatttatttgtattcattaacattagtaatacctatttttcttaagagccttcttttttccctttgtttcttgtcaccaagaagttatcacacttatacttattctataaggccaaagccttatctagaaagatcatgaagagtttggatatttttaaaactatactcgaattttcattttttcctgtcctgtaaaggagagaattcttaagatatcaggcataatgtatgtaccttttccagactgaagttcaaagaatgattaggttcaatctttcagtggcaggccagctaaactttctatagtttaatgattagctgtggttatgatcttgagccctaacatgccacattactcaagatttacacaggcaagtgacttcatttggcactgctaataatggcaggtgaacattcctctcaggtgtgagatatttcctatgaaacagtccactggcaggctggagatatcttacacttgagttgttttttttacacaaggtcattttgccgaagaattacttgtcagaactttgccctggggtccatgcattgccggccaattaggctcacaaaatccacagtttgggtagagcgcagggcacaagggtatgggggcaaaaaacaaaagccaacaaaaaaaattggggcacaaatagcggaaagtaata

SEQ ID NO: 41972 - DNA, 1945 bp, Homo sapiens
tttaagaatagctaggttgtattaaaacatgtaagctactttaagtgataaatcaatagctaaagttttctcctaactttaagtctggtaaatatctctcaggaatggaagtgtcaatgagtagtcagtattactatactcttgtttgtaagaatatattttccttattgttggagtctccagaggttattggaaggaataaaaaaggacatgttttctaacgaaactctcaaattcattatctacttcatgagaatttatttgtattcattaacattagtaatacctatttttcttaagagccttcttttttccctttgtttcttgtcaccaagaagttatcacacttatacttattctataaggccaaagccttatctagaaagatcatgaagagtttggatatttttaaaactatactcgaattttcattttttcctgtcctgtaaaggagagaattcttaagatatcaggcataatgtatgtaccttttccagactgaagttcaaagaatgattaggttcaatctttcagtggcaggccagctaaactttctatagtttaatgattagctgtggttatgatcttgagccctaacatgccacattactcaagatttacacaggcaagtgacttcatttggcactgctaataatggcaggtgaacattcctctcaggtgtgagatatttcctatgaaacagtccactggcaggctggagatatcttacactttgaagttatatatatataaaacaagtgtctatttctagctgaaagagtttacctcttctagacatttatgcccaatggtgtcacacatgatcatttgctcctgctctaattttaatgtgcatacaaaaaatataccaaaaatgttattgtaattttaatgagcatgtaaagagtgtatcaaaaattgatgggatattagtgttaggttttgcttaaatgaaaattaataaattcaaaaatactaaaagtcaccttctttgtcacgttagcaaccagtttctactattctgtgcccatccagtgtcaatatcattgatttctttttcatatgaagatccacatgcattgtaagattgtgaagatatataaaattgatgaattaagagaaattatgccactttcctatagtttctgtgttctgtttattgtatggtgtattcactcttggaaaatatgtaatagttgtgtatccagaatatgtgtcttcacctgaatatttaatctttatatttacaaaaaaataagttccacaagatggacaaaaatggtccatgatatttagcttaaattgtaaccttttgttgtgtatataaaacttccttggaagaaaataaccttattgttttcttaaagctaaacagaataggattggtactcattaattatgtcttgcaaatattttctaaaaattcaaccactctcctaaaatggtgtttaaatattttgtagggcagaatatgcatattgcctgttagcaagtaataattcattctcatagagaaatgggtttttacccatggaagtaatcttttttttttcttttttttttttaattttttttttaatatactttaagttttagggtacatgtgcacattgtgcaggttagttacatatatatacatgtgccatgctggtgcgctgcacccactaactcgtcatctagcattaggtatatctcccaatgctatccctccccactccccccaccccaccacagtccccagagtgtgatattccccttcctgtgtccatgtgatctcattgttcaattcccacctatgagtgagaatatgcggtgtttggttttttgttcttgcgatagtttactgagaatgatggtttccagtttcatccatgtccctacaaaggacatgaactcatcattttgtatggctgcatagtattccatggtgtatatgtgccacatt

SEQ ID NO: 41973 - DNA, 495 bp, Homo sapiens
aatacagacaaggtctcgctatgttacccaggatggtcttgattgaactcctggcctcaagctatcccctcctacctcggcctcccaaagagttgggattagaggtgtgagccaccatgtatggcttttttacatttcaaataagagaaattgggtaacttcaaggatgcaaatattacccaggaaaatcctatgatcttactttttgtgtgtgaaataattctttttctaagtgaatgcaaattaatgggatagttcattgaaattactctactaaaaaatccttatctgagctcccaaagccttaattattaactatttcaaagtactgtctctttatcttattaatctgacccagtatttaaatatacttcatttgagaagctccttcctatttctagactaaatttttcttactataataaatcaacaaggccagctgaattcatctggccttaagtgcaaaaatgacttccgtgaaaaaaatacggtgaa

SEQ ID NO: 41974 - DNA, 201 bp, Homo sapiens
agtctcttgcttttcattgattcttctgatatcaattgactttcagccacctctttgatttttggcaaaaggcatcaaaacctataaactcggctgggtgcggtggctcatgcctgtaatcccagcacttggggaggctgaagcaggaggatcgcttgaggccaggagtttgagaccaacctgggtaacataatgagaccc

SEQ ID NO: 41975 - DNA, 257 bp, Homo sapiens
aattacagtaacaacttgctttaagtatgtggcttccaagggaagccagattttaagagagtggtataagcagcaaggaaagtaaaaaaacttagaaaattcatggaaacattttatatgtttcaaaaatgaaaccaaaagaggaaattgaacagtcaaggaagccgggagtggcagcacgcacttgatctggttgagtgtgcccctgagtggggggcagctggtgctggaaccctggaacctgaccgcagaattgg

SEQ ID NO: 41976 - DNA, 598 bp, Homo sapiens
atcttggctcattgcaacctccacctcctgggttcaagtaattctcctgcctcagcctcctgagtagctgggattacaggcgtccaccaccacgtccagataatttttgtatttttcatagagacggggttttaccatgttggccaggctggtctcaaactcctaacctcaaatgatctacctaccttggccttctgaagtgctgggattacaggcgtgagccactgcgcccagcccagaatgtattgtagaagatgactggtagtggggcaaatagatttgcaggtagagactggcagcaaggagttatgagggcagggaagttattagaaagatatttaggagaagtgaagtatggaagaggcaggagttaaagatgtttctgggccagagtatgatggacagttgtgatatttttacacccagacttcatcccccccttttcaggttcagaatgctcgttgagttttaggaggaagaatcattctctagaggcttttaaaaacaagattgacaatatcaggattgatttacaatttgttaggaccatcactgaaagggttgtgcttacccccagctaagaccatgtgaccctagt

SEQ ID NO: 41977 - DNA, 579 bp, Homo sapiens
taaaaacctgttaaagcactattttgggtgtgtctgggaggatgttttcagaggacattagtgtgtgagtctgagtggactaggtagggaagatctgacctcactgtggcaccatcaattggccagaagccaagagagcaaatacagaaaatggattggtctctgagagttaggacaagacttttcttctgcttccttggatatgagaacttcaggctcaggggcctttgtactccaggacttacactaagcagcccctcagggtcctcgaagctttcaatctcccactgagagttacaccaccagcttccttggttgaggccttaggaactggactgagctttgctactgcaaccccagagtctctggcttgcagatggactgttgtggaactcctcagccaccagaatctcttatgtgaattctcctaataaatctcttctcatatatctatatacatatcctattggttctctctctggagaaccctaatacagacctagtattggagaagccaatcattccttcttattgtattccttacaacacaatggaagacatctacggaactgtcccctc

SEQ ID NO: 41978 - DNA, 334 bp, Homo sapiens
tctatgcttaagcagttttcagtgtcctctcaggttgttgatgaacttctggatcttgtttgagagactatttcaatgtttttcaaattcattaatgatacatttcaatgagcatgtcagtaaaagttatcagtaagagaaattaaagttccttttttgtcagtggttcttatttgaacaaaattgtgttaaaagaataatgggtcataagatttattttgatactgatgctttataatttagaattatgcctgcttaccctaaaaaagttaattcaaaataaaaacataaaaaaaacacattctttttttaaaaggtaagaccagaaagaaaa

SEQ ID NO: 41979 - DNA, 520 bp, Homo sapiens
ccttctctgctcagaaccctcctctccactaccatccccgcaagttccagctgcctgcactctgatctcggtttcttgtgctcagctctctggtggcctctgcttcccttgtaccttggttttgaaggcactcccagacagaaagccagagtgaatgtggggcttgactcacatgcttccagttggaccaaagacctgcactgagtgttgttccattctcgaaaacagttccttcatgcattctgtccaatatcacaattgcttgggaaagaagagtaagtctgatattcattatgccatcatgtctgggattggaagtctgattacattttaaaaggtgactctggttgctgcatagaagaaactgccaggtgaactacatacactaagaccagatgaaaaagggtgatgagggagtatttcttgaagcagaaaacctaatgtttctgcacgtgttaaacatctctgcaaattttgcaaggcatcaggagtaaaacgtgtaccttcaataaacccatgg

SEQ ID NO: 41980 - DNA, 431 bp, Homo sapiens
agatgtacatttgatcagttgccttaaaagggatgaataatcagtaatactgcctttgattgttttccttttagttgtttgcttgtcatgtttacagtagctatttatcaatttggatatcatctatttaagttagcttttactgttgtagcccatgtggagaaagagtttgaaatgcccatttatatttgatcacagatgtatggtttttcaaataaggttttttttgtgattttggtttggtttttttgtttgtttgtttgtttgtttgtttttgaaacagagtgtcactctgttgcccaggctggagtgcagtggtataatcatggctcaccacagcctcagtctcctgggctcaggagatcctcccacctcagcctctcaaatagctgggaccagaggtgtgcaccgccacacctggctttaaaaaa

SEQ ID NO: 41981 - DNA, 873 bp, Homo sapiens
gccaaaccccaataaaagaagcaattagattttttaaactctcaccaattttttccaaacagcctacatacaaatggtacagcaacagaaaaaaaggttgaaaatcaaagctcactattggcccatattttaaatatgtaaactcaaaattttatatctctacatatatgtatacacatattatcatacacaatcacacactcctctcccagaatccagcacactacttctatttcatatcacaatactcttttgaaagttgaatcatatagtctagtactttctaacccttcacgtcaagacattaatagaaaacaattgttttgacattctggtgttcaggactaaggggatcactaactcagcatcttttcttagggcaagtctgttagggaaaacgaggatttctagctgtttgccagggctggtccttgtctatcgtgatttataattctgtctacaactttctaggtgacctattatcattaagacttactatctggcattcttaaaaattatagatatatccatattctaatataaaagaagagcgggcatttcagacaagtatgttaactttctcatattaggaattctaaaggaaatatattctcaaaagacatctaatcatggctcacttgtgacagataaagtaattgtgctatttcattcggcagttctgaatcaaggacgtatccctgaatctggggagctctctatcaaaatatacatgctggaaccctaccaaaggaataataaatctggaatgaggctctgactgtctaattaggaaaagactccttcctggaattctgcacatctccctacaccttagtgacggttaaataaataattattaagcttctggaaaat

SEQ ID NO: 41982 - DNA, 785 bp, Homo sapiens
ggaagcgggacgtaccaagcggcaggcggcggaggggtgcgggccggaactccgcccttcgtgctggtcggtctccacgccccactcggactagtgtcaccgcctccccgccgcagacactatccgacaaaggagggggaatcaaaggctgggcgaagaggcagggcaggcgccggtgacgctgctgggcaagcgggctctgcagtagcatttgtggcgaccgtggcagtggctgtgactggaagcttctggaaatggcggcgatgaggacccccacatagggatggccatagcagccacaaaaggaagcaaacaagaacaagtcctgatggagcaatttatgaagacaggcagcatagagggagaagaacctgtctgtcaaccccacacacgctttcccagtttcattttagacgtctcctgaaagctgagcatttggtatcttaaagcctcttaccagtttggatagatatggatcttccaaaattaatgagctccttaatatcgacactgtttatcaacataaaggatcaatttaggaagattataaaaactgaagtttccggaacaataaatgggagaattaatcttctgaatcaaggacgtatccctgaatctggggagctctctatcaaaatatacatgctggaaccctaccaaaggaataataaatctggaatgaggctctgactgtctaattaggaaaagactccttcctggaattctgcacatctccctacaccttagtgacggttaaataaataattattaagcttctggaaaat

SEQ ID NO: 41983 - DNA, 939 bp, Homo sapiens
atgttgccctggctggtcttgaatttgtgggctcaaacaatctgtccgcctcaacctcccaaagtgctgggattacaggtgagccactgtgcccggcctgtaattttttatgttgcctattgataggcaccactgctgctctttaaatgtcaatgaaattattttggagaaactttcttcacctttactaggtttcttcttacggtttaagctcagctacctcttcttttctgcctaaaacttttctcttgatcaaatatcagaatggaatatgatttaaaagtttcattttagacgtctcctgaaagctgagcatttggtatcttaaagcctcttaccagtttggatagatatggatcttccaaaattaatgagctccttaatatcgacactgtttatcaacataaaggatcaatttaggaagattataaaaactgaagtttccggaacaataaatgggagaattaatcgtaagtacttcctgagttcttcacaggattatagaattttatatatggaagtaattttaaaaataatctggtctagagtttcctaaagtttgttccataaaattacaatcccatggcattgtatagaaaaacgggagtcccagtgatccagtatgtctggctgtaaacctcccttcctcgccattcacacagtgtaccttaaaatactacaaaggctacaaaaatcctccaataaagcctataattttgtttaatctactaaaaatgtaaccccccctttcatctgtaaacatgcctcagaacactcaagaggcagtgagctagccctatccactcacctgacagccacaatttacactagtgtttttcacttactaaacaaaaaatgattttcctgatatctcatgcttaaaatgccatctaataattacatcttcactaaaatttaaaaagtatggttcgtcagtca

SEQ ID NO: 41984 - DNA, 364 bp, Homo sapiens
  misc_feature (35)..(35): n is a, c, g, or t
  misc_feature (37)..(37): n is a, c, g, or t
gcgtcgacccccttcctgtgtccatgtgttctcantnttcaactcctacttatgagagagaacatgcggtgcttggttttctgttcctgtgttagacaaggggaagaagagcattaggacaaatacctaatgcacatggggcttaaaacctagatgacaggttggttggtgcagcaaaccaccatggcacatgtatacctatgtaacaaacctgcacattctgcacatgtatcccggaacttaaagttaaaaaaaaaataatttctaaataaaataaccaatgcaactgatactacctgacatgtaattagtatctccagaacaacctaagataacagccccagtttaatgatttgaagtcgac

SEQ ID NO: 41985 - DNA, 307 bp, Homo sapiens
atccttcccttcagtctgactgagccaattattttgccagtccacccctggagcaataattgattccaggagaaggccacacatggattgttagactaatcagaagctacatccatagagctgggatggggtctgcttccctgtgactcatgtcggggagtaattctattaggaaggaagaagtggaggtcggacgtgttggctcacgcctgtaatcccaacactttgggaggctgaggtggctggatcatctgaggtcaggagttcaagaccagcctgaccaacatggtgaaaccccgtctttact

SEQ ID NO: 41986 - DNA, 438 bp, Homo sapiens
cttttagttaatccgtttaggattgggagggcctggaagaaaaacatctagctatgttaatagatgttctttacagatgcacattttaccccacaaaggatagcttttgggggaaaatgctgtcctttatggaagaaattgcaaaatagggcaaggaaacatgttttggggtaaaatattttgactttctttttgtcacgtaatgttatgccagagtcagaatggaaagtaagtcatcatatataggattaaataaaacccatctgatgagaatttatggtttgtaggtcatgactccccagatcccttagataggaatttgggcaggattaaaaaaatcaagagtttaggctggtcgtggtggctcacgcctataatcccagcattttgggaggccaaggcaggtggatcgcttgaggtcagaagtttaagaccagc

SEQ ID NO: 41987 - DNA, 298 bp, Homo sapiens
tttaaaaaacttgatttccatttcccttacattagttaaccttgatttcatagtatcatcctgcacaaagtacaggttgcagaatactcaaactgtgcttatatagctgttttttaaaataacagttgtttgaaaatcttatttttttgatgctgcttcatccctcacacagcacttatttcccttggttgagcatgtggcatgtgacagtccatagcgccttcctttgcattactctgttatttcctgcctttgtatgttttatgtaaataatgcatttataaagtcttccactgat

SEQ ID NO: 41988 - DNA, 552 bp, Homo sapiens
ctcagagccctgcaggctggggtccgtggcgtgctgaccacctgacaaccaaggggccgttggccacatttctcagacactgcagaggtcctttcccttgcactccttcttggggtccttccaatgccctctgttgtgagggtctacctccagccttggcagggatcggaggtccgggtgaacaactaaggctaagaagaaacctctgaggctggaaaggggtgatttgaggtaggggggaatcctcccaccacacccatctgtgtgtgatgtcaatgagttcctgtgcaacccagcctcagttagcccatattggggtcattgcagcctacccctaacctgtgaggggtagctgacttcagccagctctgcagagctcctcctgtgtgctcaactctgcgcactgcagggagccaagatgagagcgcacagagctcactgctcaggagatggctgctttggggacctgtgtggacagacaggtagaggccccagggggctatgggagtgccccacagagcaggcaggggactgtggggaagtagagtgggc

SEQ ID NO: 41989 - DNA, 654 bp, Homo sapiens
gttaaaactcctagtagagcagtacgtctggaaggtaaatgcataaaataagattggataaaatttttcataaaagtgaatgttctctggtttataagtactatcccaattaatgtttgtaacactgcgcattattgtaaaagagatcccatgtgatagctaagacatttaataaatccaaaagatccaatgtgttctaaattctcatggtagttgaactgagtcatcttcttaggcatcagttccagtgattattagtactgacaactttgctgattccatttttaagatgattaagctagattttgaggcccagaagtaatacagcttgtccacattttcacttgatggagccaaagactgtgtagtatgagctcatgtatgcacacagctactgttaggcagaagccctgtgcatgaaattccagaaaaatcttcattatcatagtaactgccaaaaatctgtaacaactatatgattctgctttagcaatatccaaaatctaggtgttaacatggaaaatgtccagaggaaccatgggagaacatgtttgtgctaaaaatgaaaggaggaacacacagataacttctaattagcatgcagtgggtcttcgtggccacgtttatttattttgttttattttatttcattta

SEQ ID NO: 41990 - DNA, 1050 bp, Homo sapiens
actagtccacggttggctttaggtaaactctccaagaaagcctgctgaatcgtaagccattgctttctccatcaagttccagtttttctctagatcacaaagatgaagctggcagaacccgagtggatattcattattacgaacagaagaacagccaacaggagccgtgccatgtgcaaccccgagttgacagatgcctccccgcttcttctgtgtttgccagttgttacaaaatgatctagagaaaaactggaacttgatggagaaagcaatggcttacgattcagcaggctttcttggagagtttacctaaagtctatgtggacggtggctcagctcacctctgagaacaatacgatcttcacttttcaatctttctgcagctctaattagtgccacagggaaccatggatgaaaatggcttctcgtgttgatatccatttggggaataggatggatgcagctgcttttgctcaagggcagagttttgacttcaaagaccctgaagagaacccagaaggaaaactctcagaggtcaatggactatattctttacctgggggatcgttgacaccacagcagtaaaagcgaagtcagtgtcgtgctgtcttgaaattagatgacaagaatgactgacaccaatagagctggaactgcacttggagcctgagtagccggtctcaggctaaccacacctgtgctgaccacagcgtggcccgtgttgttcatgaggcattctggctgtacctccacagggatgcaagacttccagtgagaggctgcttctgcaagaaaatacctgcctagaaatggtccgctttctcttcctaataaagtgataagctttcttagtccaatggtactaaatagaaacctttttcttccatcagccagagaggtactttatttcctttgtttgggagtgtcagttaaatattgttgaaacatttcactagaacttcctgtcagttacctagtgaattcatgtgacttcatcagtcttgaatacagagaccgtttaataacaatacaattggttctagtcttaaa

SEQ ID NO: 41991 - DNA, 1948 bp, Homo sapiens
  misc_feature (1)..(1): n is a, c, g, or t
  misc_feature (3)..(3): n is a, c, g, or t
  misc_feature (5)..(5): n is a, c, g, or t
  misc_feature (7)..(7): n is a, c, g, or t
  misc_feature (9)..(9): n is a, c, g, or t
  misc_feature (12)..(12): n is a, c, g, or t
  misc_feature (15)..(15): n is a, c, g, or t
  misc_feature (17)..(17): n is a, c, g, or t
  misc_feature (20)..(21): n is a, c, g, or t
  misc_feature (23)..(24): n is a, c, g, or t
  misc_feature (26)..(26): n is a, c, g, or t
  misc_feature (28)..(28): n is a, c, g, or t
nantncntntangtnantanntnncncncaagtctctggacaaacctgaacagttcctttatgaactgtcactaatccccaacttttcagagcgagtcttttgcatcctgttccagtccacattttcagaaagcatttgctcaattcgtcgcaaactggaattactacagaaattgtgtgagacattaaaaaatggcccaggggttatgcaggttctaggtttggttcttgcctttggcaactacatgaatggaggaaataagactcgaggacaggcagatggctttggattagacattcttccaaaactgaaagatgtcaagagcagtgacaatagcagaagccttttgtcatatattgtttcgtattatctccgaaattttgatgaggatgctggaaaagaacagtgcctctttccactgccagaaccccaggacctttttcaggcctcacagatgaagtttgaagattttcaaaaagatctcagaaaactgaagaaagacttgaaagcctgtgaagttgaagcagggaaagtataccaggtctcctcaaaagagcatatgcagcctttcaaggaaaacatggaacaatttattattcaagccaaaattgaccaagaggcagaggaaaattcactgacagagactcataaatgctttttggagaccacggcatatttcttcatgaaaccaaaacttggagagaaggaggtgtccccaaatgctttcttcagtatctggcatgaattcagctctgactttaaagacttctggaagaaagagaacaaacttcttctacaagagagagtaaaagaagccgaagaggtgtgtagacagaagaaaggaaaatcactttataaaataaaaccaagacatgactctggaattaaagcaaagataagcatgaaaacttgaacaatgaaaagcagaatgaaaatgagtcattgcaacgactttcacaaaattcagctgacctgagagtgggagggaaactaccgtcattctgctcatgtttcttcttgacctcttgcataatctttttgttttctagacagttcactaattgttgaattttactgtatattcatataaaaatgcaaacgtactagaccagtggagaatttgacaccttttctttttgtaaaagtttatggtattataccgatagaccaaaacagcatgtgtaagaggcagtatctgcactaattctcaacatgctaaacattaactacaattcactgttgtgagaatattcctcgtcacagcaaaaacactttcctttctactgacaaccagtcctccacatcacagcatttagacatatgggtaaaatgttatttctagtgaattgtttgtatcagtttcatgtctaagtataaattttctattttaaaatttaagaaccgtttataatcagtgctttcccaactcttgggttgctctccataactatgtatttgtgaaagaaaatggtcatttttttttactgaagtcatataatgacttgggtcagctcgtaatgcattgtgatggttttgtatgagctgggtgtttttttccattacttttaatgatcttcgttgcaagttatagttgtggataaaggggagaatttattgctcttgcaaaccaattatggaaagcaacttaagaaaaccaatgttctaaatcataattgtttgtatttatgtaaagtatggtctcttactttttagtttgtagtttaagtgcaaagaaacagtagtggttttttttctattgttttgtagtcttcctgtccccttcagtccctccagtgtgtatattaccattctccaatgaaataatagggcatttaacaaagatcgctatgtgcaatactgtatttagtgtttctatttcaatttttctaggatgttaatttatatgaaaataaaatgaataataaaagaataaagatacttgcaaaa

SEQ ID NO: 41992 - DNA, 1366 bp, Homo sapiens
ctggaggcccagcagagcaaggcttcccaggtggaaagctgtagtttcatgccttggatgttcgggccatgtgctttttggagaccacggcatatttcttcatgaaaccaaaacttggagagaaggaggtgtccccaaatgctttcttcagtatctggcatgaattcagctctgactttaaagacttctggaagaaagagaacaaacttcttctacaagagagagtaaaagaagccgaagaggtgtgtagacagaagaaaggaaaatcactttataaaataaaaccaagacatgactctggaattaaagcaaagataagcatgaaaacttgaacaatgaaaagcagaatgaaaatgagtcattgcaacgactttcacaaaattcagctgacctgagagtgggagggaaactaccgtcattctgctcatgtttcttcttgacctcttgcataatctttttgttttctagacagttcactaattgttgaattttactgtatattcatataaaaatgcaaacgtactagaccagtggagaatttgacaccttttctttttgtaaaagtttatggtattataccgatagaccaaaacagcatgtgtaagaggcagtatctgcactaattctcaacatgctaaacattaactacaattcactgttgtgagaatattcctcgtcacagcaaaaacactttcctttctactgacaaccagtcctccacatcacagcatttagacatatgggtaaaatgttatttctagtgaattgtttgtatcagtttcatgtctaagtataaattttctattttaaaatttaagaaccgtttataatcagtgctttcccaactcttgggttgctctccataactatgtatttgtgaaagaaaatggtcatttttttttactgaagtcatataatgacttgggtcagctcgtaatgcattgtgatggttttgtatgagctgggtgtttttttccattacttttaatgatcttcgttgcaagttatagttgtggataaaggggagaatttattgctcttgcaaaccaattatggaaagcaacttaagaaaaccaatgttctaaatcataattgtttgtatttatgtaaagtatggtctcttactttttagtttgtagtttaagtgcaaagaaacagtagtggttttttttctattgttttgtagtcttcctgtccccttcagtccctccagtgtgtatattaccattctccaatgaaataatagggcatttaacaaagatcgctatgtgcaatactgtatttagtgtttctatttcaatttttctaggatgttaatttatatgaaaataaaatgaataataaaagaataaagatacttgcaaaa

SEQ ID NO: 41993 - DNA, 1172 bp, Homo sapiens
atacacactctgcatagaaattcttatgtagtaaaagaagccgaagaggtgtgtagacagaagaaaggaaaatcactttataaaataaaaccaagacatgactctggaattaaagcaaagataagcatgaaaacttgaacaatgaaaagcagaatgaaaatgagtcattgcaacgactttcacaaaattcagctgacctgagagtgggagggaaactaccgtcattctgctcatgtttcttcttgacctcttgcataatctttttgttttctagacagttcactaattgttgaattttactgtatattcatataaaaatgcaaacgtactagaccagtggagaatttgacaccttttctttttgtaaaagtttatggtattataccgatagaccaaaacagcatgtgtaagaggcagtatctgcactaattctcaacatgctaaacattaactacaattcactgttgtgagaatattcctcgtcacagcaaaaacactttcctttctactgacaaccagtcctccacatcacagcatttagacatatgggtaaaatgttatttctagtgaattgtttgtatcagtttcatgtctaagtataaattttctattttaaaatttaagaaccgtttataatcagtgctttcccaactcttgggttgctctccataactatgtatttgtgaaagaaaatggtcatttttttttactgaagtcatataatgacttgggtcagctcgtaatgcattgtgatggttttgtatgagctgggtgtttttttccattacttttaatgatcttcgttgcaagttatagttgtggataaaggggagaatttattgctcttgcaaaccaattatggaaagcaacttaagaaaaccaatgttctaaatcataattgtttgtatttatgtaaagtatggtctcttactttttagtttgtagtttaagtgcaaagaaacagtagtggttttttttctattgttttgtagtcttcctgtccccttcagtccctccagtgtgtatattaccattctccaatgaaataatagggcatttaacaaagatcgctatgtgcaatactgtatttagtgtttctatttcaatttttctaggatgttaatttatatgaaaataaaatgaataataaaagaataaagatacttgcaaaa

SEQ ID NO: 41994 - DNA, 2647 bp, Homo sapiens
tggtcgatctagaggtatcccccacaacgctttatacttcctgtaaaggagagaaagagacctatctctgatactatctcaaagacgaaggctaaacaagttgtcaagttattaagcaacaaaagatcacaagcagttggaatactaatgtctagccttcatttagatatgaaagacatacaacatgctgttgtgaacttggataattctgtggttgacctggagacccttcaagctctctatgagaatagagcacagtcagacgaactcgaaaaaatagaaaagcatggccgatcttccaaagacaaggaaaatgccaagtctctggacaaacctgaacagttcctttatgaactgtcactaatccccaacttttcagagcgagtcttttgcatcctgttccagtccacattttcagaaagcatttgctcaattcgtcgcaaactggaattactacagaaattgtgtgagacattaaaaaatggcccaggggttatgcaggttctaggtttggttcttgcctttggcaactacatgaatggaggaaataagactcgaggacaggcagatggctttggattagacattcttccaaaactgaaagatgtcaagagcagtgacaatagcagaagccttttgtcatatattgtttcgtattatctccgaaattttgatgaggatgctggaaaagaacagtgcctctttccactgccagaaccccaggacctttttcaggcctcacagatgaagtttgaagattttcaaaaagatctcagaaaactgaagaaagacttgaaagcctgtgaagttgaagcagggaaagtataccaggtctcctcaaaagagcatatgcagcctttcaaggaaaacatggaacaatttattattcaagccaaaattgaccaagaggcagaggaaaattcactgacagagactcataaatgctttttggagaccacggcatatttcttcatgaaaccaaaacttggagagaaggaggtgtccccaaatgctttcttcagtatctggcatgaattcagctctgactttaaagacttctggaagaaagagaacaaacttcttctacaagagagagtaaaagaagccgaagaggtgtgtagacagaagaaaggaaaatcactttataaaataaaaccaagacatgactctggaattaaagcaaagataagcatgaaaacttgaacaatgaaaagcagaatgaaaatgagtcattgcaacgactttcacaaaattcagctgacctgagagtgggagggaaactaccgtcattctgctcatgtttcttcttgacctcttgcataatctttttgttttctagacagttcactaattgttgaattttactgtatattcatataaaaatgcaaacgtactagaccagtggagaatttgacaccttttctttttgtaaaagtttatggtattataccgatagaccaaaacagcatgtgtaagaggcagtatctgcactaattctcaacatgctaaacattaactacaattcactgttgtgagaatattcctcgtcacagcaaaaacactttcctttctactgacaaccagtcctccacatcacagcatttagacatatgggtaaaatgttatttctagtgaattgtttgtatcagtttcatgtctaagtataaattttctattttaaaatttaagaaccgtttataatcagtgctttcccaactcttgggttgctctccataactatgtatttgtgaaagaaaatggtcatttttttttactgaagtcatataatgacttgggtcagctcgtaatgcattgtgatggttttgtatgagctgggtgtttttttccattacttttaatgatcttcgttgcaagttatagttgtggataaaggggagaatttattgctcttgcaaaccaattatggaaagcaacttaagaaaaccaatgttctaaatcataattgtttgtatttatgtaaagtatggtctcttactttttagtttgtagtttaagtgcaaagaaacagtagtggttttttttctattgttttgtagtcttcctgtccccttcagtccctccagtgtgtatattaccattctccaatgaaataatagggcatttaacaaagatcgctatgtgcaatactgtatttagtgtttctatttcaatttttctaggatgttaatttatatgaaaataaaatgaataataaaagaataaagatacttgcaaaaaaaaaaaaaaaaaaaaaaaaaaaaaaaaaaaaaaaaaaagaaaaaaccaaaccaaacaagaaagaacataccacaaaaaagacagcaccaaaaggtagaacaaaaaacactaacaacaagtatcaacaaaaagacgtgaaacaaaaagaagaaacccaaaaagagaagaaacagaagaggacacaaatacaacaaacacacaaccaagcaaaacaagaaagaccaaaagaaacaccggaaaacaacaccaacaaacaccacaaaacaacaaaccagaaaccaaacccgacaacaaaccaacaacaacagcaaaacacagaaaaaaacaagcgcaaggacaaaacagagagaaacgtgagaagccacacagaaaacagaaacaagaaaataaaatcacgagagaaacaaac

SEQ ID NO: 41995 - DNA, 1986 bp, Homo sapiens
tggtcgatctagaggtatcccccacaacgctttatacttcctgtaaaggagagaaagagacctatctctgatactatctcaaagacgaaggctaaacaagttgtcaagttattaagcaacaaaagatcacaagcagttggaatactaatgtctagccttcatttagatatgaaagacatacaacatgctgttgtgaacttggataattctgtggttgacctggagacccttcaagctctctatgagaatagagcacagtcagacgaactcgaaaaaatagaaaagcatggccgatcttccaaagacaaggaaaatgccaagtctctggacaaacctgaacagttcctttatgaactgtcactaatccccaacttttcagagcgagtcttttgcatcctgttccagtccacattttcagaaagcatttgctcaattcgtcgcaaactggaattactacagaaattgtgtgagacattaaaaaatggcccaggggttatgcaggttctaggtttggttcttgcctttggcaactacatgaatggaggaaataagactcgaggacaggcagatggctttggattagacattcttccaaaactgaaagatgtcaagagcagtgacaatagcagaagccttttgtcatatattgtttcgtattatctccgaaattttgatgaggatgctggaaaagaacagtgcctctttccactgccagaaccccaggacctttttcaggcctcacagatgaagtttgaagattttcaaaaagatctcagaaaactgaagaaagacttgaaagcctgtgaagttgaagcagggaaagtataccaggtctcctcaaaagagcatatgcagcctttcaaggaaaacatggaacaatttattattcaagccaaaattgaccaagaggcagaggaaaattcactgacagagactcataaatgctttttggagaccacggcatatttcttcatgaaaccaaaacttggagagaaggaggtgtccccaaatgctttcttcagtatctggcatgaattcagctctgactttaaagacttctggaagaaagagaacaaacttcttctacaagagagagtaaaagaagccgaagaggtgtgtagacagaagaaaggaaaatcactttataaaataaaaccaagacatgactctggaattaaagcaaagataagcatgaaaacttgaacaatgaaaagcagaatgaaaatgagtcattgcaacgactttcacaaaattcagctgacctgagagtgggagggaaactaccgtcattctgctcatgtttcttcttgacctcttgcataatctttttgttttctagacagttcactaattgttgaattttactgtatattcatataaaaatgcaaacgtactagaccagtggagaatttgacaccttttctttttgtaaaagtttatggtattataccgatagaccaaaacagcatgtgtaagaggcagtatctgcactaattctcaacatgctaaacattaactacaattcactgttgtgagaatattcctcgtcacagcaaaaacactttcctttctactgacaaccagtcctccacatcacagcatttagacatatgggtaaaatgttatttctagtgaattgtttgtatcagtttcatgtctaagtataaattttctattttaaaacttaagaaaaccaatgttctaaatcataattgtttgtatttatgtaaagtatggtctcttactttttagtttgtagtttaagtgcaaagaaacagtagtggttttttttctattgttttgtagtcttcctgtccccttcagtccctccagtgtgtatattaccattctccaatgaaataatagggcatttaacaaagatcgctatgtgcaatactgtatttagtgtttctatttcaatttttctaggatgttaatttatatgaaaataaaatgaataataaaagaataaagatacttgcaaaa

SEQ ID NO: 41996 - DNA, 311 bp, Homo sapiens
atttaggtttttattccatttcgagttaattttttatatagtgtaaggtaagggtccatctttacttttttgcatgtgggtatctggctttcccaggaccatttgttgaggagactatccttttcccattgagcggtcttggtatctttgctgaagatcatttgaccatatacatgaaggtttatttctatgctttctattatatttcacaggttttatatatttttattctaataccaactgttttgattactgtagcttttaatgtgttttgaagtcagaaagtgtgagctcttcacagtttgtttgtt

SEQ ID NO: 41997 - DNA, 1834 bp, Homo sapiens
gcgattctcctgtatcagcctcccaagtagctgggattataggcatgtgccaccatgcccagcaaattttgtatttttttttggtagagacagggttcaaccatgttggtcaggctggtctcgaactcctgaccgcaagtgatccacacgccttggtctcccaaagtgctgggattacggtgttagccactacacctggcctggattgtgtattatttatgtctgtagtttatatgcttagttgttgcctatagtgatctgggtaagattcaaacatttatcttttgtatcttctacagaagtgctttgagcatcaaatttgttttaacgttaaattgtagtttgctgtattaaaatagatcaatgaatataattcagtcttttaggggcaccaagtaaagcataaggtcatatatactatacaatatgtttattgcacttcccatggggataaatcactctgtcattcctagttattttaaaaaaagaactttatgattacggtcctctttctcacatactgcaaacttaaaagatacatacaccaaatataggtctgttttaaaggagaggaaaaatagttcaaggagtttttgcctctttgtttttcaatagattattctgccattttttaaaggaaagggaaaatgaaaacagcatgtctttttaaacattgaaaagaaatatggaggctttaaaccgcaaactgaaaaagctgagtagaacaaaggcagtggagcatacaatacaattctatttatttgaggttaattgaagttaataatttttaaatttttttctaattttatgccttaaaataggtttctgattacataaaatttgaatagaacactcaagaagtatgtagatttttgaaaaacccaaacaatattcttcttagatttttggaggcaaaatttagaccagtatactaattcaaaagacaaatatttcagaggaagtggagtacagtatttaacattttgtttgcaattttactttttcttcccttcttccctattgaaccttgattaaaatgtatgaatacaatacttggatttttttttttcagcttagactctgataatttcagtggtagtggggaaacctgaatttgtcagcatgattatttgtaactcagattgttcaaatgtatatagaaggtccccttcaagtgttgtttctccaagtagtcataaatgtagcaagtataaatcagaatatcatcttataatcttacagagttaacctaatgagtcaatacctttataagcaaaaccatgataaatttaaaaacaacagaaatgtggcatgattacttatttatttgttccaggtgactctaaatagttgatttttctgcctgaaggatcctgaacatatttagttaccctgtagttatttaggaatttaaaccagaagactttgaagttgtatattcttgcaatgcataaaatgacattataatcaacaaacttatggtttgtttcaattgatgcacacaaaaaataacttatagttagacttttctatttcaagtaaagctttgagttacttatttttatacatattcatcatgtaccctttattgtttctaggtgttgatatactttaataaaaatgatatgtttaatattttcccattaatatatttctttgaagctatttgttttaaaagatgtaacacttatttgctgtcaaattctgaattaaaaaatctgttggtggccaggcgcagtggctcatgcctgtaatcccaacattttgggaggccaaggagatggatcacttgaggccaggagttcaagaccagcctggccaacatggcaaaacc

SEQ ID NO: 41998 - DNA, 5409 bp, Homo sapiens
gcagggcggtcacggcggcctgcccagggcgcagcggggtcgacctttgtgcggggcgggtccctggcagcctcggcccggactcgccgccaacgaggagccgagcgccctggagaacgcgtcggggctgagccggggtccagcagccgccgctatggacatcccgccgctggccggcaagatcgcggcgctgtcgctgagcgccctcccggtgtcctacgcgctcaaccacgtctcggcgctctcgcaccccctgtgggtggcattgatgagcgccctaatcctgggtctgcttttcgtggcggtctacagcttgtcccatggcgaggtctcctatgacccactctatgctgtcttcgctgtcttcgccttcacctcggttgtggacctcatcatcgctcttcaggaagacagctatgtggtgggcttcatggagttctacaccaaggaggtacttgggggacgaccagggagccccctaccgcactgcccgtctgagtctcccacctgcccccacagggagagccatacctgcgcacagcgcacggagtcttcatctgctactgggatggcactgttcactacctcctctacctggccatggccggcgccatctgcagaaggaagagataccggaattttggactctactggctgggttccttcgccatgagcatcctggtgttccttacaggaaacattcttggtgcaagaggaacaaagaaagggactcctgcagcgtccggctgacctggcccttgtcatatatctcatccttgctggcttcttcactctgttccggggcctggtggtgcttgattgccccacagatgcctgctttgtctatatctaccagtatgagccatacctgcgggaccctgtggcctaccctaaggtgcagatgctgatgtacatgttttatgtcctgcctttctgcggcctggctgcctatgctctcaccttccctggttgctcctggcttccagactgggccttggtgtttgctggaggcatcggccaggcagacgccgggattgcgccgcctgcagggacctgcccagtcttaaccgggtgtgcggggagcgcagtccgggtgcgtaggggccgctcggcgggggccgcgcgggcaagatggtgtgcgctcgggcggccctcggtcccggcgcgctctgggccgcggcctggggcgtcctgctgctcacagcccctgcgggggcgcagcgtggccggaagaaggtcgtgcacgtgctggagggtgagtcgggctcggtagtggtacagacagcgcctgggcaggtggtaagccaccgtggtggcaccatcgtcttgccctgccgctaccactatgaggcagccgcccacggtcacgacggcgtccggctcaagtggacaaaggtggtggacccgctggccttcaccgacgtcttcgtggcactaggcccccagcaccgggcattcggcagctaccgtgggcgggctgagctgcagggcgacgggcctggggatgcctccctggtcctccgcaacgtcacgctgcaagactacgggcgctatgagtgcgaagtcaccaatgagctggaagatgacgctggcatggtcaagctggacctggaaggcgtggtctttccctaccacccccgtggaggccgatacaagctgaccttcgcggaggcgcagcgcgcgtgcgccgagcaggacggcatcctggcatctgcagaacagctgcacgcggcctggcgcgacggcctggactggtgcaacgcgggctggttgcgcgacggctcagtgcaataccccgtgaaccggccccgggagccctgcggcggcctgggggggaccgggagtgcagggggcggcggtgatgccaacgggggcctgcgcaactacgggtatcgccataacgccgaggaacgctacgacgccttctgcttcacgtccaacctgccggggcgcgtgttcttcctgaagccgctgcgacctgtacccttctccggagctgcgcgcgcgtgtgctgcgcgtggcgcggccgtggccaaggtggggcagctgttcgccgcgtggaagctgcagctgctagaccgctgcaccgcgggttggctggccgatggcagtgcgcgctaccccatcgtgaacccgcgagcgcgctgcggaggccgcaggcctggtgtgcgcagcctcggcttcccggacgccacccgacggctcttcggcgtctactgctaccgcgctccaggagcaccggacccggcacctggcggctggggctggggctgggcgggcggcggcggctgggcagggggcgcgcgcgatcctgctgcctggacccctctgcacgtctaggctgggagtaggcggacagccagggcgcttgaccactggtctagagccctgtggtcccctggagcctggccacgcccttgaagccctggacactggccacattccctgtggtcccttacaaactaactgtgcccctggggtccctgaagactggctagtcctggcagaacagtactttggagttccctggagcctggccagccctcacctcttctggatagaggattcccccaactccccaactttctccatgagggtcacgccccctgaggacctcaggaggccagcagaacccgcaggctcctgaagactggccacgcctcctgagaccacttggaaacagaccaactgcccccgtggtcgcctggtggctggacccccgggattgactagagaccggccgtacaccttctgcatctcactggagactgaacactagtcccttgcggtcacgtgggacactgggcgcctcctcctccccctcctcctcacctggagagactacaggaacttcagggtcactccccgtggtcacatggaggttgtgggccgaggcgcttattttcccttatggtgacctgagtcctggagactcccattctccccctctccctgagagtcccctgcagtttctgggtaacagggcacacccctctagtttcatgggcgagcacccccatctgccacctcagactgacacacagccagctggctcacttactgggggccacgtcccacccctcagatatttctttgaagggagagcaaacccaccctgtcctctgacgtccctttcccaactgtcaccaaacagaccatcttcccaggcctggggaccggtaagatccatgtcactagttatgcagagcagttgccttgggtcccactgtcaccaaggcaaccagtcctgctgctacctgtcacctagagtcacacaccccttccctcatcaggcacacccatgaagacagtgcctccctcctccagctgtaaccatggataccacacatttctcatctcattggcccccaccccagagacctccacctcaacttctggctgtccctaccctgactcaccgccatggagatcaccctccccgaagctgtcgccagggtgacccaacatccagttctccggctctcaccatggaaacaaactgtccctgtccccaggcccactccagttccagaccaccctccatgctccacccccaggcggtttggaccccaccactgttgccatggtgaccaaactctggagtccgaggtaacagaacacctgtccccctaggcttttccttgtggacaacggggccctgttcaccaagctgttgccatagagactgtcaacgttgtcctcatgacaaccagacttccagttctcaggaacttctcattgtgggccagaagtcctgggtgcctcctactagggctaccctactgcaccccatcaggggcctgatggctgccccttccccagacagggctggacttctggagctgctaagccaccctccgtttgcacgttaactctatgccggatagcagctgtgcacgagacaatcttgcaacacccgggcatgtttgtcgtcgtcctacaaatgaggaaaccgagcctatggcgtgccctggtctgttgagatatgcaagcactgagctcctcttttgtcctctgagaccccatctccattctcacccagttcctctctccttccctgacccccacccacatttccctccttagagatccaggagggatggaatgttctttaaaattcaacacccaccaggctctaagcggcgatctgtgctaagaggtcaggacccagccgaagtcctcggcgttgacaggcagctggggggacatgatccatggacaaggccatcccggccgtgggagaccccagtcccgaagtcttgcctgcaggagtactggggtccccctggggccctctttactgtcacgtcatctctaggaaacctatctctgagttttgggaccaggtcggtttgggtttgaattctgcctcttcttgctcactgtgtgaccaagtgacaaactccttctgaacctgtgttctcccactgtaccagggctgttctgtggtccccgtgagtgccaagcatacagtaggggctcaataaatccttgtttcttttgatgaatgagaaaatgaggcagccagtgggtaattcctgtataaatgcactttggtagataagatgttacaagcttggggggcttggggttttttttgttttgtttttttgagatggagtcctgccctgtcgcccaggctggagtgcagtcgtgcaatcttggctcactgcaacctctgcctcccgggttcaagtgattctcctgcctcagcctcccgagtagctgggattacaggtgcctgccaccacacccggctaatttttgtatttttagtagagacagggtttcaccatgttggccaggctggtcttgaactcctgacctcaggtgatctacccacctcggcctcccaaagtgttggggttacaggtgtgagccactgcgcctggccgggcttgatttttattctctttggaagtggggtccttcattcctcccccacctccccaatctcttgctcctctttcttcccccatcctgtgcccactgtctccctttagccacccaccatgggtctgctccttgtcaactctgtcctgactgggtcattgacaagatccagggcatgaaattcgggaaactggaaggggggttcctgtaccaggaagggagagacattacaaactttccctgacatgaatatgtgggctgagggcaggggctgaggaagcactggaagtttctaggatacaacaaagcatgaagagaaaaaatagtgtaaggtcctgaccgtgcacagtggatcatgcctataatcccagcactttaagagaccaaggtgggaggattgcttgagccagaaggtcgaggctgcagtgagccatgattgtaccactgcactccagcttgggcgacggagtgagaccctgtctcaaaaaataaaaataagtaaatctcctcttcctc

SEQ ID NO: 41999 - DNA, 1876 bp, Homo sapiens
gcagggcggtcacggcggcctgcccagggcgcagcggggtcgacctttgtgcggggcgggtccctggcagcctcggcccggactcgccgccaacgaggagccgagcgccctggagaacgcgtcggggctgagccggggtccagcagccgccgctatggacatcccgccgctggccggcaagatcgcggcgctgtcgctgagcgccctcccggtgtcctacgcgctcaaccacgtctcggcgctctcgcaccccctgtgggtggcattgatgagcgccctaatcctgggtctgcttttcgtggcggtctacagcttgtcccatggcgaggtctcctatgacccactctatgctggaagacagctatgtggtgggcttcatggagttctacaccaaggaggtacttgggggacgaccagggagccccctaccgcactgcccgtctgagtctcccacctgcccccacagggagagccatacctgcgcacagcgcacggagtcttcatctgctactgggatggcactgttcactacctcctctacctggccatggccggcgccatctgcagaaggtgcaggaggcagggagagggtggcccctgaccctgggagagaagttgcatcctcagatggggtcccagggcagggtggagccagaagtgtctgtaggagaaatcaggacgcctctctagggctccagccaggggtggccaggagaaggttccagggaacgtctcaggtgtaggtggtggcctagcattgcttacatccaccctgtgcctgggcagccacttctgttcttggacagagggtctcactgttatttccccgttcaactccctgttgtcccttccatcctgggcaaaactgaaagggacccggagctgggaaacccacggtggtctccaggccctggctggggctctgagattacggagtgactacctgctggtcacccctccatcccctgctcaggaagagataccggaattttggactctactggctgggttccttcgccatgagcatcctggtgttccttacaggaaacattcttggtgcaagaggaacaaagaaagggactcctgcagcgtccggctgacctggcccttgtcatatatctcatccttgctggcttcttcactctgttccggggcctggtggtgcttgattgccccacagatgcctgctttgtctatatctaccagtatgagccatacctgcgggaccctgtggcctaccctaaggtgcagatgctgatgtacatgttttatgtcctgcctttctgcggcctggctgcctatgctctcaccttccctggttgctcctggcttccagactgggccttggtgtttgctggaggcatcggccaggcacagttctcgcacatgggggcttccatgcacctgcgcacacccttcacctaccgtgtgcctgaggacacctggggctgcttcttcgtgtgcaatctgctgtatgcgctgggcccccacctgctggcctaccgttgccttcagtggcccgcattcttccaccagccaccaccctccgaccccctagccctccacaagaagcagcattgagagagctgtggactcaggacccaggactctgtttacgtgcccagtcagccctacctggggaagcgggggttgggtgttttagagacaggagggacatctccgggtgtctttagtcttggctatggtagtttcagtccagtgggtgggatggagaccaacgaccaagtgttcctgcaaggagagcctcccacagctgtcaccatgctccaactcccacacaaacgcttctaccccttccagaacttacccatcatccccccatggatcctttcagtaaaaaccctttcaatttcca

SEQ ID NO: 42000 - DNA, 1786 bp, Homo sapiens
  misc_feature (561)..(561): n is a, c, g, or t
  misc_feature (1341)..(1341): n is a, c, g, or t
  misc_feature (1582)..(1582): n is a, c, g, or t
  misc_feature (1777)..(1777): n is a, c, g, or t
gattggcccagcgtgaatcacttgcccatcccttactgagcatcatggacagggggctggaatgctccgactggctaggccagggtcgcatgccactttcagagaaaggttagtaggtttggtgtatgtgttcgggggttgggggcaaggatccccaagggaaatagaggagcactttgcagagagcctgggtggggtctgaggccatccagatccttcctcagggcctccacctcaggggtctcaggagacccacctggggtagctgctcatctcacaggctggtgcccctctcctcccgcccctgcagatgctgatgtacatgttttatgtcctgcctttctgcggcctggctgcctatgctctcaccttccctggttgctcctggcttccagactgggccttggtgtttgctggaggcatcggccaggtgaggtggcggatgggtgggtgagcaggcatgtgggagggaatttctgtctactcatcaatgcctttggtgtcctccctgggcactgtaatgatgagcccccaagaggccccagccccaggcccaatatnccaggattccctagtctaggggagacaaagccagatacagacactccaagccccatgaaaatagggacaggggctgtgaaggattccagaggggaaaggtttcctagaagcaaggcataggagctaggctttgatgtacgaggatgagttctccaggcagggaagggcattccaggaatgggaacagcacaaggagaagcacagagggagagagtgacttagcagggccataacccaggtaaaggcagataagagaaattggcagctggatgctgaaggctttgaactctgggactaggggcttgtactgagggtgatggggcgtttgaggaggagtttgagcagtgaggggcccagtcagagctaggagcctttttctgggttcctgatgaaaagtgctaaatcctgggccccggccagggaagtagggaccaggaaaacatttagaatccacaggatttgtgccaagacctctggggtggggaagactgggaggaggatctggagccaggtcagagagagatggggtgcagggcccaggagatggggttaggcaagttgggggggactcaccaggtgaggtggctcacacctgtaatcccagcattttgggaggccgaggtgggagggctgcttgagcccaggagtctgagaccagcctaggcaacatggcaaaaacctgtctctacaaaaagtacaaaaattagctgggcatggtagcacgtgcctgctgtgctagctactcgggaggctgagattggaggatcacttgagcccagnaggttggggctgcagtgagccatgattgtgccactgcactccagcctggccaacagagcaagaccctatctctaaatagatagatagatggatggatggatagatagatagatagatagatagatagatagatagatagatagaaattttaaaaataggccaggcatggtggcttatgcctgtaatcctagcactttgggaggccaagatggatggattgcctgacctcaggagttcgagnccagcctgggcaacatgatgataccccatctctactaaaaatacaaaaaattaactgggcatagaggtgcacgcctgtagtcccagctactcagaggaggctgaagcacgagaatcacttgaacccaggaggcagcggaggttgcagtgaaccgagattgcaccactgcactccagcatgggcaacagaatgagnctgtgtctc

SEQ ID NO: 42001 - DNA, 2286 bp, Homo sapiens
tcgaacctggcgccgttacttagggcacctctcttgtgccctgttggaccggggaaaacccagtggcgagctattttatgcagagcagttgccttgggtcccactgtcaccaaggcaaccagtcctgctgctacctgtcacctagagtcacacaccccttccctcatcaggcacacccatgaagacagtgcctccctcctccagctgtaaccatggataccacacatttctcatctcattggcccccaccccagagacctccacctcaacttctggctgtccctaccctgactcaccgccatggagatcaccctccccgaagctgtcgccagggtgacccaacatccagttctccggctctcaccatggaaacaaactgtccctgtccccaggcccactccagttccagaccaccctccatgctccacccccaggcggtttggaccccaccactgttgccatggtgaccaaactctggagtccgaggtaacagaacacctgtccccctaggcttttccttgtggacaacggggccctgttcaccaagctgttgccatagagactgtcaacgttgtcctcatgacaaccagacttccagttctcaggaacttctcattgtgggccagaagtcctgggtgcctcctactagggctaccctactgcaccccatcaggggcctgatggctgccccttccccagacagggctggacttctggagctgctaagccaccctccgtttgcacgttaactctatgccggatagcagctgtgcacgagacaatcttgcaacacccgggcatgtttgtcgtcgtcctacaaatgaggaaaccgagcctatggcgtgccctggtctgttgagatatgcaagcactgagctcctcttttgtcctctgagaccccatctccattctcacccagttcctctctccttccctgacccccacccacatttccctccttagagatccaggagggatggaatgttctttaaaattcaacacccaccaggctctaagcggcgatctgtgctaagaggtcaggacccagccgaagtcctcggcgttgacaggcagctggggggacatgatccatggacaaggccatcccggccgtgggagaccccagtcccgaagtcttgcctgcaggagtactggggtccccctggggccctctttactgtcacgtcatctctaggaaacctatctctgagttttgggaccaggtcggtttgggtttgaattctgcctcttcttgctcactgtgtgaccaagtgacaaactccttctgaacctgtgttctcccactgtaccagggctgttctgtggtccccgtgagtgccaagcatacagtaggggctcaataaatccttgtttcttttgatgaatgagaaaatgaggcagccagtgggtaattcctgtataaatgcactttggtagataagatgttacaagcttggggggcttggggttttttttgttttgtttttttgagatggagtcctgccctgtcgcccaggctggagtgcagtcgtgcaatcttggctcactgcaacctctgcctcccgggttcaagtgattctcctgcctcagcctcccgagtagctgggattacaggtgcctgccaccacacccggctaatttttgtatttttagtagagacagggtttcaccatgttggccaggctggtcttgaactcctgacctcaggtgatctacccacctcggcctcccaaagtgttggggttacaggtgtgagccactgcgcctggccgggcttgatttttattctctttggaagtggggtccttcattcctcccccacctccccaatctcttgctcctctttcttcccccatcctgtgcccactgtctccctttagccacccaccatgggtctgctccttgtcaactctgtcctgactgggtcattgacaagatccagggcatgaaattcgggaaactggaaggggggttcctgtaccaggaagggagagacattacaaactttccctgacatgaatatgtgggctgagggcaggggctgaggaagcactggaagtttctaggatacaacaaagcatgaagagaaaaaatagtgtaaggtcctgaccgtgcacagtggatcatgcctataatcccagcactttaagagaccaaggtgggaggattgcttgagccagaaggtcgaggctgcagtgagccatgattgtaccactgcactccagcttgggcgacggagtgagaccctgtctcaaaaaataaaaataagtaaatctcctcttcctc

SEQ ID NO: 42002 - DNA, 5452 bp, Homo sapiens
gcagggcggtcacggcggcctgcccagggcgcagcggggtcgacctttgtgcggggcgggtccctggcagcctcggcccggactcgccgccaacgaggagccgagcgccctggagaacgcgtcggggctgagccggggtccagcagccgccgctatggacatcccgccgctggccggcaagatcgcggcgctgtcgctgagcgccctcccggtgtcctacgcgctcaaccacgtctcggcgctctcgcaccccctgtgggtggcattgatgagcgccctaatcctgggtctgcttttcgtggcggtctacagcttgtcccatggcgaggtctcctatgacccactctatgctgtcttcgctgtcttcgccttcacctcggttgtggacctcatcatcgctcttcaggaagacagctatgtggtgggcttcatggagttctacaccaaggaggtacttgggggacgaccagggagccccctaccgcactgcccgtctgagtctcccacctgcccccacagggagagccatacctgcgcacagcgcacggagtcttcatctgctactgggatggcactgttcactacctcctctacctggccatggccggcgccatctgcagaaggtgcaggaggcagggagagggtggcccctgaccctgggagagaagttgcatcctcagatggggtcccagggcagggtggagccagaagtgtctgtaggagaaatcaggacgcctctctagggctccagccaggggtggccaggagaaggttccagggaacgtctcaggtgtaggtggtggcctagcattgcttacatccaccctgtgcctgggcagccacttctgttcttggacagagggtctcactgttatttccccgttcaactccctgttgtcccttccatcctgggcaaaactgaaagggacccggagctgggaaacccacggtggtctccaggccctggctggggctctgagattacggagtgactacctgctggtcacccctccatcccctgctcaggaagagataccggaattttggactctactggctgggttccttcgccatgagcatcctggtgttccttacaggaaacattcttggtgcaagaggaacaaagaaagggactcctgcagcgtccggctgacctggcccttgtcatatatctcatccttgctggcttcttcactctgttccggggcctggtggtgcttgattgccccacagatgcctgctttgtctatatctaccagtatgagccatacctgcgggaccctgtggcctaccctaaggtgcagatgctgatgtacatgttttatgtcctgcctttctgcggcctggctgcctatgctctcaccttccctggttgctcctggcttccagactgggccttggtgtttgctggaggcatcggccaggcagacgccgggattgcgccgcctgcagggacctgcccagtcttaaccgggtgtgcggggagcgcagtccgggtgcgtaggggccgctcggcgggggccgcgcgggcaagatggtgtgcgctcgggcggccctcggtcccggcgcgctctgggccgcggcctggggcgtcctgctgctcacagcccctgcgggggcgcagcgtggccggaagaaggtcgtgcacgtgctggagggtgagtcgggctcggtagtggtacagacagcgcctgggcaggtggtaagccaccgtggtggcaccatcgtcttgccctgccgctaccactatgaggcagccgcccacggtcacgacggcgtccggctcaagtggacaaaggtggtggacccgctggccttcaccgacgtcttcgtggcactaggcccccagcaccgggcattcggcagctaccgtgggcgggctgagctgcagggcgacgggcctggggatgcctccctggtcctccgcaacgtcacgctgcaagactacgggcgctatgagtgcgaagtcaccaatgagctggaagatgacgctggcatggtcaagctggacctggaaggcgtggtctttccctaccacccccgtggaggccgatacaagctgaccttcgcggaggcgcagcgcgcgtgcgccgagcaggacggcatcctggcatctgcagaacagctgcacgcggcctggcgcgacggcctggactggtgcaacgcgggctggttgcgcgacggctcagtgcaataccccgtgaaccggccccgggagccctgcggcggcctgggggggaccgggagtgcagggggcggcggtgatgccaacgggggcctgcgcaactacgggtatcgccataacgccgaggaacgctacgacgccttctgcttcacgtccaacctgccggggcgcgtgttcttcctgaagccgctgcgacctgtacccttctccggagctgcgcgcgcgtgtgctgcgcgtggcgcggccgtggccaaggtggggcagctgttcgccgcgtggaagctgcagctgctagaccgctgcaccgcgggttggctggccgatggcagtgcgcgctaccccatcgtgaacccgcgagcgcgctgcggaggccgcaggcctggtgtgcgcagcctcggcttcccggacgccacccgacggctcttcggcgtctactgctaccgcgctccaggagcaccggacccggcacctggcggctggggctggggctgggcgggcggcggcggctgggcagggggcgcgcgcgatcctgctgcctggacccctctgcacgtctaggctgggagtaggcggacagccagggcgcttgaccactggtctagagccctgtggtcccctggagcctggccacgcccttgaagccctggacactggccacattccctgtggtcccttacaaactaactgtgcccctggggtccctgaagactggctagtcctggcagaacagtactttggagttccctggagcctggccagccctcacctcttctggatagaggattcccccaactccccaactttctccatgagggtcacgccccctgaggacctcaggaggccagcagaacccgcaggctcctgaagactggccacgcctcctgagaccacttggaaacagaccaactgcccccgtggtcgcctggtggctggacccccgggattgactagagaccggccgtacaccttctgcatctcactggagactgaacactagtcccttgcggtcacgtgggacactgggcgcctcctcctccccctcctcctcacctggagagactacaggaacttcagggtcactccccgtggtcacatggaggttgtgggccgaggcgcttattttcccttatggtgacctgagtcctggagactcccattctccccctctccctgagagtcccctgcagtttctgggtaacagggcacacccctctagtttcatgggcgagcacccccatctgccacctcagactgacacacagccagctggctcacttactgggggccacgtcccacccctcagatatttctttgaagggagagcaaacccaccctgtcctctgacgtccctttcccaactgtcaccaaacaaggcccactccagttccagaccaccctccatgctccacccccaggcggtttggaccccaccactgttgccatggtgaccaaactctggagtccgaggtaacagaacacctgtccccctaggcttttccttgtggacaacggggccctgttcaccaagctgttgccatagagactgtcaacgttgtcctcatgacaaccagacttccagttctcaggaacttctcattgtgggccagaagtcctgggtgcctcctactagggctaccctactgcaccccatcaggggcctgatggctgccccttccccagacagggctggacttctggagctgctaagccaccctccgtttgcacgttaactctatgccggatagcagctgtgcacgagacaatcttgcaacacccgggcatgtttgtcgtcgtcctacaaatgaggaaaccgagcctatggcgtgccctggtctgttgagatatgcaagcactgagctcctcttttgtcctctgagaccccatctccattctcacccagttcctctctccttccctgacccccacccacatttccctccttagagatccaggagggatggaatgttctttaaaattcaacacccaccaggctctaagcggcgatctgtgctaagaggtcaggacccagccgaagtcctcggcgttgacaggcagctggggggacatgatccatggacaaggccatcccggccgtgggagaccccagtcccgaagtcttgcctgcaggagtactggggtccccctggggccctctttactgtcacgtcatctctaggaaacctatctctgagttttgggaccaggtcggtttgggtttgaattctgcctcttcttgctcactgtgtgaccaagtgacaaactccttctgaacctgtgttctcccactgtaccagggctgttctgtggtccccgtgagtgccaagcatacagtaggggctcaataaatccttgtttcttttgatgaatgagaaaatgaggcagccagtgggtaattcctgtataaatgcactttggtagataagatgttacaagcttggggggcttggggttttttttgttttgtttttttgagatggagtcctgccctgtcgcccaggctggagtgcagtcgtgcaatcttggctcactgcaacctctgcctcccgggttcaagtgattctcctgcctcagcctcccgagtagctgggattacaggtgcctgccaccacacccggctaatttttgtatttttagtagagacagggtttcaccatgttggccaggctggtcttgaactcctgacctcaggtgatctacccacctcggcctcccaaagtgttggggttacaggtgtgagccactgcgcctggccgggcttgatttttattctctttggaagtggggtccttcattcctcccccacctccccaatctcttgctcctctttcttcccccatcctgtgcccactgtctccctttagccacccaccatgggtctgctccttgtcaactctgtcctgactgggtcattgacaagatccagggcatgaaattcgggaaactggaaggggggttcctgtaccaggaagggagagacattacaaactttccctgacatgaatatgtgggctgagggcaggggctgaggaagcactggaagtttctaggatacaacaaagcatgaagagaaaaaatagtgtaaggtcctgaccgtgcacagtggatcatgcctataatcccagcactttaagagaccaaggtgggaggattgcttgagccagaaggtcgaggctgcagtgagccatgattgtaccactgcactccagcttgggcgacggagtgagaccctgtctcaaaaaataaaaataagtaaatctcctcttcctc

SEQ ID NO: 42003 - DNA, 877 bp, Homo sapiens
gattggcccagcgtgaatcacttgcccatcccttactgagcatcatggacagggggctggaatgctccgactggctaggccagggtcgcatgccactttcagagaaaggttagtaggtttggtgtatgtgttcgggggttgggggcaaggatccccaagggaaatagaggagcactttgcagagagcctgggtggggtctgaggccatccagatccttcctcagggcctccacctcaggggtctcaggagacccacctggggtagctgctcatctcacaggctggtgcccctctcctcccgcccctgcagatgctgatgtacatgttttatgtcctgcctttctgcggcctggctgcctatgctctcaccttccctggttgctcctggcttccagactgggccttggtgtttgctggaggcatcggccaggcacagttctcgcacatgggggcttccatgcacctgcgcacacccttcacctaccgtgtgcctgaggacacctggggctgcttcttcgtgtgcaatctgctgtatgcgctgggcccccacctgctggcctaccgttgccttcagtggcccgcattcttccaccagccaccaccctccgaccccctagccctccacaagaagcagcattgagagagctgtggactcaggacccaggactctgtttacgtgcccagtcagccctacctggggaagcgggggttgggtgttttagagacaggagggacatctccgggtgtctttagtcttggctatggtagtttcaagctgtcaccatgctccaactcccacacaaacgcttctaccccttccagaacttacccatcatccccccatggatcctttcagtaaaaaccctttcaatttcca

SEQ ID NO: 42004 - DNA, 1447 bp, Homo sapiens
gcagggcggtcacggcggcctgcccagggcgcagcggggtcgacctttgtgcggggcgggtccctggcagcctcggcccggactcgccgccaacgaggagccgagcgccctggagaacgcgtcggggctgagccggggtccagcagccgccgctatggacatcccgccgctggccggcaagatcgcggcgctgtcgctgagcgccctcccggtgtcctacgcgctcaaccacgtctcggcgctctcgcaccccctgtgggtggcattgatgagcgccctaatcctgggtctgcttttcgtggcggtctacagcttgtcccatggcgaggtctcctatgacccactctatgctgtcttcgctgtcttcgccttcacctcggttgtggacctcatcatcgctcttcaggaagacagctatgtggtgggcttcatggagttctacaccaaggagggagagccatacctgcgcacagcgcacggagtcttcatctgctactgggatggcactgttcactacctcctctacctggccatggccggcgccatctgcagaaggaagagataccggaattttggactctactggctgggttccttcgccatgagcatcctggtgttccttacaggaaacattcttggcaaatacagctccgagatcaggcctgccttcttcctcaccatcccctacctgctggtgccatgctgggctggcatgaaggtcttcagccagccccgggcgctaacccgctgcaccgccaacatggtgcaagaggaacaaagaaagggactcctgcagcgtccggctgacctggcccttgtcatatatctcatccttgctggcttcttcactctgttccggggcctggtggtgcttgattgccccacagatgcctgctttgtctatatctaccagtatgagccatacctgcgggaccctgtggcctaccctaaggtgcagatgctgatgtacatgttttatgtcctgcctttctgcggcctggctgcctatgctctcaccttccctggttgctcctggcttccagactgggccttggtgtttgctggaggcatcggccaggcacagttctcgcacatgggggcttccatgcacctgcgcacacccttcacctaccgttgccttcagtggcccgcattcttccaccagccaccaccctccgaccccctagccctccacaagaagcagcattgagagagctgtggactcaggacccaggactctgtttacgtgcccagtcagccctacctggggaagcgggggttgggtgttttagagacaggagggacatctccgggtgtctttagtcttggctatggtagtttcaagctgtcaccatgctccaactcccacacaaacgcttctaccccttccagaacttacccatcatccccccatggatcctttcagtaaaaaccctttcaatttcca

SEQ ID NO: 42005 - DNA, 935 bp, Homo sapiens
gattggcccagcgtgaatcacttgcccatcccttactgagcatcatggacagggggctggaatgctccgactggctaggccagggtcgcatgccactttcagagaaaggttagtaggtttggtgtatgtgttcgggggttgggggcaaggatccccaagggaaatagaggagcactttgcagagagcctgggtggggtctgaggccatccagatccttcctcagggcctccacctcaggggtctcaggagacccacctggggtagctgctcatctcacaggctggtgcccctctcctcccgcccctgcagatgctgatgtacatgttttatgtcctgcctttctgcggcctggctgcctatgctctcaccttccctggttgctcctggcttccagactgggccttggtgtttgctggaggcatcggccaggcacagttctcgcacatgggggcttccatgcacctgcgcacacccttcacctaccgtgtgcctgaggacacctggggctgcttcttcgtgtgcaatctgctgtatgcgctgggcccccacctgctggcctaccgttgccttcagtggcccgcattcttccaccagccaccaccctccgaccccctagccctccacaagaagcagcattgagagagctgtggactcaggacccaggactctgtttacgtgcccagtcagccctacctggggaagcgggggttgggtgttttagagacaggagggacatctccgggtgtctttagtcttggctatggtagtttcagtccagtgggtgggatggagaccaacgaccaagtgttcctgcaaggagagcctcccacagctgtcaccatgctccaactcccacacaaacgcttctaccccttccagaacttacccatcatccccccatggatcctttcagtaaaaaccctttcaatttcca

SEQ ID NO: 42006 - DNA, 909 bp, Homo sapiens
ataccaactttattctaattttgaagctaactggacactccacttatgtattgacatgtttaactaattacatcaaatcacgctatgcaagaaaattaatacacattccattagtaggaatgaatacttacttaaagatcaggcctggccaccttacaactccaaaagtttgggaagtacacaagataaaattgatatcttttttttaaagaaaggaatgtcaacagataaaaacagatcaagtaggtaccagaatatcatcaaaatgtcacttagcaaaaatctagtttcattgggaatattcaatattgtacaaatcttcaaataaaagataattgctaatcatacagtgacttatgaaaacatttgttacaggattcaatctaaacagattttattatatctatatctgacagatatagtaatgttaataagagccaactgttggaaattgtactggatattacaatattgttacacagaaatggttattgaacaatattcgttaaaatgggagtttatactagttgcaattaactcccaccattggaaatgcatatttattttaaaatatcccaaaaatacacacacaaaaaccttaatgcatacataaataaatcttacttcttagatatttgaatcattttaattagccttacttttgagaatatttcattttgaggccagagaattgaagtttgtccttaacattaatctaactgctacttaagtgattctcatttagactgtagctctttcaatacaaaggcctaactccttttaaagttctttcctagatctccttccctgaataacataaataatgttgagtatttgttgaattgtatctaacaaatatctggaatcacaccatcttccatttataatgagaagttaggtctgtcagat

SEQ ID NO: 42007 - DNA, 413 bp, Homo sapiens
attattatcacttctactattatcattctcattgctcccaaattacattagctagaagcaattcagttcacataaaacatacagataatgaaagttttaataacaatatcactctgtttccagaaagacctaatatttgctgttgtggtggcaaataccttgcccagagctcccagatagtctgccacctcccccgtcctccctccagggcatgtacagtaaagttggatgattgaagtgttccagatgactcggctttgggcactcaaactgctttgtccccagcacctggtttattcctcctcctctcttccacaccttgttttccttctttgaaggaatggagggacgcttcagcagaaggagtaggaaaggatgcaatggtggttggttgtaataaacaggagcctggg

SEQ ID NO: 42008 - DNA, 395 bp, Homo sapiens
taagctgttatatttaaaaatgcttgaaaaaataagagttgttctccagaaattattcattttcctatgattagcacagctgagaccttacaggtgcactgctattgagtattctcccaaccttttaaattttataggtctaattgttggtaaggtattgtggaaggagttctaagacttgctcctgctttaattgacgttgcaataaaatataataaattttggtcagagtagccaggggggttgttagaaagaaaaaaaagaattgaaggtaagagaatgatcaccaaagtaaatggttaattagaagtgttttctgctgggcactcagggagatactgacatacactccattctcccttgctaatatctagatttttttagtacctctaata

SEQ ID NO: 42009 - DNA, 445 bp, Homo sapiens
aatattagagtacagtgtcttaaaatattcatgttttacttggatatctagaagataaaaggcattctgtattttatgtcaactattgctagtagcttttacctatgggagtaaatccgtggaagaagttttgctcaatgtatgctaacatgaagcagctttctgttttcagtttattccctcagatattagtttgttttttctctttttaatttgggaaagcaaaatgaggccagcattcgttctatgtttgtgttagagcagcggtctccagaatgtattgaagggccacaagtgttataaagttaaatgatgactgctgactttcagtcttcctctctatacttaggtacttctttttaaaaatggagttttgttacaggtttaggatgatttttttttttacaaaataaaaatttaataaattaattttcagaaatcaata

SEQ ID NO: 42010 - DNA, 464 bp, Homo sapiens
atcccaggcacagcataattatccaatcttgcctgacatgcgaggattagaaagaaatgacatagcatctggctctgctactcttggtcctcatagttttcatagggaagctgcagacccatatggattgctgtcttatcagaccacctgagcagagcaggttttgtgtgtatttctgtcttctttcattgaaaatattagcctagatttccagaaatccagcatcttcacgggcattggtgctgcaggagagccatttttcactgtgacagggtcagcttaactgccctctggtgtagttatttgattgcagttttctttgatataaactgctctgagatgtccttaaaaaaattgtggatgttgacagacttcaaagtatgttggaattaatgaccaggtttctcctagcacccctctgatctgattttagatatagtctgtcttcatagtggtttgtcaga

SEQ ID NO: 42011 - DNA, 406 bp, Homo sapiens
ggttctttgaaaacatccattaagattaataaaacttgaaatgattaaagttctgccaaaattttaaaaaaagacacaaacagtattagaaatggaaaaatgaggcctaaatagagacgctgcagagattagaccattaacagaaatgaacaattttatggtaataaatttaaatgttggtaaaatgaatcaattcctagaagacatcaaacatcaacttaccaaaactgactctggaagagacagaaaatcaaataggcacagaccatcaagaaaatcgaatcagttattaaataatcttctcaaaataaaaacactaggcccacatgacatagatgacattataggtaaatcctaccaaatagacacacaatcctgttcttaaactatcaaaagtttaaaaaaa

SEQ ID NO: 42012 - DNA, 266 bp, Homo sapiens
agtatatcttatttcatgtgatattttcagattgcagttgactatggataattgaaactgaggaaagcgaaatcacacataaggggggaactactatattttattaagggaaacaatctgttcccataaatcaaacctcagctagcagaattaaaggtaaacttgaggagttagggatcatcacggtgatgggaagaaggactagaatgcagctctacacagagcagcacacggagtcttgcgttgtgaattttaggtccagattg

SEQ ID NO: 42013 - DNA, 1217 bp, Homo sapiens
aagtgtttgctgatatagaaacggaataacggcgctgtgggctggggaggacggagttgccttcaggcttctggtctccagccgcggggcactcacagctgccgctgtgaaaatgcagacctgtggggcaggaattccgagtccggggtggagcgcgatgtggaatctgactcgcttgaaacagcaccgcggtggattcggatccgggtgagtagggaaatgcgcctcagcccctcccacgggccgcccacggattccaggatccgaaaacgcttccagctcgctccgccaccccaggaaggcagcgcctgcctctgggcggttctgacggaaactggctcctccgcctgcaggaaaactcacaactaaggggccaggagaaagcctctcagggtcccgccccttcagtgaggatcctaaatttacatcccgagtgtggccccatcaaagactggagcgacgttgactgaaatgatacaagaccagcagggcgcaggcgctgcggccctcagaatgcggtgacagcgccgcctcgcgtcccttccccgacctgccccaggcggacgcggtgacgtgtgttggcctcgaggctggaatacaccggggatcaagtgcagagaagggagaaagtagggaaggatggctggggggtgggggtggggggagcgtgttgaagaaaaaagggaagagagaggaaggaaagaggagaaaaaaggtgaagaagagaataacatttaaaatatagagttttattatttctaacttttatttttggtttttatctagttttggtatgtatgaatattcttaacatagctttatctctgtctctctctctgaatctgtaaatatacagtaatatatatacacacgtaagcctctacctgccgatgtgtcagggtgtgtctcttgggcacaaaaacaaggtttttgttttgttttgttttacataagcaaagtacaaatctcaaagaagatatattttaaaagccattttattgggacttgctttgcatacaatcaaatgtatctaaaatgtatctatttgaaatgcatagctcgttgtgttttggctgttgtacacacccacatctccactaccacaatgaagatgtagaacatttccatcgtcctccaaagaactgctatgcaatacaattttatagggtcaataaaagaggtaagatcagttttaagtattgttatgagaagatgtg

SEQ ID NO: 42014 - DNA, 443 bp, Homo sapiens
gagagaatagctataactaagtcagagtccagtgggataggtactaaggacaatctcagtagcagctatctagaggtgaacttttccatctaatctatttaggcctcaagagcctttcatttttgaagctatctcaagtgacagcagaacaattaacaattggaaaaaagattaggattcatatttatcaacaaagagaggggttgggcagtgtctcacgtctgtaatctcagcactttgggaagctgaggtgggagcatcacttgaggctaggagtttgagaccagtctgggcaacacagtgagaccccatctgtacaaaaaataatttttaaaaattagccaggcatggtggcacatgcctatagtcctagatactcaggaggctgagacaggaggatcacttgagctcaggagtttgagatgtgccattgcactccagcc

SEQ ID NO: 42015 - DNA, 422 bp, Homo sapiens
gcagggtgaccttaggagagtgacttacctcctctgtgcctcagtttccacatgcctggaataaggacaataatagcatccactttataatattgtggcaaaggtaatctgaaatgaggcatgtaaaagtgttcataataggatctggcacatagtaagtttcaataaatgttagctctgatcaacttcatcattgtcatcattgtaatcaccagcacagacaagaagcaggcatgccttgctctgaaaataggttgcaagaatttcaaacagtggttttcaaacctggctacatattaaaatcagctgccccagattccccaaccctggaccaattagatcagaatctcccaggtggtattgtttaaagctctttacatgattccagtgtgctaccagggttgagactcactgatgttgag

SEQ ID NO: 42016 - DNA, 491 bp, Homo sapiens
tggagtctccaccacctattattcctgtctgtatgttaatgtgtatacattgtttagctccttcttataagtgagaacatgcagtgaaattaaaattttagaactgacaaatataatacctgaaataaaaatctactcagtggatttaaaagtagattgcactgtccacaatagctaagatttggaagcaacctacgtgtccatcaacagatgaatggataaagaaaatgtggtatatatacacaatggagtactattcagtcataaaaaagaatgagatcctgtcatttgccacaacatggatggaattggagcttattatgttaactgaaataagccaggcacagaaagacaaacatcacatgttctcacttattcgtgggatcgaaagatcaaaacaattgaactcatggacacagagaatagaggatggacatcgagagtagagggtagtgggggactgagggggagacagggatggttagtaagta

SEQ ID NO: 42017 - DNA, 625 bp, Homo sapiens
tcatggacaactgaactttttgaaaaataatatattttaagtgaaagttccccaaaatgatacatttaccatagaaaatttacagcagtgcatgctagttttatattaaacctttcagtaccttctatttctcccttgttcaggttataagcataagtcctgaaatgctattaaaagcagtgactcaccttgtttaccttaagtttgaatacagagtataacaaaactaccattcctgacaagagtggcctctagaccggtagctctcaaccaggagtgattttgtccctaggagacatttggcaacgtctgaacaatttttggctatcataatcgggttctactggcatctagtgggtagaggccagggatgcttctaatgcacaggagagcccctcacaacaaagaattctctgtcccaaaatgtctatatgttgctcttgagaaactgctctagattatagatcatactagccaagtattgtggtgcacacctatagtcccctgtagtcctgactacttgggaggctgaagcagaaggattgcttgagcccaggagtgggagaccacatagagttatgaccatgccaccgcactgtgtagccagggcaacagccagcctggg

SEQ ID NO: 42018 - DNA, 753 bp, Homo sapiens
gaaagatgtataatgtagagaactgacttctctcttaaaaagtacagagagcctgtgctgtgaacccccttcaatgggaaaaagctgcagtggtgatggcaggctcctaaagactgctgctaaaagacacaagaattatacagtttccctctataagtgaatccaaaattcactgacgaattcagagattgagggcacttgcttgaaatcaaggtgctccaacttagtttaagacctccagactctaactttatagatcatctcttctagagtgtgcatggatgtgtgttgcagggtggagaagtggggagaagtgtatagtagtacacggggggaagaggggacctccatgtccctttgttggatacatattacagaaatatgtgccactcactttttgttggttctgaatcttcctgaagtgtactgacatttgggctgcacagagccccacaccttcacttacacctcctcttctagaattgctttgctctatttttgtatatataaatatgttatgatgattattaataatgttaatgatattgctgcaaatggtgccatatataaggttaggcttcttggaacatttataaacccaaaccaatacctgtaacctcttatgttgctttcagatccttcaattttaagtaactttttaatcttacaagtctgcttgattgtactttacacttatctaccctgaaaagctctgcccagttctctgggtcaagctggatggtgatgagtagc

SEQ ID NO: 42019 - DNA, 350 bp, Homo sapiens
tttcgattatactatagagcaaaaaaaatcgtgtaggtgtggataagtgagtatgtatgtgagtgtgccatgtggatttgcttgtatgaagacatgaagaaaatacaaagggaaactcttatttctgagaggtaggattgtgggtgagttttttcctttatggttgtttttattttagatattttctacagtgatcatgtattttattataaaagtgttataaaaatgagtttttacatgctatatagaactaaaaacacttacaaatgcaaaaacattatgtcttttgaaatgcaaggcctctacagaaacagtatccctcctgtttttaaaatcacacttttgatacc

SEQ ID NO: 42020 - DNA, 1433 bp, Homo sapiens
atactgcgccggacagacccagttgcctggtgctgcggcccggcgtgggcctcgtgggcagagccagagccagagccatggacagcctcttcgtggaggaggtggccgcctccttggtcagggagttcctcagcagaaagggcttaaagaagacatgtgtgaccatggaccaggaacgcccacgctctgacctcagcataaacaacagaaatgatcttcgaaaggttttgcatcttgaatttctctataaggagaacaaggcaaaggaaaatcctctaaaaacaagccttgaactcatcaccagatactttctggatcactttggaaatacggctaacaatttcactcaagataccccaatccctgcactctcagttccaaagaaaaataacaaagtgccatcaagatgctcagagactacactggtaaatatatatgacctttcagatgaagatgcaggatggagaacatcattgtcagaaacaagcaaagccagacatgacaatcttgatggagatgtacttggtaattttgtatcatctaaaaggcccccgcacaaaagtaagcccatgcagacggtcccgggtgaaactcctgtgttgacttctgcatgggagaagatagacaagcttcactcggagccttccttggatgtgaagaggatgggagagaattccaggccaaagtctggtctgattgtgcgaggcatgatgtctgggcccatcgccagctccccacaggattcttttcacagacactatctgagacggtcctcaccgtcaagcagctccacccaaccccaagaagagagccggaaggtccctgagctctttgtctgcacccaacaggacattctggcttcgagcaacagctccccctccaggacctccctgggtcagcttagtgaactgaccgtagaaaggcagaaaaccactgccagcagccctccccatctgcccagcaaacggctgcccccatgggacagggccaggccgagggatccctccgaggacaccccagcagtggacggcagcacagacatggacaggatgcccttgaagctctacttgcctggtggtaattccaggatgacccaggagaggctggaaagagcgttcaaacggcagggcagccagcccgcacctgtcaggaaaaatcagttgctgccgtctgacaaggtggatggtgagctgggtgccctgcggctcgaggatgtggaggatgagttgataagggaagaggtcatcctgtcgccagtcccatcagtgctcaagttgcagacagcatcaaaaccaattgacctctcagtagcaaaggaaataaagacccttctgtttggttccagcttttgctgtttcaatgaagaatggaaacttcagagtttttcctttagtaacacagcctcattaaaatacggcatagtgcagaacaag

SEQ ID NO: 42021 - DNA, 873 bp, Homo sapiens
ccctgccttatccacctccctgccagccgcctctctgatatcagtgactcgcccatggggtgcagccctcccctgttggggccacacaggatgctggaattctggggtctcaggcccagagctgccgtagggccacctgaaccctgacgactccagcggtaccggccagcctttcactcacatacagcttacgcttcacagtttgacctgctatgaggacctggtgacttttcttcaacaaagcattcatcagtttgaagtgggcccctatggctgcatcctgctcaccctttctgccatcctgtccaggtctacagagctcatccgccaggactttgatgtccccaccagccacctgattggagcacatggctactgtacacaggtcagggggcgctgtggggcccaggtggtccttccccctcctctgtccctcagagagggagaggtcctcctccctcctcttgccccagaaaaagacaagtctttcttgcctctgccaacactcttcaagcagctttcacgtgcccacctctgctgggtttcactgtcatgtcatggagacccagaaagagagctcagtttagcttctgtttctggacagctttatgtgcactgatgtatgtgctcagagctgcagaggatgcaaaagaggctgaactcagaccaaagtgctacacagcccggagcccaggacacagggagtgatgtctcaggcatgggccaggggaccctgggtccagctggggagatgatggccctggcctcttctatgtttgcacaaggtattgtctttatagccacccttccctttgcatctttacagaggggccctcaatggacctcacaggggcaaagaagaccctgagcaca

SEQ ID NO: 42022 - DNA, 2740 bp, Homo sapiens
atactgcgccggacagacccagttgcctggtgctgcggcccggcgtgggcctcgtgggcagagccagagccagagccatggacagcctcttcgtggaggaggtggccgcctccttggtcagggagttcctcagcagaaagggcttaaagaagacatgtgtgaccatggaccaggaacgcccacgctctgacctcagcataaacaacagaaatgatcttcgaaaggttttgcatcttgaatttctctataaggagaacaaggcaaaggaaaatcctctaaaaacaagccttgaactcatcaccagatactttctggatcactttggaaatacggctaacaatttcactcaagataccccaatccctgcactctcagttccaaagaaaaataacaaagtgccatcaagatgctcagagactacactggtaaatatatatgacctttcagatgaagatgcaggatggagaacatcattgtcagaaacaagcaaagccagacatgacaatcttgatggagatgtacttggtaattttgtatcatctaaaaggcccccgcacaaaagtaagcccatgcagacggtcccgggtgaaactcctgtgttgacttctgcatgggagaagatagacaagcttcactcggagccttccttggatgtgaagaggatgggagagaattccaggccaaagtctggtctgattgtgcgaggcatgatgtctgggcccatcgccagctccccacaggattcttttcacagacactatctgagacggtcctcaccgtcaagcagctccacccaaccccaagaagagagccggaaggtccctgagctctttgtctgcacccaacaggacattctggcttcgagcaacagctccccctccaggacctccctgggtcagcttagtgaactgaccgtagaaaggcagaaaaccactgccagcagccctccccatctgcccagcaaacggctgcccccatgggacagggccaggccgagggatccctccgaggacaccccagcagtggacggcagcacagacatggacaggatgcccttgaagctctacttgcctggtggtaattccaggatgacccaggagaggctggaaagagcgttcaaacggcagggcagccagcccgcacctgtcaggaaaaatcagttgctgccgtctgacaaggtggatggtgagctgggtgccctgcggctcgaggatgtggaggatgagttgataagggaagaggtcatcctgtcgccagtcccatcagtgctcaagttgcagacagcatcaaaaccaattgacctctcagtagcaaaggaaataaagacccttctgtttggttccagcttttgctgtttcaatgaagaatggaaacttcagagtttttcctttagtaacacagcctcattaaaatacggcatagtgcagaacaagggtggtccttgcggagtcctggcagctgtccaaggctgtgtcctacagaaactcctgtttgaaggagatagcaaagccgactgtgctcagggactgcagccttcagatgcccaccggacccgctgcctcgtcctggccctcgcagacattgtgtggcgggcagggggccgagagagagccgttgttgcactggcttcgagaacacagcagttcagtccaacagggaaatacaaagcagatggagtcttagaaacacttacgcttcacagtttgacctgctatgaggacctggtgacttttcttcaacaaagcattcatcagtttgaagtgggcccctatggctgcatcctgctcaccctttctgccatcctgtccaggtctacagagctcatccgccaggactttgatgtccccaccagccacctgattggagcacatggctactgtacacaggaacttgtcaatctgctcctgactgggaaagctgtgtccaaacgttttcaacgatgtggttgagctggattctggggatgggaacatcacacttctcagaggcattgctgcacgcagtgatattggcttcttatctctctttgagcattacaacatgtgccaggttggctgcttcctgaagaccccgaggttccccatctgggtggtttgcagtgagagccacttcagcatcctctttagcctgcagccggggctcctgcgtgactggaggactgagaggctctttgacttgtactactacgatggcctggccaaccagcaggagcagatccggctgaccattgacaccacccaaaccatctctgaggacacagacaacgaccttgtcccacccctcgagctctgcatcagaaccaagtggaagggggcatcagtgaactggaacggctcagaccccatcctgtgaccgttggatgtgggtaaaccctgtggtccaccactcatcacctcatcaccgaggatgacagctgaaccccaagcctctggggcaggtctcatgtaccccaacctgggtcagcatgactgcagaagcatccagagcctccctgccccttccatgaagggcccacccaagactgtgctggggacccagtgtgttgctgggtcccctcccagctgagctgtgactgctgagtactggaaggaggttgccagggtctctgctacctttgtctgcatccctcccttgctccctgctgggtggtccctcacccaggcctccaatgtggttggccctggggactcattacttctggtagctggctttctataaaaatgggtcaaacccaaatcaa

SEQ ID NO: 42023 - DNA, 1077 bp, Homo sapiens
  misc_feature (41)..(41): n is a, c, g, or t
  misc_feature (69)..(69): n is a, c, g, or t
  misc_feature (80)..(80): n is a, c, g, or t
agcccacaggaatacaagcagatgaatctaaaaaaattacnctcacagttgcccgctatgagacctgtnactttctcaanaagcatcatcatttgaagtgggcccctatggctgcatcctgctcaccctttctgccatcctgtccaggtctacagagctcatccgccaggactttgatgtccccaccagccacctgattggagcacatggctactgtacacaggaacttgtcaatctgctcctgactgggaaagctgtgtccaaacgttttcaacgatgtggttgagctggattctggggatgggaacatcacacttctcagaggcattgctgcacgcagtgatattggcttcttatctctctttgagcattacaacatgtgccaggttggctgcttcctgaagaccccgaggttccccatctgggtggtttgcagtgagagccacttcagcatcctctttagcctgcagccggggctcctgcgtgactggaggactgagaggctctttgacttgtactactacgatggcctggccaaccagcaggagcagatccggctgaccattgacaccacccaaaccatctctgaggacacagacaacgaccttgtcccacccctcgagctctgcatcagaaccaagtggaagggggcatcagtgaactggaacggctcagaccccatcctgtgaccgttggatgtgggtaaaccctgtggtccaccactcatcacctcatcaccgaggatgacagctgaaccccaagcctctggggcaggtctcatgtaccccaacctgggtcagcatgactgcagaagcatccagagcctccctgccccttccatgaagggcccacccaagactgtgctggggacccagtgtgttgctgggtcccctcccagctgagctgtgactgctgagtactggaaggaggttgccagggtctctgctacctttgtctgcatccctcccttgctccctgctgggtggtccctcacccaggcctccaatgtggttggccctggggactcattacttctggtagctggctttctataaaaatgggtcaaacccaaatcaa

SEQ ID NO: 42024 - DNA, 1069 bp, Homo sapiens
gtggccaggaatgggatcacctggtcacactcccagctgaagcagaacgtggagccaccagagccaggaaaaggaagtgactgtttgaagtgggcccctatggctgcatcctgctcaccctttctgccatcctgtccaggtctacagagctcatccgccaggactttgatgtccccaccagccacctgattggagcacatggctactgtacacaggaacttgtcaatctgctcctgactgggaaagctgtgtccaaacgttttcaacgatgtggttgagctggattctggggatgggaacatcacacttctcagaggcattgctgcacgcagtgatattggcttcttatctctctttgagcattacaacatgtgccaggttggctgcttcctgaagaccccgaggttccccatctgggtggtttgcagtgagagccacttcagcatcctctttagcctgcagccggggctcctgcgtgactggaggactgagaggctctttgacttgtactactacgatggcctggccaaccagcaggagcagatccggctgaccattgacaccacccaaaccatctctgaggacacagacaacgaccttgtcccacccctcgagctctgcatcagaaccaagtggaagggggcatcagtgaactggaacggctcagaccccatcctgtgaccgttggatgtgggtaaaccctgtggtccaccactcatcacctcatcaccgaggatgacagctgaaccccaagcctctggggcaggtctcatgtaccccaacctgggtcagcatgactgcagaagcatccagagcctccctgccccttccatgaagggcccacccaagactgtgctggggacccagtgtgttgctgggtcccctcccagctgagctgtgactgctgagtactggaaggaggttgccagggtctctgctacctttgtctgcatccctcccttgctccctgctgggtggtccctcacccaggcctccaatgtggttggccctggggactcattacttctggtagctggctttctataaaaatgggtcaaacccaaatcaa

SEQ ID NO: 42025 - DNA, 2374 bp, Homo sapiens
atactgcgccggacagacccagttgcctggtgctgcggcccggcgtgggcctcgtgggcagagccagagccagagccatggacagcctcttcgtggaggaggtggccgcctccttggtcagggagttcctcagcagaaagggcttaaagaagacatgtgtgaccatggaccaggaacgcccacgctctgacctcagcataaacaacagaaatgatcttcgaaaggttttgcatcttgaatttctctataaggagaacaaggcaaaggaaaatcctctaaaaacaagccttgaactcatcaccagatactttctggatcactttggaaatacggctaacaatttcactcaagataccccaatccctgcactctcagttccaaagaaaaataacaaagtgccatcaagatgctcagagactacactggtaaatatatatgacctttcagatgaagatgcaggatggagaacatcattgtcagaaacaagcaaagccagacatgacaatcttgatggagatgtacttggtaattttgtatcatctaaaaggcccccgcacaaaagtaagcccatgcagacggtcccgggtgaaactcctgtgttgacttctgcatgggagaagatagacaagcttcactcggagccttccttggatgtgaagaggatgggagagaattccaggccaaagtctggtctgattgtgcgaggcatgatgtctgggcccatcgccagctccccacaggattcttttcacagacactatctgagacggtcctcaccgtcaagcagctccacccaaccccaagaagagagccggaaggtccctgagctctttgtctgcacccaacaggacattctggcttcgagcaacagctccccctccaggacctccctgggtcagcttagtgaactgaccgtagaaaggcagaaaaccactgccagcagccctccccatctgcccagcaaacggctgcccccatgggacagggccaggccgagggatccctccgaggacaccccagcagtggacggcagcacagacatggacaggatgcccttgaagctctacttgcctggtggtaattccaggatgacccaggagaggctggaaagagcgttcaaacggcagggcagccagcccgcacctgtcaggaaaaatcagttgctgccgtctgacaaggtggatggtgagctgggtgccctgcggctcgaggatgtggaggatgagttgataagggaagaggtcatcctgtcgccagtcccatcagtgctcaagttgcagacagcatcaaaaccaattgacctctcagtagcaaaggaaataaagacccttctgtttggttccagcttttgctgtttcaatgaagaatggaaacttcagagtttttcctttagtaacacagcctcattaaaatacggcatagtgcagaacaagggtggtccttgcggagtcctggcagctgtccaaggctgtgtcctacagaaactcctgtttgaaggagatagcaaagccgactgtgctcagggactgcagccttcagatgcccaccggacccgctgcctcgtcctggccctcgcagacattgtgtggcgggcagggggccgagagagagccgttgttgcactggcttcgagaacacagcagttcagtccaacagggaaatacaaagcagatggagtcttagaaacacttacgcttcacagtttgacctgctatgaggacctggtgacttttcttcaacaaagcattcatcagtttgaagtgggcccctatggctgcatcctgctcaccctttctgccatcctgtccaggtctacagagctcatccgccaggactttgatgtccccaccagccacctgattggagcacatggctactgtacacaggtcagggggcgctgtggggcccaggtggtccttccccctcctctgtccctcagagagggagaggtcctcctccctcctcttgccccagaaaaagacaagtctttcttgcctctgccaacactcttcaagcagctttcacgtgcccacctctgctgggtttcactgtcatgtcatggagacccagaaagagagctcagtttagcttctgtttctggacagctttatgtgcactgatgtatgtgctcagagctgcagaggatgcaaaagaggctgaactcagaccaaagtgctacacagcccggagcccaggacacagggagtgatgtctcaggcatgggccaggggaccctgggtccagctggggagatgatggccctggcctcttctatgtttgcacaaggtattgtctttatagccacccttccctttgcatctttacagaggggccctcaatggacctcacaggggcaaagaagaccctgagcaca

SEQ ID NO: 42026 - DNA, 1926 bp, Homo sapiens
ttgctgaagctcccggccaaataaagcccttccttctttaactcagtgtctgaggggttttgtctgcggcttgtcctgctacatttcttggttccctgactgggaagcaaggtgattaatggacggtcaaggcagccccttaggcggcttaggcctgccctgtgggggactctggccagcttgagcgacgcagatcctgagagcgctcccgggtaggcaactgccccggtggaatgccttgccagagcagtgcgtggcaggcccccgtggaggatcaatgtggtggctgatcaccaggaaggaattggcacttggagtccggacatctgaaacttggaaaaatcagttgctgccgtctgacaaggtggatggtgagctgggtgccctgcggctcgaggatgtggaggatgagttgataagggaagaggtcatcctgtcgccagtcccatcagtgctcaagttgcagacagcatcaaaaccaattgacctctcagtagcaaaggaaataaagacccttctgtttggttccagcttttgctgtttcaatgaagaatggaaacttcagagtttttcctttagtaacacagcctcattaaaatacggcatagtgcagaacaagggtggtccttgcggagtcctggcagctgtccaaggctgtgtcctacagaaactcctgtttgaaggagatagcaaagccgactgtgctcagggactgcagccttcagatgcccaccggacccgctgcctcgtcctggccctcgcagacattgtgtggcgggcagggggccgagagagagccgttgttgcactggcttcgagaacacagcagttcagtccaacagggaaatacaaagcagatggagtcttagaaacacttacgcttcacagtttgacctgctatgaggacctggtgacttttcttcaacaaagcattcatcagtttgaagtgggcccctatggctgcatcctgctcaccctttctgccatcctgtccaggtctacagagctcatccgccaggactttgatgtccccaccagccacctgattggagcacatggctactgtacacaggaacttgtcaatctgctcctgactgggaaagctgtgtccaaacgttttcaacgatgtggttgagctggattctggggatgggaacatcacacttctcagaggcattgctgcacgcagtgatattggcttcttatctctctttgagcattacaacatgtgccaggttggctgcttcctgaagaccccgaggttccccatctgggtggtttgcagtgagagccacttcagcatcctctttagcctgcagccggggctcctgcgtgactggaggactgagaggctctttgacttgtactactacgatggcctggccaaccagcaggagcagatccggctgaccattgacaccacccaaaccatctctgaggacacagacaacgaccttgtcccacccctcgagctctgcatcagaaccaagtggaagggggcatcagtgaactggaacggctcagaccccatcctgtgaccgttggatgtgggtaaaccctgtggtccaccactcatcacctcatcaccgaggatgacagctgaaccccaagcctctggggcaggtctcatgtaccccaacctgggtcagcatgactgcagaagcatccagagcctccctgccccttccatgaagggcccacccaagactgtgctggggacccagtgtgttgctgggtcccctcccagctgagctgtgactgctgagtactggaaggaggttgccagggtctctgctacctttgtctgcatccctcccttgctccctgctgggtggtccctcacccaggcctccaatgtggttggccctggggactcattacttctggtagctggctttctataaaaatgggtcaaacccaaatcaa

SEQ ID NO: 42027 - DNA, 1239 bp, Homo sapiens
ccctgccttatccacctccctgccagccgcctctctgatatcagtgactcgcccatggggtgcagccctcccctgttggggccacacaggatgctggaattctggggtctcaggcccagagctgccgtagggccacctgaaccctgacgactccagcggtaccggccagcctttcactcacatacagcttacgcttcacagtttgacctgctatgaggacctggtgacttttcttcaacaaagcattcatcagtttgaagtgggcccctatggctgcatcctgctcaccctttctgccatcctgtccaggtctacagagctcatccgccaggactttgatgtccccaccagccacctgattggagcacatggctactgtacacaggaacttgtcaatctgctcctgactgggaaagctgtgtccaaacgttttcaacgatgtggttgagctggattctggggatgggaacatcacacttctcagaggcattgctgcacgcagtgatattggcttcttatctctctttgagcattacaacatgtgccaggttggctgcttcctgaagaccccgaggttccccatctgggtggtttgcagtgagagccacttcagcatcctctttagcctgcagccggggctcctgcgtgactggaggactgagaggctctttgacttgtactactacgatggcctggccaaccagcaggagcagatccggctgaccattgacaccacccaaaccatctctgaggacacagacaacgaccttgtcccacccctcgagctctgcatcagaaccaagtggaagggggcatcagtgaactggaacggctcagaccccatcctgtgaccgttggatgtgggtaaaccctgtggtccaccactcatcacctcatcaccgaggatgacagctgaaccccaagcctctggggcaggtctcatgtaccccaacctgggtcagcatgactgcagaagcatccagagcctccctgccccttccatgaagggcccacccaagactgtgctggggacccagtgtgttgctgggtcccctcccagctgagctgtgactgctgagtactggaaggaggttgccagggtctctgctacctttgtctgcatccctcccttgctccctgctgggtggtccctcacccaggcctccaatgtggttggccctggggactcattacttctggtagctggctttctataaaaatgggtcaaacccaaatcaa

SEQ ID NO: 42028 - DNA, 273 bp, Homo sapiens
tgtttttttttgggggggtggtgggtggagggtatatattgcatggcatggtgaaaatagttaatagtgtattgtatatttcaaaatttcaaatgttcttgtcacaaaaatatttgaggtgatatgttaattagcttgatttaattactccatattgtgttaataactactttgtaccaatatatgcaactaaagtttgtcaatttacaaaaagaatttaaaaatcaaataaaatgggccaggtgcgatggctcatgcctataatcccagaat

SEQ ID NO: 42029 - DNA, 128 bp, Homo sapiens
ttccagttttaatgctctgattcaattgtgtatttaaaaaatagagtcaaagatcctttccaaaatgattttgggggactaatcaagacagttgtacaaagattgcttcaaaggaaagtatgactggc

SEQ ID NO: 42030 - DNA, 963 bp, Homo sapiens
taaaaaatattatttatggttgcagtaatgggtgtattattttaaatgaattaataattttgaagttttctttgtaatttcaaatatgataaatacagataaaatctcgaggtcttcagtattttgagtgtaaaagtgtcctcagataaaaaaggtcggaggatagctgaattacagtgttgtttaggtctgtactgtatggtagccactagccgcatgtatctgagtacttaaaatgtagctaagaaactcaatttttaattttaattaatttaaacttaatttctggctgatctcatcttgcagagggcagttcgctctccccctccgagagtgtaaaaaaaaaaaaaaagaattgccattctttttcctttttatactttataatgcaagtatattgattaaaaggtcaagggggaaaaggtgaagatggagtattccagacctttaattaccttttccccctttttattgccttcatttgtattcttcatttacctattactggtatagctttggggcattagaggataagtagtggtaaatcgggtgctgcagttgactgaagaccttgtactattagtttatagtgttgcttataggagaataccactatcacctaatgaagtgttttctaattttttttcactgctctcaaactaaattgctactaaattttatttttgacttgagaacatttttatgaactagatccattgccagcattcttttatgcaaagctgagaggtatgcctcttgtcagacttaattaccaagtttggtattttgtaacagctgttgagtgagtctggaatagtcttcagtaccatacaaacaccggttgattagaaagatagaaatggaacaagaagatatttaccaatattaaatgaaggtacaagcaaatattatttttggtactgtaataaaaagtaaaacagttcttgaaatttatttcaaggg

SEQ ID NO: 42031 - DNA, 207 bp, Homo sapiens
tctatcccattcctggcaaaatcttattggagacagaagaactggccagtgcatattcactgctgtgtcaccctggttctgggaaaagaggaagataagagagggagctgagcacagtagtgccaacttttttttttttttttttttttttgtatcaggtacatttgttgttatgcacattcaacctattcatctagatatttcaaa

SEQ ID NO: 42032 - DNA, 339 bp, Homo sapiens
ggggctgaaccacagaagagctggttgcctggggctggaattagaggacagtagacaagaattttccaagatagggaatatatgagagagagagagagagagagagagagagagagagagagagaggagagagagagagagtgtgtgtgtgtgtgtgtgtgtgtgtgtgtgtgtgtgtgtgtgtgtttggaggaatggagtggatattagaatgaggcttattgtctgggtcatcctacaaactgtgttgcttgtgcccaagatagttttagagagaatagtcatctcagaaatgtcagattgactatatcgaaactctgggacagtctgtctttcctt

SEQ ID NO: 42033 - DNA, 398 bp, Homo sapiens
tgcactggccttctcctctacctgaaacacttttctctccttcttcaattagccacgtctttcttaacctaaagtctcagcttgaatactactttgccaggaaagccttccttaagctcctaaactgggtttggtcttcctattatatattcatatcctgtattttatagcacctatatttatcatttaaattattgtataattatctgcttcatgtttgtctcccctattagaccataagcgccatgaggatggaaattatctgtctcactaactgcctgacaaagctcccaatacaaagtatatacttaataaatatttgttgactgggtaaattgtgcataaaggcaggttataacaatatgagagtttagattaggaagattattatggaaatt

SEQ ID NO: 42034 - DNA, 176 bp, Homo sapiens
acccgccaccatacctggctaatttttgtatttgtagttttgttttattttattttattttgttttgttttatttttaagtcttactctgtcacccaggctggagtgtagttgcagtgagccgagattgtgccactgcactccaacctgggcaacagagcaagactccatctcgga

SEQ ID NO: 42035 - DNA, 364 bp, Homo sapiens
attaaacttctggttttttttgtgtggttttttttttttgagacggagtcacactctgtcatcaagctggagtgcagtggtgcgatcttggctcactgcaacctccacctccaggtttcaagtgattcttctgcctcagcctcctgagtagctgggattacaggcacctggaccacacttaactaatctttctatttttagtagggacgggtttcaccatgttggccaggatggtctcgatctcttgaccttgttatctgtccgccttggcctcccaaagtgctggtattacaggcgtgagccaccgcaccaggcctaaatttctgctctcaaagtcattccttgtatgtctgaacccttgatt

SEQ ID NO: 42036 - DNA, 299 bp, Homo sapiens
gctaacagtttgagttgggtcatacaattgtatcatttcacatcagctactgactttgagtactgactttgaatgcttataaaatcttcctcaaatccaggtagtgtgcaggacatggtataacaagacaacggaaaattagcagagagagccttcattggaaacccagattgtatttttgccagtacaacaaatattatttttaaagtctctcactaataggattgttcaacataaatctattgagaaacaatgatgtcagagagttttaaagctatagtgaagtgtgttaaattttg

SEQ ID NO: 42037 - DNA, 401 bp, Homo sapiens
tggaagagctatggtaactgtcatagacccaggaaagacgccgtttactacgcagaggtgctgcggtgagtgacaggagactcagcagcattgtcatatcacagagcaaaccctgcctgctgggcttccaggccatgtgaaggtagagataaccgatgacctgcttgattgaatgtggagcccatggggctggtaggggtgccagggcttcagatctcttccagtgttctggggtctgcctgtcccaggagctggcagcaattccaacacattcctgagcacttattgctaaggtgaatccaagttcacgttcccagaacgggttccgagtcaaccacgccagaggtctgcgccagctgcacttggtctaggaggcctgggaccaccgtcagcccattctt

SEQ ID NO: 42038 - DNA, 428 bp, Homo sapiens
agacctgtgtcagattcctgacctccagaacagtcagagaatcaacgcctgctgttccaagctgctaaacttgtggtcatatgttatggcagccataggagctgaatgcagtcttaaaaaacggagaatggctgggtgcggtggctcatgcctgtaatcccagcactttgggaggcggaagcaggaagatcacttgagctcaggagttcaaggccagcctgggcaatacagtgagatctcgtctcactatacaaggctacatttacaagaaaatgaaactagccaggcatagtggtgtgcacctatactctcagctacttgggaggctgatatggaagaatcccttgagcccaggagttggaggctgcggtgagctacgattgcaccagtgcactccagcttgggtgacagagcgagaccctgtctcc

SEQ ID NO: 42039 - DNA, 457 bp, Homo sapiens
aattaagacaatagtatctctttatagaatctcccatagagtcaaaaaagactataagtgagagtgctttgtaaactatagagcattatataatttaattataagtatttctataaagattacagagtattttgatgcccattttattcttagcttagctcctataacccctctgaatcgtccattgccccacagttccttgcttgccttcaacaaactcaaataggacattttttaaatgatttgtcctcttaactctaagcgaactaaattatgcctgtgtattattgggctggggcaattgagttacctgaccatttccatgaagtcacagtgctaacctaatgcaatgtgacagctttttcctgtagcacattcttaaaatttgattattctgagtaagaaaatattcattgagaggctcaccaggattgcaccaggcctgtttagtatccat

SEQ ID NO: 42040 - DNA, 460 bp, Homo sapiens
gtagctgggattacaggagtgtgccaccatgcctggctaatttttgtatttttagtagagacggtgtttcaccatgttggccaggctggtctcgaatgcctgacctcaagttatccacttgccttagcctctcaaagtgctgggattacaggcatgagccaccacacccaggcaatttttaaagttgtgcaaccatcaccactatctaattctagaacacttctatcaccctataaagaaactccacgtcccttagcagtcactcctcatattcctgttttcatggattcctgtaactactaatatactttctgaatctatcagtttgcctattcttggtatttcatataaacgcaattgtaagtatgtagtttatcctggagaatgtttcatgtacacttgagaaaagcatatattattttctcaagtgtacaacaagttgttgttaagtatatgttct

SEQ ID NO: 42041 - DNA, 493 bp, Homo sapiens
catgcattagatgccctgaagagcttttgaaaaggaccaatccctgggccctatctcaggtgtgtctgagcatctgtagattttagaagctctgaggaggatttacatgcatttagggtggaaatcacttgtaagtaaatttttttaactgttccctgttaaaaaatatgaaccaatggaccaatggaccacttatggcttctgctaattctcttacatatgcccatggtaccttgttgcagtatcatttgtataataaaaagattggagccaaccagaaagtccatcaatggggggaaaattaaataaaatgtagttcattcagcaatggaatactatgcagctctgaaaaatgaatcaggaagctttctatgaacagatgtggaaagtctccaatgtatagcattaagtggaaaaagcaagacataatggtagtgtgcacgttctatattacaaaaaatgtgaataaaggcagtttatattcatgttttct

SEQ ID NO: 42042 - DNA, 475 bp, Homo sapiens
tctttgctttttcttttgattctttgtttcttgtcttgcctatttcctaccattcctttgcctttttttgtttaaagcattcagtaattaccagccagaaacagttttcattctcaacaaagtaactacatcagtaacaggtatactctttgtctctccataattgaagtttctattgtacaggctacttaaaaaaaaattttttttaagatttttcggttctgaaatttcaggacacctaatggctgttcttgaataacacaagtattaccgctcttggaaaggagagccaagagggctcattagctgcaaagaggggcaacaggaacacccttagcaagttcagtcaggttagctgctttaaagtactgccagaaaagtttcactatactatcatgtttttatgaaaggtaccaaatcagagttaagatatttgaagctgagaacccttttaaccacagaccaaatataaaac

SEQ ID NO: 42043 - DNA, 336 bp, Homo sapiens
cttccacctttgagtcaatcaagtcatgctgtaataaaaattctgaactttgcttcaggacagctcagagggaaaacacgagtcaagtaagatgcactatttagtggtcctcactaacagcagtttaaaaacagctcactcaagcactagcagactagtagcaaaattgctatccagggtgaattgtgttttgagtggttcctgtagaactgtactgtccaatatggtagccactagccacaaatgagtattgaccacttgcaatgtggctaaaccaaattgagatgcgctataaatgtaaaatacacacagacttttgaagacatagtacagaaa

SEQ ID NO: 42044 - DNA, 164 bp, Homo sapiens
aagactctgtctcaaaaacaaacaaacaaaaagaagaagaacccaacctgccattgctggtttgtgctttattacctctgctcatagaagccatgagccatggagcgtgggtggcctttttaagctggaaaattccaggagacagatgctagactccaaaaagg

SEQ ID NO: 42045 - DNA, 459 bp, Homo sapiens
gggacgcgcctctgagagccacgagggccctgaatgcacagcgcgggagtttcaggcccaggagtgaccgcctgcacttgcgcgctcattaactcttctctgcctgcctgggcccccggcgtgagtgggaatcacggcccacggagcctgggatgactcggccttgcgccccggcgtgcagcaggtctctgggcaggtctctgggcgcagcgaaccctggtctgccgggagctccttcttgaccttccttcctccacaagaagggagcgcctcccgacaggccacaggctacatcattttggattatgcaataaaatgcttggtttgtgcgcgtacaagggcaccagctaatgccccagggcagggcttactgtggccactgctgaaccaaataaaagcccacgtgatgtggaaactgcatggaataatacgttgtctggacaggcgtcacttacaaat

SEQ ID NO: 42046 - DNA, 464 bp, Homo sapiens
cccctaggtcgcggggcagccggggcggaaggggcttgttcattattttgagagtttgttgtgaacgtcataacctttcgtccttaaatattgccgatacttgacctacgcaagagacaatgtcatgtgattcagcctaatatctcaggaggatgcagcattcaaggttctatcttggaagcagagactgtgccctcaccagatgctgaacctgctgagcaccctgatcttccacttcaccttcatcagaactactgctgtgattgcacctgccatcttatgcagaaatgacctgaagacagactgaaacaacgtgttctacagcctgaaaatatctaccttgacttacagttttattaatgctggtgtgatcagactggacaaaaattagcatatgttattaactgatctaattcaagtgccaattcttaatagaaacacaaaacaataaaagcaattcagaa

SEQ ID NO: 42047 - DNA, 978 bp, Homo sapiens
cccctaggtcgcggggcagccggggcggaaggggcttgttcattattttgagagtttgttgtgaacgtcataacctttcgtccttaaatattgccgatacttgacctacgcaagagacaatgtcatgtgattcagcctaatatctcaggaggatgcagcattcaaggttctatcttggaagcagagactgtgccctcaccagatgctgaacctgctgagcaccctgatcttccacttcaccttcatcagaactactgctgtgattgcacctgccatcttatgcagaaatgacctgaagacagactgaaacaacgtgttctacagcctgaaaatatctaccttgacttacagttttattaatgctggtgtgatcagactggacaaaaattagcatatgttattaactgatctaattcaagtgccaattcttaatagaaacacaaaacaataaaagcaattcagaaaatatttactatttgatttcttcaagctccaaacaggcttgtgcttagctgtagaaacttgaatatatacaaatctacatggatagaattcttagtcttctttgggccaggtgtgttagccccttgggaaaggataaagttttggaatatatttttattcatgaacctgctctctttaagacttctgaggaaaagagctgctgggcagatgagtagaatatgttactactgttccgacatgtctacccatcaaaactagctgatacagtacactttaatgacccttctatagtcaaaactgacattgacattgacattaacagaaaagatttgggacaaagaactgtgttcatgcagcaaatcagcctcaaacttcaccacaagctgcacattttatgctactgtattctgcttaagcacttatttgtatttatgtaaactgaatgatcctttaatacttaaggactttattctgggtgagttagaatcacactgttttggcaggaaaactctt

SEQ ID NO: 42048 - DNA, 560 bp, Homo sapiens
  misc_feature (528)..(528): n is a, c, g, or t
ctttgtaagatcagatgcagagagcgcgcgttatcagattcattataggggcagtcagtgactgggccccccctgtaggtcgccggaatcgatgagattatatggctatacaggcgtatcacagttatacagcatacgcagtcagatcttgtgaccagacagtgtggcatctcagcatcagtgactctcttagctccctcatgttacaggaggatgcagcattcaaggttctatcttggaagcagagactgtgccctcaccagatgctgaacctgctgagcaccctgatcttccacttcaccttcatcagaactactgctgtgattgcacctgccatcttatgcagaaatgacctgaagacagactgaaacaacgtgttctacagcctgaaaatatctaccttgacttacagttttattaatgctggtgtgatcagactggacaaaaattagcatatgttattaactgatctaattcaagtgccaattcttaatagaaacacaaaacaataaaagcaattcagaaaanatcgatgctggccgaaactcgcttctacttta

SEQ ID NO: 42049 - DNA, 337 bp, Homo sapiens
ttgtctctacaccccaaaaaaaccaaacacaacttcaaaactggggctgtggctgagatgtcacatggcagataggatcacaaatttctgttgtatctggatggagatcagcaggaggatctatggactgctgtgattgcacctgccatcttatgcagaaatgacctgaagacagactgaaacaacgtgttctacagcctgaaaatatctaccttgacttacagttttattaatgctggtgtgatcagactggacaaaaattagcatatgttattaactgatctaattcaagtgccaattcttaatagaaacacaaaacaataaaagcaattcagaa

SEQ ID NO: 42050 - DNA, 262 bp, Homo sapiens
  misc_feature (37)..(38): n is a, c, g, or t
tataaatctatttatgtaaaaaaatgatacaacccannctcacaaataacaactgctgtgattgcacctgccatcttatgcagaaatgacctgaagacagactgaaacaacgtgttctacagcctgaaaatatctaccttgacttacagttttattaatgctggtgtgatcagactggacaaaaattagcatatgttattaactgatctaattcaagtgccaattcttaatagaaacacaaaacaataaaagcaattcagaa

SEQ ID NO: 42051 - DNA, 253 bp, Homo sapiens
tatatattgtatagaacatgtgaattaaaaataaactttatcactgctgtgattgcacctgccatcttatgcagaaatgacctgaagacagactgaaacaacgtgttctacagcctgaaaatatctaccttgacttacagttttattaatgctggtgtgatcagactggacaaaaattagcatatgttattaactgatctaattcaagtgccaattcttaatagaaacacaaaacaataaaagcaattcagaa

SEQ ID NO: 42052 - DNA, 298 bp, Homo sapiens
  misc_feature (258)..(261): n is a, c, g, or t
  misc_feature (275)..(275): n is a, c, g, or t
accagtgtctttctccccccacccccgatacagactgctgtgattgcacctgccatcttatgcagaaatgacctgaagacagactgaaacaacgtgttctacagcctgaaaatatctaccttgacttacagttttattaatgctggtgtgatcagactggacaaaaattagcatatgttattaactgatctaattcaagtgccaattcttaatagaaacacaaaacaataaaagcaattcagaagatgcggccgaaannnncccctctctccctntccccttccccccccctcccccc

SEQ ID NO: 42053 - DNA, 972 bp, Homo sapiens
ctttgtaagatcagatgcagagagcgcgcgttatcagattcattataggggcagtcagtgactgggccccccctgtaggtcgccggaatcgatgagattatatggctatacaggcgtatcacagttatacagcatacgcagtcagatcttgtgaccagacagtgtggcatctcagcatcagtgactctcttagctccctcatgttacaggaggatgcagcattcaaggttctatcttggaagcagagactgtgccctcaccagatgctgaacctgctgagcaccctgatcttccacttcaccttcatcagaactactggggctgtggctgagatgtcacatggcagataggatcacaaatttctgttgtatctggatggagatcagcaggaggatctatgggtgagaagaagcacagttacagatggattctagagcctgcttgctgacacaggcttgcaactgcggactttataagcttagtttttaatctgctatcagctagcataataccataaatgcataaaaaactaagtattcagtcttacgagaaatgctatcttgacctgaccctttctccaaataaattgacaaaatatctcatcgtctaggatgccagacagaaataccagttgcaatgttttgttgcataaagtttatcctaatttaaattagtggcatataaagtcatcatcttgcttgaacaaacatcttattaaattgagcatgtcttttatcccatgaaatgaaattaattttgagatagttatttttcagttggaaatttattgagttgatagaaaacaagttatatagtcttccaaagaatatgttacatccatttgcattttgtttttcttcagcaatgtttggtttttagaaaatcttacaagttaaatatactaatgtagaaattgaaagaaaataatcagagatagagcaataaatttgcaaataaagattattcttcaaa

SEQ ID NO: 42054 - DNA, 551 bp, Homo sapiens
cccctaggtcgcggggcagccggggcggaaggggcttgttcattattttgagagtttgttgtgaacgtcataacctttcgtccttaaatattgccgatacttgacctacgcaagagacaatgtcatgtgattcagcctaatatctcaggaggatgcagcattcaaggttctatcttggaagcagagactgtgccctcaccagatgctgaacctgctgagcaccctgatcttccacttcaccttcatcagaactactggggctgtggctgagatgtcacatggcagataggatcacaaatttctgttgtatctggatggagatcagcaggaggatctatggactgctgtgattgcacctgccatcttatgcagaaatgacctgaagacagactgaaacaacgtgttctacagcctgaaaatatctaccttgacttacagttttattaatgctggtgtgatcagactggacaaaaattagcatatgttattaactgatctaattcaagtgccaattcttaatagaaacacaaaacaataaaagcaattcagaa

SEQ ID NO: 42055 - DNA, 1065 bp, Homo sapiens
cccctaggtcgcggggcagccggggcggaaggggcttgttcattattttgagagtttgttgtgaacgtcataacctttcgtccttaaatattgccgatacttgacctacgcaagagacaatgtcatgtgattcagcctaatatctcaggaggatgcagcattcaaggttctatcttggaagcagagactgtgccctcaccagatgctgaacctgctgagcaccctgatcttccacttcaccttcatcagaactactggggctgtggctgagatgtcacatggcagataggatcacaaatttctgttgtatctggatggagatcagcaggaggatctatggactgctgtgattgcacctgccatcttatgcagaaatgacctgaagacagactgaaacaacgtgttctacagcctgaaaatatctaccttgacttacagttttattaatgctggtgtgatcagactggacaaaaattagcatatgttattaactgatctaattcaagtgccaattcttaatagaaacacaaaacaataaaagcaattcagaaaatatttactatttgatttcttcaagctccaaacaggcttgtgcttagctgtagaaacttgaatatatacaaatctacatggatagaattcttagtcttctttgggccaggtgtgttagccccttgggaaaggataaagttttggaatatatttttattcatgaacctgctctctttaagacttctgaggaaaagagctgctgggcagatgagtagaatatgttactactgttccgacatgtctacccatcaaaactagctgatacagtacactttaatgacccttctatagtcaaaactgacattgacattgacattaacagaaaagatttgggacaaagaactgtgttcatgcagcaaatcagcctcaaacttcaccacaagctgcacattttatgctactgtattctgcttaagcacttatttgtatttatgtaaactgaatgatcctttaatacttaaggactttattctgggtgagttagaatcacactgttttggcaggaaaactctt

SEQ ID NO: 42056 - DNA, 650 bp, Homo sapiens
ctttgtaagatcagatgcagagagcgcgcgttatcagattcattataggggcagtcagtgactgggccccccctgtaggtcgccggaatcgatgagattatatggctatacaggcgtatcacagttatacagcatacgcagtcagatcttgtgaccagacagtgtggcatctcagcatcagtgactctcttagctccctcatgttacaggaggatgcagcattcaaggttctatcttggaagcagagactgtgccctcaccagatgctgaacctgctgagcaccctgatcttccacttcaccttcatcagaactggtgctaagaattctgaatttattgaggaaataaatgtctgattgcaacaaaagaaaacttgtctggctttgggaaggaagaggcttaggaaaaaaattaaaggcgtctttactagaagttcaagactgctgtgattgcacctgccatcttatgcagaaatgacctgaagacagactgaaacaacgtgttctacagcctgaaaatatctaccttgacttacagttttattaatgctggtgtgatcagactggacaaaaattagcatatgttattaactgatctaattcaagtgccaattcttaatagaaacacaaaacaataaaagcaattcagaa

SEQ ID NO: 42057 - DNA, 527 bp, Homo sapiens
cccctaggtcgcggggcagccggggcggaaggggcttgttcattattttgagagtttgttgtgaacgtcataacctttcgtccttaaatattgccgatacttgacctacgcaagagacaatgtcatgtgattcagcctaatatctcaggaggatgcagcattcaaggttctatcttggaagcagagactgtgccctcaccagatgctgaacctgctgagcaccctgatcttccacttcaccttcatcagaactactgctgtgattgcacctgccatcttatgcagaaatgacctgaagacagactgaaacaacgtgttctacagcctgaaaatatctaccttgacttacagttttattaatgctggtgtgatcagactggacaaaaattagcatatgttattaactgatctaattcaagtgccaattcttaatagaaacacaaaacaataaaagcaattcagaaaaactgttacgcgtcaagttatttttttttattcacccccactaaccccataaacactcacca

SEQ ID NO: 42058 - DNA, 605 bp, Homo sapiens
  misc_feature (565)..(568): n is a, c, g, or t
  misc_feature (582)..(582): n is a, c, g, or t
cccctaggtcgcggggcagccggggcggaaggggcttgttcattattttgagagtttgttgtgaacgtcataacctttcgtccttaaatattgccgatacttgacctacgcaagagacaatgtcatgtgattcagcctaatatctcaggaggatgcagcattcaaggttctatcttggaagcagagactgtgccctcaccagatgctgaacctgctgagcaccctgatcttccacttcaccttcatcagaactactggggctgtggctgagatgtcacatggcagataggatcacaaatttctgttgtatctggatggagatcagcaggaggatctatggactgctgtgattgcacctgccatcttatgcagaaatgacctgaagacagactgaaacaacgtgttctacagcctgaaaatatctaccttgacttacagttttattaatgctggtgtgatcagactggacaaaaattagcatatgttattaactgatctaattcaagtgccaattcttaatagaaacacaaaacaataaaagcaattcagaagatgcggccgaaannnncccctctctccctntccccttccccccccctcccccc

SEQ ID NO: 42059 - DNA, 609 bp, Homo sapiens
  misc_feature (554)..(556): n is a, c, g, or t
cccctaggtcgcggggcagccggggcggaaggggcttgttcattattttgagagtttgttgtgaacgtcataacctttcgtccttaaatattgccgatacttgacctacgcaagagacaatgtcatgtgattcagcctaatatctcaggaggatgcagcattcaaggttctatcttggaagcagagactgtgccctcaccagatgctgaacctgctgagcaccctgatcttccacttcaccttcatcagaactactggggctgtggctgagatgtcacatggcagataggatcacaaatttctgttgtatctggatggagatcagcaggaggatctatggactgctgtgattgcacctgccatcttatgcagaaatgacctgaagacagactgaaacaacgtgttctacagcctgaaaatatctaccttgacttacagttttattaatgctggtgtgatcagactggacaaaaattagcatatgttattaactgatctaattcaagtgccaattcttaatagaaacacaaaacaataaaagcaattcagaaaannnagatgcggccagttgtctaaaagctataaaaaatttcttaaaaaatttattta

SEQ ID NO: 42060 - DNA, 603 bp, Homo sapiens
cccctaggtcgcggggcagccggggcggaaggggcttgttcattattttgagagtttgttgtgaacgtcataacctttcgtccttaaatattgccgatacttgacctacgcaagagacaatgtcatgtgattcagcctaatatctcaggaggatgcagcattcaaggttctatcttggaagcagagactgtgccctcaccagatgctgaacctgctgagcaccctgatcttccacttcaccttcatcagaactactggggctgtggctgagatgtcacatggcagataggatcacaaatttctgttgtatctggatggagatcagcaggaggatctatggactgctgtgattgcacctgccatcttatgcagaaatgacctgaagacagactgaaacaacgtgttctacagcctgaaaatatctaccttgacttacagttttattaatgctggtgtgatcagactggacaaaaattagcatatgttattaactgatctaattcaagtgccaattcttaatagaaacacaaaacaataaaagcaattcagaaggctgaaagcctccaactatactaacaaacgcgcggataacaaataacaaaa

SEQ ID NO: 42061 - DNA, 516 bp, Homo sapiens
cccctaggtcgcggggcagccggggcggaaggggcttgttcattattttgagagtttgttgtgaacgtcataacctttcgtccttaaatattgccgatacttgacctacgcaagagacaatgtcatgtgattcagcctaatatctcaggaggatgcagcattcaaggttctatcttggaagcagagactgtgccctcaccagatgctgaacctgctgagcaccctgatcttccacttcaccttcatcagaactactgctgtgattgcacctgccatcttatgcagaaatgacctgaagacagactgaaacaacgtgttctacagcctgaaaatatctaccttgacttacagttttattaatgctggtgtgatcagactggacaaaaattagcatatgttattaactgatctaattcaagtgccaattcttaatagaaacacaaaacaataaaagcaattcagaagatgcggccgaagtccatttttttgataaatagagcaccaaaacaaaagaat

SEQ ID NO: 42062 - DNA, 496 bp, Homo sapiens
cccctaggtcgcggggcagccggggcggaaggggcttgttcattattttgagagtttgttgtgaacgtcataacctttcgtccttaaatattgccgatacttgacctacgcaagagacaatgtcatgtgattcagcctaatatctcaggaggatgcagcattcaaggttctatcttggaagcagagactgtgccctcaccagatgctgaacctgctgagcaccctgatcttccacttcaccttcatcagaactactgctgtgattgcacctgccatcttatgcagaaatgacctgaagacagactgaaacaacgtgttctacagcctgaaaatatctaccttgacttacagttttattaatgctggtgtgatcagactggacaaaaattagcatatgttattaactgatctaattcaagtgccaattcttaatagaaacacaaaacaataaaagcaattcagaaaacatcgatgcgaccggccttaactctgatag

SEQ ID NO: 42063 - DNA, 497 bp, Homo sapiens
  misc_feature (485)..(485): n is a, c, g, or t
cccctaggtcgcggggcagccggggcggaaggggcttgttcattattttgagagtttgttgtgaacgtcataacctttcgtccttaaatattgccgatacttgacctacgcaagagacaatgtcatgtgattcagcctaatatctcaggaggatgcagcattcaaggttctatcttggaagcagagactgtgccctcaccagatgctgaacctgctgagcaccctgatcttccacttcaccttcatcagaactactgctgtgattgcacctgccatcttatgcagaaatgacctgaagacagactgaaacaacgtgttctacagcctgaaaatatctaccttgacttacagttttattaatgctggtgtgatcagactggacaaaaattagcatatgttattaactgatctaattcaagtgccaattcttaatagaaacacaaaacaataaaagcaattcagaaattcccgatgcggccgaaatnggtgcgaattct

SEQ ID NO: 42064 - DNA, 1101 bp, Homo sapiens
ctttgtaagatcagatgcagagagcgcgcgttatcagattcattataggggcagtcagtgactgggccccccctgtaggtcgccggaatcgatgagattatatggctatacaggcgtatcacagttatacagcatacgcagtcagatcttgtgaccagacagtgtggcatctcagcatcagtgactctcttagctccctcatgttacaggaggatgcagcattcaaggttctatcttggaagcagagactgtgccctcaccagatgctgaacctgctgagcaccctgatcttccacttcaccttcatcagaactgtacttcaaagaggacatcctctcctgaagaacagaagaacctgaaatgtttggagcctaagactgctgtgattgcacctgccatcttatgcagaaatgacctgaagacagactgaaacaacgtgttctacagcctgaaaatatctaccttgacttacagttttattaatgctggtgtgatcagactggacaaaaattagcatatgttattaactgatctaattcaagtgccaattcttaatagaaacacaaaacaataaaagcaattcagaaaatatttactatttgatttcttcaagctccaaacaggcttgtgcttagctgtagaaacttgaatatatacaaatctacatggatagaattcttagtcttctttgggccaggtgtgttagccccttgggaaaggataaagttttggaatatatttttattcatgaacctgctctctttaagacttctgaggaaaagagctgctgggcagatgagtagaatatgttactactgttccgacatgtctacccatcaaaactagctgatacagtacactttaatgacccttctatagtcaaaactgacattgacattgacattaacagaaaagatttgggacaaagaactgtgttcatgcagcaaatcagcctcaaacttcaccacaagctgcacattttatgctactgtattctgcttaagcacttatttgtatttatgtaaactgaatgatcctttaatacttaaggactttattctgggtgagttagaatcacactgttttggcaggaaaactctt

SEQ ID NO: 42065 - DNA, 674 bp, Homo sapiens
  misc_feature (619)..(621): n is a, c, g, or t
ctttgtaagatcagatgcagagagcgcgcgttatcagattcattataggggcagtcagtgactgggccccccctgtaggtcgccggaatcgatgagattatatggctatacaggcgtatcacagttatacagcatacgcagtcagatcttgtgaccagacagtgtggcatctcagcatcagtgactctcttagctccctcatgttacaggaggatgcagcattcaaggttctatcttggaagcagagactgtgccctcaccagatgctgaacctgctgagcaccctgatcttccacttcaccttcatcagaactagatggagttccaccgtgttagccaggatggtcttgatctcctgacctcgtgatccgcctgcctcggcctcccaaagtgctgggattacagactgctgtgattgcacctgccatcttatgcagaaatgacctgaagacagactgaaacaacgtgttctacagcctgaaaatatctaccttgacttacagttttattaatgctggtgtgatcagactggacaaaaattagcatatgttattaactgatctaattcaagtgccaattcttaatagaaacacaaaacaataaaagcaattcagaaaannnagatgcggccagttgtctaaaagctataaaaaatttcttaaaaaatttattta

SEQ ID NO: 42066 - DNA, 297 bp, Homo sapiens
ttatttaaagcacggtttcatgcataaattttaaaaacaaaagacttggggaccaagtaacatatgaaggcatcaattgttcagataacagatttaaaattaaaaaaatctattaattaaaaattaatagattaaaaatttaccttccctccttttgggcaaagtattaacaaacatgttaagaaagaatgggctgggtgcagtggctcacgcctgtaatcccaacactttgggaggccaaggcaggtggatcgcttgaagtcaggaattcaagatcagcctgaccaacatggtgaa

SEQ ID NO: 42067 - DNA, 372 bp, Homo sapiens
gctatgttagttatcatttgtcctcacagaaatcccataaaaggggtgtcattatttttgttgaacaaataggaaaccttttatttgtggagattaggtgactttcttaaggctctctagctggcatggtatggctgtgtccccacccaaatctcatcttgaattgtagttcccataatccccacctgtcatgggagggaccctgtgggaggtaaattaatcatgggggcagttaccctcatgctattttcatgatagtgaattctcacaagatctgatggttttataaggggcttttccctctttgcttggaacttctctttgctgccaccatgtttgtaagtttcctgaggcctcccagccatgctgaac

SEQ ID NO: 42068 - DNA, 392 bp, Homo sapiens
ttgttaaatgggatgatacccaccacattggtagtgaggattaaatgtgatcatgtatgtaaggagattaattgaacagttagcatatggttaggattcagtcattgtcagctattaagaccatcgtcagttttagttaatggccactccgtttttttttttcagttcctcaggaaaaaaaaccttaggttgttgttgactcctcacatccagtgcattagcaaattctgttggctccactttcaaaatatattccaagtctgaccactttatatgtcctccagtgttgccatgctggttcaagccataatctctttcctggattatttatttatttattattttgagacagaatcttgctctgtcacccaggctggagtgcagtgacgtga

SEQ ID NO: 42069 - DNA, 472 bp, Homo sapiens
caaatgtagttggttttatgataaggactgcccttatctataaaactgctaaccccaaacccttgcacaagctgtcagtcttttggttgtacaacaagaaggcctggacaatgagaaccattttttctgggttgttcccattaatgctttgttcctgaagtcaggaagtgccttgacagaaagtaattgcctttaaagttcttttgacattgtacaatgcccctggccagccagaaccccatgagatcaacaccaaagttgtggaagtggtctacttgatcctaaacaccctctaatttggcataaagatgatggagtcataagaatctttaaattaggatccctaatccccacattgttcaagggtcaactgtatatattgaccagtattcattgaactgtacattttaaactggcaaattttattgtgtgtaaattacacttcattaaatctgcttaaagagaaaaaaat

SEQ ID NO: 42070 - DNA, 478 bp, Homo sapiens
gctctacaataataaatacatcacagatgcccgtcaaaggcttaaataattttagtttacaaaaatggccaatagcgattcgctaactagtctttctagcccactattttcagtctgtcatatacattaaaaaatacctcaactgtaaattgaacctaaataacctcttctggttgaagatagggttcttattcaaagcctaggaaagccaaacgtatattaatccagaatcaaatcaggaggaaaaatagtgcagaatttgcacttgttgcaaaagcagcatggaagaagaaaaagtaaagatccacaggtacacctttagaaccctatgagcagcagggctgcttcattacagaggctgacttgaaacccaggaggtggaggttgcagtaagctaagatagcgccattgccctccagaccagcaacagagcaagactctgtctcaaaaaaaaaaaaaaaaaaaagtgtatgtaaaa

SEQ ID NO: 42071 - DNA, 391 bp, Homo sapiens
tcattctttggctaaaccttaaatgggaccatgtacttacttcatcccatgcaccaccatacacaggggcattagaatgtaatgagtttggctaagcgtggtggctcacacttgtaatccaagcactttgggaggccaaggtgggtggattgcttgagcccaggaatttaagactagcctaggcaacatggtcaaaccctgtcctacaaaaaatacaaaaaaatcagctgggtatggtagcacactctgtagttccagctactagggaggctaaagtgggaggatcacttgagcccaggaggttgaggctgcaatgagctgtgattgcgccactgcactccagcctgggcaacagagcaagacctgtctcaaaaaaaaaaaaatgtagtga

SEQ ID NO: 42072 - DNA, 386 bp, Homo sapiens
tcaccaatttcctttaccctgctgggctccggtgttccgtgccaggctgccggcactggcactgcccacctccaccctgcaacagtgcctgttttccttggctccacctaatggcttttagacaggagagaagaagaaccgagccgaggccaagggcatgacggggtcaactggggatttttgttgcaggtaacagaagccagcgctggctaacattagcaaatcagaataatcattattgttattgaaaggacatgggacaacacaaaagctagacagtcagccttgggtagattaggaaccaaggtgatctgaggatgtgggggtgcaagcaggatttgggggtactgccattagaatggctcagcacaaagcattgtacaccc

SEQ ID NO: 42073 - DNA, 282 bp, Homo sapiens
aggcagccgagcaaccactatgcactagaccagtgcacaccccctggcctggatcctgacatccgcagccccttcttccagtcaggatctcaaggaaacagggaacacaactctgacagcagaaagtggctcagctctgtgccagctcgaacccactgaccctctggaggcctgactctaggcagctgctcaaggcctgtagacagatgggccaccaggcaggagctgctgctgggatttgcttttgtggcctggtgagctaataaacaccaataacttcag

SEQ ID NO: 42074 - DNA, 234 bp, Homo sapiens
ctggggtccacacaggacaagaaaaaccaaagtttcagctggaggtagaactgagtctgttcagccaccttaactggctgagaaccaccaaaggttcttctggtacatttaggattccccactccctagtcccaggagaggaggacaggggatggaggcagagttcggtagggccagaggcagcccccagccctgcaccagcacctcctgcctcacaagcttcctgatagcatg

SEQ ID NO: 42075 - DNA, 1742 bp, Homo sapiens
  misc_feature (163)..(163): n is a, c, g, or t
  misc_feature (402)..(402): n is a, c, g, or t
  misc_feature (818)..(818): n is a, c, g, or t
gtctttttatcttttcctcttgttggagagcatagagtttttctatacaggtttactttttagtactttgttttatacctctggatagtaggtcacagagtacacggagcaggcttacacaaacacacacgtcaaatgaacaaatccagccacaccacctgtncagtctcttgaattcacttcctccaccactgcctggattcaggctctcacctggcttgttgaaggcatcctcaactagtctgtcagccttggtctttctcttgtctgtcatccacaccacgctaggttttgttttgctttgtttaagcctccttttgatcttgtcacagtccttgattaaatttttctgccttcttcttatctataggataaaggccatgctcttccaattccaacttnaacttctgccattgaattatgtgccagtcaaggaaaaccaaagacaaaacaacaagaaaacaacaacaaaatagcagacacggtccttgccttcatggagcctatagtctgtagtcacaacagtagtataattacaaagtagggtagtgctatgaaggggaagctgaggatgctgctatgagatattacggcatgatggggaatttcaaagacctttctgtgtaaattaaaattaggtcaagaccagaggatgttcaagaattagctaggtaaaaagctagggggagaatatttcagaatgagatactaccatgtgccaatgttctgcagcaaaaaagagcttggtggttttaggtactggaaggccagtgtgtcaggagaactgtgaatgagtgggagagtggagcaagaactanacagggcttagatttctcttaaaatgtagtgagcagccagtcgttggttttaagcagagtggtaatatggtctgctttacatattttaacttttattccagctgcatcagtcacctcgagtcattctgtttcccatacaccttgatgcctttgctcctgtctctttctcctcacctggggacaccttcaccttttttacttctgggaattagcacagcacagtagtcctagaatgaactctagaaccaaacgctttctagtggcgtggtcttagatatgttacttaaatctatctgtgcctcagtttcctttgcagaagtgggatataatatcaaggagatggcatgtgcctaacccacaataattcctacaaaagtgtttgctattattgtttttattactattattaagattcacctcaaatgttactgtgtaaccttctcccaccttttcaggtataattcattacttcctcttctgcagtcccacactgccatggttgcttttatcacactgttaagagagttgaatatgtacttttttgttgttatagattatgaattccttaagggcagcagtcatgtgacatcaagcatcgggatttacatttctcctctatcactgattaattgtacgaccttggataaattgtgcagcttctccatcttggtttcctcgcctgtaaaatgaggatagcattacccatcttaagagcttctgttttggttttgtaagaaacacatttgcaccatagctaatacttagtaaacacatatgcttttcttccctgcctctgtagatttctaacaactaagttagaaacaaagttgggcctggttatttactgattggaggctgaggtgttgaataaataaataatgagggttttatgaatgagtaaaacaacaacacaaaaaaaaggaa

SEQ ID NO: 42076 - DNA, 1151 bp, Homo sapiens
agacacctacctgaacgagatgatttggcaaagaaactagtttcagcagagttaaagttagatgacaccgagagaagaattaaggagctatcgaaaaaccttgaactgagtactaacagtttccaacgacagttgcttgctgaaaggaaaagggcatatgaggctcatgatgaaaataaagttcttcaaaaggaggtacagcgactatatcacaaattaaaggaaaaggagagagaactggatataaaaaatatatattctaatcgtctgccaaagtcctctccaaataaagagaaagaacttgcattaagaaaaaatgctgcatgccagagtgattttgcagacctgtgtacaaaaggagtacaaaccatggaagacttcaagccagaagaatatcctttaactccagaaacaattatgtgttacgaaaacaaatgggaagaaccaggacatcttactttggacttgcaatctcaaaagcaagacaggcatggagaagcagggattctaaacccaattatggaaagagaagaaaaatttgttacagatgaagaactccatgtcgtaaaacaggaggttgaaaagctggaggatgaatgggaaagagaagaacttgataaaaagcaaaaagaaaaggcatctttactggaaagagaagaaaagccagagtgggaaactggaaggtaccaactaggaatgtatccaattcagaatatggataaattgcaaggagaggaagaagaaagactgaagagagaaatgctacttgctaaactgaatgaaattgacagagaactccaagattctcgaaatctaaaataccctgttttgccattgttacctgattttgaatcaaaactacactccccagagagaagccccaaaacatacaggttctctgaatcctcagagagattatttaatgggcatcatttgcaagacatcagtttctcaactccaaaaggagaaggtcagaattcaggaaatgttagaagtccagcctcccctaatgagttcgcatttggtagctacgtgccttcgtttgcaaaaacatcagagaggtcaaatccatttagtcaaaaaagtagttttttggatttccaaagaaacagtatggaaaaacttagtaaagatggtgtagatttaattac

SEQ ID NO: 42077 - DNA, 323 bp, Homo sapiens
cgattttctgttgtattgccaatgcttacttaggtcagggcttggcatgtagtccttgcatatgagttagatgtgtggcttacaaggttaaccagcattttccagacaacctctacaaagcccacccccatgtaggtaaagggcttatcccacactgtcctgcaaaccccagtcacagcaccacataccacactatgctgactttcacgttttcctgctgtgatagtctctaggcttctgaggtcacaagccatacctcatccagtgtgcagcccccgtgactcaggaatgcctggtgcttgtgagctgtttgttgccatgaa

SEQ ID NO: 42078 - DNA, 102 bp, Homo sapiens
ggaaaatccttctccgccaggcaatgacttcatcgtttccttctcactaatttgaatactcttatgggagagccaaacaaaaaatgaaaatgatgaatgact

SEQ ID NO: 42079 - DNA, 1108 bp, Homo sapiens
agcggagggtagactgcgttgctagcagctgagtgaaggccgaaagggccaatggaaacgttagacgacgctcgggcctctgggtagagcgttggtgtccgctttcgtgaaatcgagttgcctaacccagagctttcccgagatggtcttcgttacaggtgtctgggaggcggcttaagctcacttcactaggtcattaagcatgtactttggtggttacatatatcttggaagtcaccggctttacattctgttttcctggccttcgaactggagcatcagtactaccgccgttggaatagcaacctagagactttgctattttgtgaagaaactctaactatccgcatgggcacagaattttgggtgctctggtgcaaatgtctcaggtgacttggcgtaactgagaatacagccttgggaccttcgttctggaggctgggaagtcaaagacaaggcactggcagattccatgactggaaaggagagaaggtctctgaggaagtgacattccagctgagacgtgaaggataagtagaaaccaagcagaagaattggaagaggaaagggaagagggaaaagcctgtgccaatgccctgagattggaatatgctttttgtgtttaagaaattaacagaaggagaagcacatctctggctgccctcagtacactaagagaatcagacctcagaggtggctgcattttattgttgggaataagaagactgcaattcaggaagacatatagtagtctataagtgattcaggactggaactcagttatcctaattccctctcggaggctctttccaccatgccatctgctcgtctggtgctttccatccatgaactctggaaaacaagcttgagataccaaaattgaaaagacagctcatcaaaaatgaatagttataattctataagtacaaaaatgaaatactcaaatctcttgccccccctcctgctaggagcataaatgttaacctgagttctctagctctgtacaaatccacagcaattaagactgcactgtgagggaaaatacttttctaaaaaagaatcctgatcaagttgaaacaaaaattttaaaacatgaaatggaaggaac

SEQ ID NO: 42080 - DNA, 679 bp, Homo sapiens
  misc_feature (673)..(674): n is a, c, g, or t
  misc_feature (676)..(677): n is a, c, g, or t
  misc_feature (679)..(679): n is a, c, g, or t
ggtgggtagagcagtgcacagtggggataatatgggagtaggtgtattaaacctggaagtgtaagcaactccttgtagacccaccctactgtgtataaaaggctggagaaattcttcatatgatctactctaggttatgtactgaggaccaccttatctgggtcaggtacactacacagagtgctacaatataattgtaaacataatttatcctcactgtgatggctagccacctgacccaaatcattattagactcaatactttggaactggaacaaaaatcagttgacctgatgtctgaaagacatgcccacctgctatttgacaagctatagacatatcctaccaattgatgggtagtagcactgaaactatgaaagtggatgaactcatccagaggagttgatgagtgagaaaagaagactggaaaaggaacacaaggaaatcaagaagcagcagctgagactgaaggaaaataacgtggtattacagaggccaaaaaatagagtatttcaagaagcaagtggttagtggagttaaaagctgctgatacaacctaaaaaagtaagtatccattttttaaaaaactttcatttaaaataccaccatattttattgaatctaagtacctgattgtaagacattaaagaaaaattaaacctgctaattaaannannan

SEQ ID NO: 42081 - DNA, 1079 bp, Homo sapiens
aacccggggctgcatgcgggtggcaccacctctttgaagcggtaccagagctcagctctcaccgtttgctccgaaccgagcccgcagtcggaccgtgccagtttggctcgatgccccaaaactaaccaccgaggtcccattcagctgtggcagttcctcctggagctgctccacgacggggcgcgtagcagctgcatccgttggactggcaacagccgcgagttccagctgtgcgaccccaaagaggtggctcggctgtggggcgagcgcaagagaaagccgggcatgaattacgagaagctgagccggggccttcgctactactatcgccgcgacatcgtgcgcaagagcggggggcgaaagtacacgtaccgcttcgggggccgcgtgcccagcctagcctatccggactgtgcgggaggcggacggggagcagagacacaataaaaattcccggtcaaacctcaaaaaaaaaaaaaaaaaaaaaaaaaaaaaaaaaaaggggaaaaaaaaaaaaaaaaaaaaaaaaaaaaaaaaaaaaaaaaaaaaaaaaaaaaaaccctggggggggggcccggtcccaaattccccctatagggagtcgtttaaaaattaacgggccggggtttaaaaacgtcggaacgggaaaaaccctggggtaaccaaactaaatcgcttggaagaaaatccccttttcgcaagttggcgtaatagcaaaaagcgcccccccaatcgcccttccaaaaattggcccaccctaaatggcaaagggaaaattgaaacgctaaatatttggtaaaaatccgggtaaaattttgggaaaataacctaatttttaaaccaataggccaaaatcggaaaaaccctttttaaataaaaaaaataaaccgaaatagggttagatggttgtccaagttggaaacaaaatcccattataaaaaacgggaactcaaacgtaaaagggcaaaaaaccgtatataagggaatggcccatacggaaacaatccccctaataaattttttggggtcaaggggcccccttaaatcgaaaccctaaggggacccccatttccttcggg

SEQ ID NO: 42082 - DNA, 1101 bp, Homo sapiens
gtctcttctagttcaatttagctccgcccaagggctaggttcaaccgcgtagccctcggccccgccgctccccggcccactcgaggccccgcccaacccttctcaaacccaatctcccgctgtactcctgcctcaaccaacccagtctccaccgggctctgcgaggcctcgcccaggtctgcactgcacaccgcccccaggcccggccctccccactatcgccaagccccgccccttcccactccgaccgagcgggcctctgtcctaggtggctcggctgtggggcgagcgcaagagaaagccgggcatgaattacgagaagctgagccggggccttcgctactactatcgccgcgacatcgtgcgcaagagcggggggcgaaagtacacgtaccgcttcgggggccgcgtgcccagcctagcctatccggactgtgcgggaggcggacggggagcagagacacaataaaaattcccggtcaaacctcaaaaaaaaaaaaaaaaaaaaaaaaaaaaaaaaaaaggggaaaaaaaaaaaaaaaaaaaaaaaaaaaaaaaaaaaaaaaaaaaaaaaaaaaaaaccctggggggggggcccggtcccaaattccccctatagggagtcgtttaaaaattaacgggccggggtttaaaaacgtcggaacgggaaaaaccctggggtaaccaaactaaatcgcttggaagaaaatccccttttcgcaagttggcgtaatagcaaaaagcgcccccccaatcgcccttccaaaaattggcccaccctaaatggcaaagggaaaattgaaacgctaaatatttggtaaaaatccgggtaaaattttgggaaaataacctaatttttaaaccaataggccaaaatcggaaaaaccctttttaaataaaaaaaataaaccgaaatagggttagatggttgtccaagttggaaacaaaatcccattataaaaaacgggaactcaaacgtaaaagggcaaaaaaccgtatataagggaatggcccatacggaaacaatccccctaataaattttttggggtcaaggggcccccttaaatcgaaaccctaaggggacccccatttccttcggg

SEQ ID NO: 42083 - DNA, 340 bp, Homo sapiens
gatccccttctcgggtcctgggtcccgagttgggaggacccggacctctagatcattgaagtggtgtgatctagggccgggaagactgagtgtgcccctcccttcatcccgcaggtcccattcagctgtggcagttcctcctggagctgctccacgacggggcgcgtagcagctgcatccgttggactggcaacagccgcgagttccagctgtgcgaccccaaagaggtggggcagctcccctgcccagccaaatccgccccgtctcttctagttcaatttagctccgcccaagggctaggttcaaccgcgtagccctcggccccgccgctccccggccc

SEQ ID NO: 42084 - DNA, 500 bp, Homo sapiens
ggaaacacccacagatgatcaataaatactaagggaactcagaggctggggggatcctccatatgctgaacgctggttccccggttccccttatttctttctctatactttgtctctgtgtctttttcttttccaaatctctcgtcccaccttacgagaaacacccacaggtgtgtaggggcaacccacccctacatttttctttctttcttatttccatttgtttcatagtttagtgatgttttatcttgagttacaaatccctttggtgcaaaggatgatgtcttatgctagctgcacatctcgtcggtcttatagctcaccaccacagagaggtgagccctccacaagcccctggtctgtgtccttgactctcccaaggccaccaccccacctttccccacactcagagccatcagcatcaccaccaccattgatcgtatgaagacatgcagaccacttttatactgcatgtgctttgttgcaggtacttttgtgaa

SEQ ID NO: 42085 - DNA, 976 bp, Homo sapiens
ggatatcagctttctccatttcatagggttgacatgatcctgataaaactttttaccgagagatacacaaggtgattcttcacgtggaacctaataaacaagaacagcaaaaataacctagaaaaaaacaatgaggaaggttgctggtcctatgagatgttacatgtcgagaacctccataagtgaatgtgtagtgttggcccaggaatagaacaatggaaaagtttaaaatccagaaatcgatccatgtacatttggaaatttagtgattgataaagatagcatttaaaatcagtggtaaaaatcacttctaacaagtggtattttgacaataagaccaccctgtggaaaaggataaaattggatccatcttgcatagtgtatatttaaattccaaatgaatcagaaacccagacataaaaagggaaacctgcagagcgcagcggcttgtacctggagtcccagctattccggaagctgatgtaaggagggtcacttgagcccaggagcttgagaccagcaggaccccatctcttcaaagacttttaaagtcccaaagacaatgtaagtaaattccttgatagaatttgtaagtaaattccttgatagaattgggaaaacttcgctctctgggaatcaagggagaaattgatgaagtgttgatattccatatatatgaaatcttaaggacaacctagtagaaaaatgggcaaaaaatatgaatagctcacaggaaaaagaaaagcaaatggctcaaacatatgaacaaaagattctccagctgatatactgtaccatcgcttacctagagactggcaaaaatccaggagtttgacaacatatactgttggttaggctgtaggggaaaaaggcattctcataaacattgctagcaggaatgaaaaacttagaattcctatggaaggaagttggcactatctagcgagattatatatgctgctttagcaatcctact

SEQ ID NO: 42086 - DNA, 1214 bp, Homo sapiens
gagctgagattatgccattgcactctagcctgggcgaccaagagtgaaactctgtcttacacacacacacacacaaaaagacactatcaagttacagaaatcaaggcagtgtggtattggagaagacttagacatatagatcaatggaacagaatgggacccacacatagatcctcacaaatatggccaattgattgttttaaattgcggtaaactacatgtaacataaatttaccatcgtaaccatttttaagcatacagttcagtatggtttaatatattcatattgttgtgcaactaatttccagaactttttcgtcttgcaaaacaaactcgatttccgttaaacaacaactgcccctttctcctttccccagctcctgggcaacccgcattctactttctctttctataagcttgactatgttaggtacctcatataagtaatcatatagtatttgtgactggcttatttcacttaatgtaatgtcctcaaggttcatccatttgtcagaaattctttcctttttaacactgaataatattctctcgtttgtgtatacaacatcttgtttatccattcattcatgcatggacacttgggttccttctaccttttggctattgtgaataatgctgctatgaacatgggtatacaaatatctgttcgattccctgctttcaattcttttgggtattgttgtactgtgaaatatatatttggtctttgttccaatttcctggcatacaactcctaagatccttggaatctccaaagtgatgtctttttgtgtgctaatgagttgccagatggctggcagctcctaggtagcttcaggatgggggctggtcaccagaaatgattagacggttgggacttttggccctagccccatcctttagagaggaaaaaggggctcaaggttaagttgatcaccagcggtcaatggtttaatcaattatgcctacctaacaaagcttctataaaaactgcaaatgacagggtgtgggaagtttctgaatagttgaactcatgaaagttcctggagggtggcatgcctgggaggatataaaagctccacgtctattttcatctcttaccctaggcatcttttcatcaataccctttgtaatattctttataataaactggtaaatgtaagttaaaagttaagtgtcttcctgagttatatgccactctagcaaattaatcg

SEQ ID NO: 42087 - DNA, 552 bp, Homo sapiens
ggggacctcatcagcgcccagtcctttcttgatttaccgcgttgcttcctccctcttctccctagtaattattattcagagcttcccagaataaagccggggccctgattttacctagacaaacagtgccacaggtttccccgacggaaagactgaacccagcagagagaagcgggtgagggtgggagttccagaagggaaggggcacaggtggggcctggatccagattatggatggatgcccctcccaggtagcacccaggcccagccctgcccctcccatgcatgggagtagcaggaggttgtgatagtggccctgacaacaggtagccggtcaatggtttaatcaattatgcctacctaacaaagcttctataaaaactgcaaatgacagggtgtgggaagtttctgaatagttgaactcatgaaagttcctggagggtggcatgcctgggaggatataaaagctccacgtctattttcatctcttaccctaggcatcttttcatcaataccctttgtaatattctttataataaactggtaaatgta

SEQ ID NO: 42088 - DNA, 415 bp, Homo sapiens
ggggacctcatcagcgcccagtcctttcttgatttaccgcgttgcttcctccctcttctccctagtaattattattcagagcttcccagaataaagccggggccctgattttacctagacaaacagtgccacaggtttccccgacggaaagactgaacccagcagagagaagcgggtgagggtgggagttccagaagggaaggggcacaggtggggcctggatccagattatggatggatgcccctcccaggtagcacccaggcccagccctgcccctcccatgcatgggagtagcaggaggttgtgatagtggccctgacaacaggtagccggccctcttttatgccattgaccatggagtgctgtagtctctgtcttccttctttctcctcaccctcccttgccccacacctt

SEQ ID NO: 42089 - DNA, 817 bp, Homo sapiens
agtctccaaggccgccatcttggccaggattaaaagacccggagatggaaactacaagagtggctgagtttggggtccctcaggttcctttttcaaaaaccagccaggcagaggttttaatgtctgcttattaactactgaataatattctctcgtttgtgtatacaacatcttgtttatccattcattcatgcatggacacttgggttccttctaccttttggctattgtgaataatgctgctatgaacatgggtatacaaatatctgttcgattccctgctttcaattcttttgggtattgttgtactgtgaaatatatatttggtctttgttccaatttcctggcatacaactcctaagatccttggaatctccaaagtgatgtctttttgtgtgctaatgagttgccagatggctggcagctcctaggtagcttcaggatgggggctggtcaccagaaatgattagacggttgggacttttggccctagccccatcctttagagaggaaaaaggggctcaaggttaagttgatcaccagcggtcaatggtttaatcaattatgcctacctaacaaagcttctataaaaactgcaaatgacagggtgtgggaagtttctgaatagttgaactcatgaaagttcctggagggtggcatgcctgggaggatataaaagctccacgtctattttcatctcttaccctaggcatcttttcatcaataccctttgtaatattctttataataaactggtaaatgtaagttaaaagttaagtgtcttcctgagttatatgccactctagcaaattaatcg

SEQ ID NO: 42090 - DNA, 1161 bp, Homo sapiens
gagctgagattatgccattgcactctagcctgggcgaccaagagtgaaactctgtcttacacacacacacacacaaaaagacactatcaagttacagaaatcaaggcagtgtggtattggagaagacttagacatatagatcaatggaacagaatgggacccacacatagatcctcacaaatatggccaattgattgttttaaattgcggtaaactacatgtaacataaatttaccatcgtaaccatttttaagcatacagttcagtatggtttaatatattcatattgttgtgcaactaatttccagaactttttcgtcttgcaaaacaaactcgatttccgttaaacaacaactgcccctttctcctttccccagctcctgggcaacccgcattctactttctctttctataagcttgactatgttaggtacctcatataagtaatcatatagtatttgtgactggcttatttcacttaatgtaatgtcctcaaggttcatccatttgtcagaaattctttcctttttaacactgaataatattctctcgtttgtgtatacaacatcttgtttatccattcattcatgcatggacacttgggttccttctaccttttggctattgtgaataatgctgctatgaacatgggtatacaaatatctgttcgattccctgctttcaattcttttgggtattgttgtactgtgaaatatatatttggtctttgttccaatttcctggcatacaactcctaagatccttggaatctccaaagtgatgtctttttgtgtgctaatgagttgccagatggctggcagctcctaggtagcttcaggatgggggctggtcaccagaaatgattagacggttgggacttttggccctagccccatcctttagagaggaaaaaggggctcaaggttaagttgatcaccagcggtcaatggtttaatcaattatgcctacctaacaaagcttctataaaaactgcaaatgacagggtgtgggaagtttctgaatagttgaactcatgaaagttcctggagggtggcatgcctgggaggatataaaagctccacgtctattttcatctcttaccctaggcatcttttcatcaataccctttgtaatattctttataataaactggtaaatgta

SEQ ID NO: 42091 - DNA, 317 bp, Homo sapiens
gtttactttgcacaggcatttttaaaaacattaaagaaaaaataactgtgacatgtcatctcattattgaataaaatctcttcttaaatgattcatagttcctgaaaacattaagctttgaaaagaaaaacaagttaacaattgcttctactccataactgtttgcttgacaactatacttctttatcccgcatcttatagttaatatgactctgtttaataaaagaaacatctatgaaagcattaggagaatccaataaccgaaactatcgtgtgcttataattttaatttttatcagtacattttgtatcccctg

SEQ ID NO: 42092 - DNA, 293 bp, Homo sapiens
ggctcacctggcctctgaattccttacttgtaactgccacagagcttcttgtaggggagatttgcctccattcatggaattaatctaaatgagacatctgaggacatatctctactaattagaaaacacagagacaatgttcttctaactggacaactctaagcttttggtttggctcagttctgtaattgttagtaaactgacaactatttgctccttagctactggttactcttggcaaaaagaagtaacaagagatttacagtcctcttggctgaattcatcacaaataa

SEQ ID NO: 42093 - DNA, 324 bp, Homo sapiens
tcaatatacactacaagaaatagtaaaggaagttctccaggcagaaggaaaatgatatcaaatggaagctggattcacagtaagaaatgaacagcactagaaatgctaaatatgtgagtaaatataaaattttaaaaaattattttaaaacatccttattaagtagttgactatttaaagcaaaccaataagattgtattgtggtgcttatatgtaaaaataaaatgtatttcaactataaataaaatttgtgggaggccattgttttggattgagctcctgcaccaagctccaacagaccagaccaaaccagaatggagttac

SEQ ID NO: 42094 - DNA, 421 bp, Homo sapiens
gactggttaggaggatgggttttcaagtttcaaccttggccagggtaattattagtgatgtggccatggccgaggtacttaacctccattacccctctgtaaaataagaatgataccacataccccataagactgatgtaaggattgaatgaaatgatgtccagcattgagcacagtgcctggcacacagaaaaggtgcaggaaatgatagaaactactccattcggaacacaagacactttggttaatgatggctctcttatcactgccccatcttgttcactctgactcttgtgacctggcacggcttcattcattcattcgttcacttctcaagttatttataccaataaagcctagttccaaaataaatttggggtggctgatgtcagcccctactggaattctctctcccagatgc

SEQ ID NO: 42095 - DNA, 355 bp, Homo sapiens
gaattttatttaaaatattttgatgaactagatttaaagatagattaaattaattcctacacatgatttaatttaatggataaaataagggactgagcattagcctgaactgtgtacttgcattagccctgatgttccccagagggaataatatgtgaagaatactgcataggctgaaaaacaagagttcccagcagaccaatattctttctttctgcaagctgtgagacacctggggaaagttctccacatttggtttttcagctactccacccatgactagaaggaagattttattttattattttattttattgtattttttaacagtaaaagaaaaattattgttatttta

SEQ ID NO: 42096 - DNA, 377 bp, Homo sapiens
ttttaaagagagaagcaacagaatcagatctgcagcctagaagagagcttaccctggggagaggctggacgtggtctggggctctcgctggcagaggcagacacaaccttcctctcaggaaaccatgaggatacaaaagtaggagggatcaaaagaaggaatcaaaagatatttaggatttccagttcaagatgatggcttgaagacatgtgtttttatctctgctccctcctgaaaccccactaaggcaacagtaaatgatatatatatcccaaggacaaagattaaaggtgaagagtcaatagcaataaactttcagaaacctagaagcaaaccatcacttggtggttgacaagcaagcccaaagattcaactgg

SEQ ID NO: 42097 - DNA, 352 bp, Homo sapiens
aaaagatctccttccgagttaccctccctaaaatacaataaaaaccccatacccactcacctaagcacaatatgagcaactgaacacataagactgaaacccactggggtccaacagactcaacctatctctttgtgtctcagagtataattggcagtaatgaccatcgaactctggtctccctgcccaaaaccatgcttacaacttcccagttgccacttctgccgaaatgcccacagaagtgaatagactagtgagacagatatgtgatctcaaactcaagttttccagcttacacactattgataaaatactgaggaaaatctaagcatttttaaaagtcaaaaataaa

SEQ ID NO: 42098 - DNA, 639 bp, Homo sapiens
tgcctctgcccagagatgtcccaaaggccctcagcagacggccgggccagggatgtggctgccacagctgagaccaagggctctggctggcccgtccccaccaggtggccctgccctccccaagttgggggttgtggcacttggggtcaggcctagccacgtaaggacacaggtaacaccctgaggatctggcattggcagcttcaggcctaactttcctggtcagggccccttaaggtggcccgggcacattggtttcatttcgatgagactttgtcagaggcctggtctggtcctggccctaccgccccagctgtccttcagcacagctcggggtggggactccaggatgctgggtctgccccttgggaggggaactctggaaggtcagggtgatccacaactgtgagctgaggttggatgcagctgggagcttgggacagagagagcccagggctcccctgctgtggggcacctgcccagcggggacatgagatgacagagacctccccggcgggggtactcaggtgctacgaacatggcagctcttgtttccggctgagccatggccagagcagggctcagtctgcccctgaacttgctgaatggaccgacgagctgagcctgaaagcccagaag

SEQ ID NO: 42099 - DNA, 385 bp, Homo sapiens
agccatacaaccctacatttttaccctgcatctgttccgtagggaaagagaattttactgattgccagctaatgtttattgcatactcactatgttccagagactaaagcctccattcttatgcatatctgacccgcataatggctctctaaggtggtattaccatcattttctacatgagagcactgagcccagagaggttaaataacttgcccacagttgcacagctagtgaatttggggtttgaacccaaatctgcttgactgcaaagcccatgttcttaactattctactggtttttaaataacaagagcctcatgatttcacagggtataaacaatgacatcaaaatagaagtgaaagaaggaaagtctctgggtctata

SEQ ID NO: 42100 - DNA, 128 bp, Homo sapiens
tctgctctccagttaaacaactgaagaatgaacgaatttagtgcatttgcacaagaagtgcattacaatgcaggggaggaagaagtcacttggggttggacaaatccttagaaaatgccaaaggaata

SEQ ID NO: 42101 - DNA, 344 bp, Homo sapiens
aagctgtcatgggaatttgtacataactgtacagagtacatgtgtacttaacataattccagaattaccagtttttataaccatgataaaagccctctccaggggcttttgcctctttggccaaagtatcagtggccactcttagcttcaagaaggctgaaagatggaataatcaaggtcttctcttactcatgggggatatgttccaagaccctcagtagacaccggagactatgggtactaccaaaccgtgtatgtactgtttggtatatatttttttctatacatacatagctatgataaaacttaatttataaatgaggcacagtagagattaataataa

SEQ ID NO: 42102 - DNA, 455 bp, Homo sapiens
aatttatatttctgttaattccataggccagtaaagaaaatttttaaagtgacctagaaaaattaaagggaggttatctgttgattaactcactggtgaccatgttaagatgcattttcaagtatatactgagatgaatgggaacatatttgaagaaaaataaacccagctgccgggcaaggtggctcacacctgtaatcccagcactttgggaggccgaggcaggcggatcaccagaggtcaggagttcgagatcaaccttgctaacatggtgaaaccccatttctactaaatatacaaaattagctgggcgtggtggtgtgtgcctgtaatcccagctacttgggaggctgaggcaggagaatcgcttgaacctgggaggtggaggttacagtgagtcaggatcacgccattgcactccagcctgggcaacagagtaagactcggtctcaaaa

SEQ ID NO: 42103 - DNA, 504 bp, Homo sapiens
cttccaaacttgggtgatctgcctgccttggcctctcaaaatacaggtgtgagccaccgcacccagccaggtttattcttttttgaaagtacagtactctgttaaaattcctgtgtaaactgggacttttcttttcactttcttgtgtttcaagaacagtaggtgttccagggcttttgtcctgctgggtacaagcaagtaggattttgagaaggtgtgaggaggaggtcagaaaaattggtggaaataggaaagagaaagaaatatggccccgattttggggagagaaagtctggggaaagagcaaaggcaattaaagaggattttgaggaagagacttctgtaaaatatgtcttagcaacactttttggagttgaaaatatttctttttagtgtgttattttttctaagaggtgcctcaagatggataatggaagatttggagtacgattgggttgacaatccaaggagattcggtgacatccagattaccctgaaataaaa

SEQ ID NO: 42104 - DNA, 254 bp, Homo sapiens
cccgtctccccatcaccccagtgcccttttctcccatatattttaaagtgataaggctcaatgtaaacttcctccttcccaaacgtttagggcagttcctgccaaagtgccccattctacaaagtgatttagtactttaaccttgctccagacactctgacatctctgtttagtctctggtgtaaaaaggttcgtctctcatatttcttgaggttggggaaaggaaatggtcacagagtttaggtgagggtggg

SEQ ID NO: 42105 - DNA, 857 bp, Homo sapiens
gtcaccttctctcttcctctagagcactaatgccatttcctcccatcagctcaatacatcagcttagtcctctttagttttgggtccaagcagtattttgagggtggggaccagggaaaggtagcaccatgaatcaatacctgtgcatctctctctgttgccctgttcccccagccagtgtctccccttatttgttctctacttgtatcaggtaaaaaggccttcgtgatggtctggccaggatcaaaaggcaggcttctccattcctacccactcccacacttcctggcttatgagtaatgatattaccttttttttttttttttttaaattgagacagggtctcactatgttgctcaggttggtctgagtaatgatattatcttgcatttatgtggtgctttactttttgttacacattcacagtaattaacctcatttgattttcaacatctctacaacagaggtttggcaaatattttttgagtggctgctaagtggcaatcattccacaaggtatttttacatttgttacttcacttaatcctttcaacaatcctgagaggtaagcatttgctttacttaacagaggaggagacggagactcaaggaacttaaatcttaaaaaaaaaaaaaacccaaaacacccaaaaacaattatttatgttttacagataagagactataaaaccaattaacaggtactttcaccacatcagcttgtaagatgaaatggtttatcatcctaatgttagtgaatgacagaggtgtgcagtcttacaaatgacacactttgtaagtcactgagcaatgtttttctgccataagggattttgagtccgagaaatcaggtcctc

SEQ ID NO: 42106 - DNA, 656 bp, Homo sapiens
ttgtaggcagagtctcactatggttacccaggttggtctggaaattcctgggctcaagcgatccaccacctcagcctcctaaagtgctgagatagattacaggtatgagccatggcgcctggcctacatttttaacctaagcttaaatttatactttctatcagtgtccaaggttaataagtatctcttgtctttccaaggtaatagcatgaagatccatagatctctggcacaaaccttccagaggaagaacctagctacagaacccacaagatgtctagtttgtaagtgacaactgtgattctctccgggccagtgcgtgtcttagcctaactgactgggctagggaagtatttcagtggttcctgaggccgaaaccatacaaatcgccgccctatcgccgggctctctcccttaccttcagtctctgcactatctcccttatgtcctccacagaaccctctgtcgcctgtaggaagatgtggtctcctcgtccatagaagattttgagtgtggaggagtctggagtccagccaatgacatccccgcagtagcagttgaacaccacctccttggtgcgtaagtccaggagcaccacaaactcattggaaattccaaaatgcagtcgatttccaccccctgggcgtagtcctggg

SEQ ID NO: 42107 - DNA, 331 bp, Homo sapiens
aaccacaatagaccctgaatagccaaagaaatcttgaccaaaaaagaagctggaggtatcacactccttgatttcaaagtataacacaattataattgcaacaacatgctactggcataaaaacagataagtcaatcaacagaacaggacagaaagcccagtaataaactcatgcatttatggtcaattgatttttgacaaagatgtcaagaatgcacaatggggaatggtgttgggaaaactgaatatccatatgcagaataataaaatttgatccttatctcactccatgtataaaaatcaactcaaaatggattaaagacacaaatat

SEQ ID NO: 42108 - DNA, 591 bp, Homo sapiens
gagcgcaggtgctggggccaggggcggacagaactgtgtgaaagcaccaaggacagggccagaggagccaggtcagagcccagccctaggtcgggaacacgtagggagcagagctggtggttcagggccctgttgtggcatcagagagatgtgagcgctaacctcagcaccctgctttccactccggggccttggggcgacttatttatctgccaaggcagtttcctgacttcagggaaggggccaggagagaattaagtaagaacaagcagcacctgacactcagaaaagtgtccctaaatgttcgccacctttattaatagtacaaattaatgggtgaccagcctccattgtgggatggagccggaagctgctctccaggcctgctctcacccagatacatggtatgtttcgaccacacaggagttcttttaaggatgaatgatgatgaccgccaacgtttaggtgtcagcagattttacagaagcctttggccatttgacttctcctggtctagtggagcctctagttttctggggcctgcctcttcctgtccatagacaaccgtagctggggtgcggccgccccctt

SEQ ID NO: 42109 - DNA, 3288 bp, Homo sapiens
gctggccaggagcgcggggacagttcggggctgcgccggagcgccggcccgccttcccgggggttccgttatcatgtcgctgaggcagcgcctggcccagctggttggccgtctgcaggacccgcagaaagtggcccgtttccagcggctgtgcggggtggaagcgccgccgcgccgctcagcagaccggagggaggatgagaaagcggaggcgcctctcgccggagaccctcgactgcgagggcggcagccaggggcgcctggaggcccccagcctcccgggagcgaccgcaatcagtgcccggccaagccggacggcggcggcgcccccaacggcgtgcggaacgggctggcggccgagctgggcccggcctcgccgcggcgcgcgggcgctctgcgccgcaactcgctgacgggcgaggagggccagctggcccgcgtgagcaactggccgctctactgcctgttctgcttcggcacggagctgggcaacgaactcttctacatcctgttcttccccttctggatctggaacctggaccctctggtgggccggaggctcgtggtcatctgggtgctggtcatgtacctgggccagtgcaccaaggacatcatccgctggccgaggcccgcctcgccgcccgtggtcaagttggaggtcttctacaactctgagtacagcatgccctccacccatgccatgtccggcaccgccatccccatttctatggtcctcctcacctatggccgctggcagtaccctcttatatatggactgattcttattccctgctggtgttctctagtttgcctaagtagaatttacatgggaatgcactctattctggatattattgctggattcctatataccattttaatcttagctgtcttctatccatttgtggacctgattgacaacttcaaccaaactcacaaatatgctccattcatcatcatcgggcttcatttagctttggggatcttttctttcactcttgacacctggagcacatcccgaggagacacagccgagatactaggaagtggtgctggaattgcatgtggatctcatgttacttataacatgggtctagtattagatccttctctagatacattacctttagctgggccccccattactgtgactctgtttggaaaagccatattgcggatcctcatagggatggtatttgtactaataatcagagatgtaatgaaaaagatcaccattcctttagcctgcaaaatcttcaatataccgtgtgatgatattcgaaaagcaagacagcacatggaagttgaacttccttatcggtatattacctatggaatggttggtttctccatcacattttttgttccttacatatttttctttattggtatctcttgatggagaagtattgtttatgataagaaaggagggtatcagttactgatacccaaaaatatattccaggtaaagccaggtcagaattaggcttttgcaggaatttaacttaaataattatttaagtaaattcataagagtcagtgcattttatcattgcacatccagatactgttttaggtgagctgagctatttcgttactgagaaaatgataagtatccatttagaatgttcatgtaatgtttggagagttttgtattatggattcaacttatatataatatatataaggtacataatatgcaattatatatctgatatatattatatataaaataatatacctaagtgtttttttaaactatgggagtgtattataaaatcaataataatatgcaaacagttgtgcctgtgtatttgaactacatacaggtatgttgttattaacagatatatttaacatttatttactatgggagccatttcctaattgaattgcgtaattactagaccagaatgcatatgctactatacattgatttactgcctgtttttacactgccattacctttcatgttatccatgatgttgaacatgggaggcatttttaatggaccaaatttttagaaaaattagtttttggatttttttttaagttctgtatactgttttgaatgaactttatttgcagctattctggatgtcagtttaataattcaggtactgaattttattgcttgctaattgtgcctttccgttgctaaattaagaaatgctatgtgtactgtgatgtaaaaataagacattaactttatcttaagttacatataatcaagcaaatattttaaaaaatgtatgtcagggtgacaggcataaaagtaaattacccttaactctttagcctttatttagaaagaaatgtggaatgggctaaactttctcaccaatttattagaaagctaaatggataaatacttccctttttgtagatatttttctgtgcattgtaagttataggagcaggacatattttttgtacattgtcttgattgtttatactgcaggtaggtatttccagtgaatggaaacgttgaaatttatagatgggacaatgcacatacttcatatgtaaacaaagcatttttctaaataatttggaaaggattggatttagcaccgttaacttttaatacccatttattggctatttaaggtaaattataaaacctaaaattagtatcagtattttagatcctattattttttcaactttctattattttcacagtggaaaatttgcgtatagtattaaactattcttttttctgtctacctttatattttgaagtgtggttgtacttacgttaatagtaagtgtatttgtagaaagtttttcataaagaagagattaactttccatataaataaataccaggtatgaaattactgattttagtgcaatatctgtatgattatccagaactatcacttcagatgtttctattttgggcaccataactatttgagctcatatttttataattctgattgagaatttaggggcatggtaatttttaccaaaactgaagctggtaattttaagtaaagcaactaaatttaccctttacttattagttaaaaggaaaccaaggcatgtaggaaaatattggtacgttggaaaatgtgaaaagagctttactttcaaaatgtatgtttaatgaattgaattttagggaccgtttcccataatttgggcctatgctatcctgttgatttttatgtctagcttaaaaggtatttgaaaatgttccatttgtgttttattattttctgtcctatgacagttctatgctaaatgtattttaaaataaaagccaaattgaagattaaa

SEQ ID NO: 42110 - DNA, 3622 bp, Homo sapiens
gctggccaggagcgcggggacagttcggggctgcgccggagcgccggcccgccttcccgggggttccgttatcatgtcgctgaggcagcgcctggcccagctggttggccgtctgcaggacccgcagaaagtggcccgtttccagcggctgtgcggggtggaagcgccgccgcgccgctcagcagaccggagggaggatgagaaagcggaggcgcctctcgccggagaccctcgactgcgagggcggcagccaggggcgcctggaggcccccagcctcccgggagcgaccgcaatcagtgcccggccaagccggacggcggcggcgcccccaacggcgtgcggaacgggctggcggccgagctgggcccggcctcgccgcggcgcgcgggcgctctgcgccgcaactcgctgacgggcgaggagggccagctggcccgcgtgagcaactggccgctctactgcctgttctgcttcggcacggagctgggcaacgaactcttctacatcctgttcttccccttctggatctggaacctggaccctctggtgggccggaggctcgtggtcatctgggtgctggtcatgtacctgggccagtgcaccaaggacatcatccgctggccgaggcccgcctcgccgcccgtggtcaagttggaggtcttctacaactctgagtacagcatgccctccacccatgccatgtccggcaccgccatccccatttctatggtcctcctcacctatggccgctggcagtaccctcttatatatggactgattcttattccctgctggtgttctctagtttgcctaagtagaatttacatgggaatgcactctattctggatattattgctggattcctatataccattttaatcttagctgtcttctatccatttgtggacctgattgacaacttcaaccaaactcacaaatatgctccattcatcatcatcgggcttcatttagctttggggatcttttctttcactcttgacacctggagcacatcccgaggagacacagccgagatactaggaagtggtgctggaattgcatgtggatctcatgttacttataacatgggtctagtattagatccttctctagatacattacctttagctgggccccccattactgtgactctgtttggaaaagccatattgcggatcctcatagggatggtatttgtactaataatcagagatgtaatgaaaaagatcaccattcctttagcctgcaaaatcttcaatataccgtgtgatgatattcgaaaagcaagacagcacatggaagttgaacttccttatcggtatattacctatggaatggttggtttctccatcacattttttgttccttacatatttttctttattggtatctcttgatggagaagtattgtttatgataagaaaggagggtatcagttactgatacccaaaaatatattccaggtaaagccaggtcagaattaggcttttgcaggaatttaacttaaataattatttaagtaaattcataagagtcagtgcattttatcattgcacatccagatactgttttaggtgagctgagctatttcgttactgagaaaatgataagtatccatttagaatgttcatgtaatgtttggagagttttgtattatggattcaacttatatataatatatataaggtacataatatgcaattatatatctgatatatattatatataaaataatatacctaagtgtttttttaaactatgggagtgtattataaaatcaataataatatgcaaacagttgtgcctgtgtatttgaactacatacaggtatgttgttattaacagatatatttaacatttatttactatgggagccatttcctaattgaattgcgtaattactagaccagaatgcatatgctactatacattgatttactgcctgtttttacactgccattacctttcatgttatccatgatgttgaacatgggaggcatttttaatggaccaaatttttagaaaaattagtttttggatttttttttaagttctgtatactgttttgaatgaactttatttgcagctattctggatgtcagtttaataattcaggtactgaattttattgcttgctaattgtgcctttccgttgctaaattaagaaatgctatgtgtactgtgatgtaaaaataagacattaactttatcttaagttacatataatcaagcaaatattttaaaaaatgtatgtcagggtgacaggcataaaagtaaattacccttaactctttagcctttatttagaaagaaatgtggaatgggctaaactttctcaccaatttattagaaagctaaatggataaatacttccctttttgtagatatttttctgtgcattgtaagttataggagcaggacatattttttgtacattgtcttgattgtttatactgcaggtaggtatttccagtgaatggaaacgttgaaatttatagatgggacaatgcacatacttcatatgtaaacaaagcatttttctaaataatttggaaaggattggatttagcaccgttaacttttaatacccatttattggctatttaaggtaaattataaaacctaaaattagtatcagtattttagatcctattattttttcaactttctattattttcacagtggaaaatttgcgtatagtattaaactattcttttttctgtctacctttatattttgaagtgtggttgtacttacgttaatagtaagtgtatttgtagaaagtttttcataaagaagagattaactttccatataaataaataccaggtatgaaattactgattttagtgcaatatctgtatgattatccagaactatcacttcagatgtttctattttgggcaccataactatttgagctcatatttttataattctgattgagaatttaggggcatggtaatttttaccaaaactgaagctggtaattttaagtaaagcaactaaatttaccctttacttattagttaaaaggaaaccaaggcatgtaggaaaatattggtacgttggaaaatgtgaaaagagctttactttcaaaatgtatgtttaatgaattgaattttagggaccgtttcccataatttgggcctatgctatcctgttgatttttatgtctagcttaaaaggtatttgaaaatgttccatttgtgttttattattttctgtcctatgacagttctatgctaaatgtattttaaaataaaagccaaattgaagattaaaaaaaaaaaaaaaaaaaaaaaaaaaaaaaaaaaaaaaggggaaaaaaaaaaaaaaaaaaaaaaaaaaaattttggggggggggggggcgaaaaaattttaaaaacaccgttggggggggcaggggccccaagtggtattataaaaaacacggctcaagcgggggctcccacagagagacccggggcaaacacaacggtggggggggtttctcccccccaataaaaaagcgccggggggaacacaccaccggtgtttgaaaaaccaccacgagggaggcgcgagggagaacagaggggctatcaacgggggggcacccagggcgcgcgctataatg

SEQ ID NO: 42111 - DNA, 2911 bp, Homo sapiens
cttgcagcaatggcttggattagatccacttgcattctcttttttaccttgctttttgcccacatagcagctgtaccgattaagcatcttcctgaagaaaatgtacatgatgcagattttggtgaacagaaggatatttcagaaatcaatttagctgcaggcttggacctctttcaaggggacatcctcttgcagaaatccagaaatggcctgagagacccaaacaccaggtggacgttccccattccttacatcttggctgataatttggggctgaatgctaaaggagccattctgtatgcctttgagatgttccgtctcaagtcctgtgtggatttcaagccctatgaaggagagagctcatatatcatatttcaacagtttgatgggtgctggtctgaggttggtgaccaacatgtgggacagaacatttccattggccaaggatgtgcctataaggccatcatagaacacgagatcctgcatgctttgggattttaccacgagcagtcaaggacggaccgggatgattatgtgaacatctggtgggaccaaattctttcaggttaccagcacaactttgacacctatgatgatagcttaatcacagacctcaatacaccctatgattatgagtctttgatgcactaccagcctttctcatttaacaagaatgcaagtgttcccaccatcacagccaagatccctgagtttaactccattatcggacagcgcctggatttcagtgccattgatttagagaggctgaaccgaatgtacaattgcaccacaactcacactcttttggaccactgtacttttgagaaggcaaacatctgtggaatgattcagggcaccagagatgacactgactgggcccatcaggacagtgctcaggctggagaagtggatcacaccttgttgggacaatgcacaggtgccggctacttcatgcagttcagcaccagctcggggtccgcggaagaggcagccctactggagtctcggattctttacccaaagaggaagcagcagtgcctgcaatttttctataaaatgacgggaagtccttcagacagactcgttgtctgggtcaggagggatgacagcacaggcaatgttcgcaagttggtgaaggtgcagacttttcaaggagatgatgaccacaattggaaaattgcccatgtggtgctcaaagaggaacagaagtttcgctaccttttccagggcacaaaaggcgaccctcagaactcaactgggggaatttacctagatgacatcactctgacagaaaccccctgccccacaggggtctggacagtccggaatttctcccaagtccttgagaacaccagcaaaggggacaagcttcagagccctcgattctacaattcggagggatatggttttggggtaactttatacccaaatagcagagaaagctctggttacttgagacttgcttttcatgtgtgcagtggggagaacgatgctatcctggagtggccggtagaaaacagacaggtgataattaccatccttgaccaggagcctgatgtccggaacaggatgtcctcaagcatggtgttcactacctcgaagtcgcacacatctccagcgataaatgacactgtcatctgggacaggccgtccagggtgggaacctatcatacagactgtaattgttttagaagcatcgacttgggctggagtggtttcatttcccaccaaatgctgaaaaggaggagtttcctgaaaaatgatgacctcatcatatttgtggactttgaagatatcacccacctcagccagactgaagttcccactaaaggcaaaagactgagcccccaaggcctcattctccaaggccaggagcagcaggtctccgaagaaggttcgggaaaggccatgttagaggaagccctacctgtcagcctgagccaggggcagcccagccgacagaagcggtcggtggagaacacaggccccctggaggaccataactggccacagtacttcagagacccatgtgacccaaacccttgccaaaatgacggcatctgtgtgaacgtgaaggggatggcgagctgcaggtgcatctctggacatgctttcttctacacgggggagcgctgtcaggccgtgcaggtgcacggcagtgtcctgggcatggtgatcggaggcacggctggcgtgatcttcttgaccttctccatcatcgccatcctttcccaaaggccaaggaagtgacctgcctgctggcattggccagaccacagcagcacctcctccatgcaggccttaactttcccatgttcaatgcagtttggggcagcttttttatcagccttgctttggataggacctccaaggactaaggcctccagccccatgtgtgacccttgtcatctctctgccccacataattctgttactttgctatgtgctcctaatgtatctagtgtgtcctgtgacaacactcatcacacttcattgtaaatcacttgttttattgactgtctttcctatagactgtaagctccatgagggcaggcacatgttgttctcattgaccgtgctggccccagtgcctagatgcatggctggcacattgttggcactcaacaatggttgaatgaataaaacaataaatgaatgaataactaagatatagaaactctcatttatattgcagattgaatatatatgatgaaattcttatgttgaatatgttagaatcaaatactcatttttcattagatacagtagtgtcatcactcttttaagatcttgttaaagatttcaaataaaggtacttctgggcagccaggctgcacagcatttgctttcctctgagattctaagagaaggcctttaataaatttaataaatattgagttagcaccttctt

SEQ ID NO: 42112 - DNA, 488 bp, Homo sapiens
aataaggctaagaagtgcaggatcccaggagaaaggtaggtaggggtgtgtgtatgtgcgtgtgtgtgtgtgtgcacgcgcaagttggtatcacatactcagcagatgatgtagttatgagcagggagtttggaatcagagaccttgttttgacccctagctgtttctcccatttctgtgagaccctggactagttaatatgtgtcggtatgagtttctctacctgtgaaatggagctaatgcgtggtttctcagtggaggatctgttgacattggggctggataattcattgctgaggggctaccctgcgcattttaggatgttttgcagtatatctctagcctctacgcactagattccggtagcatcttccctgctgtctccctgtgacaaccaaaaatgtctctggacattgccaaatatcccctgggagtcaaaattgtttcagagccgctggcctatactacttctctctccctcccttcct

SEQ ID NO: 42113 - DNA, 181 bp, Homo sapiens
ccatccctcagcccagtgataatggactgattcaacaaatgaaatcagccaaactagtccatggattctctttctggccagtcagttcaataaggaagtgaaagccaaaaagaatggaggcatctaatttctaactggttaaataagtcattgttaagaaattttacattatgaaggtata

SEQ ID NO: 42114 - DNA, 791 bp, Homo sapiens
gaggcaggagaatcacttgaacctgggaggcggaggttgcagtgagccaagatcacgccactgcactccagcctgggcaacagagtgagactccgtctcaaaaaataaataaaatttttttaaaaaggtcaaaatgctataaaatttaacatctactatttaaatttataaaggagatgcagtgataattatgcatatgcgttttttgacttgttagctacattcttttttactatacttgctttctttattaagttctacattttgtcctacattaatatgaatcatttgaagtactttattctaatttaaatttgaaaatactattttctgaaaaaatgtattttattttggaagctcttcatttttaaaaatttgtggtttatattctgagcaaattaaaagtagctgttttggccatttaaaaatgttaaaagaatatgagtgcattaagagatataatgaccactataactattacttgacctgtttttatattcactacctaacatttatttaatgcctgctaaatacaaggcagtataattgagccagtttgtgtgatagaatatatatttgattctttaaatttttgtttttttattataacagtgtgctcagtttaaactgtgaaacaaagacaagaacagctgccatcattttaagataactgaagttagaaatgtgataatggttgttttaaaatctttacctctgcaattacctataaggccttttaagatcctgtaatgatctgcctacccacaccacttcttaaacctctctggcct

SEQ ID NO: 42115 - DNA, 469 bp, Homo sapiens
agataaactgtttccacctgtgacaaatgagtcatccaccttccgtgtggtctggactttgtccctgttacaatattcctgtctcttgtttctggtttttggcgtcccacgtgttgtccctgtaacagtcctgtctcttgtttctggggtcacccctgtggcgagctgactgtgccacgttcctgaggctggtgaggatgctgtgggcaccttaatcacggctgtgaacaaactggctagagctaggtgccatggagctttgcagtggacagtaagttgtggtacccattctttgatcagtgacggagccaggtgccttattaagtctcggggatttctggaagcacagagcaggcaagcaccttctacactgaaaggaatccttctcacactcatgttggcaacgtgaagtcctgcctttggaaatccctgatttcctaagacactaccctaacattttaaaggactt

SEQ ID NO: 42116 - DNA, 727 bp, Homo sapiens
agctccctggcttccattccactcatgactagctttacctctttgaccccactgtattattgtctagcccagttcagctgaatctttcaacacaaaatatacagggaaccccttcctggggaacttcctttgttattgaggtcttcgctgatggcttcttccatttgatactcagtctcagtcacagtaggattacggaatcttttgccagagtatcaatctacatgggtgctacacattactgaaaaaaattaggaacatggtgctagttaattcaagtcttcatgtaaaacttcttctatcatagtggacattaaaaaaaatctctctgcaaagtgcattgaccctacctctagtagatgaatgttgaacaagtagcctatctaggaagcaagtgactagcatccatgggcatcccacaggttgtagtccagccccgatcttggtggttgggattgatgttgctgccaagtccctccgtttcatgttcaggctctgcctatgttcctggtgtctggtacctgatttttcaggatgctgacatttacttcttgcccacaacaccatataccctaagtcttgccaacatctttgaatgtcttctgctggtctgtctctcctccgttgttcttttactatgtcccaagtgcatgctttgttcagtatctgcctaagtctcaggatactgattttagctttttactaggtcctgacattcccgtagttt

SEQ ID NO: 42117 - DNA, 316 bp, Homo sapiens
aaattactaggatctgatatgaaagagtagacactactaccaaccttacagaaatgggcaatctgaatagacctataactagtgaacagattaaaccaggaatcagaaaattgcccacaaagaatagtccaggcacagacagttttaccactgtgttctaccaaacaatcaaataaattatagcaattattctcaaactctttcaagaaataggagggagtacttcccagtattgccctgataacaaaactgctcaaagatattacaagaaaactgcagaccaatatgtcttatgaaatacctgcaaaaatcctca

SEQ ID NO: 42118 - DNA, 441 bp, Homo sapiens
accacaaccattcaatggagaaagaagagtaccttcaacaaatcatactagaacatttgtataatgacatgtaaaaaaaaatgaagtgggactccatataaaataattaactcatatataataattaactcatggatcaaggaccctcaatgtaaggggtaagattgcaaaattcttagaagcaaacatagaagtagatctgcatttcctcagatttgacaatggattgttagatttgacaccaaaagcactagtaacaaaatttaaaaatagattagattctgcaaaaatgtaaagcttttttgcattaaaaaacattttcagccaggtgcagtgctcatgcctgtaatcccagaactttgggaggccacagcataaggcttgcttgagcccaggaatttgagaccagcatgggcaatatagtgagaccttgtctctaga

SEQ ID NO: 42119 - DNA, 253 bp, Homo sapiens
tctgaatctcgttgacccttcagtaaaatggaaatagtagtactgactcaaccactgtcttatcagatacacatagcaatcctataaggtgagtcttattaaaggaaacagaggctcaagagaggttaatagtttgcttaaggtcacacagcaagtagcattgtcagggttaaaccaattctttgtaactctcaagttgggtgttattagtaatagcctgattagagtaatatacaaacagactattgagagt

SEQ ID NO: 42120 - DNA, 287 bp, Homo sapiens
ccgggtgggggtccaggaacaggcccaacaagccaaagcccaggagaccggggtcttgggcacagacccctgggccatctcttgccaaggccctggaaatagggatcctggacacagaccccccacaaaaccaaggacaggggtacagagattctaggtacaactcctagaactagatggggatggagatggggtcggggacacagcccccgtatcaaaccaaggcctccaggacgcgattccagacacaatccctacctctccctgcctaagggggtctcagcaca

SEQ ID NO: 42121 - DNA, 674 bp, Homo sapiens
cggtatcatttgttgaaaagattatcttttccccacttaaatgacttggcactttgctgaaaatcaattgaccatatatgtgtggatctatttctggacttgctattctgttccattcatctaatggtctattttcatatcaataccatactgtcttgattactgtagctttataataattcttgaaatcatgtagtctaagtccttcaactgtgttgttctttttcaaagttattttagcaactctgggttccttgcatttccatataaactttagaatcaggttatcaaattctacaagtaggcatgctgaggtctgattccgattgctttgaatctgtagatcattttgggaaaagtcgccatcctaagatactgagtcttctgattcaagagcatgttataacttgccatttatttaggtcttttaaaatttctctcagcagtgttttgtagattacagtgtacaggcctcgcgcattttatctctgagcatttcataattttcatgcttgattactgttttttgtttttttttttttgagatggtagtcttgctctgtcacccaggctagagtgcagtggcatgatctcggctcactgcaagctctgcctcctgggttcaagcaattctcctgcctcagcctccccagtaactgggattacaggcgcct

SEQ ID NO: 42122 - DNA, 2215 bp, Homo sapiens
cgcccgcgcgggccctgacgcgggcccgggcgccgcgccgctgcggctgcaggcggcgacggctacaccatgggccggctgctgcgggccgcccggctgccgccgctgctttcgccgctgctgcttctgctggttgggggagcgttcctgggtgcctgtgtggctgggtctgatgagcctggcccagagggcctcacctccacctccctgctagacctcctgctgcccactggcttggagccactggactcagaggagcctagtgagaccatgggcctgggagctgggctgggagcccctggctcaggcttccccagcgaagagaatgaagagtctcggattctgcagccaccacagtacttctgggaagaggaggaagagctgaatgactcaagtctggacctgggacccactgcagattatgtttttcctgacttaactgagaaggcaggttccattgaagacaccagccaggctcaagagctgccaaacctcccctctcccttgcccaagatgaatctggttgagcctccctggcatatgcctcccagagaggaggaagaagaggaagaggaagaggaggagagggagaaggaagaggtagagaaacaagaggaggaggaagaggaggagctgctccctgtgaatggatcccaagaagaagccaagcctcaggtccgtgacttttctctcaccagcagcagccagaccccaggggccaccaaaagcaggcatgaagactccggggaccaggcctcatcaggtgtggaggtggagagcagcatggggcccagcttgctgctgccttcagtcaccccaactacagtgactccgggggaccaggactccaccagccaagaggcagaggccacagtgctgccagctgcagggcttggggtagagttcgaggctcctcaggaagcaagcgaggaagccactgcaggagcagctggtttgtctggccagcacgaggaggtgccggccttgccttcattccctcaaaccacagctcccagtggggccgagcacccagatgaagatccccttggctctagaacctcagcctcttccccactggcccctggagacatggaactgacaccttcctctgctaccttgggacaagaagatctcaaccagcagctcctagaagggcaggcagctgaagctcaatccaggataccctgggattctacgcaggtgatctgcaaggactggagcaatctggctgggaaaaactacatcattctgaacatgacagagaacatagactgtgaggtgttccggcagcaccgggggccacagctcctggccctggtggaagaggtgctgccccgccatggcagtggccaccatggggcctggcacatctctctgagcaagcccagcgagaaggagcagcaccttctcatgacactggtgggcgagcagggggtggtgcccactcaagatgtcctttccatgctgggtgacatccgcaggagcctggaggagattggcatccagaactattccacaaccagcagctgccaggcgcgggccagccaggtgcgcagcgactacggcacgctcttcgtggtgctggtggtcattggggccatctgcatcatcatcattgcgcttggcctgctctacaactgctggcagcgccggctgcccaagctcaagcacgtgtcgcacggcgaggagctgcgcttcgtggagaacggctgccacgacaaccccacgctggacgtggccagcgacagccagtcggagatgcaggagaagcaccccagcctgaacggcggcggggccctcaacggcccggggagctggggggcgctcatggggggcaagcgggaccccgaggactcggacgtgttcgaggaggacacgcacctgtgagcgcagccgaggcgcaggccgagtgggccgccaggaccaagcgaggtggaccccgaaacggacggcccggagcccgcaccagccccgcgcctacccgggccgcccccgcggcctggccctcggcgcgggctccttcccgcttcccccgacttcacacggcggcttcggaccaactccctcactcccgcccgaggggcaggcctcaaagcccgccttggccccgctttcccgcccctgaaccccggccccgcgggcggcgggcgcgcttcctgcgccccgggactcaattaaacccgcccggagaccacgccgggcccagcgcgtctgc

SEQ ID NO: 42123 - DNA, 1856 bp, Homo sapiens
cgcccgcgcgggccctgacgcgggcccgggcgccgcgccgctgcggctgcaggcggcgacggctacaccatgggccggctgctgcgggccgcccggctgccgccgctgctttcgccgctgctgcttctgctggttgggggagcgttcctgggtgcctgtgtggctgggtctgatgagcctggcccagagggcctcacctccacctccctgctagacctcctgctgcccactggcttggagccactggactcagaggagcctagtgagaccatgggcctgggagctgggctgggagcccctggctcaggcttccccagcgaagagaatgaagagtctcggattctgcagccaccacagtacttctgggaagaggaggaagagctgaatgactcaagtctggacctgggacccactgcagattatgtttttcctgacttaactgagaaggcaggttccattgaagacaccagccaggctcaagagctgccaaacctcccctctcccttgcccaagatgaatctggttgagcctccctggcatatgcctcccagagaggaggaagaagaggaagaggaagaggaggagagggagaaggaagaggtagagaaacaagaggaggaggaagaggaggagctgctccctgtgaatggatcccaagaagaagccaagcctcaggtccgtgacttttctctcaccagcagcagccagaccccaggggccaccaaaagcaggcatgaagactccggggaccaggcctcatcaggtgtggaggtggagagcagcatggggcccagcttgctgctgccttcagtcaccccaactacagtgactccgggggaccaggactccaccagccaagaggcagaggccacagtgctgccagctgcagggcttggggtagagttcgaggctcctcaggaagcaagcgaggaagccactgcaggagcagctggtttgtctggccagcacgaggaggtgccggccttgccttcattccctcaaaccacagctcccagtggggccgagcacccagatgaagatccccttggctctagaacctcagcctcttccccactggcccctggagacatggaactgacaccttcctctgctaccttgggacaagaagatctcaaccagcagctcctagaagggcaggcagctgaagctcaatccaggataccctgggattctacgcaggtgatctgcaaggactggagcaatctggctgggaaaaactacatcattctgaacatgacagagaacatagactgtgaggtgttccggcagcaccgggggccacagctcctggccctggtggaagaggtgctgccccgccatggcagtggccaccatggggcctggcacatctctctgagcaagcccagcgagaaggagcagcaccttctcatgacactggtgggcgagcagggggtggtgcccactcaagatgtcctttccatgctgggtgacatccgcaggagcctggaggagattggcatccagaactattccacaaccagcagctgccaggcgcgggccagccaggtgcgcagcgactacggcacgctcttcgtggtgctggtggtcattggggccatctgcatcatcatcattgcgcttggcctgctctacaactgctggcagcgccggctgcccaagctcaagcacgtggtgagtgtggggacaggtggggctgggggccagttgagaggagagtgcccatcgataggtgtcctcatctgcaaggggaggcagtgactctcctgggcgcacagggtcccgtgggtgaagcagctggtcagcctagcactgctgactgctctgcagggcaccagccccaggacaggtgccag

SEQ ID NO: 42124 - DNA, 1391 bp, Homo sapiens
cggacgcgtgggcatgctgctctccacctccacacctgatgaggccacagtgctgccagctgcagggcttggggtagagttcgaggctcctcaggaagcaagcgaggaagccactgcaggagcagctggtttgtctggccagcacgaggaggtgccggccttgccttcattccctcaaaccacagctcccagtggggccgagcacccagatgaagatccccttggctctagaacctcagcctcttccccactggcccctggagacatggaactgacaccttcctctgctaccttgggacaagaagatctcaaccagcagctcctagaagggcaggcagctgaagctcaatccaggataccctgggattctacgcaggtgatctgcaaggactggagcaatctggctgggaaaaactacatcattctgaacatgacagagaacatagactgtgaggtgttccggcagcaccgggggccacagctcctggccctggtggaagaggtgctgccccgccatggcagtggccaccatggggcctggcacatctctctgagcaagcccagcgagaaggagcagcaccttctcatgacactggtgggcgagcagggggtggtgcccactcaagatgtcctttccatgctgggtgacatccgcaggagcctggaggagattggcatccagaactattccacaaccagcagctgccaggcgcgggccagccaggtgcgcagcgactacggcacgctcttcgtggtgctggtggtcattggggccatctgcatcatcatcattgcgcttggcctgctctacaactgctggcagcgccggctgcccaagctcaagcacgtgtcgcacggcgaggagctgcgcttcgtggagaacggctgccacgacaaccccacgctggacgtggccagcgacagccagtcggagatgcaggagaagcaccccagcctgaacggcggcggggccctcaacggcccggggagctggggggcgctcatggggggcaagcgggaccccgaggactcggacgtgttcgaggaggacacgcacctgtgagcgcagccgaggcgcaggccgagtgggccgccaggaccaagcgaggtggaccccgaaacggacggcccggagcccgcaccagccccgcgcctacccgggccgcccccgcggcctggccctcggcgcgggctccttcccgcttcccccgacttcacacggcggcttcggaccaactccctcactcccgcccgaggggcaggcctcaaagcccgccttggccccgctttcccgcccctgaaccccggccccgcgggcggcgggcgcgcttcctgcgccccgggactcaattaaacccgcccggagaccacgccgggcccagcgcgtctgc

SEQ ID NO: 42125 - DNA, 1273 bp, Homo sapiens
atatgggctatgcgacgggcgtagcacgaggaggtgccggccttgccttcattccctcaaaccacagctcccagtggggccgagcacccagatgaagatccccttggctctagaacctcagcctcttccccactggcccctggagacatggaactgacaccttcctctgctaccttgggacaagaagatctcaaccagcagctcctagaagggcaggcagctgaagctcaatccaggataccctgggattctacgcaggtgatctgcaaggactggagcaatctggctgggaaaaactacatcattctgaacatgacagagaacatagactgtgaggtgttccggcagcaccgggggccacagctcctggccctggtggaagaggtgctgccccgccatggcagtggccaccatggggcctggcacatctctctgagcaagcccagcgagaaggagcagcaccttctcatgacactggtgggcgagcagggggtggtgcccactcaagatgtcctttccatgctgggtgacatccgcaggagcctggaggagattggcatccagaactattccacaaccagcagctgccaggcgcgggccagccaggtgcgcagcgactacggcacgctcttcgtggtgctggtggtcattggggccatctgcatcatcatcattgcgcttggcctgctctacaactgctggcagcgccggctgcccaagctcaagcacgtgtcgcacggcgaggagctgcgcttcgtggagaacggctgccacgacaaccccacgctggacgtggccagcgacagccagtcggagatgcaggagaagcaccccagcctgaacggcggcggggccctcaacggcccggggagctggggggcgctcatggggggcaagcgggaccccgaggactcggacgtgttcgaggaggacacgcacctgtgagcgcagccgaggcgcaggccgagtgggccgccaggaccaagcgaggtggaccccgaaacggacggcccggagcccgcaccagccccgcgcctacccgggccgcccccgcggcctggccctcggcgcgggctccttcccgcttcccccgacttcacacggcggcttcggaccaactccctcactcccgcccgaggggcaggcctcaaagcccgccttggccccgctttcccgcccctgaaccccggccccgcgggcggcgggcgcgcttcctgcgccccgggactcaattaaacccgcccggagaccacgccgggcccagcgcgtctgc

SEQ ID NO: 42126 - DNA, 1562 bp, Homo sapiens
cgcccgcgcgggccctgacgcgggcccgggcgccgcgccgctgcggctgcaggcggcgacggctacaccatgggccggctgctgcgggccgcccggctgccgccgctgctttcgccgctgctgcttctgctggttgggggagcgttcctgggtgcctgtgtggctgggtctgatgagcctggcccagagggcctcacctccacctccctgctagacctcctgctgcccactggcttggagccactggactcagaggagcctagtgagaccatgggcctgggagctgggctgggagcccctggctcaggcttccccagcgaagagaatgaagagtctcggattctgcagccaccacagtacttctgggaagaggaggaagagctgaatgactcaagtctggacctgggacccactgcaggtagctcttcttacctacagagcattgacaccttcctctgctaccttgggacaagaagatctcaaccagcagctcctagaagggcaggcagctgaagctcaatccaggataccctgggattctacgcaggtgatctgcaaggactggagcaatctggctgggaaaaactacatcattctgaacatgacagagaacatagactgtgaggtgttccggcagcaccgggggccacagctcctggccctggtggaagaggtgctgccccgccatggcagtggccaccatggggcctggcacatctctctgagcaagcccagcgagaaggagcagcaccttctcatgacactggtgggcgagcagggggtggtgcccactcaagatgtcctttccatgctgggtgacatccgcaggagcctggaggagattggcatccagaactattccacaaccagcagctgccaggcgcgggccagccaggtgcgcagcgactacggcacgctcttcgtggtgctggtggtcattggggccatctgcatcatcatcattgcgcttggcctgctctacaactgctggcagcgccggctgcccaagctcaagcacgtgtcgcacggcgaggagctgcgcttcgtggagaacggctgccacgacaaccccacgctggacgtggccagcgacagccagtcggagatgcaggagaagcaccccagcctgaacggcggcggggccctcaacggcccggggagctggggggcgctcatggggggcaagcgggaccccgaggactcggacgtgttcgaggaggacacgcacctgtgagcgcagccgaggcgcaggccgagtgggccgccaggaccaagcgaggtggaccccgaaacggacggcccggagcccgcaccagccccgcgcctacccgggccgcccccgcggcctggccctcggcgcgggctccttcccgcttcccccgacttcacacggcggcttcggaccaactccctcactcccgcccgaggggcaggcctcaaagcccgccttggccccgctttcccgcccctgaaccccggccccgcgggcggcgggcgcgcttcctgcgccccgggactcaattaaacccgcccggagaccacgccgggcccagcgcgtctgc

SEQ ID NO: 42127 - DNA, 1150 bp, Homo sapiens
cactgcaggagcacctcctcgtgctggccagacaaaccagctgctcctgcagtggcttcctcgcttgcttcctgaggagcctcgaactctaccccaagccctgcagctggcagcactgtggcctctgcagcacgaggaggtgccggccttgccttcattccctcaaaccacagctcccagtggggccgagcacccagatgaagatccccttggctctagaacctcagcctcttccccaagctcctggccctggtggaagaggtgctgccccgccatggcagtggccaccatggggcctggcacatctctctgagcaagcccagcgagaaggagcagcaccttctcatgacactggtgggcgagcagggggtggtgcccactcaagatgtcctttccatgctgggtgacatccgcaggagcctggaggagattggcatccagaactattccacaaccagcagctgccaggcgcgggccagccaggtgcgcagcgactacggcacgctcttcgtggtgctggtggtcattggggccatctgcatcatcatcattgcgcttggcctgctctacaactgctggcagcgccggctgcccaagctcaagcacgtgtcgcacggcgaggagctgcgcttcgtggagaacggctgccacgacaaccccacgctggacgtggccagcgacagccagtcggagatgcaggagaagcaccccagcctgaacggcggcggggccctcaacggcccggggagctggggggcgctcatggggggcaagcgggaccccgaggactcggacgtgttcgaggaggacacgcacctgtgagcgcagccgaggcgcaggccgagtgggccgccaggaccaagcgaggtggaccccgaaacggacggcccggagcccgcaccagccccgcgcctacccgggccgcccccgcggcctggccctcggcgcgggctccttcccgcttcccccgacttcacacggcggcttcggaccaactccctcactcccgcccgaggggcaggcctcaaagcccgccttggccccgctttcccgcccctgaaccccggccccgcgggcggcgggcgcgcttcctgcgccccgggactcaattaaacccgcccggagaccacgccgggcccagcgcgtctgc

SEQ ID NO: 42128 - DNA, 949 bp, Homo sapiens
gcgcgtgcgtgctggcgtgcgttcactttcagcctggtgtggggcttgtaaacatataacataaaaatggcttccaaaagagctctggtcatcctggctaaaggagcagaggaaatggagacggtcatccctgtaggactgcatccaaccccgcaggctccactccgggtggtgcccactcaagatgtcctttccatgctgggtgacatccgcaggagcctggaggagattggcatccagaactattccacaaccagcagctgccaggcgcgggccagccaggtgcgcagcgactacggcacgctcttcgtggtgctggtggtcattggggccatctgcatcatcatcattgcgcttggcctgctctacaactgctggcagcgccggctgcccaagctcaagcacgtgtcgcacggcgaggagctgcgcttcgtggagaacggctgccacgacaaccccacgctggacgtggccagcgacagccagtcggagatgcaggagaagcaccccagcctgaacggcggcggggccctcaacggcccggggagctggggggcgctcatggggggcaagcgggaccccgaggactcggacgtgttcgaggaggacacgcacctgtgagcgcagccgaggcgcaggccgagtgggccgccaggaccaagcgaggtggaccccgaaacggacggcccggagcccgcaccagccccgcgcctacccgggccgcccccgcggcctggccctcggcgcgggctccttcccgcttcccccgacttcacacggcggcttcggaccaactccctcactcccgcccgaggggcaggcctcaaagcccgccttggccccgctttcccgcccctgaaccccggccccgcgggcggcgggcgcgcttcctgcgccccgggactcaattaaacccgcccggagaccacgccgggcccagcgcgtctgc

SEQ ID NO: 42129 - DNA, 905 bp, Homo sapiens
ccagaggcaggccctgcgttggtggtgcccaaggatcaaggagaggctccagcagcctagaggcctccccaggaggaagcgagcagagccctagcgatgctccctgcccacctcgcaagtggagtcttcttagggggctgttgggggatcgatgacgtcagggaggccacggggctttgtagtgccaacgactagtaggtttattttgagaaaggagttgagctgcagcaacagaaaagaaggatctggcacctgtggagggtgccgcgggaaccccctgggtggggttgcacagacggccgcgggcctggcgctgtccgggggctggctcgctcgcccatggcctctccccaccccgcctcagtcgcacggcgaggagctgcgcttcgtggagaacggctgccacgacaaccccacgctggacgtggccagcgacagccagtcggagatgcaggagaagcaccccagcctgaacggcggcggggccctcaacggcccggggagctggggggcgctcatggggggcaagcgggaccccgaggactcggacgtgttcgaggaggacacgcacctgtgagcgcagccgaggcgcaggccgagtgggccgccaggaccaagcgaggtggaccccgaaacggacggcccggagcccgcaccagccccgcgcctacccgggccgcccccgcggcctggccctcggcgcgggctccttcccgcttcccccgacttcacacggcggcttcggaccaactccctcactcccgcccgaggggcaggcctcaaagcccgccttggccccgctttcccgcccctgaaccccggccccgcgggcggcgggcgcgcttcctgcgccccgggactcaattaaacccgcccggagaccacgccgggcccagcgcgtctgc

SEQ ID NO: 42130 - DNA, 1070 bp, Homo sapiens
aggggagctgagcggcgtccgcccccgccgagccgagcggagcgcgagcgaagccggcgcgcctgcagctgggagctgggagctgggagcgcgccgggcgcagggccgggccggccgcgggagggtagtgtcagcgcccgcgtccagctcttcggccgcagacccgggctgtctggaggccgcgcggccacctgctgcgtcgccccggctttgggctggggctagacgcgcaccgcggcgggagcagccccggctcgccgcaccccgcggaaggtgcccttctctgcgcgtctcgccgagcccgggccacgctcctgtcccagcgagcttgacatgatttccacaagggtgatggacattaagcttcgggaggctgcagaaggccttggggaggacagcacaggaaagaaaaaatctaaattcaaaacttttaagaagttttttgggaagaagaagagaaaagaatcgccgtcgtccacaggaagtagcacctggaaacaaagtcagacgaggaatgaggtcattgccatcgaatccgggccagtgggctacgactccgaggatgagctggaggagtcgaggggcacgctgggcagccgggccctttctcacgacagtattttcattcctgagtccggacaggacgctactcggcctgtgcgggtgttttcccaagaaaatgtgtgtgatcggattaaagctctgcagttaaaaatacagtgtaatgtgaaaatggggccaccacctcctccaggggggcttcctgccaagcggggagaggatgccggcatgagctctgaggacgacgggctgcccaggagccccccagagatgtctctgctgcacgacgtgggtcctggtaccaccataaaggtctctgtcgtgtctccagaccacgtgagcgacagcaccgtctctgcccggatctcagacaacagcctggcaccagtggcttgacttcagttatcctgcagaatcctcctcctgcctggacaactctgcagctaagcacaagctccaggtcaagccccgcaaccagcggtcgagtaagatgaggcggctctcatcgg

SEQ ID NO: 42131 - DNA, 934 bp, Homo sapiens
aggggagctgagcggcgtccgcccccgccgagccgagcggagcgcgagcgaagccggcgcgcctgcagctgggagctgggagctgggagcgcgccgggcgcagggccgggccggccgcgggagggtagtgtcagcgcccgcgtccagctcttcggccgcagacccgggctgtctggaggccgcgcggccacctgctgcgtcgccccggctttgggctggggctagacgcgcaccgcggcgggagcagccccggctcgccgcaccccgcggaaggtgcccttctctgcgcgtctcgccgagcccgggccacgctcctgtcccagcgagcttgacatgatttccacaagggtgatggacattaagcttcgggaggctgcagaaggccttggggaggacagcacaggaaagaaaaaatctaaattcaaaacttttaagaagttttttgggaagaagaagagaaaagaatcgccgtcgtccacaggaagtagcacctggaaacaaagtcagacgaggaatgaggtcattgccatcgaatccgggccagtgggctacgactccgaggatgagctggattaaaaatacagtgtaatgtgaaaatggggccaccacctcctccaggggggcttcctgccaagcggggagaggatgccggcatgagctctgaggacgacgggctgcccaggagccccccagagatgtctctgctgcacgacgtgggtcctggtaccaccataaaggtctctgtcgtgtctccagaccacgtgagcgacagcaccgtctctgcccggatctcagacaacagcctggcaccagtggcttgacttcagttatcctgcagaatcctcctcctgcctggacaactctgcagctaagcacaagctccaggtcaagccccgcaaccagcggtcgagtaagatgaggcggctctcatcgg

SEQ ID NO: 42132 - DNA, 922 bp, Homo sapiens
aggggagctgagcggcgtccgcccccgccgagccgagcggagcgcgagcgaagccggcgcgcctgcagctgggagctgggagctgggagcgcgccgggcgcagggccgggccggccgcgggagggtagtgtcagcgcccgcgtccagctcttcggccgcagacccgggctgtctggaggccgcgcggccacctgctgcgtcgccccggctttgggctggggctagacgcgcaccgcggcgggagcagccccggctcgccgcaccccgcggaaggtgcccttctctgcgcgtctcgccgagcccgggccacgctcctgtcccaggttttaactccatgattgtgtgctatgagtatatggctgcatgtctcaagaaattcactggctttaaaatgtgggcttagctactgccagtatgatttgatgaaagcggatagaggtctcagatccacccccggattccaccgtcaggcccaaggacggacccctggccattgactgatgccaagtgggtgcctggcagcagccttccttcccatccctgcttctggacgcctcagccaagtcactgattttctgcatactccatgtaatgaatctggtatgctgagataaggacacctgtgactgagatgatttctttggcgtccgtgcaagataaaagcgagcttgacatgatttccacaagggtgatggacattaagcttcgggaggctgcagaaggccttggggaggacagcacaggaagaaaaattctaattcacacttttacaagtttttggcacaagaagaaaaaaatccgtcgccacggaagtcgcctgcgacaagccacggcgaagaggtcttcctcaatccggccggggcacccggatatgagacaaagcacgggcgagctccaccaaacccacgacacgccgccagta

SEQ ID NO: 42133 - DNA, 978 bp, Homo sapiens
gtcgacaggctatccacaggctgtgggatgggagaaactgtggagccatccagctgtgtggccaggaaggatggctagcctctcccctgccagactactcactgcagggacagggcaggcatttgccagaagtcactgattttctgcatactccatgtaatgaatctggtatgctgagataaggacacctgtgactgagatgatttctttggcgtccgtgcaagataaaagcgagcttgacatgatttccacaagggtgatggacattaagcttcgggaggctgcagaaggccttggggaggacagcacaggaaagaaaaaatctaaattcaaaacttttaagaagttttttgggaagaagaagagaaaagaatcgccgtcgtccacaggaagtagcacctggaaacaaagtcagacgaggaatgaggtcattgccatcgaatccgggccagtgggctacgactccgaggatgagctggaggagtcgaggggcacgctgggcagccgggccctttctcacgacagtattttcattcctgagtccggacaggacgctactcggcctgtgcgggtgttttcccaagaaaatgtgtgtgatcggattaaagctctgcagttaaaaatacagtgtaatgtgaaaatggggccaccacctcctccaggggggcttcctgccaagcggggagaggatgccggcatgagctctgaggacgacgggctgcccaggagccccccagagatgtctctgctgcacgacgtgggtcctggtaccaccataaaggtctctgtcgtgtctccagaccacgtgagcgacagcaccgtctctgcccggatctcagacaacagcctggcaccagtggcttgacttcagttatcctgcagaatcctcctcctgcctggacaactctgcagctaagcacaagctccaggtcaagccccgcaaccagcggtcgagtaagatgaggcggctctcatcgg

SEQ ID NO: 42134 - DNA, 394 bp, Homo sapiens
atcacatgtacatgacagctcccccaggacacaccaaatgagctgcagtgggatctcgactcattcttagatgaacaaagaagagatggcagtggaagagctggtggcagatgcacgttcagttcagttctctgcaccacaccaagatactgaaggcatttccagcatgaatgaattagagcaggaggatttgttgataaatatcattgatgaaaataagagcacatgttctttattccaatctagttaaaaatacagtgtaatgtgaaaatggggccaccacctcctccaggggggcttcctgccaagcggggagaggatgccggcatgagctctgaggacgacgggctgcccaggagccccccagagatgtctctgctgcacgacgtgggtc

SEQ ID NO: 42135 - DNA, 271 bp, Homo sapiens
ttgccctgagggggacagttagggaggcccacgtgaggagtgaacatgtggctggagatgaggacccagagtgatccccccaggtgatgcttaggaacagggaaagcccagatctgagaagggaggcacatcctgaggggtctttggaaccagtgtgtctacactgtgggctcaagtttttaacacacttgtcctagggccctgccaccttcctccctgaaactggtcagggtgccactcccaggacccaggtgcacactatttccacccc

SEQ ID NO: 42136 - DNA, 429 bp, Homo sapiens
tctcttgttgcccaggctggagtgcaatggtgcgatcttggctcactgcaacctccacctcccaggttcaagcgattctcctgctcatgcctgtaatctcagcacactttgggagggtgaggtggggggatcacttgaagtcaggagttcgagaccagcctgggcaataataacaataaaaaagccattttagattccaatccactgaaagaaaactgacccttagttaatgtcatgcttattggatccatgaagtctttgaaaatttaaactacaaggacactgctctctgtggtggtggagagaataccaaggatttaaaggtctttaagaaagagaatgtagaaagcgtacccattggaaacagcaagatgatgataatcgtactgacagtaataataagctgaaatatatagagcttactatgta

SEQ ID NO: 42137 - DNA, 390 bp, Homo sapiens
tagaggcagggtcttgtgatgttgctcaggctggatggagttcagtggctatttacaagcacagtcatagcacgctgcagccttaaactcctggcctcaagagatcttccctcctcagccacctgagtagccaaaaccataagtgcatgccaccatgtaccacttcctaccaagaatttttcaaaaaactagggaggcatttactactacaggccatggaattttaagattgacttatgttacttggatccttgaaagcggggagtgaccaatgatggagatttgggagagtggggaggcaggggagtggagtcatttagatgacacctggaaagcacaggagtaacacctttttcaactttgttgatagtaaacaaagaacgtacttat

SEQ ID NO: 42138 - DNA, 280 bp, Homo sapiens
acgaattcttagaacagagaagtagtactgattttatatgacatagtattgatcttagttatatttttttttcaaaaaaagtcagtgaatcacacaaaataaccttcaaatcacatgtgacttttgtagtatgttcagaaagggtcatctcaatcatgaagagaaacatttcattaaaaatatttaaggactgactcagttttcttaagagcctttcttaattatttgatattcctgtcattctctttggaagcacctctaatgttaccactctttccat

SEQ ID NO: 42139 - DNA, 417 bp, Homo sapiens
tgggacttcaggtgcatgccaccatggcaggctaattaaaaaaaagtttaatggaaattggggtccctctatgttgtccaggctagtcttgaactcctggcctcaagcaatcctcctgcctcggcctcacaaagtgctgagattacaggcatgaaccactgtaccaggcctaattgattttttaattatcaattccacaagcttaaactgaactatctttaactgaaggtgctcatttgtcttgatggctacattcagttaaaatgtgctgactggaattttcttttaatccagccacgtttaggaacctactagataatacaaactgagagattcaagagattaagtagtggcatataatttcatagttgcttcttttttgcatgtacaattggaaaactcagcctgcttttacat

SEQ ID NO: 42140 - DNA, 484 bp, Homo sapiens
caatataattgtaaacataatttatcctcactgtgatggctagccacctgacccaaatcattattagactcaatactttggaactggaacaaaaatcagttgacctgatgtctgaaagacatgcccacctgctatttgacaagctatagacatatcctaccaattgatgggtagtagcactgaaactatgaaagtggatgaactcatccagaggagttgatgagtgagaaaagaagactggaaaaggaacacaaggaaatcaagaagcagcagctgagactgaaggaaaataacgtggtattacagaggccaaaaaatagagtatttcaagaagcaagtggttagtggagttaaaagctgctgatacaacctaaaaaagtaagtatccattttttaaaaaactttcatttaaaataccaccatattttattgaatctaagtacctgattgtaagacattaaagaaaaattaaacctgctaatta

SEQ ID NO: 42141 - DNA, 264 bp, Homo sapiens
aactcacaccttctgctcacttctcaacctagaagagtccacttttgctgactctctctttcttctatcatctcatggaaactgctaaacactttacctggtgttccaatccctggcctcagagatctttggcctgaggacattacggaactttcctttcctttccctttcccttctcttccctttttctttctcagagtctcactctgtcacccaggagggcgtgcagtggcatgaactcggctcactgcaacctctgcctcc

SEQ ID NO: 42142 - DNA, 438 bp, Homo sapiens
gcctcaaacaagaggactttttaccgcagtttcttctacccagtatatcatgtctgctttcaacaaaaacttacaagacatgctaaaaggcaaaaatcaaagttgcatgaggcataacaagaatcagaaccattgccagactcatttatggcagcgatttttggaataatcagactggaaattttaaataagtatgattaatatactaaaggctctaatggaaaaagtgaacaacatgcaagaaaggtgggtaacataagcagacaatagaaactctaagaaagaacccaaaagaaatactagaaataagcaatactataacagaaatgaagaatgcccttggacttattgatagagtggaaaggacaatagataacctgggaaagattcaatgagcttgaagatatgtcagtagaaagttccaaaacttaaactgca

SEQ ID NO: 42143 - DNA, 197 bp, Homo sapiens
gatcgcaccattgtactccagcctgggcaacagagcgaaactctatctcaaaacaaaccaaccaaccaggattgaagtttctattttcctgttttcacatacacattttcttcagccatattatatgtgtatgtatagcctacattggctaaatctgaggaacaccacaaacatcagataaatctctcatgttgtgt

SEQ ID NO: 42144 - DNA, 407 bp, Homo sapiens
aacatcaaccaatcaatcagatttgcatctaagcttgtgtgacatacaagcctaaggcctgggttagttgtagataaaccttttcatcattgccaaaagcaaacaccatttctattttttaacatctacaaaatgttgaacatttttaacatgttggatctgttgttttggggatatatatgtggatataataagcatttaagaagtttagtctacagccgggtgcggtggctcacacctgtaatcccggcactttgggaggccgaggcgggcggatcaccaggtcaagagatcgagaccatcctggccaacatggtgaaaccccgtctctactaaaaatacaaaaattagctgggcgtggtggcacgggtctatagtcccagctactcaggaggctgagactgcac

SEQ ID NO: 42145 - DNA, 451 bp, Homo sapiens
ctggcttgctttgcagggcttccacaagaatgggctgggagcgtaactgagtaactgagtcatgattaggggttaattaagaggagaaatgggctagctgtttcctaagataagggaggggaagtttttttaaaaactgtaactgctcagaacagtatgtgctaaggcagactttctgtgctgggagacagaacacttctgcagtgatgtagcagaatccttaaaggatcctgccaatgactctttttttctggtgtcacatccaatctttgctgcagccaacacttcctggagatgaaacacaacttcaatacagagatagcaagttcacactctggcagtcatgcaaggatgagtgatgcgggccttttctaagtgagtatgaacgggtgggacctacggtaaattcaatgcagtataatccgtctacggggcagtgggcacccagcaa

SEQ ID NO: 42146 - DNA, 426 bp, Homo sapiens
aacaaccacacttttcatagcattgcaacatctctgtcttttcttacgccctgaatcatctcaaatcatcgcgagtggatattgatgcttctacttcccttgtttatagaaaaatcccaggcaaatgggttgatagaataaaggactggaaggattactggaaagccctcaattataggtatgggattgaaaggctgtgtagcccatggacacctaagaataagactaagtgtctttgagggtgtccgtgtatttccaacaatttttcctcttctgaaaactgcttccctgtccatccctcccaccctcttctagggcctgagggtgggctctcagtggccctgttgctatcctgtggccccaccctcttggccaacagtgattggacatcagatccgagctgagccaatcagcttcactaacttc

SEQ ID NO: 42147 - DNA, 490 bp, Homo sapiens
gatgaggggtgcacctggctacacctcactcccttgtccagaagaggagaaagtaccagtgtcagctgcatgtccaccaggcacgctccgagcacgttgcaaggcatccacggtgagggccactcctaagtgggccctcttctgtctggtgagctgctctgttccagtgtctgcaacagtgccaggcacttggtaggtgctcaataaatgctcatggaccacatgaatcacctcatgtgatattcacaaccacccatgggttaagtacaatcaccatccgcattacagtagagggtactgaggctcagagagcgagggccatcacgctgggattttaatctaggcagtggcttctgattcttctctaaccactgcgcggcattcgacaggagggagagcggaaggagggtaccagcgcaaggcggctgtaggagtgtggattcgcttcccatggctgccacagcaaatgaccacagactgattgtggctt

SEQ ID NO: 42148 - DNA, 553 bp, Homo sapiens
tgcaaacacatcgtctttgtgcagctgcaggaaggggagcacgtcttccagcccagggagccggaccccagcatctgtgtggtgcaggacgggcggctggaggtctgcatccaggacactgacggcaccgaggtggtggtgaaagaggttctggcgggagacagcgtccacagcctgctcagcatcctggacatcatcaccggccatgctgcaccttacaaaacggtctccgtccgcgcggccatcccgtccaccatcctccggcttccagctgcggcttttcatggagtttttgagaaatatccggaaactctggtgagggtggtgcagatcatcatggtgcggctgcagagggtgacctttctggctctgcacaactacctcggcctgaccacagagctcttcaacgctgagagccaggccatccctctcgtgtctgtagccagtgtggctgccgggaaggccaagaagcaggtgttctatggcgaagaagagcggcttaaaaagccaccgcggctccaggagtcctgtgactcaggtactgtcctgcacc

SEQ ID NO: 42149 - DNA, 448 bp, Homo sapiens
agatctataatgggaaaatgctccaggctcagaagagttcatgcttagttctatcttttaaagaaagagtaataccagtgttatttattatatggatgtaatacaatccatgaactgtactcatttattttattaagtcagaataaattttaacaccaaaatcaaatacagatagttgaaaaaagaaaacttctgctgggtgcggtggctcacgcctgtaatcccaacactttgggaggccgaggcaggtggatcatgaggtcagaagttcgagatggtgaaaccccatctctactaaaaatacaaaaattagccgggtgtggtggcacacacctgtagtcccagctacttgggaggttgaggcatgaggcaggagaattgcttgtacccaggaggtagaggttgcggtgagccaagatcgtgccatccagcctgggtgacaagagcg

SEQ ID NO: 42150 - DNA, 411 bp, Homo sapiens
acattttagcaaactaaagcagaacaaagatgagttttattgcatttatttctactacgtgatttaacacatcactttttgcacacatggtgctttttatttcaacactatttaaaatgtattaatcatcagtcatcacaggagccactgaaaagctaattttatatggaattttaacaacaagataaaaacatgtgcataatgaactatcaagtcccaggcacaaacatggtttcacttagcccttataaaaattctgggaggggttgttattctctccatttcacagatgagaaactggagcacagagaggttgatttatctctgcaaaaaagctcagggccaatgttgtgggtccaacaatcattctggaagacaaacgttgttcgtgttaccttccaagctaagaga

SEQ ID NO: 42151 - DNA, 479 bp, Homo sapiens
aagaaaatcagtttcagattactagtaattatttaggtactaattaaaaaataatgaatctcagttactaaatacacaaataagggagttatatgaaactgtgcaatagtcattctatggatagtcatatttaaaataaaatgaaaagagactaaaatatgcatttgtgcttttaactctgaaaacctgaatacctattcaactgttgattctgagtatttacagaactttatttcttctttggacatgctttggcagtttttacctaatgtatacacatttttgccttgttcttaataattaaaaatctgagaaaaagatattcaaaaagtggttttttgtgcgtactcatgataaacagtaatataaaaagttacagaggtcgggcccagtggctcacgcctgtaatcccagcactttgggaggccaaggtgggtggatcacttgaagtcaggagttttagaccagcctggccaaca

SEQ ID NO: 42152 - DNA, 3161 bp, Homo sapiens
cacccatcacccgagcagtgtacactgtacccaatgtgcagtcttttatccctcgcccacttcccacccttccccctgagtccccaaagtccactgtatcattcttatgccttcgcatgctcatagctgagctcccacttatatgtgagaatatacatttggtttttcatccctgagttacttcacttagaataatgaaatccccatacacctaggttcagggctcctccccaggaaacttctgaggtttggggagtcccaggagagaagttaggaaactctggcctccatcccctccctgtagcagccaaagttcttagggatttagaggcgattttcttttgtcctttctaagaattgacatcattggtctcatctagacttgcttcaagccctactgatgaacctttgacagagtcttccccccagtctgactcttctccatttttccagaaaagggattagataggaaagtcacatacccagggcctgcagcctgtgacttcagaactggaagtctaaaccctacagccccttcttcttctgagccacctactattgttgcagaattgtgtgactgagtcttgtctccttaaaacgaccgtaaactcttgagtgcaaggattgtattagtcagagtaaagctatgctgctataaaaaatagtccctacatgcaaaggttcaatacagtagatgtttatttcctgcttacaaggcagtcttcagcatgtgtatgtccatgtggtcattcagggatccaggctccttgtgttttctggctccacctcaccctagttcctaatcatcatccatatccacctgatggaatagaaaatagcgtgaggtgtgttcccaggaggctttgcatgggttagacctggaaggcaaacacatcacgtctgcttatgttccatctggaaaaacatttgagttgccacagcaaattgctagtgagaatgagagatggagttccctgtgtctccaagaagggtatgactttggcagagcagctcttctgttccctgacttctctttctcctgccagaacccagcaccgagagggaccatcagaggatgttccatgagaacttggtgagggttgtggagaggttggctggtgcttctccgtcttcatacagatgtccagacaggggaccagaagtctcaggtctgagctctacctggaagcccctcacgtctgtagccatcaaacctccagataagacgagccctgaagcattttggttgcatcagaaaacagatggaaggccagtcttcacagatgcatatacttcatcctggcttccacccacagaggttgcatctgtgcagaaattcatcccagagcaccaggcaggtgggtgtcaactcctgctgagatttcgctgtatcaggaaactcatgcatctggtgcagatgtcccggagtggctctgacagtccagggctgggcagtggagacactgatgacagccttgagcagagtggttttagtagaaatggcagagacaaaagccaggctagaggagtttaaggaaggaacagaggtaagtaagctagaaatgaacttttccagtcacttggaaaaaataagaccaaagatgattatgcatatcacaactgatacacacatagcccagggccaggttccctcctctctggaacccctgattcctgctggtgctgttttatctccccaggtagccactgtgtctttatctccctccagagaagcaacgcgctccagactctgatgcactggaggcaggagacagctgcaggtggtggtgtgctctggaagagtagaaacagagacccctcatagataccctgtcttcagaatagacctaggctcttcaccccaccacccctgccaccacccccacccaagccactgcagtgtcttgcccagacaaggggcatagccaactaactgatccctcagatcttgccctggtccccctaagataactctttatatggcagctttctccatcttagcactttgggaggccgagacaggtggactgcctgagctcaggagttcaagaccagcctgggcaacatggtgaagtccagtctgtattaaaactataaaaaattagctgggcatggtggcgcacacctctaatcccaactactgtggaggctgaggcatgagaatcacttgaacctgggaggcagaggatgcagtgagccgagatggtgccacttcactccagcctggacaacagagcaagactctgtctaaaacaacaacaacaaaaaaaaaaaaaaaaaacaaacaaaagaaggaagaaagaaagaagggagggaaggagggaaagaaaaaggaaggaaagaaagagaaagagaaaacactataacagagatgatgaaggcatttgatgggaccatcagtagactggacatagatgaggaaaaaatcagcctgaaggtatgttaatagaaccttcccaaactgtaatgcaaagaaaaaaatggggaaaaaaacagattatacaagaactgtgggatattttcaaaaggtatatgcacaattgaaacaccacaaggagaagaaagggagaacagagcagaaaaatcgtgaaagttataatggctcccaattttccaaaagtaaaggcagaccccaagccacggatccagtaagcttagagaacaccaaataggatacatacttaaaaaaaaaatcaacacctacatatatcatattcaaactgtagaaaaccaaagacaaacacaaaatcttgaaagaagccatagaaaaaaacccagcttacttatacaggaaacgaataagaattacagccttcttgtcagaacacgcaagcaagaagagaaaagggtgaaatatgtaaagtgttgaaagagaaaactggctgggcaagtggctcatgcctgtaatcccagcactttggaaggccgaggtgggtggatcacgaggtcaggatttcaagaccatcctggctaacacggtgaaaccccgtctctactaaaaatacaaaaaaattagccaggcgtggtggcagacgcctgtagtcccagctactcgggaggctgaggcaggagaatggcctgaacccgggaggtggagcttgcagtgagccgagatcgcgccattgcactccagtttgggcgacagagcaagactctgcctc

SEQ ID NO: 42153 - DNA, 2198 bp, Homo sapiens
aggccttccttttccttgtttcccccctgaacctttcctcctttttcctcccttggcccaaggaaacccccaagccacccgaaggaggggaccaattcaagaaggaattgttccattggaagaacctttggtgagggttgtggagaggttggctggtgcttctccgtcttcatacagatgtccagacaggggaccagaagtctcaggtctgagctctacctggaagcccctcacgtctgtagccatcaaacctccagataagacgagccctgaagcattttggttgcatcagaaaacagatggaaggccagtcttcacagatgcatatacttcatcctggcttccacccacagaggttgcatctgtgcagaaattcatcccagagcaccaggcaggtgggtgtcaactcctgctgagatttcgctgtatcaggaaactcatgcatctggtgcagatgtcccggagtggctctgacagtccagggctgggcagtggagacactgatgacagccttgagcagagtggttttagtagaaatggcagagacaaaagccaggctagaggagtttaaggaaggaacagaggtaagtaagctagaaatgaacttttccagtcacttggaaaaaataagaccaaagatgattatgcatatcacaactgatacacacatagcccagggccaggttccctcctctctggaacccctgattcctgctggtgctgttttatctccccaggtagccactgtgtctttatctccctccagagaagcaacgcgctccagactctgatgcactggaggcaggagacagctgcaggtggtggtgtgctctggaagagtagaaacagagacccctcatagataccctgtcttcagaatagacctaggctcttcaccccaccacccctgccaccacccccacccaagccactgcagtgtcttgcccagacaaggggcatagccaactaactgatccctcagatcttgccctggtccccctaagataactctttatatggcagctttctccatcttagcactttgggaggccgagacaggtggactgcctgagctcaggagttcaagaccagcctgggcaacatggtgaagtccagtctgtattaaaactataaaaaattagctgggcatggtggcgcacacctctaatcccaactactgtggaggctgaggcatgagaatcacttgaacctgggaggcagaggatgcagtgagccgagatggtgccacttcactccagcctggacaacagagcaagactctgtctaaaacaacaacaacaaaaaaaaaaaaaaaaaacaaacaaaagaaggaagaaagaaagaagggagggaaggagggaaagaaaaaggaaggaaagaaagagaaagagaaaacactataacagagatgatgaaggcatttgatgggaccatcagtagactggacatagatgaggaaaaaatcagcctgaaggtatgttaatagaaccttcccaaactgtaatgcaaagaaaaaaatggggaaaaaaacagattatacaagaactgtgggatattttcaaaaggtatatgcacaattgaaacaccacaaggagaagaaagggagaacagagcagaaaaatcgtgaaagttataatggctcccaattttccaaaagtaaaggcagaccccaagccacggatccagtaagcttagagaacaccaaataggatacatacttaaaaaaaaaatcaacacctacatatatcatattcaaactgtagaaaaccaaagacaaacacaaaatcttgaaagaagccatagaaaaaaacccagcttacttatacaggaaacgaataagaattacagccttcttgtcagaacacgcaagcaagaagagaaaagggtgaaatatgtaaagtgttgaaagagaaaactggctgggcaagtggctcatgcctgtaatcccagcactttggaaggccgaggtgggtggatcacgaggtcaggatttcaagaccatcctggctaacacggtgaaaccccgtctctactaaaaatacaaaaaaattagccaggcgtggtggcagacgcctgtagtcccagctactcgggaggctgaggcaggagaatggcctgaacccgggaggtggagcttgcagtgagccgagatcgcgccattgcactccagtttgggcgacagagcaagactctgcctc

SEQ ID NO: 42154 - DNA, 1619 bp, Homo sapiens
agcagggctcccgcgggcgtcactccggccatcgtccccacctccacctgggccgcccggcaggcaggcgacggaggcccgggagccatgggtgactggggcttcctggagaagttgctggaccaggtccaggagcactcgaccgtggtgggtaagatctggctgacggtgctcttcatcttccgcatcctcatcctgggcctggccggcgagtcagtgtggggtgacgagcagtcagatttcgagtgtaacacggcccagccaggctgcaccaacgtctgctatgaccaggccttccccatctcccacatccgctactgggtgctgcagttcctcttcgtcagcacacccaccctggtctacctgggccatgtcatttacctgtctcggcgagaagagcggctgcggcagaaggagggggagctgcgggcactgccggccaaggacccacaggtggagcgggcgctggcggccgtagagcgtcagatggccaagatctcggtggcagaagatggtcgcctgcgcatccgcggagcactgatgggcacctatgtcgccagtgtgctctgcaagagtgtgctagaggcaggcttcctctatggccagtggcgcctgtacggctggaccatggagcccgtgtttgtgtgccagcgagcaccctgcccctacctcgtggactgctttgtctctcgccccacggagaagaccatcttcatcatcttcatgttggtggttggactcatctccctggtgcttaacctgctggagttggtgcacctgctgtgtcgctgcctcagccgggggatgagggcacggcaaggccaagacgcacccccgacccagggcacctcctcagacccttacacggaccaggtcttcttctacctccccgtgggccaggggccctcatccccaccatgccccacctacaatgggctctcatccagtgagcagaactgggccaacctgaccacagaggagaggctggcgtcttccaggccccctctcttcctggacccaccccctcagaatggccaaaaacccccaagtcgtcccagcagctctgcttctaagaagcagtatgtatagaggcctgtggcttatgtcacccaacagaggggtcctgagaagtctggctgcctgggatgccccctgccccctcctggaaggctctgcagagatgactgggctggggaagcagatgcttgctggccatggagcctcattgcaagttgttcttgaacacctgaggccttcctggtgcccaccaggcactacggcttcctctccagaatgtggctttgcctgagcacagacagagtcagcatggaatgctcttggccaagggtactgggggccctctggccttttgcagctgatccagaggaacccagagccaacttaccccaacctcaccctatggaacagtcacctgtgcgcaggttgtcctcaaaccctctcctcacaggaaaaggcggattgaggctgctgggtcagccttgatcgcacagacagagcttgtgccggatttggccctgtcaaggggactggtgccttgttttcatcactccttcctagttctactgttcaagcttctgaaataaacaggacttgatcac

SEQ ID NO: 42155 - DNA, 1798 bp, Homo sapiens
agcagggctcccgcgggcgtcactccggccatcgtccccacctccacctgggccgcccggcaggcaggcgacggaggcccgggagccatgggtgactggggcttcctggagaagttgctggaccaggtccaggagcactcgaccgtggtgggtaagatctggctgacggtgctcttcatcttccgcatcctcatcctgggcctggccggcgagtcagtgtggggtgacgagcagtcagatttcgagtgtaacacggcccagccaggctgcaccaacgtctgctatgaccaggccttccccatctcccacatccgctactgggtgctgcagttcctcttcgtcagcacacccaccctggtctacctgggccatgtcatttacctgtctcggcgagaagagcggctgcggcagaaggagggggagctgcgggcactgccggccaaggacccacaggtggagcgggcgctggcggccgtagagcgtcagatggccaagatctcggtggcagaagatggtcgcctgcgcatccgcggagcactgatgggcacctatgtcgccagtgtgctctgcaagagtgtgctagaggcaggcttcctctatggccagtggcgcctgtacggctggaccatggagcccgtgtttgtgtgccagcgagcaccctgcccctacctcgtggactgctttgtctctcgccccacggagaagaccatcttcatcatcttcatgttggtggttggactcatctccctggtgcttaacctgctggagttggtgcacctgctgtgtcgctgcctcagccgggggatgagggcacggcaaggccaagacgcacccccgacccagggcacctcctcagacccttacacggaccaggtcttcttctacctccccgtgggccaggggccctcatccccaccatgccccacctacaatgggctctcatccagtgagcagaactgggccaacctgaccacagaggagaggctggcgtcttccaggccccctctcttcctggacccaccccctcagaatggccaaaaacccccaagtcgtcccagcagctctgcttctaagaagcagtatgtatagaggcctgtggcttatgtcacccaacagaggggtcctgagaagtctggctgcctgggatgccccctgccccctcctggaaggctctgcagagatgactgggctggggaagcagatgcttgctggccatggagcctcattgcaagttgttcttgaacacctgaggccttcctggtgcccaccaggcactacggcttcctctccagaatgtggctttgcctgagcacagacagagtcagcatggaatgctcttggccaagggtactgggggccctctggccttttgcagctgatccagaggaacccagagccaacttaccccaacctcaccctatggaacagtcacctgtgcgcaggttgtcctcaaaccctctcctcacaggaaaaggcggattgaggctgctgggtcagccttgatcgcacagacagagcttgtgccggatttggccctgtcaaggggactggtgccttgttttcatcactccttcctagttctactgttcaagcttctgaaataaacaggacttgatcacaagtaggtgtgtattgatgctatcatgatgtgctgggggttgggggatagagttattttgcccaggcttcctttacttcttggtcctgtataatctctttggtctctataacccccgattccagccaacaccttgaaccctcaaactcataccttctgcctccaacagccctgatttct

SEQ ID NO: 42156 - DNA, 1714 bp, Homo sapiens
agcagggctcccgcgggcgtcactccggccatcgtccccacctccacctgggccgcccggcaggcaggcggtagaacgggcgtggcagacctccctgcaggcttgttgctgggcgaacgagaaggatgccatgctgacacactgacgtgctctgtctccttgcagacggaggcccgggagccatgggtgactggggcttcctggagaagttgctggaccaggtccaggagcactcgaccgtggtgggtaagatctggctgacggtgctcttcatcttccgcatcctcatcctgggcctggccggcgagtcagtgtggggtgacgagcagtcagatttcgagtgtaacacggcccagccaggctgcaccaacgtctgctatgaccaggccttccccatctcccacatccgctactgggtgctgcagttcctcttcgtcagcacacccaccctggtctacctgggccatgtcatttacctgtctcggcgagaagagcggctgcggcagaaggagggggagctgcgggcactgccggccaaggacccacaggtggagcgggcgctggcggccgtagagcgtcagatggccaagatctcggtggcagaagatggtcgcctgcgcatccgcggagcactgatgggcacctatgtcgccagtgtgctctgcaagagtgtgctagaggcaggcttcctctatggccagtggcgcctgtacggctggaccatggagcccgtgtttgtgtgccagcgagcaccctgcccctacctcgtggactgctttgtctctcgccccacggagaagaccatcttcatcatcttcatgttggtggttggactcatctccctggtgcttaacctgctggagttggtgcacctgctgtgtcgctgcctcagccgggggatgagggcacggcaaggccaagacgcacccccgacccagggcacctcctcagacccttacacggaccaggtcttcttctacctccccgtgggccaggggccctcatccccaccatgccccacctacaatgggctctcatccagtgagcagaactgggccaacctgaccacagaggagaggctggcgtcttccaggccccctctcttcctggacccaccccctcagaatggccaaaaacccccaagtcgtcccagcagctctgcttctaagaagcagtatgtatagaggcctgtggcttatgtcacccaacagaggggtcctgagaagtctggctgcctgggatgccccctgccccctcctggaaggctctgcagagatgactgggctggggaagcagatgcttgctggccatggagcctcattgcaagttgttcttgaacacctgaggccttcctggtgcccaccaggcactacggcttcctctccagaatgtggctttgcctgagcacagacagagtcagcatggaatgctcttggccaagggtactgggggccctctggccttttgcagctgatccagaggaacccagagccaacttaccccaacctcaccctatggaacagtcacctgtgcgcaggttgtcctcaaaccctctcctcacaggaaaaggcggattgaggctgctgggtcagccttgatcgcacagacagagcttgtgccggatttggccctgtcaaggggactggtgccttgttttcatcactccttcctagttctactgttcaagcttctgaaataaacaggacttgatcac

SEQ ID NO: 42157 - DNA, 1020 bp, Homo sapiens
taatattataattaagtaatctaaggaccattgcactccagcctgggcaacaagagcgaaactcccctacctcgtggactgctttgtctctcgccccacggagaagaccatcttcatcatcttcatgttggtggttggactcatctccctggtgcttaacctgctggagttggtgcacctgctgtgtcgctgcctcagccgggggatgagggcacggcaaggccaagacgcacccccgacccagggcacctcctcagacccttacacggaccaggtcttcttctacctccccgtgggccaggggccctcatccccaccatgccccacctacaatgggctctcatccagtgagcagaactgggccaacctgaccacagaggagaggctggcgtcttccaggccccctctcttcctggacccaccccctcagaatggccaaaaacccccaagtcgtcccagcagctctgcttctaagaagcagtatgtatagaggcctgtggcttatgtcacccaacagaggggtcctgagaagtctggctgcctgggatgccccctgccccctcctggaaggctctgcagagatgactgggctggggaagcagatgcttgctggccatggagcctcattgcaagttgttcttgaacacctgaggccttcctggtgcccaccaggcactacggcttcctctccagaatgtggctttgcctgagcacagacagagtcagcatggaatgctcttggccaagggtactgggggccctctggccttttgcagctgatccagaggaacccagagccaacttaccccaacctcaccctatggaacagtcacctgtgcgcaggttgtcctcaaaccctctcctcacaggaaaaggcggattgaggctgctgggtcagccttgatcgcacagacagagcttgtgccggatttggccctgtcaaggggactggtgccttgttttcatcactccttcctagttctactgttcaagcttctgaaataaacaggacttgatcac

SEQ ID NO: 42158 - DNA, 247 bp, Homo sapiens
ctagaatagaatgttgttcatcatctatttggaaggaggcaggaagcctttacctccagctttgggggattcttattatcatcctatccacttttcctacttgtaaaagtttctttctgcagatctccaaagggcgagagtggtaactcaatctctcactcctttagatctttttgttcaactcaagaaatagttctgaatgccagtattaggcttcttcaatgaggggagcaggccagtgactcac

SEQ ID NO: 42159 - DNA, 445 bp, Homo sapiens
ttttttttaagaagtcttgctctgtcgcccaggctggagtacaatggctcgatctcggctcactgcaacctccaccttctgggttcaagcaatcctcctgtctcagcctcctgagtagctgggattacaggcacgtgccaccaggcttggctaatttttttttttgtgtgtgtgtatttttagtaaagatgaggtttcaccatgttggccaagctggtcttgaactcctgaccttgtgaaatgcctgcctcagcctcccaaagtgctgcgattacaggcatgagccactgtgcccagcctcaaagattcttatgagtcctcacagatgtcagaggaagataccatgacctatacttgcaaactcccagaagacttaaagctattgttttgcaaatggtgtgtgtatttttagtaaagatgaggtttcaccatgttggccaagctg

SEQ ID NO: 42160 - DNA, 6757 bp, Homo sapiens
gtcatttaaaagtgtgtggtggctgcggcggcggctgcgcgcgtggggcccggggcgcggggcgaggccgtggggacgtgcgagcggggccgcggtggggctcgggggcgcgtccacgtggccagagggcggccacccggagccagcggagggacaggcctgtccccaggcgcggctgccggccatgccctctgtctgcctcctcctgctgctcttccttgccgtggggggggccctgggcaacaggcccttccgtgccttcgtggtgacagacaccacgcttacccacctggctgtgcaccgggtgactggggaggtgttcgtgggcgcagtgaaccgagtctttaagctggcccccaacctgactgagctgcgggcccatgtcacggggcccgtcgaggacaacgctcgctgctacccgccccccagcatgcgcgtgtgtgcccaccgcctggcccccgtggacaacatcaacaagctgctgctcatagactatgcggcccgccgcctggtggcctgcggcagcatctggcagggcatctgccagttcctgcgtctggacgacctcttcaagctgggtgagccgcaccaccgcaaggagcactacctgtcgggggcccaggagcccgactccatggctggtgtcattgtggagcagggccaggggcccagcaagctgtttgtgggcactgctgtcgacggcaagtcggagtacttccccaccttgagctcccgcaagctcatcagtgatgaagacagcgcggacatgttcagtctcgtgtaccaggatgagtttgtgtcctcccagatcaagatcccctcagacacgctgtccttgtaccctgcccttgacatctactacatctacggcttcgtcagcgcctccttcgtgtacttcctgacgctgcagctggacacccagcagacgctgttggacacagcgggcgagaaatttttcacgtccaagatcgtgcgcatgtgcgcgggagactcagagttctactcatacgtggaattccccatcggctgctcctggcgcggcgtggagtaccgcttggtgcagagcgcccacctggccaagcctggcctgctgctggcccaggccctgggcgtgccggctgatgaggacgtcctcttcaccatcttctctcagggccagaagaaccgggccagcccaccccggcagaccatcctctgcctcttcaccctcagcaacatcaatgcccacatccggcgccgcatccagtcctgctatcgtggggagggcactctggctctgccctggctgctgaacaaggagctgccctgcatcaacacccccatgcagatcaacggcaacttctgtgggctggtgttgaaccagcctctgggaggcctgcatgtgatcgaggggctgcccctgctggccgacagcaccgacggcatggccagcgtggccgcctacacctaccgccagcactctgtggtcttcattggcacgcgcagcggcagcttgaagaaggtgcgggtcgatggcttccaggatgcccacctgtatgagacagtccccgtggtggatggcagccccatcctccgagacctgctcttcagcccggaccaccggcacatctatctcctgagtgagaagcaggtgagccagctcccggtggagacctgtgagcagtaccagagctgcgcagcctgcctgggctccggggacccgcactgtggttggtgtgtgctgcgacacaggtgctgccgcgaaggggcctgtctgggcgcctctgccccacacggctttgctgaggagctgagcaagtgtgtccaggtgcgggtccggcccaacaatgtgtcagtgacgtcacctggggtgcagctgaccgtcaccctgcacaacgtgccagacctcagtgcgggcgtgagctgcgccttcgaggcggcggcggagaacgaggcggtcctgctgccctccggtgaactgctctgcccctcaccctccctccaggagctccgagctcttaccagggggcatggggccacccgcactgtgcggctgcagcttctctccaaggagacaggcgtgaggtttgccggtgctgactttgtcttctacaactgcagcgtcctccagtcgtgcatgtcctgtgttggcagcccttacccctgccactggtgtaagtaccgccacacgtgtaccagccgcccccacgagtgctccttccaggagggcagggtccacagccctgagggctgccctgagatcctgcccagtggggacctcctgatccccgttggggtcatgcagcctcttaccttgcgggctaagaacctacctcagccgcagtcgggccagaagaactatgagtgcgtggtgcgggtgcaggggcggcagcagcgggtgcctgccgtgcgcttcaacagcagcagtgtgcagtgccagaacgcctcgtactcctatgaaggtgatgagcatggtgacaccgagctggacttctccgtggtctgggatggagacttccccatagacaagcctcccagcttccgagccctcctgtacaagtgctgggcgcagcggcccagctgtggcctctgcctcaaggctgatccccgcttcaactgtggctggtgcatctcagagcacaggtgccagctgcggacccactgcccggccccgaagaccaactggatgcacctgagccagaagggcacccggtgcagccacccccgcatcacgcagatccaccctctcgtggggcccaaggaaggaggcacccgggtcaccatcgtgggtgagaacctgggcctcttgtcccgagaggtgggcctgcgggtggctggcgtgcgttgcaactccattccggccgagtacatcagtgctgagaggatcgtgtgtgagatggaggagtcgctggtgcccagcccgccgccggggcccgtggagctgtgtgtgggtgactgttcagccgacttccgcacgcagtcggagcaggtctacagctttgtgaccccaacgtttgaccaagtgagtcccagccgtggcccggcgtccgggggcacacggcttaccatctcaggcagctctctggatgctggcagcagggtcacagtgactgtgagggacagcgagtgccagtttgtaaggagagatgccaaggcgatcgtgtgcatctcacctctctccaccctgggccccagccaggcccccatcacacttgccattgaccgggctaacatctccagccccgggctcatctacacctacactcaggaccccaccgtcacccgccttgagcccacctggagcatcatcaatggaagcactgccatcactgtgagtgggacccacctgctgacggtccaggagccccgggtccgtgccaagtaccgcggcattgagaccaccaatacatgccaagtgatcaacgacactgccatgctgtgtaaggcccccggcatctttcttgggcggccccagcctcgggcgcaaggcgagcaccctgatgagtttggcttcctgctggaccacgtgcaaacggcccgctccctcaaccgctcctcctttacctactaccctgatcccagctttgagccgctggggccctctggcgtgctggacgtcaaaccgggctcccacgtggtgctgaagggcaagaacctgattcccgcggcagccggcagctcccgcctcaactacactgtgctgataggaggccagccgtgttcgctcactgtctcggacacacaactcctgtgcgactcacccagccagactggccggcagcctgtcatggtgctggtgggtggcctggagttctggctgggcaccctgcacatctcggcagagcgggcgctgaccctaccggccatgatggggctggcggcggggggtgggctcctgctgctggccatcacagccgtgctggtggcgtacaagcgcaagactcaggacgcggaccgtaccctcaagcgtctgcagctgcagatggacaacctggagtcccgtgtggccctggagtgcaaggaagcttttgcagagctgcagacggacatcaatgagctgactaaccacatggacgaggtgcagatccccttcctggactaccggacttacgccgtgcgcgtgctcttcccgggcatcgaggcccacccggtgctcaaggagctggatacgccacccaacgtggagaaggccctgcgcctcttcgggcagctgctgcacagccgcgcgttcgtgcttaccttcatccacacgctggaggcccagagcagcttctccatgcgcgaccgcggcaccgtggcctcgctcaccatggtggccctgcagagccggctcgactatgccacggggctgctcaagcaactgctggccgacctcatcgagaagaacctcgagagcaagaaccaccccaagctgctgctacgcaggacagagtcagtggctgagaagatgcttaccaactggttcacgttcctgctgcataagtttctgaaggagtgtgctggggagcctctcttcctgctttactgtgccatcaagcagcagatggagaagggccccattgatgccatcacgggcgaggcacgatactccctgagcgaggacaagctcatccgtcagcagatcgactacaagacactgacccttcactgcgtgtgtccggagaacgagggcagcgcccaggtcccagtgaaggttctcaactgtgacagcatcacccaggccaaagataagctgctggacactgtgtacaagggcattccgtactcccagcgtcccaaagctgaggacatggacctggagtggcgccagggccgcatgactcgcatcatcctccaggatgaggatgtcaccaccaagatcgagtgtgactggaagaggctcaactcactggcccactaccaggtgacagacggttccttggtggcattggtgcccaaacaagtgtctgcctataacatggccaactccttcaccttcacccgctccctcagccgctacgagagcttgctccgcacggccagcagccctgatagcctccgctcacgggcacccatgattacgcctgaccaggagacaggcaccaaattgtggcacctggtgaaaaaccacgaccatgccgaccatcgcgagggggaccgtggcagcaagatggtctccgagatctacctgacacggctgctggccaccaagggcacactgcagaagttcgtggatgacctctttgagacagtgttcagcacagcccaccggggctcggccctgcccctggccatcaagtacatgttcgacttcctggatgagcaggcggaccagcgccagatcagcgaccccgatgtgcgccacacctggaagagcaactgcctgccgctgcgcttctgggtgaatgtgatcaagaacccgcagttcgtgttcgacatccacaagaacagcatcacggatgcctgcctgtcggtggtagcccagaccttcatggactcctgctctacatccgagcaccgcctggggaaggactcgccctccaacaaactgctctacgccaaggacatccccaactacaagagctgggtggagaggtattatcgagacattgcaaagatggcatccatcagcgaccaggacatggatgcctacctggtggagcagtcccgcctccacgccagcgacttcagcgtcctgagtgcgctcaacgagctgtatttctatgtcaccaagtaccgccaggagattctcacggctctggaccgagatgcctcttgtcggaagcataagttgcggcagaaactggaacagatcatcagcctcgtgtccagcgacagctaaggtggtggaatcggtgaggagggggcttctcagtcctgtgccgtcctcccatccaggggagtggctggctcaagcctgggtccccgggctgagccctggattgggtatcgtggggcaggtcaccctggccacgatgcccccggcacacccaggcccccttcattagtgccttgctttgggccctgcagggggaggggtgacagggcgagcccccaccccagcagcagcaatacccccaccctcctgccctgtgcccaggtgttgggacagtcccaccctccctgctatttatatccctctgcctatttattgaatcgaacttcgcctctgtctccatctgtaaatatgtgtccccccaccggatgtcgccaccctcactcacctgcctcttcttgagctgtcctgggccctgccacccgtctgggctcctttgtgtagcattatcagcctcggtctggcctctggcacctcacccttgccatggctgaccccacccattccaaggcggggtcacggtaccagcagcacttggggtgaggcctccaaagcttcctcagaattgtggctgtgccacgctggaccacagggtccccctcaagcatctcggggccctattctctctgagcacctggagggctggactcaggcttgtgccagggcctgacttgggcctgggggccctagaacactcctcctcctgagcctactgccaaacgtcctcagtgttgtctgcacctgctccgactccttcagccgccccattcagcgcccgctccgtccagtgcccgccctgtggggccaaggcggccgtgccttactactctgtgtcttctgcctcctctgaggaatctggccctgtctgacagtcccagaccccccgttctctcctctttagttgcatgagtttttctttgttcatggaatgttttttcctgattaaatgttggggaaatgcca

SEQ ID NO: 42161 - DNA, 5894 bp, Homo sapiens
cccagtgccccgcttctgcttccttccgttcccagctcgttcctccttgctccgtctcccggttgccccttgtcttgagccaacaagagtcttgtgggcccaggcttcgctcctcgctccctgctgtccctcctctgtctccctccgcagccaccaatttcctggagcaccctagggcgagcagtcagtcctggctggaggggaccgggttctagatcccgctctcttctgggacacaggaactgccggcctccatcttgcgcctgggagctttgactctcacgggttcctcctctgtttcaccagcccatgcagatcaacggcaacttctgtgggctggtgttgaaccagcctctgggaggcctgcatgtgatcgaggggctgcccctgctggccgacagcaccgacggcatggccagcgtggccgcctacacctaccgccagcactctgtggtcttcattggcacgcgcagcggcagcttgaagaaggtgcgggtcgatggcttccaggatgcccacctgtatgagacagtccccgtggtggatggcagccccatcctccgagacctgctcttcagcccggaccaccggcacatctatctcctgagtgagaagcaggtgagccagctcccggtggagacctgtgagcagtaccagagctgcgcagcctgcctgggctccggggacccgcactgtggttggtgtgtgctgcgacacaggtgctgccgcgaaggggcctgtctgggcgcctctgccccacacggctttgctgaggagctgagcaagtgtgtccaggtgcgggtccggcccaacaatgtgtcagtgacgtcacctggggtgcagctgaccgtcaccctgcacaacgtgccagacctcagtgcgggcgtgagctgcgccttcgaggcggcggcggagaacgaggcggtcctgctgccctccggtgaactgctctgcccctcaccctccctccaggagctccgagctcttaccagggggcatggggccacccgcactgtgcggctgcagcttctctccaaggagacaggcgtgaggtttgccggtgctgactttgtcttctacaactgcagcgtcctccagtcgtgcatgtcctgtgttggcagcccttacccctgccactggtgtaagtaccgccacacgtgtaccagccgcccccacgagtgctccttccaggagggcagggtccacagccctgaggtgaggcgggcgccgcatgtgaggggctgggctctgtggtgcgggcggggccaccggcttctatgcgttctcggtttctttgagccttctccaggttgggcctggagaagggtggccctgtgtgcagctgacaggtgctttccccgcagggctgccctgagatcctgcccagtggggacctcctgatccccgttggggtcatgcagcctcttaccttgcgggctaagaacctacctcagccgcagtcgggccagaagaactatgagtgcgtggtgcgggtgcaggggcggcagcagcgggtgcctgccgtgcgcttcaacagcagcagtgtgcagtgccagaacgcctcgtactcctatgaaggtgatgagcatggtgacaccgagctggacttctccgtggtctgggatggagacttccccatagacaagcctcccagcttccgagccctcctgtacaagtgctgggcgcagcggcccagctgtggcctctgcctcaaggctgatccccgcttcaactgtggctggtgcatctcagagcacaggtgccagctgcggacccactgcccggccccgaagaccaactggatgcacctgagccagaagggcacccggtgcagccacccccgcatcacgcagatccaccctctcgtggggcccaaggaaggaggcacccgggtcaccatcgtgggtgagaacctgggcctcttgtcccgagaggtgggcctgcgggtggctggcgtgcgttgcaactccattccggccgagtacatcagtgctgagaggatcgtgtgtgagatggaggagtcgctggtgcccagcccgccgccggggcccgtggagctgtgtgtgggtgactgttcagccgacttccgcacgcagtcggagcaggtctacagctttgtgaccccaacgtttgaccaagtgagtcccagccgtggcccggcgtccgggggcacacggcttaccatctcaggcagctctctggatgctggcagcagggtcacagtgactgtgagggacagcgagtgccagtttgtaaggagagatgccaaggcgatcgtgtgcatctcacctctctccaccctgggccccagccaggcccccatcacacttgccattgaccgggctaacatctccagccccgggctcatctacacctacactcaggaccccaccgtcacccgccttgagcccacctggagcatcatcaatggaagcactgccatcactgtgagtgggacccacctgctgacggtccaggagccccgggtccgtgccaagtaccgcggcattgagaccaccaatacatgccaagtgatcaacgacactgccatgctgtgtaaggcccccggcatctttcttgggcggccccagcctcgggcgcaaggcgagcaccctgatgagtttggcttcctgctggaccacgtgcaaacggcccgctccctcaaccgctcctcctttacctactaccctgatcccagctttgagccgctggggccctctggcgtgctggacgtcaaaccgggctcccacgtggtgctgaagggcaagaacctgattcccgcggcagccggcagctcccgcctcaactacactgtgctgataggaggccagccgtgttcgctcactgtctcggacacacaactcctgtgcgactcacccagccagactggccggcagcctgtcatggtgctggtgggtggcctggagttctggctgggcaccctgcacatctcggcagagcgggcgctgaccctaccggccatgatggggctggcggcggggggtgggctcctgctgctggccatcacagccgtgctggtggcgtacaagcgcaagactcaggacgcggaccgtaccctcaagcgtctgcagctgcagatggacaacctggagtcccgtgtggccctggagtgcaaggaagcttttgcagagctgcagacggacatcaatgagctgactaaccacatggacgaggtgcagatccccttcctggactaccggacttacgccgtgcgcgtgctcttcccgggcatcgaggcccacccggtgctcaaggagctggatacgccacccaacgtggagaaggccctgcgcctcttcgggcagctgctgcacagccgcgcgttcgtgcttaccttcatccacacgctggaggcccagagcagcttctccatgcgcgaccgcggcaccgtggcctcgctcaccatggtggccctgcagagccggctcgactatgccacggggctgctcaagcaactgctggccgacctcatcgagaagaacctcgagagcaagaaccaccccaagctgctgctacgcaggacagagtcagtggctgagaagatgcttaccaactggttcacgttcctgctgcataagtttctgaaggagtgtgctggggagcctctcttcctgctttactgtgccatcaagcagcagatggagaagggccccattgatgccatcacgggcgaggcacgatactccctgagcgaggacaagctcatccgtcagcagatcgactacaagacactgacccttcactgcgtgtgtccggagaacgagggcagcgcccaggtcccagtgaaggttctcaactgtgacagcatcacccaggccaaagataagctgctggacactgtgtacaagggcattccgtactcccagcgtcccaaagctgaggacatggacctggagtggcgccagggccgcatgactcgcatcatcctccaggatgaggatgtcaccaccaagatcgagtgtgactggaagaggctcaactcactggcccactaccaggtgacagacggttccttggtggcattggtgcccaaacaagtgtctgcctataacatggccaactccttcaccttcacccgctccctcagccgctacgagagcttgctccgcacggccagcagccctgatagcctccgctcacgggcacccatgattacgcctgaccaggagacaggcaccaaattgtggcacctggtgaaaaaccacgaccatgccgaccatcgcgagggggaccgtggcagcaagatggtctccgagatctacctgacacggctgctggccaccaagggcacactgcagaagttcgtggatgacctctttgagacagtgttcagcacagcccaccggggctcggccctgcccctggccatcaagtacatgttcgacttcctggatgagcaggcggaccagcgccagatcagcgaccccgatgtgcgccacacctggaagagcaactgcctgccgctgcgcttctgggtgaatgtgatcaagaacccgcagttcgtgttcgacatccacaagaacagcatcacggatgcctgcctgtcggtggtagcccagaccttcatggactcctgctctacatccgagcaccgcctggggaaggactcgccctccaacaaactgctctacgccaaggacatccccaactacaagagctgggtggagaggtattatcgagacattgcaaagatggcatccatcagcgaccaggacatggatgcctacctggtggagcagtcccgcctccacgccagcgacttcagcgtcctgagtgcgctcaacgagctgtatttctatgtcaccaagtaccgccaggagattctcacggctctggaccgagatgcctcttgtcggaagcataagttgcggcagaaactggaacagatcatcagcctcgtgtccagcgacagctaaggtggtggaatcggtgaggagggggcttctcagtcctgtgccgtcctcccatccaggggagtggctggctcaagcctgggtccccgggctgagccctggattgggtatcgtggggcaggtcaccctggccacgatgcccccggcacacccaggcccccttcattagtgccttgctttgggccctgcagggggaggggtgacagggcgagcccccaccccagcagcagcaatacccccaccctcctgccctgtgcccaggtgttgggacagtcccaccctccctgctatttatatccctctgcctatttattgaatcgaacttcgcctctgtctccatctgtaaatatgtgtccccccaccggatgtcgccaccctcactcacctgcctcttcttgagctgtcctgggccctgccacccgtctgggctcctttgtgtagcattatcagcctcggtctggcctctggcacctcacccttgccatggctgaccccacccattccaaggcggggtcacggtaccagcagcacttggggtgaggcctccaaagcttcctcagaattgtggctgtgccacgctggaccacagggtccccctcaagcatctcggggccctattctctctgagcacctggagggctggactcaggcttgtgccagggcctgacttgggcctgggggccctagaacactcctcctcctgagcctactgccaaacgtcctcagtgttgtctgcacctgctccgactccttcagccgccccattcagcgcccgctccgtccagtgcccgccctgtggggccaaggcggccgtgccttactactctgtgtcttctgcctcctctgaggaatctggccctgtctgacagtcccagaccccccgttctctcctctttagttgcatgagtttttctttgttcatggaatgttttttcctgattaaatgttggggaaatgcca

SEQ ID NO: 42162 - DNA, 4402 bp, Homo sapiens
cacccaggcgcacttctctcaaagccatactggtggggatttttgttgttttaacagggtcttgctctgtcacccaggctcccagaagtgcgcctgggtgcgcacccaggcgcacttctccgtggtctgggatggagacttccccatagacaagcctcccagcttccgagccctcctgtacaagtgctgggcgcagcggcccagctgtggcctctgcctcaaggctgatccccgcttcaactgtggctggtgcatctcagagcacaggtgccagctgcggacccactgcccggccccgaagaccaactggatgcacctgagccagaagggcacccggtgcagccacccccgcatcacgcagatccaccctctcgtggggcccaaggaaggaggcacccgggtcaccatcgtgggtgagaacctgggcctcttgtcccgagaggtgggcctgcgggtggctggcgtgcgttgcaactccattccggccgagtacatcagtgctgagaggatcgtgtgtgagatggaggagtcgctggtgcccagcccgccgccggggcccgtggagctgtgtgtgggtgactgttcagccgacttccgcacgcagtcggagcaggtctacagctttgtgaccccaacgtttgaccaagtgagtcccagccgtggcccggcgtccgggggcacacggcttaccatctcaggcagctctctggatgctggcagcagggtcacagtgactgtgagggacagcgagtgccagtttgtaaggagagatgccaaggcgatcgtgtgcatctcacctctctccaccctgggccccagccaggcccccatcacacttgccattgaccgggctaacatctccagccccgggctcatctacacctacactcaggaccccaccgtcacccgccttgagcccacctggagcatcatcaatggaagcactgccatcactgtgagtgggacccacctgctgacggtccaggagccccgggtccgtgccaagtaccgcggcattgagaccaccaatacatgccaagtgatcaacgacactgccatgctgtgtaaggcccccggcatctttcttgggcggccccagcctcgggcgcaaggcgagcaccctgatgagtttggcttcctgctggaccacgtgcaaacggcccgctccctcaaccgctcctcctttacctactaccctgatcccagctttgagccgctggggccctctggcgtgctggacgtcaaaccgggctcccacgtggtgctgaagggcaagaacctgattcccgcggcagccggcagctcccgcctcaactacactgtgctgataggaggccagccgtgttcgctcactgtctcggacacacaactcctgtgcgactcacccagccagactggccggcagcctgtcatggtgctggtgggtggcctggagttctggctgggcaccctgcacatctcggcagagcgggcgctgaccctaccggccatgatggggctggcggcggggggtgggctcctgctgctggccatcacagccgtgctggtggcgtacaagcgcaagactcaggacgcggaccgtaccctcaagcgtctgcagctgcagatggacaacctggagtcccgtgtggccctggagtgcaaggaagcttttgcagagctgcagacggacatcaatgagctgactaaccacatggacgaggtgcagatccccttcctggactaccggacttacgccgtgcgcgtgctcttcccgggcatcgaggcccacccggtgctcaaggagctggatacgccacccaacgtggagaaggccctgcgcctcttcgggcagctgctgcacagccgcgcgttcgtgcttaccttcatccacacgctggaggcccagagcagcttctccatgcgcgaccgcggcaccgtggcctcgctcaccatggtggccctgcagagccggctcgactatgccacggggctgctcaagcaactgctggccgacctcatcgagaagaacctcgagagcaagaaccaccccaagctgctgctacgcaggacagagtcagtggctgagaagatgcttaccaactggttcacgttcctgctgcataagtttctgaaggagtgtgctggggagcctctcttcctgctttactgtgccatcaagcagcagatggagaagggccccattgatgccatcacgggcgaggcacgatactccctgagcgaggacaagctcatccgtcagcagatcgactacaagacactgacccttcactgcgtgtgtccggagaacgagggcagcgcccaggtcccagtgaaggttctcaactgtgacagcatcacccaggccaaagataagctgctggacactgtgtacaagggcattccgtactcccagcgtcccaaagctgaggacatggacctggagtggcgccagggccgcatgactcgcatcatcctccaggatgaggatgtcaccaccaagatcgagtgtgactggaagaggctcaactcactggcccactaccaggtgacagacggttccttggtggcattggtgcccaaacaagtgtctgcctataacatggccaactccttcaccttcacccgctccctcagccgctacgagagcttgctccgcacggccagcagccctgatagcctccgctcacgggcacccatgattacgcctgaccaggagacaggcaccaaattgtggcacctggtgaaaaaccacgaccatgccgaccatcgcgagggggaccgtggcagcaagatggtctccgagatctacctgacacggctgctggccaccaagggcacactgcagaagttcgtggatgacctctttgagacagtgttcagcacagcccaccggggctcggccctgcccctggccatcaagtacatgttcgacttcctggatgagcaggcggaccagcgccagatcagcgaccccgatgtgcgccacacctggaagagcaactgcctgccgctgcgcttctgggtgaatgtgatcaagaacccgcagttcgtgttcgacatccacaagaacagcatcacggatgcctgcctgtcggtggtagcccagaccttcatggactcctgctctacatccgagcaccgcctggggaaggactcgccctccaacaaactgctctacgccaaggacatccccaactacaagagctgggtggagaggtattatcgagacattgcaaagatggcatccatcagcgaccaggacatggatgcctacctggtggagcagtcccgcctccacgccagcgacttcagcgtcctgagtgcgctcaacgagctgtatttctatgtcaccaagtaccgccaggagattctcacggctctggaccgagatgcctcttgtcggaagcataagttgcggcagaaactggaacagatcatcagcctcgtgtccagcgacagctaaggtggtggaatcggtgaggagggggcttctcagtcctgtgccgtcctcccatccaggggagtggctggctcaagcctgggtccccgggctgagccctggattgggtatcgtggggcaggtcaccctggccacgatgcccccggcacacccaggcccccttcattagtgccttgctttgggccctgcagggggaggggtgacagggcgagcccccaccccagcagcagcaatacccccaccctcctgccctgtgcccaggtgttgggacagtcccaccctccctgctatttatatccctctgcctatttattgaatcgaacttcgcctctgtctccatctgtaaatatgtgtccccccaccggatgtcgccaccctcactcacctgcctcttcttgagctgtcctgggccctgccacccgtctgggctcctttgtgtagcattatcagcctcggtctggcctctggcacctcacccttgccatggctgaccccacccattccaaggcggggtcacggtaccagcagcacttggggtgaggcctccaaagcttcctcagaattgtggctgtgccacgctggaccacagggtccccctcaagcatctcggggccctattctctctgagcacctggagggctggactcaggcttgtgccagggcctgacttgggcctgggggccctagaacactcctcctcctgagcctactgccaaacgtcctcagtgttgtctgcacctgctccgactccttcagccgccccattcagcgcccgctccgtccagtgcccgccctgtggggccaaggcggccgtgccttactactctgtgtcttctgcctcctctgaggaatctggccctgtctgacagtcccagaccccccgttctctcctctttagttgcatgagtttttctttgttcatggaatgttttttcctgattaaatgttggggaaatgcca

SEQ ID NO: 42163 - DNA, 3404 bp, Homo sapiens
cgggccagtacggatgtggctggaagattaagacatgccaagtgatcaacgacactgccatgctgtgtaaggcccccggcatctttcttgggcggccccagcctcgggcgcaaggcgagcaccctgatgagtttggcttcctgctggaccacgtgcaaacggcccgctccctcaaccgctcctcctttacctactaccctgatcccagctttgagccgctggggccctctggcgtgctggacgtcaaaccgggctcccacgtggtgctgaagggcaagaacctgattcccgcggcagccggcagctcccgcctcaactacactgtgctgataggaggccagccgtgttcgctcactgtctcggacacacaactcctgtgcgactcacccagccagactggccggcagcctgtcatggtgctggtgggtggcctggagttctggctgggcaccctgcacatctcggcagagcgggcgctgaccctaccggccatgatggggctggcggcggggggtgggctcctgctgctggccatcacagccgtgctggtggcgtacaagcgcaagactcaggacgcggaccgtaccctcaagcgtctgcagctgcagatggacaacctggagtcccgtgtggccctggagtgcaaggaagcttttgcagagctgcagacggacatcaatgagctgactaaccacatggacgaggtgcagatccccttcctggactaccggacttacgccgtgcgcgtgctcttcccgggcatcgaggcccacccggtgctcaaggagctggatacgccacccaacgtggagaaggccctgcgcctcttcgggcagctgctgcacagccgcgcgttcgtgcttaccttcatccacacgctggaggcccagagcagcttctccatgcgcgaccgcggcaccgtggcctcgctcaccatggtggccctgcagagccggctcgactatgccacggggctgctcaagcaactgctggccgacctcatcgagaagaacctcgagagcaagaaccaccccaagctgctgctacgcaggacagagtcagtggctgagaagatgcttaccaactggttcacgttcctgctgcataagtttctgaaggagtgtgctggggagcctctcttcctgctttactgtgccatcaagcagcagatggagaagggccccattgatgccatcacgggcgaggcacgatactccctgagcgaggacaagctcatccgtcagcagatcgactacaagacactgacccttcactgcgtgtgtccggagaacgagggcagcgcccaggtcccagtgaaggttctcaactgtgacagcatcacccaggccaaagataagctgctggacactgtgtacaagggcattccgtactcccagcgtcccaaagctgaggacatggacctggagtggcgccagggccgcatgactcgcatcatcctccaggatgaggatgtcaccaccaagatcgagtgtgactggaagaggctcaactcactggcccactaccaggtgacagacggttccttggtggcattggtgcccaaacaagtgtctgcctataacatggccaactccttcaccttcacccgctccctcagccgctacgagagcttgctccgcacggccagcagccctgatagcctccgctcacgggcacccatgattacgcctgaccaggagacaggcaccaaattgtggcacctggtgaaaaaccacgaccatgccgaccatcgcgagggggaccgtggcagcaagatggtctccgagatctacctgacacggctgctggccaccaagggcacactgcagaagttcgtggatgacctctttgagacagtgttcagcacagcccaccggggctcggccctgcccctggccatcaagtacatgttcgacttcctggatgagcaggcggaccagcgccagatcagcgaccccgatgtgcgccacacctggaagagcaactgcctgccgctgcgcttctgggtgaatgtgatcaagaacccgcagttcgtgttcgacatccacaagaacagcatcacggatgcctgcctgtcggtggtagcccagaccttcatggactcctgctctacatccgagcaccgcctggggaaggactcgccctccaacaaactgctctacgccaaggacatccccaactacaagagctgggtggagaggtattatcgagacattgcaaagatggcatccatcagcgaccaggacatggatgcctacctggtggagcagtcccgcctccacgccagcgacttcagcgtcctgagtgcgctcaacgagctgtatttctatgtcaccaagtaccgccaggagattctcacggctctggaccgagatgcctcttgtcggaagcataagttgcggcagaaactggaacagatcatcagcctcgtgtccagcgacagctaaggtggtggaatcggtgaggagggggcttctcagtcctgtgccgtcctcccatccaggggagtggctggctcaagcctgggtccccgggctgagccctggattgggtatcgtggggcaggtcaccctggccacgatgcccccggcacacccaggcccccttcattagtgccttgctttgggccctgcagggggaggggtgacagggcgagcccccaccccagcagcagcaatacccccaccctcctgccctgtgcccaggtgttgggacagtcccaccctccctgctatttatatccctctgcctatttattgaatcgaacttcgcctctgtctccatctgtaaatatgtgtccccccaccggatgtcgccaccctcactcacctgcctcttcttgagctgtcctgggccctgccacccgtctgggctcctttgtgtagcattatcagcctcggtctggcctctggcacctcacccttgccatggctgaccccacccattccaaggcggggtcacggtaccagcagcacttggggtgaggcctccaaagcttcctcagaattgtggctgtgccacgctggaccacagggtccccctcaagcatctcggggccctattctctctgagcacctggagggctggactcaggcttgtgccagggcctgacttgggcctgggggccctagaacactcctcctcctgagcctactgccaaacgtcctcagtgttgtctgcacctgctccgactccttcagccgccccattcagcgcccgctccgtccagtgcccgccctgtggggccaaggcggccgtgccttactactctgtgtcttctgcctcctctgaggaatctggccctgtctgacagtcccagaccccccgttctctcctctttagttgcatgagtttttctttgttcatggaatgttttttcctgattaaatgttggggaaatgcca

SEQ ID NO: 42164 - DNA, 2477 bp, Homo sapiens
caccttggttctgccggtcgatctaaggatccccgctgagatgacagtcggccaagcaactgctggccgacctcatcgagaagaacctcgagagcaagaaccaccccaagctgctgctacgcaggacagagtcagtggctgagaagatgcttaccaactggttcacgttcctgctgcataagtttctgaaggagtgtgctggggagcctctcttcctgctttactgtgccatcaagcagcagatggagaagggccccattgatgccatcacgggcgaggcacgatactccctgagcgaggacaagctcatccgtcagcagatcgactacaagacactgacccttcactgcgtgtgtccggagaacgagggcagcgcccaggtcccagtgaaggttctcaactgtgacagcatcacccaggccaaagataagctgctggacactgtgtacaagggcattccgtactcccagcgtcccaaagctgaggacatggacctggagtggcgccagggccgcatgactcgcatcatcctccaggatgaggatgtcaccaccaagatcgagtgtgactggaagaggctcaactcactggcccactaccaggtgacagacggttccttggtggcattggtgcccaaacaagtgtctgcctataacatggccaactccttcaccttcacccgctccctcagccgctacgagagcttgctccgcacggccagcagccctgatagcctccgctcacgggcacccatgattacgcctgaccaggagacaggcaccaaattgtggcacctggtgaaaaaccacgaccatgccgaccatcgcgagggggaccgtggcagcaagatggtctccgagatctacctgacacggctgctggccaccaagggcacactgcagaagttcgtggatgacctctttgagacagtgttcagcacagcccaccggggctcggccctgcccctggccatcaagtacatgttcgacttcctggatgagcaggcggaccagcgccagatcagcgaccccgatgtgcgccacacctggaagagcaactgcctgccgctgcgcttctgggtgaatgtgatcaagaacccgcagttcgtgttcgacatccacaagaacagcatcacggatgcctgcctgtcggtggtagcccagaccttcatggactcctgctctacatccgagcaccgcctggggaaggactcgccctccaacaaactgctctacgccaaggacatccccaactacaagagctgggtggagaggtattatcgagacattgcaaagatggcatccatcagcgaccaggacatggatgcctacctggtggagcagtcccgcctccacgccagcgacttcagcgtcctgagtgcgctcaacgagctgtatttctatgtcaccaagtaccgccaggagattctcacggctctggaccgagatgcctcttgtcggaagcataagttgcggcagaaactggaacagatcatcagcctcgtgtccagcgacagctaaggtggtggaatcggtgaggagggggcttctcagtcctgtgccgtcctcccatccaggggagtggctggctcaagcctgggtccccgggctgagccctggattgggtatcgtggggcaggtcaccctggccacgatgcccccggcacacccaggcccccttcattagtgccttgctttgggccctgcagggggaggggtgacagggcgagcccccaccccagcagcagcaatacccccaccctcctgccctgtgcccaggtgttgggacagtcccaccctccctgctatttatatccctctgcctatttattgaatcgaacttcgcctctgtctccatctgtaaatatgtgtccccccaccggatgtcgccaccctcactcacctgcctcttcttgagctgtcctgggccctgccacccgtctgggctcctttgtgtagcattatcagcctcggtctggcctctggcacctcacccttgccatggctgaccccacccattccaaggcggggtcacggtaccagcagcacttggggtgaggcctccaaagcttcctcagaattgtggctgtgccacgctggaccacagggtccccctcaagcatctcggggccctattctctctgagcacctggagggctggactcaggcttgtgccagggcctgacttgggcctgggggccctagaacactcctcctcctgagcctactgccaaacgtcctcagtgttgtctgcacctgctccgactccttcagccgccccattcagcgcccgctccgtccagtgcccgccctgtggggccaaggcggccgtgccttactactctgtgtcttctgcctcctctgaggaatctggccctgtctgacagtcccagaccccccgttctctcctctttagttgcatgagtttttctttgttcatggaatgttttttcctgattaaatgttggggaaatgcca

SEQ ID NO: 42165 - DNA, 2450 bp, Homo sapiens
cttccgcctctcctgctgcttgatggcacagtaaagcaggaagagaggctcccaagccccacccctgccaggcccgagcccccttctcttgccctaggacagagtcagtggctgagaagatgcttaccaactggttcacgttcctgctgcataagtttctgaaggagtgtgctggggagcctctcttcctgctttactgtgccatcaagcagcagatggagaagggccccattgatgccatcacgggcgaggcacgatactccctgagcgaggacaagctcatccgtcagcagatcgactacaagacactgacccttcactgcgtgtgtccggagaacgagggcagcgcccaggtcccagtgaaggttctcaactgtgacagcatcacccaggccaaagataagctgctggacactgtgtacaagggcattccgtactcccagcgtcccaaagctgaggacatggacctggagtggcgccagggccgcatgactcgcatcatcctccaggatgaggatgtcaccaccaagatcgagtgtgactggaagaggctcaactcactggcccactaccaggtgacagacggttccttggtggcattggtgcccaaacaagtgtctgcctataacatggccaactccttcaccttcacccgctccctcagccgctacgagagcttgctccgcacggccagcagccctgatagcctccgctcacgggcacccatgattacgcctgaccaggagacaggcaccaaattgtggcacctggtgaaaaaccacgaccatgccgaccatcgcgagggggaccgtggcagcaagatggtctccgagatctacctgacacggctgctggccaccaagggcacactgcagaagttcgtggatgacctctttgagacagtgttcagcacagcccaccggggctcggccctgcccctggccatcaagtacatgttcgacttcctggatgagcaggcggaccagcgccagatcagcgaccccgatgtgcgccacacctggaagagcaactgcctgccgctgcgcttctgggtgaatgtgatcaagaacccgcagttcgtgttcgacatccacaagaacagcatcacggatgcctgcctgtcggtggtagcccagaccttcatggactcctgctctacatccgagcaccgcctggggaaggactcgccctccaacaaactgctctacgccaaggacatccccaactacaagagctgggtggagaggtattatcgagacattgcaaagatggcatccatcagcgaccaggacatggatgcctacctggtggagcagtcccgcctccacgccagcgacttcagcgtcctgagtgcgctcaacgagctgtatttctatgtcaccaagtaccgccaggagattctcacggctctggaccgagatgcctcttgtcggaagcataagttgcggcagaaactggaacagatcatcagcctcgtgtccagcgacagctaaggtggtggaatcggtgaggagggggcttctcagtcctgtgccgtcctcccatccaggggagtggctggctcaagcctgggtccccgggctgagccctggattgggtatcgtggggcaggtcaccctggccacgatgcccccggcacacccaggcccccttcattagtgccttgctttgggccctgcagggggaggggtgacagggcgagcccccaccccagcagcagcaatacccccaccctcctgccctgtgcccaggtgttgggacagtcccaccctccctgctatttatatccctctgcctatttattgaatcgaacttcgcctctgtctccatctgtaaatatgtgtccccccaccggatgtcgccaccctcactcacctgcctcttcttgagctgtcctgggccctgccacccgtctgggctcctttgtgtagcattatcagcctcggtctggcctctggcacctcacccttgccatggctgaccccacccattccaaggcggggtcacggtaccagcagcacttggggtgaggcctccaaagcttcctcagaattgtggctgtgccacgctggaccacagggtccccctcaagcatctcggggccctattctctctgagcacctggagggctggactcaggcttgtgccagggcctgacttgggcctgggggccctagaacactcctcctcctgagcctactgccaaacgtcctcagtgttgtctgcacctgctccgactccttcagccgccccattcagcgcccgctccgtccagtgcccgccctgtggggccaaggcggccgtgccttactactctgtgtcttctgcctcctctgaggaatctggccctgtctgacagtcccagaccccccgttctctcctctttagttgcatgagtttttctttgttcatggaatgttttttcctgattaaatgttggggaaatgcca

SEQ ID NO: 42166 - DNA, 4574 bp, Homo sapiens
cccagtgccccgcttctgcttccttccgttcccagctcgttcctccttgctccgtctcccggttgccccttgtcttgagccaacaagagtcttgtgggcccaggcttcgctcctcgctccctgctgtccctcctctgtctccctccgcagccaccaatttcctggagcaccctagggcgagcagtcagtcctggctggaggggaccgggttctagatcccgctctcttctgggacacaggaactgccggcctccatcttgcgcctgggagctttgactctcacgggttcctcctctgtttcaccagcccatgcagatcaacggcaacttctgtgggctggtgttgaaccagcctctgggaggcctgcatgtgatcgaggggctgcccctgctggccgacagcaccgacggcatggccagcgtggccgcctacacctaccgccagcactctgtggtcttcattggcacgcgcagcggcagcttgaagaaggtgcgggtcgatggcttccaggatgcccacctgtatgagacagtccccgtggtggatggcagccccatcctccgagacctgctcttcagcccggaccaccggcacatctatctcctgagtgagaagcaggtgagccagctcccggtggagacctgtgagcagtaccagagctgcgcagcctgcctgggctccggggacccgcactgtggttggtgtgtgctgcgacacaggtgctgccgcgaaggggcctgtctgggcgcctctgccccacacggctttgctgaggagctgagcaagtgtgtccaggtgcgggtccggcccaacaatgtgtcagtgacgtcacctggggtgcagctgaccgtcaccctgcacaacgtgccagacctcagtgcgggcgtgagctgcgccttcgaggcggcggcggagaacgaggcggtcctgctgccctccggtgaactgctctgcccctcaccctccctccaggagctccgagctcttaccagggggcatggggccacccgcactgtgcggctgcagcttctctccaaggagacaggcgtgaggtttgccggtgctgactttgtcttctacaactgcagcgtcctccagtcgtgcatgtcctgtgttggcagcccttacccctgccactggtgtaagtaccgccacacgtgtaccagccgcccccacgagtgctccttccaggagggcagggtccacagccctgaggtgaggcgggcgccgcatgtgaggggctgggctctgtggtgcgggcggggccaccggcttctatgcgttctcggtttctttgagccttctccaggttgggcctggagaagggtggccctgtgtgcagctgacaggtgctttccccgcagggctgccctgagatcctgcccagtggggacctcctgatccccgttggggtcatgcagcctcttaccttgcgggctaagaacctacctcagccgcagtcgggccagaagaactatgagtgcgtggtgcgggtgcaggggcggcagcagcgggtgcctgccgtgcgcttcaacagcagcagtgtgcagtgccagaacgcctcgtactcctatgaaggtgatgagcatggtgacaccgagctggacttctccgtggtctgggatggagacttccccatagacaagcctcccagcttccgagccctcctgtacaagtgctgggcgcagcggcccagctgtggcctctgcctcaaggctgatccccgcttcaactgtggctggtgcatctcagagcacaggtgccagctgcggacccactgcccggccccgaagaccaactggatgcacctgagccagaagggcacccggtgcagccacccccgcatcacgcagatccaccctctcgtggggcccaaggaaggaggcacccgggtcaccatcgtgggtgagaacctgggcctcttgtcccgagaggtgggcctgcgggtggctggcgtgcgttgcaactccattccggccgagtacatcagtgctgagaggatcgtgtgtgagatggaggagtcgctggtgcccagcccgccgccggggcccgtggagctgtgtgtgggtgactgttcagccgacttccgcacgcagtcggagcaggtctacagctttgtgaccccaacgtttgaccaagtgagtcccagccgtggcccggcgtccgggggcacacggcttaccatctcaggcagctctctggatgctggcagcagggtcacagtgactgtgagggacagcgagtgccagtttgtaaggagagatgccaaggcgatcgtgtgcatctcacctctctccaccctgggccccagccaggcccccatcacacttgccattgaccgggctaacatctccagccccgggctcatctacacctacactcaggaccccaccgtcacccgccttgagcccacctggagcatcatcaatggaagcactgccatcactgtgagtgggacccacctgctgacggtccaggagccccgggtccgtgccaagtaccgcggcattgagaccaccaatacatgccaagtgatcaacgacactgccatgctgtgtaaggcccccggcatctttcttgggcggccccagcctcgggcgcaaggcgagcaccctgatgagtttggcttcctgctggaccacgtgcaaacggcccgctccctcaaccgctcctcctttacctactaccctgatcccagctttgagccgctggggccctctggcgtgctggacgtcaaaccgggctcccacgtggtgctgaagggcaagaacctgattcccgcggcagccggcagctcccgcctcaactacactgtgctgataggaggccagccgtgttcgctcactgtctcggacacacaactcctgtgcgactcacccagccagactggccggcagcctgtcatggtgctggtgggtggcctggagttctggctgggcaccctgcacatctcggcagagcgggcgctgaccctaccggccatgatggggctggcggcggggggtgggctcctgctgctggccatcacagccgtgctggtggcgtacaagcgcaagactcaggacgcggaccgtaccctcaagcgtctgcagctgcagatggacaacctggagtcccgtgtggccctggagtgcaaggaagcttttgcagagctgcagacggacatcaatgagctgactaaccacatggacgaggtgcagatccccttcctggactaccggacttacgccgtgcgcgtgctcttcccgggcatcgaggcccacccggtgctcaaggagctggatacgccacccaacgtggagaaggccctgcgcctcttcgggcagctgctgcacagccgcgcgttcgtgcttaccttcatccacacgctggaggcccagagcagcttctccatgcgcgaccgcggcaccgtggcctcgctcaccatggtggccctgcagagccggctcgactatgccacggggctgctcaagcaactgctggccgacctcatcgagaagaacctcgagagcaagaaccaccccaagctgctgctacgcaggacagagtcagtggctgagaagatgcttaccaactggttcacgttcctgctgcataagtttctgaaggagtgtgctggggagcctctcttcctgctttactgtgccatcaagcagcagatggagaagggccccattgatgccatcacgggcgaggcacgatactccctgagcgaggacaagctcatccgtcagcagatcgactacaagacactgacccttcactgcgtgtgtccggagaacgagggcagcgcccaggtcccagtgaaggttctcaactgtgacagcatcacccaggccaaagataagctgctggacactgtgtacaagggcattccgtactcccagcgtcccaaagctgaggacatggacctggagtggcgccagggccgcatgactcgcatcatcctccaggatgaggatgtcaccaccaagatcgagtgtgactggaagaggctcaactcactggcccactaccaggtgacagacggttccttggtggcattggtgcccaaacaagtgtctgcctataacatggccaactccttcaccttcacccgctccctcagccgctacgagagcttgctccgcacggccagcagccctgatagcctccgctcacgggcacccatgattacgcctgaccaggagacaggcaccaaattgtggcacctggtgaaaaaccacgaccatgccgaccatcgcgagggggaccgtggcagcaagatggtctccgagatctacctgacacggctgctggccaccaagggcacactgcagaagttcgtggatgacctctttgagacagtgttcagcacagcccaccggggctcggccctgcccctggccatcaagtacatgttcgacttcctggatgagcaggcggaccagcgccagatcagcgaccccgatgtgcgccacacctggaagagcaactggtatcaccccgtgctgggctgccagcagcctgtctggagactggtgggcggaagacgctggtggctctgctgagacccagggcctggagtagcatcc

SEQ ID NO: 42167 - DNA, 2556 bp, Homo sapiens
cccagtgccccgcttctgcttccttccgttcccagctcgttcctccttgctccgtctcccggttgccccttgtcttgagccaacaagagtcttgtgggcccaggcttcgctcctcgctccctgctgtccctcctctgtctccctccgcagccaccaatttcctggagcaccctagggcgagcagtcagtcctggctggaggggaccgggttctagatcccgctctcttctgggacacaggaactgccggcctccatcttgcgcctgggagctttgactctcacgggttcctcctctgtttcaccagcccatgcagatcaacggcaacttctgtgggctggtgttgaaccagcctctgggaggcctgcatgtgatcgaggggctgcccctgctggccgacagcaccgacggcatggccagcgtggccgcctacacctaccgccagcactctgtggtcttcattggcacgcgcagcggcagcttgaagaaggtgcgggtcgatggcttccaggatgcccacctgtatgagacagtccccgtggtggatggcagccccatcctccgagacctgctcttcagcccggaccaccggcacatctatctcctgagtgagaagcaggtgagccagctcccggtggagacctgtgagcagtaccagagctgcgcagcctgcctgggctccggggacccgcactgtggttggtgtgtgctgcgacacaggtgctgccgcgaaggggcctgtctgggcgcctctgccccacacggctttgctgaggagctgagcaagtgtgtccaggtgcgggtccggcccaacaatgtgtcagtgacgtcacctggggtgcagctgaccgtcaccctgcacaacgtgccagacctcagtgcgggcgtgagctgcgccttcgaggcggcggcggagaacgaggcggtcctgctgccctccggtgaactgctctgcccctcaccctccctccaggagctccgagctcttaccagggggcatggggccacccgcactgtgcggctgcagcttctctccaaggagacaggcgtgaggtttgccggtgctgactttgtcttctacaactgcagcgtcctccagtcgtgcatgtcctgtgttggcagcccttacccctgccactggtgtaagtaccgccacacgtgtaccagccgcccccacgagtgctccttccaggagggcagggtccacagccctgaggtgaggcgggcgccgcatgtgaggggctgggctctgtggtgcgggcggggccaccggcttctatgcgttctcggtttctttgagccttctccaggttgggcctggagaagggtggccctgtgtgcagctgacaggtgctttccccgcagggctgccctgagatcctgcccagtggggacctcctgatccccgttggggtcatgcagcctcttaccttgcgggctaagaacctacctcagccgcagtcgggccagaagaactatgagtgcgtggtgcgggtgcaggggcggcagcagcgggtgcctgccgtgcgcttcaacagcagcagtgtgcagtgccagaacgcctcgtactcctatgaaggtgatgagcatggtgacaccgagctggacttctccgtggtctgggatggagacttccccatagacaagcctcccagcttccgagccctcctgtacaagtgctgggcgcagcggcccagctgtggcctctgcctcaaggctgatccccgcttcaactgtggctggtgcatctcagagcacaggtgccagctgcggacccactgcccggccccgaagaccaactggatgcacctgagccagaagggcacccggtgcagccacccccgcatcacgcagatccaccctctcgtggggcccaaggaaggaggcacccgggtcaccatcgtgggtgagaacctgggcctcttgtcccgagaggtgggcctgcgggtggctggcgtgcgttgcaactccattccggccgagtacatcagtgctgagaggatcgtgtgtgagatggaggagtcgctggtgcccagcccgccgccggggcccgtggagctgtgtgtgggtgactgttcagccgacttccgcacgcagtcggagcaggtctacagctttgtgaccccaacgtttgaccaagtgagtcccagccgtggcccggcgtccgggggcacacggcttaccatctcaggcagctctctggatgctggcagcagggtcacagtgactgtgagggacagcgagtgccagtttgtaaggagagatgccaaggcgatcgtgtgcatctcacctctctccaccctgggccccagccaggcccccatcacacttgccattgaccgggctaacatctccagccccgggctcatctacacctacactcaggaccccaccgtcacccgccttgagcccacctggagcatcatcaatggaagcactgccatcactgtgagtgggacccacctgctgacggtccaggagccccgggtccgtgccaagtaccgcggcattgagaccaccaatgtgagtaccagctgccccgccccaccccgaccct

SEQ ID NO: 42168 - DNA, 3956 bp, Homo sapiens
ggctctgtgggtgcccgggccgtatgtggcctggccggccctgacgctctctgagccctaggatcgtgtgtgagatggaggagtcgctggtgcccagcccgccgccggggcccgtggagctgtgtgtgggtgactgttcagccgacttccgcacgcagtcggagcaggtctacagctttgtgaccccaacgtttgaccaagtgagtcccagccgtggcccggcgtccgggggcacacggcttaccatctcaggcagctctctggatgctggcagcagggtcacagtgactgtgagggacagcgagtgccagtttgtaaggagagatgccaaggcgatcgtgtgcatctcacctctctccaccctgggccccagccaggcccccatcacacttgccattgaccgggctaacatctccagccccgggctcatctacacctacactcaggaccccaccgtcacccgccttgagcccacctggagcatcatcaatggaagcactgccatcactgtgagtgggacccacctgctgacggtccaggagccccgggtccgtgccaagtaccgcggcattgagaccaccaatacatgccaagtgatcaacgacactgccatgctgtgtaaggcccccggcatctttcttgggcggccccagcctcgggcgcaaggcgagcaccctgatgagtttggcttcctgctggaccacgtgcaaacggcccgctccctcaaccgctcctcctttacctactaccctgatcccagctttgagccgctggggccctctggcgtgctggacgtcaaaccgggctcccacgtggtgctgaagggcaagaacctgattcccgcggcagccggcagctcccgcctcaactacactgtgctgataggaggccagccgtgttcgctcactgtctcggacacacaactcctgtgcgactcacccagccagactggccggcagcctgtcatggtgctggtgggtggcctggagttctggctgggcaccctgcacatctcggcagagcgggcgctgaccctaccggccatgatggggctggcggcggggggtgggctcctgctgctggccatcacagccgtgctggtggcgtacaagcgcaagactcaggacgcggaccgtaccctcaagcgtctgcagctgcagatggacaacctggagtcccgtgtggccctggagtgcaaggaagcttttgcagagctgcagacggacatcaatgagctgactaaccacatggacgaggtgcagatccccttcctggactaccggacttacgccgtgcgcgtgctcttcccgggcatcgaggcccacccggtgctcaaggagctggatacgccacccaacgtggagaaggccctgcgcctcttcgggcagctgctgcacagccgcgcgttcgtgcttaccttcatccacacgctggaggcccagagcagcttctccatgcgcgaccgcggcaccgtggcctcgctcaccatggtggccctgcagagccggctcgactatgccacggggctgctcaagcaactgctggccgacctcatcgagaagaacctcgagagcaagaaccaccccaagctgctgctacgcaggacagagtcagtggctgagaagatgcttaccaactggttcacgttcctgctgcataagtttctgaaggagtgtgctggggagcctctcttcctgctttactgtgccatcaagcagcagatggagaagggccccattgatgccatcacgggcgaggcacgatactccctgagcgaggacaagctcatccgtcagcagatcgactacaagacactgacccttcactgcgtgtgtccggagaacgagggcagcgcccaggtcccagtgaaggttctcaactgtgacagcatcacccaggccaaagataagctgctggacactgtgtacaagggcattccgtactcccagcgtcccaaagctgaggacatggacctggagtggcgccagggccgcatgactcgcatcatcctccaggatgaggatgtcaccaccaagatcgagtgtgactggaagaggctcaactcactggcccactaccaggtgacagacggttccttggtggcattggtgcccaaacaagtgtctgcctataacatggccaactccttcaccttcacccgctccctcagccgctacgagagcttgctccgcacggccagcagccctgatagcctccgctcacgggcacccatgattacgcctgaccaggagacaggcaccaaattgtggcacctggtgaaaaaccacgaccatgccgaccatcgcgagggggaccgtggcagcaagatggtctccgagatctacctgacacggctgctggccaccaagggcacactgcagaagttcgtggatgacctctttgagacagtgttcagcacagcccaccggggctcggccctgcccctggccatcaagtacatgttcgacttcctggatgagcaggcggaccagcgccagatcagcgaccccgatgtgcgccacacctggaagagcaactgcctgccgctgcgcttctgggtgaatgtgatcaagaacccgcagttcgtgttcgacatccacaagaacagcatcacggatgcctgcctgtcggtggtagcccagaccttcatggactcctgctctacatccgagcaccgcctggggaaggactcgccctccaacaaactgctctacgccaaggacatccccaactacaagagctgggtggagaggtattatcgagacattgcaaagatggcatccatcagcgaccaggacatggatgcctacctggtggagcagtcccgcctccacgccagcgacttcagcgtcctgagtgcgctcaacgagctgtatttctatgtcaccaagtaccgccaggagattctcacggctctggaccgagatgcctcttgtcggaagcataagttgcggcagaaactggaacagatcatcagcctcgtgtccagcgacagctaaggtggtggaatcggtgaggagggggcttctcagtcctgtgccgtcctcccatccaggggagtggctggctcaagcctgggtccccgggctgagccctggattgggtatcgtggggcaggtcaccctggccacgatgcccccggcacacccaggcccccttcattagtgccttgctttgggccctgcagggggaggggtgacagggcgagcccccaccccagcagcagcaatacccccaccctcctgccctgtgcccaggtgttgggacagtcccaccctccctgctatttatatccctctgcctatttattgaatcgaacttcgcctctgtctccatctgtaaatatgtgtccccccaccggatgtcgccaccctcactcacctgcctcttcttgagctgtcctgggccctgccacccgtctgggctcctttgtgtagcattatcagcctcggtctggcctctggcacctcacccttgccatggctgaccccacccattccaaggcggggtcacggtaccagcagcacttggggtgaggcctccaaagcttcctcagaattgtggctgtgccacgctggaccacagggtccccctcaagcatctcggggccctattctctctgagcacctggagggctggactcaggcttgtgccagggcctgacttgggcctgggggccctagaacactcctcctcctgagcctactgccaaacgtcctcagtgttgtctgcacctgctccgactccttcagccgccccattcagcgcccgctccgtccagtgcccgccctgtggggccaaggcggccgtgccttactactctgtgtcttctgcctcctctgaggaatctggccctgtctgacagtcccagaccccccgttctctcctctttagttgcatgagtttttctttgttcatggaatgttttttcctgattaaatgttggggaaatgcca

SEQ ID NO: 42169 - DNA, 4468 bp, Homo sapiens
cccagtgccccgcttctgcttccttccgttcccagctcgttcctccttgctccgtctcccggttgccccttgtcttgagccaacaagagtcttgtgggcccaggcttcgctcctcgctccctgctgtccctcctctgtctccctccgcagccaccaatttcctggagcaccctagggcgagcagtcagtcctggctggaggggaccgggttctagatcccgctctcttctgggacacaggaactgccggcctccatcttgcgcctgggagctttgactctcacgggttcctcctctgtttcaccagcccatgcagatcaacggcaacttctgtgggctggtgttgaaccagcctctgggaggcctgcatgtgatcgaggggctgcccctgctggccgacagcaccgacggcatggccagcgtggccgcctacacctaccgccagcactctgtggtcttcattggcacgcgcagcggcagcttgaagaaggtgcgggtcgatggcttccaggatgcccacctgtatgagacagtccccgtggtggatggcagccccatcctccgagacctgctcttcagcccggaccaccggcacatctatctcctgagtgagaagcaggtgagccagctcccggtggagacctgtgagcagtaccagagctgcgcagcctgcctgggctccggggacccgcactgtggttggtgtgtgctgcgacacaggtgctgccgcgaaggggcctgtctgggcgcctctgccccacacggctttgctgaggagctgagcaagtgtgtccaggtgcgggtccggcccaacaatgtgtcagtgacgtcacctggggtgcagctgaccgtcaccctgcacaacgtgccagacctcagtgcgggcgtgagctgcgccttcgaggcggcggcggagaacgaggcggtcctgctgccctccggtgaactgctctgcccctcaccctccctccaggagctccgagctcttaccagggggcatggggccacccgcactgtgcggctgcagcttctctccaaggagacaggcgtgaggtttgccggtgctgactttgtcttctacaactgcagcgtcctccagtcgtgcatgtcctgtgttggcagcccttacccctgccactggtgtaagtaccgccacacgtgtaccacctcgggcgcaaggcgagcaccctgatgagtttggcttcctgctggaccacgtgcaaacggcccgctccctcaaccgctcctcctttacctactaccctgatcccagctttgagccgctggggccctctggcgtgctggacgtcaaaccgggctcccacgtggtgctgaagggcaagaacctgattcccgcggcagccggcagctcccgcctcaactacactgtgctgataggaggccagccgtgttcgctcactgtctcggacacacaactcctgtgcgactcacccagccagactggccggcagcctgtcatggtgctggtgggtggcctggagttctggctgggcaccctgcacatctcggcagagcgggcgctgaccctaccggccatgatggggctggcggcggggggtgggctcctgctgctggccatcacagccgtgctggtggcgtacaagcgcaagactcaggacgcggaccgtaccctcaagcgtctgcagctgcagatggacaacctggagtcccgtgtggccctggagtgcaaggaagcttttgcagagctgcagacggacatcaatgagctgactaaccacatggacgaggtgcagatccccttcctggactaccggacttacgccgtgcgcgtgctcttcccgggcatcgaggcccacccggtgctcaaggagctggatacgccacccaacgtggagaaggccctgcgcctcttcgggcagctgctgcacagccgcgcgttcgtgcttaccttcatccacacgctggaggcccagagcagcttctccatgcgcgaccgcggcaccgtggcctcgctcaccatggtggccctgcagagccggctcgactatgccacggggctgctcaagcaactgctggccgacctcatcgagaagaacctcgagagcaagaaccaccccaagctgctgctacgcaggacagagtcagtggctgagaagatgcttaccaactggttcacgttcctgctgcataagtttctgaaggagtgtgctggggagcctctcttcctgctttactgtgccatcaagcagcagatggagaagggccccattgatgccatcacgggcgaggcacgatactccctgagcgaggacaagctcatccgtcagcagatcgactacaagacactgacccttcactgcgtgtgtccggagaacgagggcagcgcccaggtcccagtgaaggttctcaactgtgacagcatcacccaggccaaagataagctgctggacactgtgtacaagggcattccgtactcccagcgtcccaaagctgaggacatggacctggagtggcgccagggccgcatgactcgcatcatcctccaggatgaggatgtcaccaccaagatcgagtgtgactggaagaggctcaactcactggcccactaccaggtgacagacggttccttggtggcattggtgcccaaacaagtgtctgcctataacatggccaactccttcaccttcacccgctccctcagccgctacgagagcttgctccgcacggccagcagccctgatagcctccgctcacgggcacccatgattacgcctgaccaggagacaggcaccaaattgtggcacctggtgaaaaaccacgaccatgccgaccatcgcgagggggaccgtggcagcaagatggtctccgagatctacctgacacggctgctggccaccaagggcacactgcagaagttcgtggatgacctctttgagacagtgttcagcacagcccaccggggctcggccctgcccctggccatcaagtacatgttcgacttcctggatgagcaggcggaccagcgccagatcagcgaccccgatgtgcgccacacctggaagagcaactgcctgccgctgcgcttctgggtgaatgtgatcaagaacccgcagttcgtgttcgacatccacaagaacagcatcacggatgcctgcctgtcggtggtagcccagaccttcatggactcctgctctacatccgagcaccgcctggggaaggactcgccctccaacaaactgctctacgccaaggacatccccaactacaagagctgggtggagaggtattatcgagacattgcaaagatggcatccatcagcgaccaggacatggatgcctacctggtggagcagtcccgcctccacgccagcgacttcagcgtcctgagtgcgctcaacgagctgtatttctatgtcaccaagtaccgccaggagattctcacggctctggaccgagatgcctcttgtcggaagcataagttgcggcagaaactggaacagatcatcagcctcgtgtccagcgacagctaaggtggtggaatcggtgaggagggggcttctcagtcctgtgccgtcctcccatccaggggagtggctggctcaagcctgggtccccgggctgagccctggattgggtatcgtggggcaggtcaccctggccacgatgcccccggcacacccaggcccccttcattagtgccttgctttgggccctgcagggggaggggtgacagggcgagcccccaccccagcagcagcaatacccccaccctcctgccctgtgcccaggtgttgggacagtcccaccctccctgctatttatatccctctgcctatttattgaatcgaacttcgcctctgtctccatctgtaaatatgtgtccccccaccggatgtcgccaccctcactcacctgcctcttcttgagctgtcctgggccctgccacccgtctgggctcctttgtgtagcattatcagcctcggtctggcctctggcacctcacccttgccatggctgaccccacccattccaaggcggggtcacggtaccagcagcacttggggtgaggcctccaaagcttcctcagaattgtggctgtgccacgctggaccacagggtccccctcaagcatctcggggccctattctctctgagcacctggagggctggactcaggcttgtgccagggcctgacttgggcctgggggccctagaacactcctcctcctgagcctactgccaaacgtcctcagtgttgtctgcacctgctccgactccttcagccgccccattcagcgcccgctccgtccagtgcccgccctgtggggccaaggcggccgtgccttactactctgtgtcttctgcctcctctgaggaatctggccctgtctgacagtcccagaccccccgttctctcctctttagttgcatgagtttttctttgttcatggaatgttttttcctgattaaatgttggggaaatgcca

SEQ ID NO: 42170 - DNA, 2807 bp, Homo sapiens
taactctagcggatcttagtacttgttctcgtgttggcctggagtacaaggaagcttttgcagagctgcagacggacatcaatgagctgactaaccacatggacgaggtgcagatccccttcctggactaccggacttacgccgtgcgcgtgctcttcccgggcatcgaggcccacccggtgctcaaggagctggatacgccacccaacgtggagaaggccctgcgcctcttcgggcagctgctgcacagccgcgcgttcgtgcttaccttcatccacacgctggaggcccagagcagcttctccatgcgcgaccgcggcaccgtggcctcgctcaccatggtggccctgcagagccggctcgactatgccacggggctgctcaagcaactgctggccgacctcatcgagaagaacctcgagagcaagaaccaccccaagctgctgctacgcaggacagagtcagtggctgagaagatgcttaccaactggttcacgttcctgctgcataagtttctgaaggagtgtgctggggagcctctcttcctgctttactgtgccatcaagcagcagatggagaagggccccattgatgccatcacgggcgaggcacgatactccctgagcgaggacaagctcatccgtcagcagatcgactacaagacactgacccttcactgcgtgtgtccggagaacgagggcagcgcccaggtcccagtgaaggttctcaactgtgacagcatcacccaggccaaagataagctgctggacactgtgtacaagggcattccgtactcccagcgtcccaaagctgaggacatggacctggagtggcgccagggccgcatgactcgcatcatcctccaggatgaggatgtcaccaccaagatcgagtgtgactggaagaggctcaactcactggcccactaccaggtgacagacggttccttggtggcattggtgcccaaacaagtgtctgcctataacatggccaactccttcaccttcacccgctccctcagccgctacgagagcttgctccgcacggccagcagccctgatagcctccgctcacgggcacccatgattacgcctgaccaggagacaggcaccaaattgtggcacctggtgaaaaaccacgaccatgccgaccatcgcgagggggaccgtggcagcaagatggtctccgagatctacctgacacggctgctggccaccaagggcacactgcagaagttcgtggatgacctctttgagacagtgttcagcacagcccaccggggctcggccctgcccctggccatcaagtacatgttcgacttcctggatgagcaggcggaccagcgccagatcagcgaccccgatgtgcgccacacctggaagagcaactgcctgccgctgcgcttctgggtgaatgtgatcaagaacccgcagttcgtgttcgacatccacaagaacagcatcacggatgcctgcctgtcggtggtagcccagaccttcatggactcctgctctacatccgagcaccgcctggggaaggactcgccctccaacaaactgctctacgccaaggacatccccaactacaagagctgggtggagaggtattatcgagacattgcaaagatggcatccatcagcgaccaggacatggatgcctacctggtggagcagtcccgcctccacgccagcgacttcagcgtcctgagtgcgctcaacgagctgtatttctatgtcaccaagtaccgccaggagattctcacggctctggaccgagatgcctcttgtcggaagcataagttgcggcagaaactggaacagatcatcagcctcgtgtccagcgacagctaaggtggtggaatcggtgaggagggggcttctcagtcctgtgccgtcctcccatccaggggagtggctggctcaagcctgggtccccgggctgagccctggattgggtatcgtggggcaggtcaccctggccacgatgcccccggcacacccaggcccccttcattagtgccttgctttgggccctgcagggggaggggtgacagggcgagcccccaccccagcagcagcaatacccccaccctcctgccctgtgcccaggtgttgggacagtcccaccctccctgctatttatatccctctgcctatttattgaatcgaacttcgcctctgtctccatctgtaaatatgtgtccccccaccggatgtcgccaccctcactcacctgcctcttcttgagctgtcctgggccctgccacccgtctgggctcctttgtgtagcattatcagcctcggtctggcctctggcacctcacccttgccatggctgaccccacccattccaaggcggggtcacggtaccagcagcacttggggtgaggcctccaaagcttcctcagaattgtggctgtgccacgctggaccacagggtccccctcaagcatctcggggccctattctctctgagcacctggagggctggactcaggcttgtgccagggcctgacttgggcctgggggccctagaacactcctcctcctgagcctactgccaaacgtcctcagtgttgtctgcacctgctccgactccttcagccgccccattcagcgcccgctccgtccagtgcccgccctgtggggccaaggcggccgtgccttactactctgtgtcttctgcctcctctgaggaatctggccctgtctgacagtcccagaccccccgttctctcctctttagttgcatgagtttttctttgttcatggaatgttttttcctgattaaatgttggggaaatgcca

SEQ ID NO: 42171 - DNA, 1675 bp, Homo sapiens
ttgcaccaggtagagatgctggtggtcggtcgcaggtggtgagagcggtgacaggagaagctgcggagggggttgagccctattgagaacagaagttcagcagagacttagaggaaaggccgttcaccctaaatgtgttgctctcaccacctctggacaagatgtgagccggccggacaggaaagagatgtgcacatgggaggggccccttggggctaactagggagcctcaggcgcacgtccctctgttgtccacagcctgccgctgcgcttctgggtgaatgtgatcaagaacccgcagttcgtgttcgacatccacaagaacagcatcacggatgcctgcctgtcggtggtagcccagaccttcatggactcctgctctacatccgagcaccgcctggggaaggactcgccctccaacaaactgctctacgccaaggacatccccaactacaagagctgggtggagaggtattatcgagacattgcaaagatggcatccatcagcgaccaggacatggatgcctacctggtggagcagtcccgcctccacgccagcgacttcagcgtcctgagtgcgctcaacgagctgtatttctatgtcaccaagtaccgccaggagattctcacggctctggaccgagatgcctcttgtcggaagcataagttgcggcagaaactggaacagatcatcagcctcgtgtccagcgacagctaaggtggtggaatcggtgaggagggggcttctcagtcctgtgccgtcctcccatccaggggagtggctggctcaagcctgggtccccgggctgagccctggattgggtatcgtggggcaggtcaccctggccacgatgcccccggcacacccaggcccccttcattagtgccttgctttgggccctgcagggggaggggtgacagggcgagcccccaccccagcagcagcaatacccccaccctcctgccctgtgcccaggtgttgggacagtcccaccctccctgctatttatatccctctgcctatttattgaatcgaacttcgcctctgtctccatctgtaaatatgtgtccccccaccggatgtcgccaccctcactcacctgcctcttcttgagctgtcctgggccctgccacccgtctgggctcctttgtgtagcattatcagcctcggtctggcctctggcacctcacccttgccatggctgaccccacccattccaaggcggggtcacggtaccagcagcacttggggtgaggcctccaaagcttcctcagaattgtggctgtgccacgctggaccacagggtccccctcaagcatctcggggccctattctctctgagcacctggagggctggactcaggcttgtgccagggcctgacttgggcctgggggccctagaacactcctcctcctgagcctactgccaaacgtcctcagtgttgtctgcacctgctccgactccttcagccgccccattcagcgcccgctccgtccagtgcccgccctgtggggccaaggcggccgtgccttactactctgtgtcttctgcctcctctgaggaatctggccctgtctgacagtcccagaccccccgttctctcctctttagttgcatgagtttttctttgttcatggaatgttttttcctgattaaatgttggggaaatgcca

SEQ ID NO: 42172 - DNA, 2852 bp, Homo sapiens
cccagtgccccgcttctgcttccttccgttcccagctcgttcctccttgctccgtctcccggttgccccttgtcttgagccaacaagagtcttgtgggcccaggcttcgctcctcgctccctgctgtccctcctctgtctccctccgcagccaccaatttcctggagcaccctagggcgagcagtcagtcctggctggaggggaccgggttctagatcccgctctcttctgggacacaggaactgccggcctccatcttgcgcctgggagctttgactctcacgggttcctcctctgtttcaccagcccatgcagatcaacggcaacttctgtgggctggtgttgaaccagcctctgggaggcctgcatgtgatcgaggggctgcccctgctggccgacagcaccgacggcatggccagcgtggccgcctacacctaccgccagcactctgtggtcttcattggcacgcgcagcggcagcttgaagaaggtgcgggtcgatggcttccaggatgcccacctgtatgagacagtccccgtggtggatggcagccccatcctccgagacctgctcttcagcccggaccaccggcacatctatctcctgagtgagaagcaggtgagccagctcccggtggagacctgtgagcagtaccagagctgcgcagcctgcctgggctccggggacccgcactgtggttggtgtgtgctgcgacacaggtgctgccgcgaaggggcctgtctgggcgcctctgccccacacggctttgctgaggagctgagcaagtgtgtccaggtgcgggtccggcccaacaatgtgtcagtgacgtcacctggggtgcagctgaccgtcaccctgcacaacgtgccagacctcagtgcgggcgtgagctgcgccttcgaggcggcggcggagaacgaggcggtcctgctgccctccggtgaactgctctgcccctcaccctccctccaggagctccgagctcttaccagggggcatggggccacccgcactgtgcggctgcagcttctctccaaggagacaggcgtgaggtttgccggtgctgactttgtcttctacaactgcagcgtcctccagtcgtgcatgtcctgtgttggcagcccttacccctgccactggtgtaagtaccgccacacgtgtaccagccgcccccacgagtgctccttccaggagggcagggtccacagccctgaggtgaggcgggcgccgcatgtgaggggctgggctctgtggtgcgggcggggccaccggcttctatgcgttctcggtttctttgagccttctccaggttgggcctggagaagggtggccctgtgtgcagctgacaggtgctttccccgcagggctgccctgagatcctgcccagtggggacctcctgatccccgttggggtcatgcagcctcttaccttgcgggctaagaacctacctcagccgcagtcgggccagaagaactatgagtgcgtggtgcgggtgcaggggcggcagcagcgggtgcctgccgtgcgcttcaacagcagcagtgtgcagtgccagaacgcctcgtactcctatgaaggtgatgagcatggtgacaccgagctggacttctccgtggtctgggatggagacttccccatagacaagcctcccagcttccgagccctcctgtacaagtgctgggcgcagcggcccagctgtggcctctgcctcaaggctgatccccgcttcaactgtggctggtgcatctcagagcacaggtgccagctgcggacccactgcccggccccgaagaccaactggatgcacctgagccagaagggcacccggtgcagccacccccgcatcacgcagatccaccctctcgtggggcccaaggaaggaggcacccgggtcaccatcgtgggtgagaacctgggcctcttgtcccgagaggtgggcctgcgggtggctggcgtgcgttgcaactccattccggccgagtacatcagtgctgagaggatcgtgtgtgagatggaggagtcgctggtgcccagcccgccgccggggcccgtggagctgtgtgtgggtgactgttcagccgacttccgcacgcagtcggagcaggtctacagctttgtgaccccaacgtttgaccaagtgagtcccagccgtggcccggcgtccgggggcacacggcttaccatctcaggcagctctctggatgctggcagcagggtcacagtgactgtgagggacagcgagtgccagtttgtaaggagagatgccaaggcgatcgtgtgcatctcacctctctccaccctgggccccagccaggcccccatcacacttgccattgaccgggctaacatctccagccccgggctcatctacacctacactcaggaccccaccgtcacccgccttgagcccacctggagcatcatcaatggaagcactgccatcactgtgagtgggacccacctgctgacggtccaggagccccgggtccgtgccaagtaccgcggcattgagaccaccaatacatgccaagtgatcaacgacactgccatgctgtgtaaggcccccggcatctttcttgggcggccccagcctcgggcgcaaggcgagcaccctgatgagtttggcttcctgctggaccacgtgcaaacggcccgctccctcaaccgtccgtccagtgcccgccctgtggggccaaggcggccgtgccttactactctgtgtcttctgcctcctctgaggaatctggccctgtctgacagtcccagaccccccgttctctcctctttagttgcatgagtttttctttgttcatggaatgttttttcctgattaaatgttggggaaatgcca

SEQ ID NO: 42173 - DNA, 498 bp, Homo sapiens
gtgatgtcgcctgagtgacatactcagggtcccaacaggtattatcgagacattgcaaagatggcatccatcagcgaccaggacatggatgcctacctggtggagcagtcccgcctccacgccagcgacttcagcgtcctgagtgcgctcaacgagctgtatttctatgtcaccaagtaccgccaggaggtgtgtgtcatccccacagactcccagttacttggtcctgaaggtgcagccagtgacaaaggcaggagggttggtgggggttggggattgttcacggtctctcccctgaccagggcctggggccggcacaggtgatgctctctgggatcacaggtagatgctggaatttgagggacccaggagataagccactggctgggtacaaagtggccactgggcaaaagttaaagggcctgagcactggaagggatgggtcaggctttgtgatgagaaatagccagaggcaggaggacatagaggtgtggactt

SEQ ID NO: 42174 - DNA, 517 bp, Homo sapiens
gcacccccctctttttctggctcctctaggggcaccaggcagctgtcagggccctggcatgcaaggctgtgcccaagggaagcggacatcatggagctaattaaaccaacgtggacccaagtgcctggaattcaggaggctgtcctctcccacccaccccaacagagccccgcagacgctggagtgagttagtttgaccttctggattgatgcagttaatgagatggttgtgtaatgctttgtttaacagaactggtttctgggcccggcccaaagctaggctggactctggctggcttccatgccccagccctgcttgctcccttgaggctccctctggccagtgccctctaggggccggggctgatatgtttattgctaactactccgaactcgtctgcctcctctgaggaacccggggacaattcctctgacctttccctgcaagctccatctctgtgaaacttggtctcacaagctagcctttcttgcttggagaatctgtgtttgaagtcag

SEQ ID NO: 42175 - DNA, 334 bp, Homo sapiens
ccctggttccaggcctttaagaagtggcaccaacgcctggcagccaggagcccaaggagaggagctgccagtagcccaagaccctggagcaagccaggccccaagggccccgagagtggacaggaagccgccggagcaccgcggggttgggggcttggggcagagcatggggcccagctgcagctgtgacttgttctcatagaataaaaaacagaactgaacttagccttcccagggaaggaaccatgccccacacatccagggagtgatgacagaggggacagcttgaagagctctgaaggacaataaaacccactcctcagtcctaaaagct

SEQ ID NO: 42176 - DNA, 334 bp, Homo sapiens
tgatccacctgcctcggcctcccaaagtgctgggattacaggagtgagccaccatgcccggccccagatctgttttttgaagttcacatcaggtaattctggaactcacaacttgactgacactggacctgaatttagaaattggaaatgtttgatgatcaagtgttgccgatctaaaccttattgaattcattcagttctgcagttcttattggcaagtacctctgctttccattttacattagccagatggcaagatgaacttactctattatacttacaagccagccagtgatattcaaagactagcatccatccatccagatatcacatt

SEQ ID NO: 42177 - DNA, 374 bp, Homo sapiens
cccttcagaaacccagaatcagctcccttttctcccttcccttcttcttaaaatgaatgacttcttttctcctgtgcaaaatgaaggccctgcggctgggcacagtggctcacgcctgtaatcccagcactttgggaggccaaggcgggcgaatcacaaggtcaggagcttgcgaccagcctggccaatgtggtgaaaccccgtctctactgaaaatacaaaaattagcctggcgtggtggtgcacgcttgtaatcccagctactcgggaggctgaggcaggagaattgcttgaacccaggaagcagaggttgcagtgtgctgagtttgcaccactgcactccagcctgggtgacagagtaagactccatctca

SEQ ID NO: 42178 - DNA, 402 bp, Homo sapiens
gacatatgaatccctgaataaaatattttgagcaaaatggcactgtaacagaagtaataattcagtttatttttttacagttttatgtcgggattcatatataattacccacctaataaaaggagctattaggttgtaaagatcctatcccttccatgctcttttaaaattatgacctactcaagcttgaaatcaaaggcagagctgaaaggaataattcagctgaaactctctcattgggttttcaagtcacctaactgataaatatgcaaactagctcccttttggcgattcagctgcataaacagggattaactccaaatgcagctgaaaattcagaaactaaaatgctgcatacaaaatgttcttaattttagctagttccaagctgtagataaacat

SEQ ID NO: 42179 - DNA, 560 bp, Homo sapiens
aaccctatgtttccttcactagctccaggtctcttctttggcctcttgaacctggtgccatccctactgaagttaacagaggtctggcccaacctaagggcatcattttttaaagtcccatggaaaaaactcccagcagagttcagcatctgggaacggttggcaggccccacaggaaccacagcttctgcctttatgatgctgagaaacacttcactgttgacttcccccatctaagggggccagagctaaattttgggcagctgtgtttatcctgggggtccacatatttgcatcattctttcttctcatcgtgatgttctaccttgttggtactgttctcttccttctttgtgtgagttcctgttgtgagcttccccttgttcactgaggtaatgtagccaaacaaggttaaaaagcccccagtaagccgggtgcggtggctcatgcccgtaatctcagcactttgggaggccgaggcgggcagatcacctgaggtcgagagtttaagaccagcctgaccaacatggagaaaccccgtctctactaaaaatacaaaa

SEQ ID NO: 42180 - DNA, 377 bp, Homo sapiens
attctagcaagttgatgttattggtatctggtgttaaggcagtgccgaatggagggcaggaaacacatttttaaatatttatggatttatgtatttttctcataaagacagggtctccctatgattcccaggctctccttgaacgcctaggctcaagtgatcctcccacctcagcctcccaaagtgctgggattacaggtgtgagccaccagattatatttatttctattcgctgtatttaattcttaaccccatgtttattttacataacttccctatttctcaaaaagaatttaaggcctattctcaaaataatgtaagtttatgggtattaaatattaaaatagtattagtccaattttaaaagcggcaaaaaa

SEQ ID NO: 42181 - DNA, 792 bp, Homo sapiens
tgcctcagccttccaaagtgttgggattataggcgggatagccattgcacctggccctgttagtgtcttctatttgttgagctcttgatcgttcacaaagccccttcataactgttaccccagaaaaattccacccattttgcagatgagaaaactggagctttgagggcactttctcagggtcacaagctagtacgaggcaaagctgagtctcaaaagccttttcccctgactccagagctcccacccactgatgaagcttttcccctgacagagctggggcttgaggtgtgaccctggatgaacctcttctctctctccccgttgtactcatcagttctgccagtaaaaattctcctctatgacctggaaagcggggttgtggcctttctttaggtagtgagttggtgttttgggtttgctttttatttttgaatcagtgacaaataacctttctggctggttgaatggcttcaggttctggaattcttgctttgttctaaatgtcaatagtatagcagaaatattaataataaataatacaatataaataataatagcaaaaacacacaggcagttcaaaaacagagaattaaaatgttatgctaaaaaatatttatttccccactgcttaatttgactggctttgaaaagaaaagtaggctgggcaaggtggctcatgcctgtaacacagcactttgggaggccaaagctggaatattgcttgagcccaggagtttgaggctgcagtgagctatgattgcaccactgtactccagcctgggtgacaga

SEQ ID NO: 42182 - DNA, 493 bp, Homo sapiens
tgcgcagggaacactctgaatcacactgtgatagccacaggacaagtctcagggcaaatggtgtggcacgccacacagacactgatcgtctaacgtgtaagcagccggcaggcacagaacagcccgtgagcctgctcagggagtcccagccggcttgtcctctcagctgctctgaccattcaaggcagatatgacaacatttccgaggcagaattttgttaccgtctatttggcataggcaactggaaatcctccaaaatccagttgccaggcatggaaccagttaggtggcaagcatcagaaccattgggagccatccctggaagtgccagctatgggctttcctggattctccaaccatgtcctcacaagcgtgaagcctgcctctaaaatatttcagccaatccgtatatcttgaaattgagtattatgaattttaccctttttaaaaatagccatcatgctaaagagcaagccatcaatttcaccactt

SEQ ID NO: 42183 - DNA, 2202 bp, Homo sapiens
  misc_feature (174)..(174): n is a, c, g, or t
agagcaaggaagggcaggggacctgggaaggaagttctggaaggcagtggggtttgagattggacccagggtcaagatagaacatgaaggtgggatgaggacatgaacagaacatggccaagaaggatctgggggagcagccaggacgaggcggagctgatccgagaggacatncagggggctctgcacaattaccgctcgggccgcggggagcgcagggcggcggcgctcagggccacgcaggaggagttgcagcgcgaccgctcgcccgccgctgagaccccgcccctgcagcgccgcccgtcagtccgcgcagtgatcagcaccgtagagcggggcgcgggccgcggacgaccccaggcgaagcccattcccgaggcagaggaggcgcagaggcctgagccggtggggacctcgagcaacgctgactcggcctccccggacctgggtccccggggtcctgacctggcggttctgcaggcggagcgggaagtggacatcctgaaccacgtgttcgacgacgtagagagctttgtatcgaggctgcagaagtcggcggaggcggccagggtgctggagcaccgggaacgcggccgcaggagccggcgccgggcggctggggagggcttgctgacgctgcgggccaagccgccctcggaggccgagtacaccgacgtgctgcagaagatcaagtacgccttcagcctgctggcccggctgcgcggcaacatcgccgacccctcctctccggagctgttgcacttccttttcgggcctctgcagatgattgtgaacacgtcgggggggccggagttcgcgagcagtgtgcggcggccgcatctgacatcggatgccgtggcgctgctgcgggacaacgtcactccacgtgaaaacgagctctggacctcgctgggggactcgtggacccgccccgggctggagctgtccccggaggagggacccccatacagacccgagttcttcagcggctgggagccgccggtcactgacccgcagagccgcgcctgggaggacccagttgagaaacagctacagcacgagcggaggcgccggcagcaaagcgccccccaggtcgctgtcaatggtcaccgagacttggagccagaatctgagcctcagctggagtcagagacagcaggaaaatgggtcctgtgtaattatgacttccaggcccgcaacagcagtgagctgtcggtcaagcagcgggacgtactggaggtcctggatgacagtcgtaagtggtggaaggttcgggacccagcggggcaggagggatatgtgccctacaacatcctgacaccctaccccggaccccggctgcaccacagccaaagccctgcccgcagcctgaacagcactcctcctccaccaccagccccagccccggccccacctccagctctggctcggccccgctgggacaggccccgctgggacagctgcgatagcctcaacggcttggaccccagcgagaaggagaaattctcccagatgctcatcgtcaacgaggaactgcaggcgcgcctggcccagggccgctcgggaccgagccgcgcagtcccagggccccgcgccccggaaccgcagctcagcccgggctcggacgcctccgaggtccgcgcctggctgcaggccaagggctttagctccgggaccgtggacgcgctgggtgtgctgaccggggcgcagcttttctcgctgcagaaggaggagctgcgggcggtgagccccgaggagggggcacgtgtgtacagccaggtcaccgtgcagcgctcgctgctggaggacaaagagaaagtgtcagagctggaggcagtgatggagaagcaaaagaagaaggtggaaggcgaggtggaaatggaggtcatttgacctgccaggcgcccttcgcaaagagtgacgaggccccgtgggagaacggactcctcagactctccccaatagcggaagtcgatcttctgaaggatggccaatctgctccggccctggtcttcccccatcccggtggacagacttaacgatccttgctgcagtccctccggagaggatctggactggctgggagtggggagggcgtggagacagtctacggaaagcgctagcagacccccgagagggtgcagtggagccctgagcattgtaatatgcggcccagcctataaacagcctccgtgcttagca

SEQ ID NO: 42184 - DNA, 2143 bp, Homo sapiens
  misc_feature (586)..(586): n is a, c, g, or t
ggcacgaggccagaacacccctatcttctaggattgacactggctgtcaaactcatccttcaaggtgattcctggcctgccctcctcctccaggcagcctgtcctcctcctccaggcagcctgtcctgaccctcagcagcctctcctggccttggcagagcccctcgtgtcctcccttgcagcacgcatgggaagaaaggccatcgtcctcgccattgctaacaccagccttgcgtttcctctttgccagcacctggtgacgttctgcctgggtgaggacgatggcgtgcataccgtggaggatgcctccaggaagttggccgtcatggatagccagggccgagtctgggcacaggagatgctgctgcgagtgtctcccgaccatgtcacgctgctcgacccggcctccaaggaggagctggagtcgtacccactgggcgccatcgtgcgctgtgacgcggtgatgccacccggcaggagccgctcgttgctgctgctcgtgtgccaggaacccgagcgcgcgcagcccgacgtgcacttcttccagggcctgcgcctcggggcggagctgatccgagaggacatncagggggctctgcacaattaccgctcgggccgcggggagcgcagggcggcggcgctcagggccacgcaggaggagttgcagcgcgaccgctcgcccgccgctgagaccccgcccctgcagcgccgcccgtcagtccgcgcagtgatcagcaccgtagagcggggcgcgggccgcggacgaccccaggcgaagcccattcccgaggcagaggaggcgcagaggcctgagccggtggggacctcgagcaacgctgactcggcctccccggacctgggtccccggggtcctgacctggcggttctgcaggcggagcgggaagtggacatcctgaaccacgtgttcgacgacgtagagagctttgtatcgaggctgcagaagtcggcggaggcggccagggtgctggagcaccgggaacgcggccgcaggagccggcgccgggcggctggggagggcttgctgacgctgcgggccaagccgccctcggaggccgagtacaccgacgtgctgcagaagatcaagtacgccttcagcctgctggcccggctgcgcggcaacatcgccgacccctcctctccggagctgttgcacttccttttcgggcctctgcagatgattgtgaacacgtcgggggggccggagttcgcgagcagtgtgcggcggccgcatctgacatcggatgccgtggcgctgctgcgggacaacgtcactccacgtgaaaacgagctctggacctcgctgggggactcgtggacccgccccgggctggagctgtccccggaggagggacccccatacagacccgagttcttcagcggctgggagccgccggtcactgacccgcagagccgcgcctgggaggacccagttgagaaacagctacagcacgagcggaggcgccggcaggtgacccaagcgacacagcagggccgaggctgggaagtccgggggcgcggccggtccgcctggccccgcctgacccgactgtcttacttcctacagcaaagcgccccccaggtcgctgtcaatggtcaccgagacttggagccagaatctgagcctcagctggagtcagagacagcaggaaaatgggtcctgtgtaattatgacttccaggcccgcaacagcagtgagctgtcggtcaagcagcgggacgtactggaggacaaagagaaagtgtcagagctggaggcagtgatggagaagcaaaagaagaaggtggaaggcgaggtggaaatggaggtcatttgacctgccaggcgcccttcgcaaagagtgacgaggccccgtgggagaacggactcctcagactctccccaatagcggaagtcgatcttctgaaggatggccaatctgctccggccctggtcttcccccatcccggtggacagacttaacgatccttgctgcagtccctccggagaggatctggactggctgggagtggggagggcgtggagacagtctacggaaagcgctagcagacccccgagagggtgcagtggagccctgagcattgtaatatgcggcccagcctataaacagcctccgtgcttagca

SEQ ID NO: 42185 - DNA, 1676 bp, Homo sapiens
aaaaaaaaaaaaaaaaaaaaaaaaaaatcgcggccgcaggagccggcgccgggcggctggggagggcttgctgacgctgcgggccaagccgccctcggaggccgagtacaccgacgtgctgcagaagatcaagtacgccttcagcctgctggcccggctgcgcggcaacatcgccgacccctcctctccggagctgttgcacttccttttcgggcctctgcagatgattgtgaacacgtcgggggggccggagttcgcgagcagtgtgcggcggccgcatctgacatcggatgccgtggcgctgctgcgggacaacgtcactccacgtgaaaacgagctctggacctcgctgggggactcgtggacccgccccgggctggagctgtccccggaggagggacccccatacagacccgagttcttcagcggctgggagccgccggtcactgacccgcagagccgcgcctgggaggacccagttgagaaacagctacagcacgagcggaggcgccggcagcaaagcgccccccaggtcgctgtcaatggtcaccgagacttggagccagaatctgagcctcagctggagtcagagacagcaggaaaatgggtcctgtgtaattatgacttccaggcccgcaacagcagtgagctgtcggtcaagcagcgggacgtactggaggtcctggatgacagtcgtaagtggtggaaggttcgggacccagcggggcaggagggatatgtgccctacaacatcctgacaccctaccccggaccccggctgcaccacagccaaagccctgcccgcagcctgaacagcactcctcctccaccaccagccccagccccggccccacctccagctctggctcggccccgctgggacaggccccgctgggacagctgcgatagcctcaacggcttggaccccagcgagaaggagaaattctcccagatgctcatcgtcaacgaggaactgcaggcgcgcctggcccagggccgctcgggaccgagccgcgcagtcccagggccccgcgccccggaaccgcagctcagcccgggctcggacgcctccgaggtccgcgcctggctgcaggccaagggctttagctccgggaccgtggacgcgctgggtgtgctgaccggggcgcagcttttctcgctgcagaaggaggagctgcgggcggtgagccccgaggagggggcacgtgtgtacagccaggtcaccgtgcagcgctcgctgctggaggacaaagagaaagtgtcagagctggaggcagtgatggagaagcaaaagaagaaggtggaaggcgaggtggaaatggaggtcatttgacctgccaggcgcccttcgcaaagagtgacgaggccccgtgggagaacggactcctcagactctccccaatagcggaagtcgatcttctgaaggatggccaatctgctccggccctggtcttcccccatcccggtggacagacttaacgatccttgctgcagtccctccggagaggatctggactggctgggagtggggagggcgtggagacagtctacggaaagcgctagcagacccccgagagggtgcagtggagccctgagcattgtaatatgcggcccagcctataaacagcctccgtgcttagcaaaaggtgtgccaactgctgtcctctacccggcta

SEQ ID NO: 42186 - DNA, 1289 bp, Homo sapiens
gagcaaatagagggcagactggagggaagcaacgtgggaggagacgaaaacaaagcagtgaggctggaggagacaaaggggggtctgggtgagggcccgagcagagggtctcagcagggacagcgtgctgggagctgccggccccacacagggggtgccgcggccctgaagaccccccctctcccctgcacagtcaccgagacttggagccagaatctgagcctcagctggagtcagagacagcaggaaaatgggtcctgtgtaattatgacttccaggcccgcaacagcagtgagctgtcggtcaagcagcgggacgtactggaggtcctggatgacagtcgtaagtggtggaaggttcgggacccagcggggcaggagggatatgtgccctacaacatcctgacaccctaccccggaccccggctgcaccacagccaaagccctgcccgcagcctgaacagcactcctcctccaccaccagccccagccccggccccacctccagctctggctcggccccgctgggacaggccccgctgggacagctgcgatagcctcaacggcttggaccccagcgagaaggagaaattctcccagatgctcatcgtcaacgaggaactgcaggcgcgcctggcccagggccgctcgggaccgagccgcgcagtcccagggccccgcgccccggaaccgcagctcagcccgggctcggacgcctccgaggtccgcgcctggctgcaggccaagggctttagctccgggaccgtggacgcgctgggtgtgctgaccggggcgcagcttttctcgctgcagaaggaggagctgcgggcggtgagccccgaggagggggcacgtgtgtacagccaggtcaccgtgcagcgctcgctgctggaggacaaagagaaagtgtcagagctggaggcagtgatggagaagcaaaagaagaaggtggaaggcgaggtggaaatggaggtcatttgacctgccaggcgcccttcgcaaagagtgacgaggccccgtgggagaacggactcctcagactctccccaatagcggaagtcgatcttctgaaggatggccaatctgctccggccctggtcttcccccatcccggtggacagacttaacgatccttgctgcagtccctccggagaggatctggactggctgggagtggggagggcgtggagacagtctacggaaagcgctagcagacccccgagagggtgcagtggagccctgagcattgtaatatgcggcccagcctataaacagcctccgtgcttagca

SEQ ID NO: 42187 - DNA, 1242 bp, Homo sapiens
cttgtttcaaatttctattaacagtattaacccggcccctgctgtgcccccagcttggctctaaccccagctcacaccagcaccctgcagcccagagcaatggggctggctgcctccttatctccaaccctcccgcttctcctcagtcaccgagacttggagccagaatctgagcctcagctggagtcagagacagcaggaaaatgggtcctgtgtaattatgacttccaggcccgcaacagcagtgagctgtcggtcaagcagcgggacgtactggaggtcctggatgacagtcgtaagtggtggaaggttcgggacccagcggggcaggagggatatgtgccctacaacatcctgacaccctaccccggaccccggctgcaccacagccaaagccctgcccgcagcctgaacagcactcctcctccaccaccagccccagccccggccccacctccagctctggctcggccccgctgggacaggccccgctgggacagctgcgatagcctcaacggcttggaccccagcgagaaggagaaattctcccagatgctcatcgtcaacgaggaactgcaggcgcgcctggcccagggccgctcgggaccgagccgcgcagtcccagggccccgcgccccggaaccgcagctcagcccgggctcggacgcctccgaggtccgcgcctggctgcaggccaagggctttagctccgggaccgtggacgcgctgggtgtgctgaccggggcgcagcttttctcgctgcagaaggaggagctgcgggcggtgagccccgaggagggggcacgtgtgtacagccaggtcaccgtgcagcgctcgctgctggaggacaaagagaaagtgtcagagctggaggcagtgatggagaagcaaaagaagaaggtggaaggcgaggtggaaatggaggtcatttgacctgccaggcgcccttcgcaaagagtgacgaggccccgtgggagaacggactcctcagactctccccaatagcggaagtcgatcttctgaaggatggccaatctgctccggccctggtcttcccccatcccggtggacagacttaacgatccttgctgcagtccctccggagaggatctggactggctgggagtggggagggcgtggagacagtctacggaaagcgctagcagacccccgagagggtgcagtggagccctgagcattgtaatatgcggcccagcctataaacagcctccgtgcttagca

SEQ ID NO: 42188 - DNA, 563 bp, Homo sapiens
ccaccaaggtaagtcgcgaccgcaagtgaagtcggaccgtggacgcgctgggtgtgctgaccggggcgcagcttttctcgctgcagaaggaggagctgcgggcggtgagccccgaggagggggcacgtgtgtacagccaggtcaccgtgcagcgctcgctgctggaggacaaagagaaagtgtcagagctggaggcagtgatggagaagcaaaagaagaaggtggaaggcgaggtggaaatggaggtcatttgacctgccaggcgcccttcgcaaagagtgacgaggccccgtgggagaacggactcctcagactctccccaatagcggaagtcgatcttctgaaggatggccaatctgctccggccctggtcttcccccatcccggtggacagacttaacgatccttgctgcagtccctccggagaggatctggactggctgggagtggggagggcgtggagacagtctacggaaagcgctagcagacccccgagagggtgcagtggagccctgagcattgtaatatgcggcccagcctataaacagcctccgtgcttagca

SEQ ID NO: 42189 - DNA, 899 bp, Homo sapiens
aaaaaaaaaaaaaaaaaaaaaaaaaaatcgcggccgcaggagccggcgccgggcggctggggagggcttgctgacgctgcgggccaagccgccctcggaggccgagtacaccgacgtgctgcagaagatcaagtacgccttcagcctgctggcccggctgcgcggcaacatcgccgacccctcctctccggagctgttgcacttccttttcgggcctctgcagatgattgtgaacacgtcgggggggccggagttcgcgagcagtgtgcggcggccgcatctgacatcggatgccgtggcgctgctgcgggacaacgtcactccacgtgaaaacgagctctggacctcgctgggggactcgtggacccgccccgggctggagctgtccccggaggagggacccccatacagacccgagttcttcagcggctgggagccgccggtcactgacccgcagagccgcgcctgggaggacccagttgagaaacagctacagcacgagcggaggcgccggcagcaaagcgccccccaggtcgctgtcaatggtcaccgagacttggagccagaatctgagcctcagctggagtcagagacagcaggaaaatgggtcctgtgtaattatgacttccaggcccgcaacagcagtgagctgtcggtcaagcagcgggacgtactggaggtcctggatgacagtcgtaagtggtggaaggttcgggacccagcggggcaggagggatatgtgccctacaacatcctgacaccctaccccggaccccggctgcaccacagccaaagccctgcccgcagcctgaacagcactcctcctccaccaccagccccagcccggtgttcctcgttgacgatgagcatctgggagaatttctccttctcgctggggt

SEQ ID NO: 42190 - DNA, 719 bp, Homo sapiens
aaaaaaaaaaaaaaaaaaaaaaaaaaatcgcggccgcaggagccggcgccgggcggctggggagggcttgctgacgctgcgggccaagccgccctcggaggccgagtacaccgacgtgctgcagaagatcaagtacgccttcagcctgctggcccggctgcgcggcaacatcgccgacccctcctctccggagctgttgcacttccttttcgggcctctgcagatgattgtgaacacgtcgggggggccggagttcgcgagcagtgtgcggcggccgcatctgacatcggatgccgtggcgctgctgcgggacaacgtcactccacgtgaaaacgagctctggacctcgctgggggactcgtggacccgccccgggctggagctgtccccggaggagggacccccatacagacccgagttcttcagcggctgggagccgccggtcactgacccgcagagccgcgcctgggaggacccagttgagaaacagctacagcacgagcggaggcgccggcagcaaagcgccccccaggtcgctgtcaatgggtgagtgtccgccccagggcagggcaagggggtcaaggaggggtgcgtcccgggggctcccgatgctgactccgccccctttttttctgtgtttttccttctgtcttcctggctcttctcaggtgggtgagatggtgatggggcgggccggggctgggagagagggaggagca

SEQ ID NO: 42191 - DNA, 1830 bp, Homo sapiens
gatctcttccaaatgtccccgctctccccaggctctcccctcccgccacttgccagggctgacctcaccgccatcttaaccgggtgtccacctctctctgcctgcctggtgctggccccgcgtccccatcgccgcgcccgtctgctcccctcagagggcttgctgacgctgcgggccaagccgccctcggaggccgagtacaccgacgtgctgcagaagatcaagtacgccttcagcctgctggcccggctgcgcggcaacatcgccgacccctcctctccggagctgttgcacttccttttcgggcctctgcagatgattgtgaacacgtcgggggggccggagttcgcgagcagtgtgcggcggccgcatctgacatcggatgccgtggcgctgctgcgggacaacgtcactccacgtgaaaacgagctctggacctcgctgggggactcgtggacccgccccgggctggagctgtccccggaggagggacccccatacagacccgagttcttcagcggctgggagccgccggtcactgacccgcagagccgcgcctgggaggacccagttgagaaacagctacagcacgagcggaggcgccggcaggtgacccaagcgacacagcagggccgaggctgggaagtccgggggcgcggccggtccgcctggccccgcctgacccgactgtcttacttcctacagcaaagcgccccccaggtcgctgtcaatggtcaccgagacttggagccagaatctgagcctcagctggagtcagagacagcaggaaaatgggtcctgtgtaattatgacttccaggcccgcaacagcagtgagctgtcggtcaagcagcgggacgtactggaggtcctggatgacagtcgtaagtggtggaaggttcgggacccagcggggcaggagggatatgtgccctacaacatcctgacaccctaccccggaccccggctgcaccacagccaaagccctgcccgcagcctgaacagcactcctcctccaccaccagccccagccccggccccacctccagctctggctcggccccgctgggacaggccccgctgggacagctgcgatagcctcaacggcttggaccccagcgagaaggagaaattctcccagatgctcatcgtcaacgaggaactgcaggcgcgcctggcccagggccgctcgggaccgagccgcgcagtcccagggccccgcgccccggaaccgcagctcagcccgggctcggacgcctccgaggtccgcgcctggctgcaggccaagggctttagctccgggaccgtggacgcgctgggtgtgctgaccggggcgcagcttttctcgctgcagaaggaggagctgcgggcggtgagccccgaggagggggcacgtgtgtacagccaggtcaccgtgcagcgctcgctgctggaggacaaagagaaagtgtcagagctggaggcagtgatggagaagcaaaagaagaaggtggaaggcgaggtggaaatggaggtcatttgacctgccaggcgcccttcgcaaagagtgacgaggccccgtgggagaacggactcctcagactctccccaatagcggaagtcgatcttctgaaggatggccaatctgctccggccctggtcttcccccatcccggtggacagacttaacgatccttgctgcagtccctccggagaggatctggactggctgggagtggggagggcgtggagacagtctacggaaagcgctagcagacccccgagagggtgcagtggagccctgagcattgtaatatgcggcccagcctataaacagcctccgtgcttagca

SEQ ID NO: 42192 - DNA, 1642 bp, Homo sapiens
aaaaaaaaaaaaaaaaaaaaaaaaaaatcgcggccgcaggagccggcgccgggcggctggggagggcttgctgacgctgcgggccaagccgccctcggaggccgagtacaccgacgtgctgcagaagatcaagtacgccttcagcctgctggcccggctgcgcggcaacatcgccgacccctcctctccggagctgttgcacttccttttcgggcctctgcagatgattgtgaacacgtcgggggggccggagttcgcgagcagtgtgcggcggccgcatctgacatcggatgccgtggcgctgctgcgggacaacgtcactccacgtgaaaacgagctctggacctcgctgggggactcgtggacccgccccgggctggagctgtccccggaggagggacccccatacagacccgagttcttcagcggctgggagccgccggtcactgacccgcagagccgcgcctgggaggacccagttgagaaacagctacagcacgagcggaggcgccggcagcaaagcgccccccaggtcgctgtcaatggtcaccgagacttggagccagaatctgagcctcagctggagtcagagacagcaggaaaatgggtcctgtgtaattatgacttccaggcccgcaacagcagtgagctgtcggtcaagcagcgggacgtactggaggtcctggatgacagtcgtaagtggtggaaggttcgggacccagcggggcaggagggatatgtgccctacaacatcctgacaccctaccccggaccccggctgcaccacagccaaagccctgcccgcagcctgaacagcactcctcctccaccaccagccccagccccggccccacctccagctctggctcggccccgctgggacaggccccgctgggacagctgcgatagcctcaacggcttggaccccagcgagaaggagaaattctcccagatgctcatcgtcaacgaggaactgcaggcgcgcctggcccagggccgctcgggaccgagccgcgcagtcccagggccccgcgccccggaaccgcagctcagcccgggctcggacgcctccgaggtccgcgcctggctgcaggccaagggctttagctccgggaccgtggacgcgctgggtgtgctgaccggggcgcagcttttctcgctgcagaaggaggagctgcgggcggtgagccccgaggagggggcacgtgtgtacagccaggtcaccgtgcagcgctcgctgctggaggacaaagagaaagtgtcagagctggaggcagtgatggagaagcaaaagaagaaggtggaaggcgaggtggaaatggaggtcatttgacctgccaggcgcccttcgcaaagagtgacgaggccccgtgggagaacggactcctcagactctccccaatagcggaagtcgatcttctgaaggatggccaatctgctccggccctggtcttcccccatcccggtggacagacttaacgatccttgctgcagtccctccggagaggatctggactggctgggagtggggagggcgtggagacagtctacggaaagcgctagcagacccccgagagggtgcagtggagccctgagcattgtaatatgcggcccagcctataaacagcctccgtgcttagca

SEQ ID NO: 42193 - DNA, 1868 bp, Homo sapiens
aaaaaaaaaaaaaaaaaaaaaaaaaaatcgcggccgcaggagccggcgccgggcggctggggagggcttgctgacgctgcgggccaagccgccctcggaggccgagtacaccgacgtgctgcagaagatcaagtacgccttcagcctgctggcccggctgcgcggcaacatcgccgacccctcctctccggagctgttgcacttccttttcgggcctctgcagatgattgtgaacacgtcgggggggccggagttcgcgagcagtgtgcggcggccgcatctgacatcggatgccgtggcgctgctgcgggacaacgtcactccacgtgaaaacgagctctggacctcgctgggggactcgtggacccgccccgggctggagctgtccccggaggagggacccccatacagacccgagttcttcagcggctgggagccgccggtcactgacccgcagagccgcgcctgggaggacccagttgagaaacagctacagcacgagcggaggcgccggcagcaaagcgccccccaggtcgctgtcaatggtcaccgagacttggagccagaatctgagcctcagctggagtcagagacagcaggaaaatgggtcctgtgtaattatgacttccaggcccgcaacagcagtgagctgtcggtcaagcagcgggacgtactggaggtcctggatgacagtcgtaagtggtggaaggttcgggacccagcggggcaggagggatatgtgccctacaacatcctgacaccctaccccggaccccggctgcaccacagccaaagccctgcccgcagcctgaacagcactcctcctccaccaccagccccagccccggccccacctccagctctggctcggccccgctgggacaggccccgctgggacagctgcgatagcctcaacggcttggaccccagcgagaaggagaaattctcccagatgctcatcgtcaacgaggaactgcaggcgcgcctggcccagggccgctcgggaccgagccgcgcagtcccagggccccgcgccccggaaccgcagctcagcccgggctcggacgcctccgaggtccgcgcctggctgcaggccaagggctttagctccgggaccgtggacgcgctgggtgtgctgaccggggcgcagcttttctcgctgcagaaggaggagctgcgggcggtgagccccgaggagggggcacgtgtgtacagccaggtcaccgtgcagcgctcgctgctggaggacaaagagaaagtgtcagagctggaggcagtgatggagaagcaaaagaagaaggtggaaggcgaggtggaaatggaggtcatttgacctgccaggcgcccttcgcaaagagtgacgaggccccgtgggagaacggactcctcagactctccccaatagcggaagtcgatcttctgaaggatggccaatctgctccggccctggtcttcccccatcccggtggacagacttaacgatccttgctgcagtccctccggagaggatctggactggctgggagtggggagggcgtggagacagtctacggaaagcgctagcagacccccgagagggtgcagtggagccctgagcattgtaatatgcggcccagcctataaacagcctccgtgcttagcaaaaaaaaaaaaaaaaaaaaaaaaaaaaaaaaaaaaaaaaaaaaaaaaaaaaaacatacaaaaaataaaagaatagtcaacaaacaaaataagaaactatagataatataaaaatgaaaataaaaaagagatggggtggggcccttgtctttactctctccctctggagtgggcacactatattatttcgccctccccctctttttttgtatgagagggctctttta

SEQ ID NO: 42194 - DNA, 1557 bp, Homo sapiens
aaaaaaaaaaaaaaaaaaaaaaaaaaatcgcggccgcaggagccggcgccgggcggctggggagggcttgctgacgctgcgggccaagccgccctcggaggccgagtacaccgacgtgctgcagaagatcaagtacgccttcagcctgctggcccggctgcgcggcaacatcgccgacccctcctctccggagctgttgcacttccttttcgggcctctgcagatgattgtgaacacgtcgggggggccggagttcgcgagcagtgtgcggcggccgcatctgacatcggatgccgtggcgctgctgcgggacaacgtcactccacgtgaaaacgagctctggacctcgctgggggactcgtggacccgccccgggctggagctgtccccggaggagggacccccatacagacccgagttcttcagcggctgggagccgccggtcactgacccgcagagccgcgcctgggaggacccagttgagaaacagctacagcacgagcggaggcgccggcagcaaagcgccccccaggtcgctgtcaatgggcccgcaacagcagtgagctgtcggtcaagcagcgggacgtactggaggtcctggatgacagtcgtaagtggtggaaggttcgggacccagcggggcaggagggatatgtgccctacaacatcctgacaccctaccccggaccccggctgcaccacagccaaagccctgcccgcagcctgaacagcactcctcctccaccaccagccccagccccggccccacctccagctctggctcggccccgctgggacaggccccgctgggacagctgcgatagcctcaacggcttggaccccagcgagaaggagaaattctcccagatgctcatcgtcaacgaggaactgcaggcgcgcctggcccagggccgctcgggaccgagccgcgcagtcccagggccccgcgccccggaaccgcagctcagcccgggctcggacgcctccgaggtccgcgcctggctgcaggccaagggctttagctccgggaccgtggacgcgctgggtgtgctgaccggggcgcagcttttctcgctgcagaaggaggagctgcgggcggtgagccccgaggagggggcacgtgtgtacagccaggtcaccgtgcagcgctcgctgctggaggacaaagagaaagtgtcagagctggaggcagtgatggagaagcaaaagaagaaggtggaaggcgaggtggaaatggaggtcatttgacctgccaggcgcccttcgcaaagagtgacgaggccccgtgggagaacggactcctcagactctccccaatagcggaagtcgatcttctgaaggatggccaatctgctccggccctggtcttcccccatcccggtggacagacttaacgatccttgctgcagtccctccggagaggatctggactggctgggagtggggagggcgtggagacagtctacggaaagcgctagcagacccccgagagggtgcagtggagccctgagcattgtaatatgcggcccagcctataaacagcctccgtgcttagca

SEQ ID NO: 42195 - DNA, 1392 bp, Homo sapiens
aaaaaaaaaaaaaaaaaaaaaaaaaaatcgcggccgcaggagccggcgccgggcggctggggagggcttgctgacgctgcgggccaagccgccctcggaggccgagtacaccgacgtgctgcagaagatcaagtacgccttcagcctgctggcccggctgcgcggcaacatcgccgacccctcctctccggagctgttgcacttccttttcgggcctctgcagatgattgtgaacacgtcgggggggccggagttcgcgagcagtgtgcggcggccgcatctgacatcggatgccgtggcgctgctgcgggacaacgtcactccacgtgaaaacgagctctggacctcgctgggggactcgtggacccgccccgggctggagctgtccccggaggagggacccccatacagacccgagttcttcagcggctgggagccgccggtcactgacccgcagagccgcgcctgggaggacccagttgagaaacagctacagcacgagcggaggcgccggcagcaaagcgccccccaggtcgctgtcaatggtcaccgagacttggagccagaatctgagcctcagctggagtcagagacagcaggaaaatgggtcctgtgtaattatgacttccaggcccgcaacagcagtgagctgtcggtcaagcagcgggacgtactggaggtcctggatgacagtcgtaagtggtggaaggttcgggacccagcggggcaggagggatatgtgccctacaacatcctgacaccctaccccggaccccggctgcaccacagccaaagccctgcccgcagcctgaacagcactcctcctccaccaccagccccagccccggccccacctccagctctggctcggccccgctgggacaggccccgctgggacagctgcgatagcctcaacggcttggaccccagcgagaaggagaaattctcccagatgctcatcgtcaacgaggaactgcaggcgcgcctggcccagggccgctcgggaccgagccgcgcagtcccagggccccgcgccccggaaccgcagctcagcccgggctcggacgcctccgaggtccgcgcctggctgcaggccaagggctttagctccgggaccgtggacgcgctgggtgtgctgaccggggcgcagcttttctcgctgcagaaggaggagctgcgggcggtgagccccgaggagggggcacgtgtgtacagccaggtcaccgtgcagcgctcgctgctggaggacaaagagaaagtgtcagagctggaggcagtgatggagaagcaaaagaagaaggtggaaggcgaggtggacatcccagctggctagtttgtttccgggtgataagcaatcatctgtgagttttgtttgtccccgaagtatgtagt

SEQ ID NO: 42196 - DNA, 438 bp, Homo sapiens
aaaaaaaaaaaaaaaaaaaaaaaaaaatcgcggccgcaggagccggcgccgggcggctggggagggcttgctgacgctgcgggccaagccgccctcggaggccgagtacaccgacgtgctgcagaagatcaagtacgccttcagcctgctggcccggctgcgcggcaacatcgccgacccctcctctccggagctgttgcacttccttttcgggcctctgcagatgattgtgaacacgtcgggggggccggagttcgcgagcagtgtgcggcggccgcatctgacatcggatgccgtggcgctgctgcgggacaacgtcactccacgtgaaaacgagctctggacctcgctgggggactcgtggacccgccccgggctggagctgtcccacggaggagggacccccacgagagagcatccacccacagagagagcgtg

SEQ ID NO: 42197 - DNA, 438 bp, Homo sapiens
atcaagagaaaggtggagggcctaaaaactaaaaaaaaaaaaaaaaaaagaaagtaaatgctgtttagtgtgttgtagatactgagaaataagatgtctttgcaaatgtatttaggagggaagcactggagcgagacttagacaaggtacctagaatataaacaaaagaattttatatttcaggtctttaaatggagttcgtagctgatttcttttttcttttttagacagagtcttgctctgtcacccaggctggagtgccgtggtacattcttggctcactgcaacctccgcctcctggattcaagcaattctcttcccccagctacttgggaggctgaggcaggagaatggcgtgaacccgggaggcagagcttgcagtgagcccagatagcgccactgcagtccagcctggatgaaagagcgagctccgtctca

SEQ ID NO: 42198 - DNA, 455 bp, Homo sapiens
ataacttgacacagagatgactgtgaactgcataaatacatcccactaaacccaaacaaaatgtggacccaattcgacttccccctagctatatctcaaaagcactttcaagtccaatgtcatcaaacccaaacagaaatgtgacagcagggaagtcagaatgagaaagaaaaacattaaaggattgcttaaaatcttcttccaattttaccagttatgatcccatgaaggcccagctacgtatactgctagggctcctccagggccctggaaagtgctgggtgggccctggcaatatattcaaaaacggcaaggaatgcgttgtacaagtcaggggccctggggctggagcttcattagcttcacaataaatctgcctctgtggtccctattattattcattatttatctcagtctgtacatgtctggtctctccaaataaatttcaaatcctt

SEQ ID NO: 42199 - DNA, 1390 bp, Homo sapiens
tgttttgattgtgtaaagagtagagtgctgatttgtgtgttacagagggtggtctgtacaagtcataaagctcgacatggccttgcttcctgctaggtgttaggacacccatgatggtggagtctcttggcattctgtgtaattagataaggctgtttatagcattggtccatgagaacttccttgtttctatttaaaatgaaaatcattgtataagtaaaacttcttaaatgtagatagaaatagaattttaactgaaattttatgaagccattggccgcagggatgtgtgtcatggaggagggctccatacttttttggtatacttatctcaaacttaattcatttgcatactgctttttctctaagtgccaactgtcctagtatattttctaagtcaacttttactttcactttatcctaagcaagaatatctttggcatcacagactcagtaagcccgtttttttctaatgcacatacaaataaataaaatgcacaacttttaacataaatggctgcctccaatttgggaaatactgttctggccagaggccgttgctctgataatgtcatgtggttagtgcattttaggaagacctcctttccctttggttgactcctgcaggacataagatatcagtgacgttatcctttgttgagccatcctggtttgagtcaggatgagtgttgagagtttttggggagttgcccctgtgtcctatattattttatcctcttaaattctgatggtctttggctccactgactccaggtaagttggggtgacagtgcagcatatttctattttctagttgtttctggccagacatggggaaggtcaagacatcttgttcatgcaaacggattgatggccattcctaatctgattttattagtgtattttaggaagtaaagtaagattcttgagcccagctgaacttcccctattgaattttctaacaaaaagagagtttgcgtatgggtttataattgagcctgctcttgtagaaatgttttatcagaattgaaatcctctctgatccccaaattctagagacaaagttgttttctgaatttgagaaatctgttcagttcacaaggaaaggtgacaatgtgtcatttggatgttgtcccacacgtgaggcctcgttgggtgcttgtggtgggagggaccctccaggcaggctttgtatggagggttttcatgtctggacacatttctgttccgagaagcactgctgcgtttttgggagcgtggaccctggccagagcctgtggccagctctgcctgccctccctttcttggcctgctcttttgagtatgtagtggggctttgtgtggcatcctgccaggttaaagctgcatggtgcttaggatagagctggtg

SEQ ID NO: 42200 - DNA, 629 bp, Homo sapiens
  misc_feature (15)..(15): n is a, c, g, or t
  misc_feature (32)..(32): n is a, c, g, or t
  misc_feature (37)..(37): n is a, c, g, or t
  misc_feature (40)..(40): n is a, c, g, or t
aatggatggcccccnacctccggcccacgggnccccnganccgcccccggcctggcctccagttaaactccctctggccacatacctaaattaatcctgcactacgacagtatcctgcttttgtataactagaaatttcagttaataatgccctgaattgacttcctcatagctcttaaaacttctggttatatgtgtcaagatgaatattttgataaaagaataagtaaagcatcatgttcaggaaagtaagtgttgcagaagaaatgagcaatgatatggtctgatgtcctctacatttgatatatactatatatcaatttgatatatagtatgtatctgattgtagttaactccaggagattttccccttatcttagagtttgaaccatatagtgaccatgtattatcgaagaaaaatgaagggtatttccccttacaaaaagaaaaaggagtaaagatcataagcaggaagttcatggacacactaacaaaaataaatgaaatagtaattataatcataattgtttatacattacaatgtgtttcaccattttcaatatttaagtttttcccacactttgaatgttttctgaatttattttgaatcttttattactaaaaaaaaa

SEQ ID NO: 42201 - DNA, 804 bp, Homo sapiens
ttccaatggcttttgatggcagctggtattcttctcaccctcaggtatacctcagactgagtttcctttgagtcaggaaatactgagcccacattgacattcacattcacattcacaggaaatctcagtgcccacattcaactgagccatgtaatgggcaccccgcttttggactgactgggaattgattgtcctaactctgaccactggtctctgatctgcctggtcttgcttcagttaaactccctctggccacatacctaaattaatcctgcactacgacagtatcctgcttttgtataactagaaatttcagttaataatgccctgaattgacttcctcatagctcttaaaacttctggttatatgtgtcaagatgaatattttgataaaagaataagtaaagcatcatgttcaggaaagtaagtgttgcagaagaaatgagcaatgatatggtctgatgtcctctacatttgatatatactatatatcaatttgatatatagtatgtatctgattgtagttaactccaggagattttccccttatcttagagtttgaaccatatagtgaccatgtattatcgaagaaaaatgaagggtatttccccttacaaaaagaaaaaggagtaaagatcataagcaggaagttcatggacacactaacaaaaataaatgaaatagtaattataatcataattgtttatacattacaatgtgtttcaccattttcaatatttaagtttttcccacactttgaatgttttctgaatttattttgaatcttttattactaaaaaaaaa

SEQ ID NO: 42202 - DNA, 496 bp, Homo sapiens
agctatttgatggcagtttgggttaagtgatttctgagactttcccatagattctttgaatttaaatgagaagcctgataaaaattccaagttaaagatacccaggaaatctacaacagatcaagcttgtttttttgtttgtttgtttgttagtttgtttttgagatggagtcccgctctgtcacccaggctgaagtgcagtggtgcaatcttggctcactgcaaccgccacctcccgggttcaagcgatcctcttgcctcagcctcctgactagctggaattacaggcacatgctaccacacctggctaatttttgtatttttcagtagagacgggatttcaccatgttggtcaggctggtctcgaactccagacctcatgatccgcccgcctttgcctcccaaagtgttgggattacaggcgtgagccactgcgccaggctgatcaagcttgttttttagatacaatatgtgaatttagcctaagccatacgtt

SEQ ID NO: 42203 - DNA, 1198 bp, Homo sapiens
agggtggagtgcaggcttggaaagcaggagagctcagcctacgtctttaatcctcctgcccaccccttggattctgtctccactgggactcaagagaggaacctggggcccgctcctcccccctccaggccatgaggattctgcagttaatcctgcttgctctggcaacagggcttgtagggggagagaccaggatcatcaaggggttcgagtgcaagcctcactcccagccctggcaggcagccctgttcgagaagacgcggctactctgtggggcgacgctcatcgcccccagatggctcctgacagcagcccactgcctcaagccccgctacatagttcacctggggcagcacaacctccagaaggaggagggctgtgagcagacccggacagccactgagtccttcccccaccccggcttcaacaacagcctccccaacaaagaccaccgcaatgacatcatgctggtgaagatggcatcgccagtctccatcacctgggctgtgcgacccctcaccctctcctcacgctgtgtcactgctggcaccagctgcctcatttccggctggggcagcacgtccagcccccagttacgcctgcctcacaccttgcgatgcgccaacatcaccatcattgagcaccagaagtgtgagaacgcctaccccggcaacatcacagacaccatggtgtgtgccagcgtgcaggaagggggcaaggactcctgccagggtgactccgggggccctctggtctgtaaccagtctcttcaaggcattatctcctggggccaggatccgtgtgcgatcacccgaaagcctggtgtctacacgaaagtctgcaaatatgtggactggatccaggagacgatgaagaacaattagactggacccacccaccacagcccatcaccctccatttccacttggtgtttggttcctgttcactctgttaataagaaaccctaagccaagaccctctacgaacattctttgggcctcctggactacaggagatgctgtcacttaataatcaacctggggttcgaaatcagtgagacctggattcaaattctgccttgaaatattgtgactctgggaatgacaacacctggtttgttctctgttgtatccccagccccaaagacagctcctggccatatatcaaggtttcaataaatatttgctaaatgagtgaa

SEQ ID NO: 42204 - DNA, 1182 bp, Homo sapiens
caacccagcctacctgctgtagctgccgccactgccgtctccgccgccactgggcccccagagccccagccccagagcctaggaacctggggcccgctcctcccccctccaggccatgaggattctgcagttaatcctgcttgctctggcaacagggcttgtagggggagagaccaggatcatcaaggggttcgagtgcaagcctcactcccagccctggcaggcagccctgttcgagaagacgcggctactctgtggggcgacgctcatcgcccccagatggctcctgacagcagcccactgcctcaagccccgctacatagttcacctggggcagcacaacctccagaaggaggagggctgtgagcagacccggacagccactgagtccttcccccaccccggcttcaacaacagcctccccaacaaagaccaccgcaatgacatcatgctggtgaagatggcatcgccagtctccatcacctgggctgtgcgacccctcaccctctcctcacgctgtgtcactgctggcaccagctgcctcatttccggctggggcagcacgtccagcccccagttacgcctgcctcacaccttgcgatgcgccaacatcaccatcattgagcaccagaagtgtgagaacgcctaccccggcaacatcacagacaccatggtgtgtgccagcgtgcaggaagggggcaaggactcctgccagggtgactccgggggccctctggtctgtaaccagtctcttcaaggcattatctcctggggccaggatccgtgtgcgatcacccgaaagcctggtgtctacacgaaagtctgcaaatatgtggactggatccaggagacgatgaagaacaattagactggacccacccaccacagcccatcaccctccatttccacttggtgtttggttcctgttcactctgttaataagaaaccctaagccaagaccctctacgaacattctttgggcctcctggactacaggagatgctgtcacttaataatcaacctggggttcgaaatcagtgagacctggattcaaattctgccttgaaatattgtgactctgggaatgacaacacctggtttgttctctgttgtatccccagccccaaagacagctcctggccatatatcaaggtttcaataaatatttgctaaatgagtgaa

SEQ ID NO: 42205 - DNA, 420 bp, Homo sapiens
gctcggtacccgtggacatttccacgagtcaccccgaaagcctggtgtctacacgaaagtctgcaaatatgtggactggatccaggagacgatgaagaacaattagactggacccacccaccacagcccatcaccctccatttccacttggtgtttggttcctgttcactctgttaataagaaaccctaagccaagaccctctacgaacattctttgggcctcctggactacaggagatgctgtcacttaataatcaacctggggttcgaaatcagtgagacctggattcaaattctgccttgaaatattgtgactctgggaatgacaacacctggtttgttctctgttgtatccccagccccaaagacagctcctggccatatatcaaggtttcaataaatatttgctaaatgagtgaa

SEQ ID NO: 42206 - DNA, 1281 bp, Homo sapiens
  misc_feature (4)..(4): n is a, c, g, or t
  misc_feature (6)..(6): n is a, c, g, or t
  misc_feature (8)..(8): n is a, c, g, or t
  misc_feature (12)..(12): n is a, c, g, or t
cccncncntccntgctccacacctggtcaggggagagaggggaggaaagccaagggaagggacctaactgaaaacaaacaagctgggagaagcaggaatctgcgctcgggttccgcagatgcagaggttgaggtggctgcgggactggaagtcatcgggcagaggtctcacagcagccaaggaacctggggcccgctcctcccccctccaggccatgaggattctgcagttaatcctgcttgctctggcaacagggcttgtagggggagagaccaggatcatcaaggggttcgagtgcaagcctcactcccagccctggcaggcagccctgttcgagaagacgcggctactctgtggggcgacgctcatcgcccccagatggctcctgacagcagcccactgcctcaagccccgctacatagttcacctggggcagcacaacctccagaaggaggagggctgtgagcagacccggacagccactgagtccttcccccaccccggcttcaacaacagcctccccaacaaagaccaccgcaatgacatcatgctggtgaagatggcatcgccagtctccatcacctgggctgtgcgacccctcaccctctcctcacgctgtgtcactgctggcaccagctgcctcatttccggctggggcagcacgtccagcccccagttacgcctgcctcacaccttgcgatgcgccaacatcaccatcattgagcaccagaagtgtgagaacgcctaccccggcaacatcacagacaccatggtgtgtgccagcgtgcaggaagggggcaaggactcctgccagggtgactccgggggccctctggtctgtaaccagtctcttcaaggcattatctcctggggccaggatccgtgtgcgatcacccgaaagcctggtgtctacacgaaagtctgcaaatatgtggactggatccaggagacgatgaagaacaattagactggacccacccaccacagcccatcaccctccatttccacttggtgtttggttcctgttcactctgttaataagaaaccctaagccaagaccctctacgaacattctttgggcctcctggactacaggagatgctgtcacttaataatcaacctggggttcgaaatcagtgagacctggattcaaattctgccttgaaatattgtgactctgggaatgacaacacctggtttgttctctgttgtatccccagccccaaagacagctcctggccatatatcaaggtttcaataaatatttgctaaatgagtgaa

SEQ ID NO: 42207 - DNA, 1809 bp, Homo sapiens
caacccagcctacctgctgtagctgccgccactgccgtctccgccgccactgggcccccagagccccagccccagagcctaggaacctggggcccgctcctcccccctccaggccatgaggattctgcagttaatcctgcttgctctggcaacagggcttgtagggggagagaccaggatcatcaaggggttcgagtgcaagcctcactcccagccctggcaggcagccctgttcgagaagacgcggctactctgtggggcgacgctcatcgcccccagatggctcctgacagcagcccactgcctcaagccccgctacatagttcacctggggcagcacaacctccagaaggaggagggctgtgagcagacccggacagccactgagtccttcccccaccccggcttcaacaacagcctccccaacaaagaccaccgcaatgacatcatgctggtgaagatggcatcgccagtctccatcacctgggctgtgcgacccctcaccctctcctcacgctgtgtcactgctggcaccagctgcctcatttccggctggggcagcacgtccagcccccagttacgcctgcctcacaccttgcgatgcgccaacatcaccatcattgagcaccagaagtgtgagaacgcctaccccggcaacatcacagacaccatggtgtgtgccagcgtgcaggaagggggcaaggactcctgccagggtgactccgggggccctctggtctgtaaccagtctcttcaaggcattatctcctggggccaggatccgtgtgcgatcacccgaaagcctggtgtctacacgaaagtctgcaaatatgtggactggatccaggagacgatgaagaacaattagactggacccacccaccacagcccatcaccctccatttccacttggtgtttggttcctgttcactctgttaataagaaaccctaagccaagaccctctacgaacattctttgggcctcctggactacaggagatgctgtcacttaataatcaacctggggttcgaaatcagtgagacctggattcaaattctgccttgaaatattgtgactctgggaatgacaacacctggtttgttctctgttgtatccccagccccaaagacagctcctggccatatatcaaggtttcaataaatatttgctaaatgagtgaaaaaacaaaaaacacaaaaaaaaaaaaaaaaaaaaaaaaaaaaaaaaaaaaaaaaaaacagaaaaaaaacaacaaccaacgaccaacaagcaagaaaaaccacacaagcaagacgacgtgggtggggggcggaggccgcccacccagaagcaggaaataacacacaggaggggcgggggcggccgccaccaaagtaataaaaagcacgaccgctccgttggtacaaacacagtgcgcccggagagagggaggggcggtgggcccaccacaaaaaaaagagcggggggggggaaggacgggtgtgacaaaccaccacaggggtgaggatgcgagcagagttttggcttacaaaaccggcgcgcgccccctttccccccgcccggcggcgggggtcgtaaaaacgaagcaaagaaagaaaaacaaacagaagagcaaaaaaagaagaagtgaacaaacgaacaacccacagcaaacagtaaaccaaagacgggaacgaacaacaaacgaagaaacaacagacggacacaaaaaagagaagacgacaacaggagtgtaaagaaacagaaacgaaagaaaacaaagagaaccgaaaaggagagaaggaaggagacaggaaagaacagcacgc

SEQ ID NO: 42208 - DNA, 410 bp, Homo sapiens
aacccacctctgagaagtagtagctaaggctaagatcacaggccttggattaggcataccttacattagcctcccatctctgccatagatgcatataaatcatttactacaattatggcacattgtgagaactcagcaagtggtagcttttcactaggatctctgggtacatagcagatttaagttgactaaggcaaacactcatcttccagttgttcatagtcagattgtcatgccttgataagttcatgtcctgactgggcctgggagatgctggccatcctgctcatacagcaccagggcttctgccatggagttgtgccaattccctcttcttgcctcctacagaaaatctatctttccatttatttagcctctgctctgttcctttcagctcagtaccactaggt

SEQ ID NO: 42209 - DNA, 404 bp, Homo sapiens
taaagttacagataacagaattatatggtctaacatgcagctcacttaggcagtcctacctttccaaatgttttcttcaatgccatattcccagggaaaattgctgctgggtagttgaaactaggtgcctcactggacttcttcctattatttgggcaacttgtaaaagcttacaaactttctagaaagtagccctgaaaacagttccttcgttatgtttttagcaataccacagaatacatggttctatgttatagcttagaattgctactactcttacaaaattggaacatagaaaagatggacaaaaacctagtataatgtatcattatttccatttcaagatggcgttttgaactcatctcttttccttcccaaaatcctagtgaaattatcataggaat

SEQ ID NO: 42210 - DNA, 172 bp, Homo sapiens
attcatcagcaaaaccagacctgaaccaaagtgaccctattcatattctttgattatctgtcctactgggacatatatggtttgctacagaaatattaatgtatttaattataggatactgccctagatagttcatatatgtggtatatgcaccatactgcttttctaaatt

SEQ ID NO: 42211 - DNA, 404 bp, Homo sapiens
ggatggtctcgatctcttgacttcgtgatctgcctgcctcggcctcctaaagtgctgggattacaggcgtaagcaaccgtgcccggctgtccatctcttttcagatgaagagctcaggttctgaggagtgacttgtcaaaagctgttctacctctcagagccagcccttgtcctcctgctagccagagcaaggtaccacctggaagagatgttcagttacatgggatccagggccagagggaaaatatcagtgcttcctgaggttcgggtccagccacccttcttccaccatttctactgagccttcagttgtaccccttcagtccacttggcgaggcatcacgccctctgggcaggctcagtggggaactatgggagcaggtgctgtgtgccacctctggagg

SEQ ID NO: 42212 - DNA, 411 bp, Homo sapiens
tgcgatggacagacaccctctccgaacactccccgctccctgggctgcattgagagggcctgcagtcagtctccaaagcgctttgtgcgctgggaatgttgaaagaaggcaagatgatggagaagcttctgcgtgaagcgcgttcgtgcgcgcgactttcccaaatctacttctgtgcacctgcttttcttccctgtgcgagtgtgtcactctgacccatttaatctgttggattaaaaatccctggaaaaggttcagctgccctcggaccctcgagttcagcccacagccgggctccactggacctgtcgagttgggggaccagcgccacgttgggacgcggctgcctgggacgctgagtctcgacgtggcgcgcagatggcccggacagaccagggctgttctcaattg

SEQ ID NO: 42213 - DNA, 649 bp, Homo sapiens
gttttgtttgaggcaatgtcttactctgtcacccagactggagtgcagtggtgctactacagttcactgcagtctcaatctctcaagctcaagcgagcctcctgccttagcctcctgagtagctgggaccacaggcacatgccaccacaggcacatgccaccacacccaggtcatttttaaaaatttttggtagagatgaagcctcactgtattgcctaggctaatctcgaactcctgtgctcaagcaatcctcccaccttggcctcccaaagtgctgggattacaggtgtgagccactgcaccgggcccaaagtacattttttacacctgattggattttgttctagttggcctatccactatgtggtatgagtatacttcctgggtaatgagaatggcaaacacttgtgattacctagttgtcaagatgattactaattctaacctagcattctaatctagagttcgtttctagattagaattagtaatcaagtcacagtgaaagaaaaaaagagtttctgggaaggcagaaggaaaaattggtaaattcacttttactgtttacatattgacttgtttttcttaatgttaactgcagaatttgtttcgtcatccaaggtgcaaataaaagtcctgagagtttaatt

SEQ ID NO: 42214 - DNA, 429 bp, Homo sapiens
agtcagccttgctgtggtggcccacaaggagtggagatgacagagggccttggggacagggcaaaagctcatgtgatagggatgctgtctctgcaaccacatggattttaatagttacccatggctggcttcagctttttttgtgaatggcagccaaaaagtgtggtgaaaatggagggatagttcagtggagacagaggggagactgttgaatttgtggagtttttagttcttcctaaacagagagcaacagacaagagttacagacaaattaattcttttcgttaatttaccctcaactactggccaagaaggggtgtaactcagaatgttttcttcttttgtgccctgagtagcagacccagagtctggagacccagattctaggcctggcttggccaacgacaagcagggtgaccttgggttaaa

SEQ ID NO: 42215 - DNA, 334 bp, Homo sapiens
agtagagatggggtttcatcgtgtcagccaggatggtctcgatcacctgacttcatgatctgcctgacttagcctcccaaagttctgggattacaggggtgagccaccgtgcccagccaaggccagccaatttttgtattttttgtagagacggggtcttgccatgttgcccgggctggtctggaactcctgggctcaagcgattcatctgcctctgcctcctaaagtactgggattacaggcataagccatctagcccagcccagagataggatatttaaagaggtcattaaggttaaatgaggtcatcagggcgggccctaatccaatatac

SEQ ID NO: 42216 - DNA, 537 bp, Homo sapiens
gttatattcatgcagattctgaggttcagggtatcaaagtatgatgagactatcatcccatactaaaaataaaaaagacaaaatcgaatggattgttaagcatagcaaaggaagtacagtctcttggagcagaccgctaatttatatagagtctcacggaagtgtgaagttcagtgactggcgaagttgcagaggcttaagagcttcaacatcatccgcagaggtgtgggtacacagatgaggctattggtaattggttgtcactatagtgtatttattgaggtgagtctgtgattggctggctttcagaagtaagcagctaatgctgattgtaaacaacttgtaaaagctcttcaccaaagcaaattgttgttgctggcttgaccaggttccaaactggttctgagtgccacttattgatatggctatagggcaaccaggcctttccaagggggtgggaatttattttcttccccattcagctttactggtagtaaagctggcactgtccttttatcatcttcaggctccttgtgc

SEQ ID NO: 42217 - DNA, 463 bp, Homo sapiens
gactctctaaacacagggggagttcacacacacacacacacacacacacacacacacacacacacactgatagagccctacacacacacacaaccacaaggctgctggagggatctgacagcacctggcactgtgggcacagagcagaggcttggtaaggaccagcatccctatatgatgagtagggctcttcttgaagccttagctttggtgaccaggactccgcaggggagagattgaggccaagtattcccacctcctaaaaagagtctagattaattggggccacatatctttgattaaagatccaagggcttttgaacgatgagactaggccaggcatagtgggtttatgtgtctaatcccagcactttgagaggctgaggtgggtggatcacctgaggtaggaagttcgagaccagcctgaccaacatggagatacctgcgtgctgctgactaaaaa

SEQ ID NO: 42218 - DNA, 141 bp, Homo sapiens
gggggtgtccaacctgtatagcccatgggttgtgtctagaattaagtggagggcagctatctggagttaacttgcaagcatattggtgccctccatgaccacctctggcttaggacttggccctgttatgagctgtgcccc

SEQ ID NO: 42219 - DNA, 422 bp, Homo sapiens
caggagaactgcttgaacctgggaggtggaggttgcagtgagccgagatcacgccactgcactccagcctggacaacagagtgagactccgtttaaaaaaattctgtgctctctctctgtctctgtctccctttgtgtctctgtctcgctctcactttcactctcccatccaggttctgaaagcaggtgggctgaggtggagggagcggagggtggaccctctgaggcccccaggggccggcagggctgggcggggtggggagtgggggctgccacagaccacggttctgcagaggccaaaatagcactaaagggaagtgggcagttttcatatgaacaacgattgccaagagctggcttcggggaagttctcggggctgggctggaggagctacagtgtctgaatcccgcctggaaggacg

SEQ ID NO: 42220 - DNA, 380 bp, Homo sapiens
ctacaatcatttatatctgcttgtaaaacctttttttaaaaaacttgcttactagacacagcacatgttcattttagaaaatgtagaaaaatcagataagcagccgggcatgatgactcatgcctgtaatctcagcactttgggaggccaaggcaggcagatcacctgaggtcaggagttcgagaccagcctggccaacatggtgaaaccccatctctactaaaaatacaaaaattatctgggtgtggtggtgcgtacctgtagtctcagttacctgggaggctgaggtgggagaatcacttgaacccaggaggtggaggttccagtgagccgagatcatgccactgtactccaacctacgtgacagagtgagaccctgt

SEQ ID NO: 42221 - DNA, 374 bp, Homo sapiens
gaactcctggcttcaagtaatcctcccaccttggcctcccaaagcactaggattacaggtgtgcactgccatgcctggcagaattaaaatatttatataaatgaaggaggaggtactatataaaacattagtttcattaaagtgcccttttgtttgcagccattcaaaataaaatgctatacaaaggtgtttcaaggactccacagtgtgctttctgtaaacaagattatatacaatagttcagtataggattttattgccttaggataactgctgagaatgacagcaacagaataaaaataactatgggtgacaagatgtttttggacatttctcattattagaattagaaacttagtagattagtcaaattt

SEQ ID NO: 42222 - DNA, 462 bp, Homo sapiens
gttgagccctggagactgtcaggtcgtacgactgcaattcttctcagattcactctcttcctcattgttcttgttctgtaaatgactaagagagaccagagaccagacctccccacttccaatcactggttttgttgtagatgaactgcctcctttgctgtccggtacctaatgtggaccagacggtgctcaagaccctatcactagtacaacctcagtgtggaatgttaaatatgccttgcctggaagaaaaagaccaacttgactaatcagatcatcataactatgcatgaagtcttccacagaaagatgatgaaattttgttacacttccctaacctttgtctaaataagcattcccaaacatctacactttggaacactgacttctgttctttgagatgggtgcttcccaggtggcccatcctcaaactttttgcttgaataaactctctaaactaga

SEQ ID NO: 42223 - DNA, 281 bp, Homo sapiens
tggattttcactgggggaaacagtctctaccctccggggtctgactcagtgcggggagataggtgagcagacatagaatcaacacagagcactaagtgctgtggaagatagaatggacacttatctttttgtctgaccagcaacccccatccttcttctaagaacagctcccctgagtatttctcctttcctgcttccagtctgtggctccgacaggagctgctgtgtccttgcacccctggccctggaacaggcttggactcctgacccaggttgggcca

SEQ ID NO: 42224 - DNA, 468 bp, Homo sapiens
agtctccactggacaggtaagattggcagcagtttattaatgacactcataatctcagtgagagaaacactgcataccattcagggccacatggaggttgcatttgggagcagagcgaaccagtaggagttgtgggaggaaggctttctagtaaccagggagtggggtgcctgtgtttcccgtaagaccatgtgattggtttctttaaataattttacaggctggcaggcagctgaagactgttaggttgatagccgagtggagtacatgtagaccagctgatgggcactagcagagtggggagcccatctcactaagtagggggtatatctggtgagagcaggggagctcttggttagaactttggggccccatgaggctcaaagacatcaaggcagcacatgaatttttaggtatacaagaagttaggacttcaacttatctttttgaatgacccaattcaaccca

SEQ ID NO: 42225 - DNA, 561 bp, Homo sapiens
ttttttgagatggagtcttgctctgtcgcccaggctggagtgcagtgacacgatctccgctcactgcaagctccgcctcccgggttcacgccattctcctgcctcagcctcccgagtagctgggactacaggcactgccacgacgcccggctaattttttgtatttttagtagagacggggtttcaccatgttagccaggatggtcttgatctcctgaactcgtgatccgcccgcctcggcctcccaaagtgctgggattacaagcgtgagccatcgcaccgggccttgccaatattcttgatttcaaaattccttaccattttcaggacattcatcaatcatttgtcctaattattgaaacctagtaaaattctgctattatttttcctactccttattatagtttcttgtattatgtaccttattgtatactatttataattatataaattttagagtttagatagactccaatcagtcattaaagttctgtctgctatgtaataattcctaatttctttatacaacgctcaaaactcagttctcgtaatttcataccc

SEQ ID NO: 42226 - DNA, 1056 bp, Homo sapiens
gtaaatgaatagttaggctcttcagtgtaataatcatggtaaatattctcaatgtgcgaaaatacaaacaaaagactttctctcccagcaaatttagacccacatgaaaatttaagcacaatcattttaaacgaatttaccctggagcttagtggttcgagctcaaggttgaggagcagtctggggacatcagctcttaatatttttcaagttttggagcaagtggtttctaggttctgagtgaagtgaaacagaatctctaggggcatgtggtaaagataatcccatactatgtactgcgtagagttaaagagaagaggcgagagcatgaagataaaccagtacaatcagtcgttcacataccactaactacaatgatactcccgtttgcttcctgtgaagtagttactaataatcactgatgtcgctttttaatttcatacatcctttaactatcttcatataggtattgaaagagtcaacataaaagccacatccattttctaattttgaacaatagttagagaaacctaatatcttctcatatttttgtcttgcttctgtctcatgagttcccaaaatagatatattatctgaatgaagagttcatgggcaaatgtcacacttttcttggtttggctaattatatttctgcttttgcttagaataagattaattttcctattctgctaataaaccacgtgatggcaaaatgccttattctgagaaaagaagcctttggtattttaaagaattgggaagctatttcagataagctatcatatgcatgaagattaatttattcatatgaaatgttcaataaccagaaaagactgttttaaataaaaccatttcacaattaagtttttttttggttatggacagtgatttcttctaagaaacaaagcgtctgtctatatgaagaataactaaaataatggttagcaaatattgattggatccagccaagtgagcagcatttttgagtttacagatgtggtaactttgaactatatttacgtgcttataatgaaaccttacagttggagtaatagc

SEQ ID NO: 42227 - DNA, 587 bp, Homo sapiens
ttaccaaggggcagactggataattgagtaatttaaatacttgggactttgttaaagaagctgttgggggaaggtgagcctgggtgagtggtggagggtgatgtgcagcatctgctgggccttcctgcctcttggtatgactgctcagctcaggagttgggtgctttagggcccctaccatgcagtgcggtgaagccccgcccctgcagtggtttgtgcttgtctgcacgtaggagggaacaagccggctgcagtaccttcggtggcctctgagactcacctcccccacttctgtccatagacaaagctcctggggagccctaagcctctttcctcatgccagcaagcagtcttggaagcaggctggggctgcagtgggagagatgccaagaccagttattcaagggcagtgaggttgccagtcctagcattacacactgtggaccagcacagctgctggctgaatactgcagtcaagattctctgaagggagtcatatcccttccaaacatcttcagtttacttgcagtgagctgagatcgcgccagtgcactccagcctgggcaacagagcgagactccatctca

SEQ ID NO: 42228 - DNA, 349 bp, Homo sapiens
  misc_feature (61)..(61): n is a, c, g, or t
cttactctgtattcaggctggatgatcatggctcactgcagcctccatctcccaggcgcanaattcctcccacctcagcctgggaaacagagtccctgtttaaaaaaaaaaataataataaataaataaaagtggctcatgcctgtaatcctagcactttgggagaccaaggtaagaggatcacttaagcccaagagttcaagactggcctgggtgacatagcaaaacctcgtctcaataaagtgtaagaatatataaaaaaacaaaacaggctaggcctgtagctcacatctgtaattacagcacttggcgaggctgaggtgggcagatggcttgagcccagaagttc

SEQ ID NO: 42229 - DNA, 410 bp, Homo sapiens
tgctagcttatactgcagcttccagctgctttaagtagactgtgagcaagtgattctcattcttgtagattctgccttctcatttctgttctgcctgctgtgctgttgtcctccctaggttattcatacagttaagatattgtattcagttgctgctgagtgtgctcagagatagcttcaaatatgaatttttatctgggagaattccagttctcctcccatttgctcctatgtgtttcttttcttccttttgttctccagagccagttgtacaagtttaaactactgaagtgatcaaactgtagtaccaattatcagcagtatttattcagaggcttttttttttaaaagaaacagagtctcattctgttgcccaggatggaatgcagtggtacaatctttagctcact

SEQ ID NO: 42230 - DNA, 386 bp, Homo sapiens
ggccattatgtgcttactctgtgttaaataccttgataagtacagtgtcctcattatctcatgtgaacttcagggcaacctcgtgagatagtgacagtacactaaccttatagtaacattttatttgatattatttagaagtttttaagttaccactgatgctctaagtcggtctatatctggggaatttcctttgtagcttatattctcagccagtgtcaggcaatgtattcctttaagtgtctcaggccttcctcctgagtccttggtggctgagagtcctggatctggaggcatacctcttgagattagatttcaagtgtgaaacacttactaacaatgtgaccttgagcaaattatttaaccttcctgtaagatgaagatga

SEQ ID NO: 42231 - DNA, 732 bp, Homo sapiens
cttgggttccagcatcctttatcattctgcaaacagattgtcagattttaggctgtcttcccgccaaactcccagctcctctcctcatccattatttttctttttttctaagcttcttatctcccccacggcacaatttcgctttatccaataaggaattgtttttgttactatctcatcccaggaatcactgaatctggagagtgaagggagtgctctgtatgatccagaaaagtctgacttgtaatatggagtcgcagagcatgaactggtcaaggctgatcagctaaatggagtagcccattcctccctgcctgcctcctgcccctcctcttgcctgccccttgcccctccttctgcctgcccagctgctccccaccttgaagccatggaagacatgcaagttttatgcccggaggaagtttatagttctgtttattcttcaggcttccatgtatgggtaaatggggaagcctctagcacttgagactaaacctaaattattttaaggatagattgattgctgtaatataatggtgagtctttctgttcacatttcagccactccttgaccactctcttgtttggcctattagagctgcttaagtgagtccaggctcccttagacaggaagcagaagaaagccaggacagagtgcaggagaaacacccatatagattcttatgattgtaacatctaggatctgtttcatgatactcagagtttaatata

SEQ ID NO: 42232 - DNA, 302 bp, Homo sapiens
tttatctgaacagttcattctttgccttactgtgtaacatccaccatagatagctgcctatgagaatgaatggaaaccatctgtatgtataatgtattcattaactcagtatagtgtaagtagatgcactaatcttttcccaatagatattcttttatttctttgataaggacttgttaagcatttgctatgtactgtgtactcttctgaatgctttagatatgctattaaacaagaataaggatcctgtcgtcatgtagcttatagtctaacagtggaaaaataaattataaagaagtaaa

SEQ ID NO: 42233 - DNA, 142 bp, Homo sapiens
tgctggtgtgagccactgcacccggcttaggatgcatttttcaatattttagtgtttgaataacgggctaacttgagaaaaaaataatttgaatcacacatcacacctgtaatcccagcactttgggaggccgaggcaggtg

SEQ ID NO: 42234 - DNA, 501 bp, Homo sapiens
ctggcaggttggatgactgaggcttagcaaggcaaatccaaggctgtgagaccggattccaggtgcagtgctcttgccgttgcaataaatattcaggtggaggtatttaatgtgggttggagggggtcccatcgctgtggcccctctgctcagctccttctggtgtggagacaagaagggcctctgcaccatgaagaaactcagcatttttttagttcttttttaatttttcagattctgaggcaacgtgatggttacggttcaaaacaaagagagatgactcagcttcctgtggagaagctgcagccttttgcaaatgatctttcagttttaatgcttctctcttcttatccatggaggcagcttgtccaagctgcttgttttcttttttcttttcttttttctcttatttatttatttattgagacagggtctccctctattgcccaggctgcagtgcagtggcatgagcataacttactgcagccttgaattcctggg

SEQ ID NO: 42235 - DNA, 416 bp, Homo sapiens
agaatattaaatgcaatgacggaaaaaggatggaagaacgaaatgaccacggtaatgaacatcagtggcctgctacccctatgtggaaggctgcccgtgacctctgaggtacaccctcgtacccctacctgtgaaaactggactcatggggatgctcaaaaccctaaaaccctcctcactgtacagcaggcatcttcccgggtgccgctcgcattctctaggggctgattttgcatggctctctccactcatctattctgctcgaaccgggtgatgaggaaggtggctctgacctcctctcccactcttcagtggatctatccctgcacccagctggcacagcagatatttgttccttgactttactctggtttggggttttcacccttttttttcaataaatgactcagaagtga

SEQ ID NO: 42236 - DNA, 588 bp, Homo sapiens
ggttttagaaagcagttcaggtgcaaaaaaataaagttcacagttcaaagaaggcctacagtgactacctgctacttggaacatactttgtttctccacaaagctgaaaataatgttgcaatgggaaagaaaacacatcattctggaggatatccaagggggattcaagtgaaaaatggaaccaagaacttactttgcaaagcttcaaggtgacctccttctcaccgtagggcataaaagccaatcagatatatgcatagttacagttcaagcagtacctatactgacaggtcccatatttccaaatggatttcacatttatataacatagtgatggttctatcctattaggctatctaaaaagtctaaaaagaatgagcatgtgccaaatataaatctggttcaacagaatcaaaaaattccttctagggtgcccctgctcttaataaatgactgtgaactatttcattaaaatcactcaggattctggaccaggatttccattgattatgtggtcttacacggttacttaatttgtctaggtctcagtttatctttttttttttaaaggattttatatttgggtaa

SEQ ID NO: 42237 - DNA, 377 bp, Homo sapiens
taaaataaaagggactgcaaatgcccatgacttagatgtgttagagtccagcttctgtttccccccatttggtcctgattttccgaagtgaaggggagacaggactgagtggcatggtggtgagcaacccgtgtgcttagcccagcggctctctggtttgtcattgtggtatccctctctggaccacagtttcctcatctggaaaatgaagatctaaggctaggtgattttaaagtccctttcagctctaaaatattattttacagttgtaggatttatggaggagaacggcattccgctctatcccttgctttagccttttgaatgaaagtgagatgtctcatcagctcagatagagccagctcaagcccagtgtc

SEQ ID NO: 42238 - DNA, 474 bp, Homo sapiens
gacaaagagcagggcactgattgtagcaactagtatatggatcttgcagctactctgtactctaattagccgagacaccctattgacaaggatggccagtgtcttagtgccactggggtgtaatcagtgggaaggcctgaatccctggtcggattttccacaaaacttagtgctcacatggaaccttcccgtggcccagaaacagctataagattgggattaagctgggcatggcagctcatttctgtaatcccactttgggaggccaagttgggtggataatttgagcccaggagttcaagaccagcctgggcaacatagcaaaatcccacttctaccacaaaaacaaaagttagctgcatgtggtggtacgtgcctgtaatcccagctacttcagaggctgaagcaaagagtcgcttgagcctgggagacagaggttacagtgagccaagatcgcaccactgaacgccagcc

SEQ ID NO: 42239 - DNA, 812 bp, Homo sapiens
gacagctttcatcaaacttggctttatccaaactttcagtggtttcccattttgttcatgattaagtccaaatattttagccagtgaaaggccctgtaatttaacccacacctttctaatcttatttctcatcatttttcctattcagtgagattaatgtgtttccctgatccatgcctttgtttgctcctgctgacttgttcttttaattctttctgcctatcagtacccatcatttttgctccagttccgatcccactgctcccagctcccctccacctccaaaaaaaaaacttttattttttgtctgcttgatatttttaccaaattattttttgaattgtatgtatccctcattatagcataatatttttaatgatacagatttaatagtacaaactatgttggagcagtttctgcataaggtatgttttaatttactctaggaatatgaagcacgaacggggaggacctgtaaaccaccacctcagtcttcaagacgcaagaattttgaatttgagccgctttctaccactgccttgattcttgaggatcgaccatcaaatcttcctgccaaatctgtggaagaagctttacgtcaccgacaagaatacgatgagatggtggctgaggctaaaaaacgaggtataaaatttaactccaaatggtataattttctgattttaataagaagatggatggtaaaattcatcaagtctgtcttcaagatgatactgaattcttttttttatttcttttttcgtttcttttttgagtctgggcaacaagagcgaaactccatctcaaaaata

SEQ ID NO: 42240 - DNA, 5252 bp, Homo sapiens
aacgttgcggcggctgtcgccgcggccccagcacccagagctgttctctggccaagcctgcgcctgtagtccttctttgcctcctggggcggccgccacccacccccagatggtgggtccggaggatgccggagcctgctcgggaagaaaccccaagttgctcccggtgcctgcgccggaccccgtgggccaggacaggaaggtaatccgggccacgggcggctttggcggaggcgtcggcgctgtggagccgccggaggaggctgacgaggaggaggagacgccgcctcggcagctccttcagcgttacctcgcggcggccggggagcagctggagccggggctctgctactgtccgctccccgctggccaggccggcgccccgccgccctcggcagccccacgatcggacgcctgcctgctgggctcgggctccaaacaccgcggcgcggaggtggctgatggccgcgcgccgcggcacgaaggcatgaccaacggcgactcgggttttctgccgggccgggactgtcgcgatctggaagaggctcgcgggctggcgcgcgccggcggccgggagtcgcgccgccgccgcccctacggccgccttcgcctggaggggcctggcgacgaggacgcggacggcgcgggaagcccgtccgattgggcctctccgcttgaggacccgctgcggagctgctgcctggtggccgcggacgcccaggagcccgagggcgcgggcagcgactcgggggacagccccgccagcagctgcagcagtagcgaggactcagagcagcggggagtcggcgccgggggtcccgaggagggcgcgccccctgccacctcggccgagaggactaatgggggtgcggagccgcgcctgggcttttctgacattcacttcaactctcgcaacacgttccaggtgagccgcggtcagagcgcccgcgatcacctgcccccggcggggccgccggtgcccttgcccgccgcggagcagggtcctgcgggggcttcggcccgggctcgacggagtggcggcttcgcggacttcttcaccagaaacctttttccaaaaaggacaaaggaactcaaatcagttgtccatagtgctcctggttggaaattatttggtaaagtccctcctagagagaatcttcagaaaacatccaaaatcattcagcaggaatatgaagcacgaacggggaggacctgtaaaccaccacctcagtcttcaagacgcaagaattttgaatttgagccgctttctaccactgccttgattcttgaggatcgaccatcaaatcttcctgccaaatctgtggaagaagctttacgtcaccgacaagaatacgatgagatggtggctgaggctaaaaaacgagaaattaaggaagcacataaaagaaaaagaatcatgaaagaacgatttaagcaggaagaaaatattgcaagtgcaatggtaatttggatcaatgaaatactgcccaattgggaagtaatgcgtagtacaagaagagttcgagaattgtggtggcagggattgccccctagtgtccgtgggaaagtttggagtctagctgtaggaaatgaactaaatatcactcctgaactttatgaaatcttcctctcaagagcaaaagaacggtggaaaagtttcagtgaaacaagttcagagaatgatacagaaggtgtatctgttgctgatcgagaggccagtctggaattaattaagttggacatatcccgtacatttccatctctctacatctttcagaagggtggtccatatcatgatgtcttgcatagtattttaggggcatacacatgctacaggcctgatgttggttatgtccaagggatgtccttcattgcagcagtactcattctcaatttggaagaggcagatgcctttatcgcatttgccaatctcctgaataagccatgccagttggccttttttcgtgtggatcacagcatgatgttgaaatattttgcaacatttgaagtattctttgaagaaaatctttccaaattatttcttcacttcaaatcttacagtcttacaccagatatatacttgatagactggatcttcacactatatagcaaatcactaccacttgatctggcctgtcgagtctgggatgtattttgcagagatggggaagaatttttatttaggactggattaggaatcctccgattatatgaagatattctcctgcagatggactttattcatatagcacagtttctaactaaattgccagaagatatcacatcggaaaagctgttcagttgtattgcagccattcagatgcagaatagcaccaaaaaatggactcaggtctttgcatctgtaatgaaggatattaaagaaggagacaagaacagtagtcctgctttgaaaagctagtcttcaaaattgacagactaactgacatagaaaaagtggtttttggataaaggttttttgtttcctatgtaaaaggcgtggaagaaaatgttggagatacctaaaagaatcaagaggtggaaaactgctgattttacattttatggctgaagtaaatgaaataagtaacttattgacagtattaataaactattattttgtaggtagagtcatttttcaaaggaaaaagtttaagtggtgagtttatattccacaatttggagtaaacaaaatgcaataaatttttaaaatagctttgaagatacttcaaatttttacatcttttcttttgtaacagttaccacaaagatattctggaggctagagtaggattgttaaatactactgttaacctccaaagtactatagtacagacattgtttccagttctgaccttttgaagatattatagaccagtaatgaacagatttggttgtaaattatttaagtcactgaagatgtcatttatcttcattcacaagttggggcaaattcgagttacctaggaactggaaatgttggtgggagattgtttattgtttgtttagatgtttttccatagtatggtgtccatttgttttttaagggaaattttttgtcttccttaaggaattcctatcactcagagaattttagccattctggttctagtctaacaaattattcatctaataatttgacattaagaaaactataaataactggtagaaggaaagtgctttgcacttcagtggattgaagacttgactttgagagtaagtccaaaaacatatatgatgtttctcagtgataagagtaaaaagtaatgaatcctgagagttcttaaacagcatgctacttggcaagacttcatattttttagttacaattcttccactgtttaactccagtttgaaatttgaaatctaatatgtagctaaatctgtgacttgtaaaactctatgcataatttttcctaatcagtggaaataagaataaaagaaaaaggtaaagttaattttttttctaagtctacatcctatctcttgattcagttgcctgaagaagctgggtaaggagattagtcttgttattgattcttttatgtgtcagtgccatcttaatctcttcacatggtacactaaatgctgcctataacccatcctcatcttctttactcatcattgctttcttcaaggaaggtcttgatactgccctcgtctacctcactatccgctagtctagatagtgactctttggaaaattggtagcctctgaatgagttatccaacttctgcttcctcacattggccactttgcataggttcgggaacttagcaggttttaaatcatcatgcccatggaggtgaaatactttgaggaatgggaacatctcttcactgtgtttttggatcagccttctctcaaccgccaagaaatgcatgatttccctgccaactctaggaagtagtgctgcatgattgaatcattatttgatgaattctttcattgtaacatagggagtcattttcaaaaaggtagatatgaacttaaattaaattgacttatgaatgctttgcctgtgggcccaacagtgtcatgaccctccaattgaaacatagcatgaattatttttatgtcgagttcttgaactgctaatcaggtgtgtgtttccttgaagtccagagcaggatccaggtcagatgaaggaggtggtatgcctggcttaactgctgaaaatagagcattgaaactcttcacaatgtgctgcattgggtttctgcttggctttctcactgaaaagtaaattggggaaaatgctgcttttactattttgcattttatagcaacattaacagtcttttcccagtcaggtgctgtccagggaacatgtttcccttgggaggtctgaacagagtgacctggcttgatgtatttcctgagctctagtaccatatcatagaattagttaaatgtagtcaacagcaatgtcagaacaattgacattgtctttccaagagtgaatgcattggctttcggaactgctactagagacatacatgaggcagcgaacacatctttaggtgggggcaaggctatatctgattgacagagatctctgatctctaatgacatattgctattgtcctattatgtttaaatttgaacctaaatcacttgagtgttatgagtgatggctatataacatgctgtttggttagatttacagtgtgtttttatgttgcagtttagtttgaaacaacacttaagcacactatttctgttagtgtatatagttttcaaactaacaagcctgcgatccttgttagtgtagtgactgcctctttaggagtatggggccctagggtgtccatatatttttaccccatgggtcattctagtctaaggactactagtagaaccctcaaaaggtaattgctattatagggacttacttattggagactggtaatataataaaatattgaaggagtggccatggtcttagcaggttttagaatgaccttttaactccagtaactacttccttggtattggtatccttgatagagggaatataacatctggcagtaatctcattcaggttatactacctgactaaatttaatcatactttcatgtatttgtttcctcagttggacctaagttactgtatttgtttttcttatttttttattattgtacagtttctttacctttcaagtataaatgtgtatataaaatgtaaatacaaagaattcactaaaaaccactcataacaattactgtgtaaataaaactggtaagcagagta

SEQ ID NO: 42241 - DNA, 5198 bp, Homo sapiens
aacgttgcggcggctgtcgccgcggccccagcacccagagctgttctctggccaagcctgcgcctgtagtccttctttgcctcctggggcggccgccacccacccccagatggtgggtccggaggatgccggagcctgctcgggaagaaaccccaagttgctcccggtgcctgcgccggaccccgtgggccaggacaggaaggtaatccgggccacgggcggctttggcggaggcgtcggcgctgtggagccgccggaggaggctgacgaggaggaggagacgccgcctcggcagctccttcagcgttacctcgcggcggccggggagcagctggagccggggctctgctactgtccgctccccgctggccaggccggcgccccgccgccctcggcagccccacgatcggacgcctgcctgctgggctcgggctccaaacaccgcggcgcggaggtggctgatggccgcgcgccgcggcacgaaggcatgaccaacggcgactcgggttttctgccgggccgggactgtcgcgatctggaagaggctcgcgggctggcgcgcgccggcggccgggagtcgcgccgccgccgcccctacggccgccttcgcctggaggggcctggcgacgaggacgcggacggcgcgggaagcccgtccgattgggcctctccgcttgaggacccgctgcggagctgctgcctggtggccgcggacgcccaggagcccgagggcgcgggcagcgactcgggggacagccccgccagcagctgcagcagtagcgaggactcagagcagcggggagtcggcgccgggggtcccgaggagggcgcgccccctgccacctcggccgagaggactaatgggggtgcggagccgcgcctgggcttttctgacattcacttcaactctcgcaacacgttccaggtgagccgcggtcagagcgcccgcgatcacctgcccccggcggggccgccggtgcccttgcccgccgcggagcagggtcctgcgggggcttcggcccgggctcgacggagtggcggcttcgcggacttcttcaccagaaacctttttccaaaaaggacaaaggaactcaaatcagttgtccatagtgctcctggttggaaattatttggtaaagtccctcctagagagaatcttcagaaaacatccaaaatcattcagcaggaatatgaagcacgaacggggaggacctgtaaaccaccacctcagtcttcaagacgcaagaattttgaatttgagccgctttctaccactgccttgattcttgaggatcgaccatcaaatcttcctgccaaatctgtggaagaagctttacgtcaccgacaagaatacgatgagatggtggctgaggctaaaaaacgagaaattaaggaagcacataaaagaaaaagaatcatgaaagaacgatttaagcaggaagaaaatattgcaagtgcaatggtaatttggatcaatgaaatactgcccaattgggaagtaatgcgtagtacaagaagagttcgagaattgtggtggcagggattgccccctagtgtccgtgggaaagtttggagtctagctgtaggaaatgaactaaatatcactcctgaactttatgaaatcttcctctcaagagcaaaagaacggtggaaaagtttcagtgaaacaagttcagagaatgatacagaaggtgtatctgttgctgatcgagaggccagtctggaattaattaagttggacatatcccgtacatttccatctctctacatctttcagaagggtggtccatatcatgatgtcttgcatagtattttaggggcatacacatgctacaggcctgatgttggttatgtccaagggatgtccttcattgcagcagtactcattctcaatttggaagaggcagatgcctttatcgcatttgccaatctcctgaataagccatgccagttggccttttttcgtgtggatcacagcatgatgttgaaatattttgcaacatttgaagtattctttgaagaaaatctttccaaattatttcttcacttcaaatcttacagtcttacaccagatatatacttgatagactggatcttcacactatatagcaaatcactaccacttgatctggcctgtcgagtctgggatgtattttgcagagatggggaagaatttttatttaggactggattaggaatcctccgattatatgaagatattctcctgcagatggactttattcatatagcacagtttctaactaaattgccagaagatatcacatcggaaaagctgttcagttgtattgcagccattcagatgcagaatagcaccaaaaaatggactcaggtctttgcatctgtaatgaaggatattaaagaaggagacaagaacagtagtcctgctttgaaaagctagtcttcaaaattgacagactaactgacatagaaaaagtggtttttggataaaggttttttgtttcctatgtaaaaggcgtggaagaaaatgttggagatacctaaaagaatcaagaggtggaaaactgctgattttacattttatggctgaagtaaatgaaataagtaacttattgacagtattaataaactattattttgtaggtagagtcatttttcaaaggaaaaagtttaagtggtgagtttatattccacaatttggagtaaacaaaatgcaataaatttttaaaatagctttgaagatacttcaaatttttacatcttttcttttgtaacagttaccacaaagatattctggaggctagagtaggattgttaaatactactgttaacctccaaagtactatagtacagacattgtttccagttctgaccttttgaagatattatagaccagtaatgaacagatttggttgtaaattatttaagtcactgaagatgtcatttatcttcattcacaagttggggcaaattcgagttacctaggaactggaaatgttggtgggagattgtttattgtttgtttagatgtttttccatagtatggtgtccatttgttttttaagggaaattttttgtcttccttaaggaattcctatcactcagagaattttagccattctggttctagtctaacaaattattcatctaataatttgacattaagaaaactataaataactggtagaaggaaagtgctttgcacttcagtggattgaagacttgactttgagagtaagtccaaaaacatatatgatgtttctcagtgataagagtaaaaagtaatgaatcctgagagttcttaaacagcatgctacttggcaagacttcatattttttagttacaattcttccactgtttaactccagtttgaaatttgaaatctaatatgtagctaaatctgtgacttgtaaaactctatgcataatttttcctaatcagtggaaataagaataaaagaaaaaggtaaagttaattttttttctaagtctacatcctatctcttgattcagttgcctgaagaagctgggtaaggagattagtcttgttattgattcttttatgtgtcagtgccatcttaatctcttcacatggtacactaaatgctgcctataacccatcctcatcttctttactcatcattgctttcttcaaggaaggtcttgatactgccctcgtctacctcactatccgctagtctagatagtgactctttggatttgcataggttcgggaacttagcaggttttaaatcatcatgcccatggaggtgaaatactttgaggaatgggaacatctcttcactgtgtttttggatcagccttctctcaaccgccaagaaatgcatgatttccctgccaactctaggaagtagtgctgcatgattgaatcattatttgatgaattctttcattgtaacatagggagtcattttcaaaaaggtagatatgaacttaaattaaattgacttatgaatgctttgcctgtgggcccaacagtgtcatgaccctccaattgaaacatagcatgaattatttttatgtcgagttcttgaactgctaatcaggtgtgtgtttccttgaagtccagagcaggatccaggtcagatgaaggaggtggtatgcctggcttaactgctgaaaatagagcattgaaactcttcacaatgtgctgcattgggtttctgcttggctttctcactgaaaagtaaattggggaaaatgctgcttttactattttgcattttatagcaacattaacagtcttttcccagtcaggtgctgtccagggaacatgtttcccttgggaggtctgaacagagtgacctggcttgatgtatttcctgagctctagtaccatatcatagaattagttaaatgtagtcaacagcaatgtcagaacaattgacattgtctttccaagagtgaatgcattggctttcggaactgctactagagacatacatgaggcagcgaacacatctttaggtgggggcaaggctatatctgattgacagagatctctgatctctaatgacatattgctattgtcctattatgtttaaatttgaacctaaatcacttgagtgttatgagtgatggctatataacatgctgtttggttagatttacagtgtgtttttatgttgcagtttagtttgaaacaacacttaagcacactatttctgttagtgtatatagttttcaaactaacaagcctgcgatccttgttagtgtagtgactgcctctttaggagtatggggccctagggtgtccatatatttttaccccatgggtcattctagtctaaggactactagtagaaccctcaaaaggtaattgctattatagggacttacttattggagactggtaatataataaaatattgaaggagtggccatggtcttagcaggttttagaatgaccttttaactccagtaactacttccttggtattggtatccttgatagagggaatataacatctggcagtaatctcattcaggttatactacctgactaaatttaatcatactttcatgtatttgtttcctcagttggacctaagttactgtatttgtttttcttatttttttattattgtacagtttctttacctttcaagtataaatgtgtatataaaatgtaaatacaaagaattcactaaaaaccactcataacaattactgtgtaaataaaactggtaagcagagta

SEQ ID NO: 42242 - DNA, 5217 bp, Homo sapiens
aacgttgcggcggctgtcgccgcggccccagcacccagagctgttctctggccaagcctgcgcctgtagtccttctttgcctcctggggcggccgccacccacccccagatggtgggtccggaggatgccggagcctgctcgggaagaaaccccaagttgctcccggtgcctgcgccggaccccgtgggccaggacaggaaggtaatccgggccacgggcggctttggcggaggcgtcggcgctgtggagccgccggaggaggctgacgaggaggaggaggctgacgaggaggaggagacgccgcctcggcagctccttcagcgttacctcgcggcggccggggagcagctggagccggggctctgctactgtccgctccccgctggccaggccggcgccccgccgccctcggcagccccacgatcggacgcctgcctgctgggctcgggctccaaacaccgcggcgcggaggtggctgatggccgcgcgccgcggcacgaaggcatgaccaacggcgactcgggttttctgccgggccgggactgtcgcgatctggaagaggctcgcgggctggcgcgcgccggcggccgggagtcgcgccgccgccgcccctacggccgccttcgcctggaggggcctggcgacgaggacgcggacggcgcgggaagcccgtccgattgggcctctccgcttgaggacccgctgcggagctgctgcctggtggccgcggacgcccaggagcccgagggcgcgggcagcgactcgggggacagccccgccagcagctgcagcagtagcgaggactcagagcagcggggagtcggcgccgggggtcccgaggagggcgcgccccctgccacctcggccgagaggactaatgggggtgcggagccgcgcctgggcttttctgacattcacttcaactctcgcaacacgttccaggtgagccgcggtcagagcgcccgcgatcacctgcccccggcggggccgccggtgcccttgcccgccgcggagcagggtcctgcgggggcttcggcccgggctcgacggagtggcggcttcgcggacttcttcaccagaaacctttttccaaaaaggacaaaggaactcaaatcagttgtccatagtgctcctggttggaaattatttggtaaagtccctcctagagagaatcttcagaaaacatccaaaatcattcagcaggaatatgaagcacgaacggggaggacctgtaaaccaccacctcagtcttcaagacgcaagaattttgaatttgagccgctttctaccactgccttgattcttgaggatcgaccatcaaatcttcctgccaaatctgtggaagaagctttacgtcaccgacaagaatacgatgagatggtggctgaggctaaaaaacgagaaattaaggaagcacataaaagaaaaagaatcatgaaagaacgatttaagcaggaagaaaatattgcaagtgcaatggtaatttggatcaatgaaatactgcccaattgggaagtaatgcgtagtacaagaagagttcgagaattgtggtggcagggattgccccctagtgtccgtgggaaagtttggagtctagctgtaggaaatgaactaaatatcactcctgaactttatgaaatcttcctctcaagagcaaaagaacggtggaaaagtttcagtgaaacaagttcagagaatgatacagaaggtgtatctgttgctgatcgagaggccagtctggaattaattaagttggacatatcccgtacatttccatctctctacatctttcagaagggtggtccatatcatgatgtcttgcatagtattttaggggcatacacatgctacaggcctgatgttggttatgtccaagggatgtccttcattgcagcagtactcattctcaatttggaagaggcagatgcctttatcgcatttgccaatctcctgaataagccatgccagttggccttttttcgtgtggatcacagcatgatgttgaaatattttgcaacatttgaagtattctttgaagaaaatctttccaaattagatcttcacactatatagcaaatcactaccacttgatctggcctgtcgagtctgggatgtattttgcagagatggggaagaatttttatttaggactggattaggaatcctccgattatatgaagatattctcctgcagatggactttattcatatagcacagtttctaactaaattgccagaagatatcacatcggaaaagctgttcagttgtattgcagccattcagatgcagaatagcaccaaaaaatggactcaggtctttgcatctgtaatgaaggatattaaagaaggagacaagaacagtagtcctgctttgaaaagctagtcttcaaaattgacagactaactgacatagaaaaagtggtttttggataaaggttttttgtttcctatgtaaaaggcgtggaagaaaatgttggagatacctaaaagaatcaagaggtggaaaactgctgattttacattttatggctgaagtaaatgaaataagtaacttattgacagtattaataaactattattttgtaggtagagtcatttttcaaaggaaaaagtttaagtggtgagtttatattccacaatttggagtaaacaaaatgcaataaatttttaaaatagctttgaagatacttcaaatttttacatcttttcttttgtaacagttaccacaaagatattctggaggctagagtaggattgttaaatactactgttaacctccaaagtactatagtacagacattgtttccagttctgaccttttgaagatattatagaccagtaatgaacagatttggttgtaaattatttaagtcactgaagatgtcatttatcttcattcacaagttggggcaaattcgagttacctaggaactggaaatgttggtgggagattgtttattgtttgtttagatgtttttccatagtatggtgtccatttgttttttaagggaaattttttgtcttccttaaggaattcctatcactcagagaattttagccattctggttctagtctaacaaattattcatctaataatttgacattaagaaaactataaataactggtagaaggaaagtgctttgcacttcagtggattgaagacttgactttgagagtaagtccaaaaacatatatgatgtttctcagtgataagagtaaaaagtaatgaatcctgagagttcttaaacagcatgctacttggcaagacttcatattttttagttacaattcttccactgtttaactccagtttgaaatttgaaatctaatatgtagctaaatctgtgacttgtaaaactctatgcataatttttcctaatcagtggaaataagaataaaagaaaaaggtaaagttaattttttttctaagtctacatcctatctcttgattcagttgcctgaagaagctgggtaaggagattagtcttgttattgattcttttatgtgtcagtgccatcttaatctcttcacatggtacactaaatgctgcctataacccatcctcatcttctttactcatcattgctttcttcaaggaaggtcttgatactgccctcgtctacctcactatccgctagtctagatagtgactctttggaaaattggtagcctctgaatgagttatccaacttctgcttcctcacattggccactttgcataggttcgggaacttagcaggttttaaatcatcatgcccatggaggtgaaatactttgaggaatgggaacatctcttcactgtgtttttggatcagccttctctcaaccgccaagaaatgcatgatttccctgccaactctaggaagtagtgctgcatgattgaatcattatttgatgaattctttcattgtaacatagggagtcattttcaaaaaggtagatatgaacttaaattaaattgacttatgaatgctttgcctgtgggcccaacagtgtcatgaccctccaattgaaacatagcatgaattatttttatgtcgagttcttgaactgctaatcaggtgtgtgtttccttgaagtccagagcaggatccaggtcagatgaaggaggtggtatgcctggcttaactgctgaaaatagagcattgaaactcttcacaatgtgctgcattgggtttctgcttggctttctcactgaaaagtaaattggggaaaatgctgcttttactattttgcattttatagcaacattaacagtcttttcccagtcaggtgctgtccagggaacatgtttcccttgggaggtctgaacagagtgacctggcttgatgtatttcctgagctctagtaccatatcatagaattagttaaatgtagtcaacagcaatgtcagaacaattgacattgtctttccaagagtgaatgcattggctttcggaactgctactagagacatacatgaggcagcgaacacatctttaggtgggggcaaggctatatctgattgacagagatctctgatctctaatgacatattgctattgtcctattatgtttaaatttgaacctaaatcacttgagtgttatgagtgatggctatataacatgctgtttggttagatttacagtgtgtttttatgttgcagtttagtttgaaacaacacttaagcacactatttctgttagtgtatatagttttcaaactaacaagcctgcgatccttgttagtgtagtgactgcctctttaggagtatggggccctagggtgtccatatatttttaccccatgggtcattctagtctaaggactactagtagaaccctcaaaaggtaattgctattatagggacttacttattggagactggtaatataataaaatattgaaggagtggccatggtcttagcaggttttagaatgaccttttaactccagtaactacttccttggtattggtatccttgatagagggaatataacatctggcagtaatctcattcaggttatactacctgactaaatttaatcatactttcatgtatttgtttcctcagttggacctaagttactgtatttgtttttcttatttttttattattgtacagtttctttacctttcaagtataaatgtgtatataaaatgtaaatacaaagaattcactaaaaaccactcataacaattactgtgtaaataaaactggtaagcagagta

SEQ ID NO: 42243 - DNA, 2937 bp, Homo sapiens
tttgaggattaatctttattttatataattttcaggtctttgcatctgtaatgaaggatattaaagaaggagacaagaacagtagtcctgctttgaaaagctagtcttcaaaattgacagactaactgacatagaaaaagtggtttttggataaaggttttttgtttcctatgtaaaaggcgtggaagaaaatgttggagatacctaaaagaatcaagaggtggaaaactgctgattttacattttatggctgaagtaaatgaaataagtaacttattgacagtattaataaactattattttgtaggtagagtcatttttcaaaggaaaaagtttaagtggtgagtttatattccacaatttggagtaaacaaaatgcaataaatttttaaaatagctttgaagatacttcaaatttttacatcttttcttttgtaacagttaccacaaagatattctggaggctagagtaggattgttaaatactactgttaacctccaaagtactatagtacagacattgtttccagttctgaccttttgaagatattatagaccagtaatgaacagatttggttgtaaattatttaagtcactgaagatgtcatttatcttcattcacaagttggggcaaattcgagttacctaggaactggaaatgttggtgggagattgtttattgtttgtttagatgtttttccatagtatggtgtccatttgttttttaagggaaattttttgtcttccttaaggaattcctatcactcagagaattttagccattctggttctagtctaacaaattattcatctaataatttgacattaagaaaactataaataactggtagaaggaaagtgctttgcacttcagtggattgaagacttgactttgagagtaagtccaaaaacatatatgatgtttctcagtgataagagtaaaaagtaatgaatcctgagagttcttaaacagcatgctacttggcaagacttcatattttttagttacaattcttccactgtttaactccagtttgaaatttgaaatctaatatgtagctaaatctgtgacttgtaaaactctatgcataatttttcctaatcagtggaaataagaataaaagaaaaaggtaaagttaattttttttctaagtctacatcctatctcttgattcagttgcctgaagaagctgggtaaggagattagtcttgttattgattcttttatgtgtcagtgccatcttaatctcttcacatggtacactaaatgctgcctataacccatcctcatcttctttactcatcattgctttcttcaaggaaggtcttgatactgccctcgtctacctcactatccgctagtctagatagtgactctttggaaaattggtagcctctgaatgagttatccaacttctgcttcctcacattggccactttgcataggttcgggaacttagcaggttttaaatcatcatgcccatggaggtgaaatactttgaggaatgggaacatctcttcactgtgtttttggatcagccttctctcaaccgccaagaaatgcatgatttccctgccaactctaggaagtagtgctgcatgattgaatcattatttgatgaattctttcattgtaacatagggagtcattttcaaaaaggtagatatgaacttaaattaaattgacttatgaatgctttgcctgtgggcccaacagtgtcatgaccctccaattgaaacatagcatgaattatttttatgtcgagttcttgaactgctaatcaggtgtgtgtttccttgaagtccagagcaggatccaggtcagatgaaggaggtggtatgcctggcttaactgctgaaaatagagcattgaaactcttcacaatgtgctgcattgggtttctgcttggctttctcactgaaaagtaaattggggaaaatgctgcttttactattttgcattttatagcaacattaacagtcttttcccagtcaggtgctgtccagggaacatgtttcccttgggaggtctgaacagagtgacctggcttgatgtatttcctgagctctagtaccatatcatagaattagttaaatgtagtcaacagcaatgtcagaacaattgacattgtctttccaagagtgaatgcattggctttcggaactgctactagagacatacatgaggcagcgaacacatctttaggtgggggcaaggctatatctgattgacagagatctctgatctctaatgacatattgctattgtcctattatgtttaaatttgaacctaaatcacttgagtgttatgagtgatggctatataacatgctgtttggttagatttacagtgtgtttttatgttgcagtttagtttgaaacaacacttaagcacactatttctgttagtgtatatagttttcaaactaacaagcctgcgatccttgttagtgtagtgactgcctctttaggagtatggggccctagggtgtccatatatttttaccccatgggtcattctagtctaaggactactagtagaaccctcaaaaggtaattgctattatagggacttacttattggagactggtaatataataaaatattgaaggagtggccatggtcttagcaggttttagaatgaccttttaactccagtaactacttccttggtattggtatccttgatagagggaatataacatctggcagtaatctcattcaggttatactacctgactaaatttaatcatactttcatgtatttgtttcctcagttggacctaagttactgtatttgtttttcttatttttttattattgtacagtttctttacctttcaagtataaatgtgtatataaaatgtaaatacaaagaattcactaaaaaccactcataacaattactgtgtaaataaaactggtaagcagagta

SEQ ID NO: 42244 - DNA, 2740 bp, Homo sapiens
aacgttgcggcggctgtcgccgcggccccagcacccagagctgttctctggccaagcctgcgcctgtagtccttctttgcctcctggggcggccgccacccacccccagatggtgggtccggaggatgccggagcctgctcgggaagaaaccccaagttgctcccggtgcctgcgccggaccccgtgggccaggacaggaaggtaatccgggccacgggcggctttggcggaggcgtcggcgctgtggagccgccggaggaggctgacgaggaggaggaggctgacgaggaggaggagacgccgcctcggcagctccttcagcgttacctcgcggcggccggggagcagctggagccggggctctgctactgtccgctccccgctggccaggccggcgccccgccgccctcggcagccccacgatcggacgcctgcctgctgggctcgggctccaaacaccgcggcgcggaggtggctgatggccgcgcgccgcggcacgaaggcatgaccaacggcgactcgggttttctgccgggccgggactgtcgcgatctggaagaggctcgcgggctggcgcgcgccggcggccgggagtcgcgccgccgccgcccctacggccgccttcgcctggaggggcctggcgacgaggacgcggacggcgcgggaagcccgtccgattgggcctctccgcttgaggacccgctgcggagctgctgcctggtggccgcggacgcccaggagcccgagggcgcgggcagcgactcgggggacagccccgccagcagctgcagcagtagcgaggactcagagcagcggggagtcggcgccgggggtcccgaggagggcgcgccccctgccacctcggccgagaggactaatgggggtgcggagccgcgcctgggcttttctgacattcacttcaactctcgcaacacgttccaggtgagccgcggtcagagcgcccgcgatcacctgcccccggcggggccgccggtgcccttgcccgccgcggagcagggtcctgcgggggcttcggcccgggctcgacggagtggcggcttcgcggacttcttcaccagaaacctttttccaaaaaggacaaaggaactcaaatcagttgtccatagtgctcctggttggaaattatttggtaaagtccctcctagagagaatcttcagaaaacatccaaaatcattcagcaggaatatgaagcacgaacggggaggacctgtaaaccaccacctcagtcttcaagacgcaagaattttgaatttgagccgctttctaccactgccttgattcttgaggatcgaccatcaaatcttcctgccaaatctgtggaagaagctttacgtcaccgacaagaatacgatgagatggtggctgaggctaaaaaacgagaaattaaggaagcacataaaagaaaaagaatcatgaaagaacgatttaagcaggaagaaaatattgcaagtgcaatggtaatttggatcaatgaaatactgcccaattgggaagtaatgcgtagtacaagaagagttcgagaattgtggtggcagggattgccccctagtgtccgtgggaaagtttggagtctagctgtaggaaatgaactaaatatcactcctgaactttatgaaatcttcctctcaagagcaaaagaacggtggaaaagtttcagtgaaacaagttcagagaatgatacagaaggtgtatctgttgctgatcgagaggccagtctggaattaattaagttggacatatcccgtacatttccatctctctacatctttcagaagggtggtccatatcatgatgtcttgcatagtattttaggggcatacacatgctacaggcctgatgttggttatgtccaagggatgtccttcattgcagcagtactcattctcaatttggaagaggcagatgcctttatcgcatttgccaatctcctgaataagccatgccagttggccttttttcgtgtggatcacagcatgatgttgaaatattttgcaacatttgaagtattctttgaagaaaatctttccaaattatttcttcacttcaaatcttacagtcttacaccagatatatacttgatagactggatcttcacactatatagcaaatcactaccacttgatctggcctgtcgagtctgggatgtattttgcagagatggggaagaatttttatttaggactggattaggaatcctccgattatatgaagatattctcctgcagatggactttattcatatagcacagtttctaactaaattgccagaagatatcacatcggaaaagctgttcagttgtattgcagccattcagatgcagaatagcaccaaaaaatggactcaggtctttgcatctgtaatgaaggatattaaagaaggagacaagaacagtagtcctgctttgaaaagctagtcttcaaaattgacagactaactgacatagaaaaagtggtttttggataaaggttttttgtttcctatgtaaaaggcgtggaagaaaatgttggagatacctaaaagaatcaagaggtggaaaactgctgattttacattttatggctgaagtaaatgaaataagtaacttattgacagtattaataaactattattttgtaggtagagtcatttttcaaaggaaaaagtttaagtggtgagtttatattccacaatttggagtaaacaaaatgcaataaatttttaaaatagctttgaagat

SEQ ID NO: 42245 - DNA, 252 bp, Homo sapiens
cacacacaccacatattaacaacctggattctgattctgttctaaaatgcacagttcttttcagcctttcacttccttaatgtatgaaatgaggttagtttagaaattctttgcatctgggtgtaaaaacaaataagttagtaagttgaaagttaatcttttaaaaattgtcttgacttaagtaatttttttttccagaaatcttcctgccaaatctgtggaagaagctttacgtcaccgacaagaatacga

SEQ ID NO: 42246 - DNA, 242 bp, Homo sapiens
cctgtaaaccacgcaccttcgagtcttcaagacgcaagaattttgaatttgagccgctttctaccactgccttgattcttgaggatcgaccatcaaacctttttccaaaaaggacaaaggaactcaaatcagttgtccatagtgctcctggttggaaattatttggtaaagtccctcctagagagaatcttcagaaaacatccaaaatcattcagcaggtaagtactgacatagccatgtag

SEQ ID NO: 42247 - DNA, 5573 bp, Homo sapiens
aacgttgcggcggctgtcgccgcggccccagcacccagagctgttctctggccaagcctgcgcctgtagtccttctttgcctcctggggcggccgccacccacccccagatggtgggtccggaggatgccggagcctgctcgggaagaaaccccaagttgctcccggtgcctgcgccggaccccgtgggccaggacaggaaggtaatccgggccacgggcggctttggcggaggcgtcggcgctgtggagccgccggaggaggctgacgaggaggaggagacgccgcctcggcagctccttcagcgttacctcgcggcggccggggagcagctggagccggggctctgctactgtccgctccccgctggccaggccggcgccccgccgccctcggcagccccacgatcggacgcctgcctgctgggctcgggctccaaacaccgcggcgcggaggtggctgatggccgcgcgccgcggcacgaaggcatgaccaacggcgactcgggttttctgccgggccgggactgtcgcgatctggaagaggctcgcgggctggcgcgcgccggcggccgggagtcgcgccgccgccgcccctacggccgccttcgcctggaggggcctggcgacgaggacgcggacggcgcgggaagcccgtccgattgggcctctccgcttgaggacccgctgcggagctgctgcctggtggccgcggacgcccaggagcccgagggcgcgggcagcgactcgggggacagccccgccagcagctgcagcagtagcgaggactcagagcagcggggagtcggcgccgggggtcccgaggagggcgcgccccctgccacctcggccgagaggactaatgggggtgcggagccgcgcctgggcttttctgacattcacttcaactctcgcaacacgttccaggtgagccgcggtcagagcgcccgcgatcacctgcccccggcggggccgccggtgcccttgcccgccgcggagcagggtcctgcgggggcttcggcccgggctcgacggagtggcggcttcgcggacttcttcaccagaaacctttttccaaaaaggacaaaggaactcaaatcagttgtccatagtgctcctggttggaaattatttggtaaagtccctcctagagagaatcttcagaaaacatccaaaatcattcagcaggaatatgaagcacgaacggggaggacctgtaaaccaccacctcagtcttcaagacgcaagaattttgaatttgagccgctttctaccactgccttgattcttgaggatcgaccatcaaatcttcctgccaaatctgtggaagaagctttacgtcaccgacaagaatacgatgagatggtggctgaggctaaaaaacgagaaattaaggaagcacataaaagaaaaagaatcatgaaagaacgatttaagcaggaagaaaatattgcaagtgcaatggtaatttggatcaatgaaatactgcccaattgggaagtaatgcgtagtacaagaagagttcgagaattgtggtggcagggattgccccctagtgtccgtgggaaagtttggagtctagctgtaggaaatgaactaaatatcactcctgaactttatgaaatcttcctctcaagagcaaaagaacggtggaaaagtttcagtgaaacaagttcagagaatgatacagaaggtgtatctgttgctgatcgagaggccagtctggaattaattaagttggacatatcccgtacatttccatctctctacatctttcagaagggtggtccatatcatgatgtcttgcatagtattttaggggcatacacatgctacaggcctgatgttggttatgtccaagggatgtccttcattgcagcagtactcattctcaatttggaagaggcagatgcctttatcgcatttgccaatctcctgaataagccatgccagttggccttttttcgtgtggatcacagcatgatgttgaaatattttgcaacatttgaagtattctttgaagaaaatctttccaaattatttcttcacttcaaatcttacagtcttacaccagatatatacttgatagactggatcttcacactatatagcaaatcactaccacttgatctggcctgtcgagtctgggatgtattttgcagagatggggaagaatttttatttaggactggattaggaatcctccgattatatgaagatattctcctgcagatggactttattcatatagcacagtttctaactaaattgccagaagatatcacatcggaaaagctgttcagttgtattgcagccattcagatgcagaatagcaccaaaaaatggactcaggtctttgcatctgtaatgaaggatattaaagaaggagacaagaacagtagtcctgctttgaaaagctagtcttcaaaattgacagactaactgacatagaaaaagtggtttttggataaaggttttttgtttcctatgtaaaaggcgtggaagaaaatgttggagatacctaaaagaatcaagaggtggaaaactgctgattttacattttatggctgaagtaaatgaaataagtaacttattgacagtattaataaactattattttgtaggtagagtcatttttcaaaggaaaaagtttaagtggtgagtttatattccacaatttggagtaaacaaaatgcaataaatttttaaaatagctttgaagatacttcaaatttttacatcttttcttttgtaacagttaccacaaagatattctggaggctagagtaggattgttaaatactactgttaacctccaaagtactatagtacagacattgtttccagttctgaccttttgaagatattatagaccagtaatgaacagatttggttgtaaattatttaagtcactgaagatgtcatttatcttcattcacaagttggggcaaattcgagttacctaggaactggaaatgttggtgggagattgtttattgtttgtttagatgtttttccatagtatggtgtccatttgttttttaagggaaattttttgtcttccttaaggaattcctatcactcagagaattttagccattctggttctagtctaacaaattattcatctaataatttgacattaagaaaactataaataactggtagaaggaaagtgctttgcacttcagtggattgaagacttgactttgagagtaagtccaaaaacatatatgatgtttctcagtgataagagtaaaaagtaatgaatcctgagagttcttaaacagcatgctacttggcaagacttcatattttttagttacaattcttccactgtttaactccagtttgaaatttgaaatctaatatgtagctaaatctgtgacttgtaaaactctatgcataatttttcctaatcagtggaaataagaataaaagaaaaaggtaaagttaattttttttctaagtctacatcctatctcttgattcagttgcctgaagaagctgggtaaggagattagtcttgttattgattcttttatgtgtcagtgccatcttaatctcttcacatggtacactaaatgctgcctataacccatcctcatcttctttactcatcattgctttcttcaaggaaggtcttgatactgccctcgtctacctcactatccgctagtctagatagtgactctttggaaaattggtagcctctgaatgagttatccaacttctgcttcctcacattggccactttgcataggttcgggaacttagcaggttttaaatcatcatgcccatggaggtgaaatactttgaggaatgggaacatctcttcactgtgtttttggatcagccttctctcaaccgccaagaaatgcatgatttccctgccaactctaggaagtagtgctgcatgattgaatcattatttgatgaattctttcattgtaacatagggagtcattttcaaaaaggtagatatgaacttaaattaaattgacttatgaatgctttgcctgtgggcccaacagtgtcatgaccctccaattgaaacatagcatgaattatttttatgtcgagttcttgaactgctaatcaggtgtgtgtttccttgaagtccagagcaggatccaggtcagatgaaggaggtggtatgcctggcttaactgctgaaaatagagcattgaaactcttcacaatgtgctgcattgggtttctgcttggctttctcactgaaaagtaaattggggaaaatgctgcttttactattttgcattttatagcaacattaacagtcttttcccagtcaggtgctgtccagggaacatgtttcccttgggaggtctgaacagagtgacctggcttgatgtatttcctgagctctagtaccatatcatagaattagttaaatgtagtcaacagcaatgtcagaacaattgacattgtctttccaagagtgaatgcattggctttcggaactgctactagagacatacatgaggcagcgaacacatctttaggtgggggcaaggctatatctgattgacagagatctctgatctctaatgacatattgctattgtcctattatgtttaaatttgaacctaaatcacttgagtgttatgagtgatggctatataacatgctgtttggttagatttacagtgtgtttttatgttgcagtttagtttgaaacaacacttaagcacactatttctgttagtgtatatagttttcaaactaacaagcctgcgatccttgttagtgtagtgactgcctctttaggagtatggggccctagggtgtccatatatttttaccccatgggtcattctagtctaaggactactagtagaaccctcaaaaggtaattgctattatagggacttacttattggagactggtaatataataaaatattgaaggagtggccatggtcttagcaggttttagaatgaccttttaactccagtaactacttccttggtattggtatccttgatagagggaatataacatctggcagtaatctcattcaggttatactacctgactaaatttaatcatactttcatgtatttgtttcctcagttggacctaagttactgtatttgtttttcttatttttttattattgtacagtttctttacctttcaagtataaatgtgtatataaaatgtaaatacaaagaattcactaaaaaccactcataacaattactgtgtaaataaaactggtaagcagagtaattacttgaaatgagtcttcattactttggggatatctgttttatttaactgcatctcaaggaaacaaaggaaataatctttgtttttgtttgccaaatttgtcttccaaggaatgcactaagccttcagtctttttagactgacagtactggcagctaaaatattgtactgtatcttctcttgagcccagtatgtaggaaatatgtgataattcacatggtcagtatatggcagtttttgttgttgttgttacagtatattttcaattaaaaaaaaacttttcctaaaatactcaaataatgtgaaatttaatatggtgt

SEQ ID NO: 42248 - DNA, 4081 bp, Homo sapiens
aacgttgcggcggctgtcgccgcggccccagcacccagagctgttctctggccaagcctgcgcctgtagtccttctttgcctcctggggcggccgccacccacccccagatggtgggtccggaggatgccggagcctgctcgggaagaaaccccaagttgctcccggtgcctgcgccggaccccgtgggccaggacaggaaggtaatccgggccacgggcggctttggcggaggcgtcggcgctgtggagccgccggaggaggctgacgaggaggaggagacgccgcctcggcagctccttcagcgttacctcgcggcggccggggagcagctggagccggggctctgctactgtccgctccccgctggccaggccggcgccccgccgccctcggcagccccacgatcggacgcctgcctgctgggctcgggctccaaacaccgcggcgcggaggtggctgatggccgcgcgccgcggcacgaaggcatgaccaacggcgactcgggttttctgccgggccgggactgtcgcgatctggaagaggctcgcgggctggcgcgcgccggcggccgggagtcgcgccgccgccgcccctacggccgccttcgcctggaggggcctggcgacgaggacgcggacggcgcgggaagcccgtccgattgggcctctccgcttgaggacccgctgcggagctgctgcctggtggccgcggacgcccaggagcccgagggcgcgggcagcgactcgggggacagccccgccagcagctgcagcagtagcgaggactcagagcagcggggagtcggcgccgggggtcccgaggagggcgcgccccctgccacctcggccgagaggactaatgggggtgcggagccgcgcctgggcttttctgacattcacttcaactctcgcaacacgttccaggtgagccgcggtcagagcgcccgcgatcacctgcccccggcggggccgccggtgcccttgcccgccgcggagcagggtcctgcgggggcttcggcccgggctcgacggagtggcggcttcgcggacttcttcaccagaaacctttttccaaaaaggacaaaggaactcaaatcagttgtccatagtgctcctggttggaaattatttggtaaagtccctcctagagagaatcttcagaaaacatccaaaatcattcagcaggaatatgaagcacgaacggggaggacctgtaaaccaccacctcagtcttcaagacgcaagaattttgaatttgagccgctttctaccactgccttgattcttgaggatcgaccatcaaatcttcctgccaaatctgtggaagaagctttacgtcaccgacaagaatacgatgagatggtggctgaggctaaaaaacgagaaattaaggaagcacataaaagaaaaagaatcatgaaagaacgatttaagcaggaagaaaatattgcaagtgcaatggtaatttggatcaatgaaatactgcccaattgggaagtaatgcgtagtacaagaagagttcgagaattgtggtggcagggattgccccctagtgtccgtgggaaagtttggagtctagctgtaggaaatgaactaaatatcactcctgaactttatgaaatcttcctctcaagagcaaaagaacggtggaaaagtttcagtgaaacaagttcagagaatgatacagaaggtgtatctgttgctgatcgagaggccagtctggaattaattaagttggacatatcccgtacatttccatctctctacatctttcagaagggtggtccatatcatgatgtcttgcatagtattttaggggcatacacatgctacaggcctgatgttggttatgtccaagggatgtccttcattgcagcagtactcattctcaatttggaagaggcagatgcctttatcgcatttgccaatctcctgaataagccatgccagttggccttttttcgtgtggatcacagcatgatgttgaaatattttgcaacatttgaagtattctttgaagaaaatctttccaaattatttcttcacttcaaatcttacagtcttacaccagatatatacttgatagactggatcttcacactatatagcaaatcactaccacttgatctggcctgtcgagtctgggatgtattttgcagagatggggaagaatttttatttaggactggattaggaatcctccgattatatgaagatattctcctgcagatggactttattcatatagcacagtttctaactaaattgccagaagatatcacatcggaaaagctgttcagttgtattgcagccattcagatgcagaatagcaccaaaaaatggactcaggtctttgcatctgtaatgaaggatattaaagaaggagacaagaacagtagtcctgctttgaaaagctagtcttcaaaattgacagactaactgacatagaaaaagtggtttttggataaaggttttttgtttcctatgtaaaaggcgtggaagaaaatgttggagatacctaaaagaatcaagaggtggaaaactgctgattttacattttatggctgaagtaaatgaaataagtaacttattgacagtattaataaactattattttgtaggtagagtcatttttcaaaggaaaaagtttaagtggtgagtttatattccacaatttggagtaaacaaaatgcaataaatttttaaaatagctttgaagatacttcaaatttttacatcttttcttttgtaacagttaccacaaagatattctggaggctagagtaggattgttaaatactactgttaacctccaaagtactatagtacagacattgtttccagttctgaccttttgaagatattatagaccagtaatgaacagatttggttgtaaattatttaagtcactgaagatgtcatttatcttcattcacaagttggggcaaattcgagttacctaggaactggaaatgttggtgggagattgtttattgtttgtttagatgtttttccatagtatggtgtccatttgttttttaagggaaattttttgtcttccttaaggaattcctatcactcagagaattttagccattctggttctagtctaacaaattattcatctaataatttgacattaagaaaactataaataactggtagaaggaaagtgctttgcacttcagtggattgaagacttgactttgagagtaagtccaaaaacatatatgatgtttctcagtgataagagtaaaaagtaatgaatcctgagagttcttaaacagcatgctacttggcaagacttcatattttttagttacaattcttccactgtttaactccagtttgaaatttgaaatctaatatgtagctaaatctgtgacttgtaaaactctatgcataatttttcctaatcagtggaaataagaataaaagaaaaaggtaaagttaattttttttctaagtctacatcctatctcttgattcagttgcctgaagaagctgggtaaggagattagtcttgttattgattcttttatgtgtcagtgccatcttaatctcttcacatggtacactaaatgctgcctataacccatcctcatcttctttactcatcattgctttcttcaaggaaggtcttgatactgccctcgtctacctcactatccgctagtctagatagtgactctttggaaaattggtagcctctgaatgagttatccaacttctgcttcctcacattggccactttgcataggttcgggaacttagcaggttttagaatgaccttttaactccagtaactacttccttggtattggtatccttgatagagggaatataacatctggcagtaatctcattcaggttatactacctgactaaatttaatcatactttcatgtatttgtttcctcagttggacctaagttactgtatttgtttttcttatttttttattattgtacagtttctttacctttcaagtataaatgtgtatataaaatgtaaatacaaagaattcactaaaaaccactcataacaattactgtgtaaataaaactggtaagcagagta

SEQ ID NO: 42249 - DNA, 3404 bp, Homo sapiens
ctgtgtgatcattctgtatttataaaattggacttgttagagccaagtgatcatttaaattgtatctgcttggtaaatgcaggtgtatctgttgctgatcgagaggccagtctggaattaattaagttggacatatcccgtacatttccatctctctacatctttcagaagggtggtccatatcatgatgtcttgcatagtattttaggggcatacacatgctacaggcctgatgttggttatgatcttcacactatatagcaaatcactaccacttgatctggcctgtcgagtctgggatgtattttgcagagatggggaagaatttttatttaggactggattaggaatcctccgattatatgaagatattctcctgcagatggactttattcatatagcacagtttctaactaaattgccagaagatatcacatcggaaaagctgttcagttgtattgcagccattcagatgcagaatagcaccaaaaaatggactcaggtctttgcatctgtaatgaaggatattaaagaaggagacaagaacagtagtcctgctttgaaaagctagtcttcaaaattgacagactaactgacatagaaaaagtggtttttggataaaggttttttgtttcctatgtaaaaggcgtggaagaaaatgttggagatacctaaaagaatcaagaggtggaaaactgctgattttacattttatggctgaagtaaatgaaataagtaacttattgacagtattaataaactattattttgtaggtagagtcatttttcaaaggaaaaagtttaagtggtgagtttatattccacaatttggagtaaacaaaatgcaataaatttttaaaatagctttgaagatacttcaaatttttacatcttttcttttgtaacagttaccacaaagatattctggaggctagagtaggattgttaaatactactgttaacctccaaagtactatagtacagacattgtttccagttctgaccttttgaagatattatagaccagtaatgaacagatttggttgtaaattatttaagtcactgaagatgtcatttatcttcattcacaagttggggcaaattcgagttacctaggaactggaaatgttggtgggagattgtttattgtttgtttagatgtttttccatagtatggtgtccatttgttttttaagggaaattttttgtcttccttaaggaattcctatcactcagagaattttagccattctggttctagtctaacaaattattcatctaataatttgacattaagaaaactataaataactggtagaaggaaagtgctttgcacttcagtggattgaagacttgactttgagagtaagtccaaaaacatatatgatgtttctcagtgataagagtaaaaagtaatgaatcctgagagttcttaaacagcatgctacttggcaagacttcatattttttagttacaattcttccactgtttaactccagtttgaaatttgaaatctaatatgtagctaaatctgtgacttgtaaaactctatgcataatttttcctaatcagtggaaataagaataaaagaaaaaggtaaagttaattttttttctaagtctacatcctatctcttgattcagttgcctgaagaagctgggtaaggagattagtcttgttattgattcttttatgtgtcagtgccatcttaatctcttcacatggtacactaaatgctgcctataacccatcctcatcttctttactcatcattgctttcttcaaggaaggtcttgatactgccctcgtctacctcactatccgctagtctagatagtgactctttggaaaattggtagcctctgaatgagttatccaacttctgcttcctcacattggccactttgcataggttcgggaacttagcaggttttaaatcatcatgcccatggaggtgaaatactttgaggaatgggaacatctcttcactgtgtttttggatcagccttctctcaaccgccaagaaatgcatgatttccctgccaactctaggaagtagtgctgcatgattgaatcattatttgatgaattctttcattgtaacatagggagtcattttcaaaaaggtagatatgaacttaaattaaattgacttatgaatgctttgcctgtgggcccaacagtgtcatgaccctccaattgaaacatagcatgaattatttttatgtcgagttcttgaactgctaatcaggtgtgtgtttccttgaagtccagagcaggatccaggtcagatgaaggaggtggtatgcctggcttaactgctgaaaatagagcattgaaactcttcacaatgtgctgcattgggtttctgcttggctttctcactgaaaagtaaattggggaaaatgctgcttttactattttgcattttatagcaacattaacagtcttttcccagtcaggtgctgtccagggaacatgtttcccttgggaggtctgaacagagtgacctggcttgatgtatttcctgagctctagtaccatatcatagaattagttaaatgtagtcaacagcaatgtcagaacaattgacattgtctttccaagagtgaatgcattggctttcggaactgctactagagacatacatgaggcagcgaacacatctttaggtgggggcaaggctatatctgattgacagagatctctgatctctaatgacatattgctattgtcctattatgtttaaatttgaacctaaatcacttgagtgttatgagtgatggctatataacatgctgtttggttagatttacagtgtgtttttatgttgcagtttagtttgaaacaacacttaagcacactatttctgttagtgtatatagttttcaaactaacaagcctgcgatccttgttagtgtagtgactgcctctttaggagtatggggccctagggtgtccatatatttttaccccatgggtcattctagtctaaggactactagtagaaccctcaaaaggtaattgctattatagggacttacttattggagactggtaatataataaaatattgaaggagtggccatggtcttagcaggttttagaatgaccttttaactccagtaactacttccttggtattggtatccttgatagagggaatataacatctggcagtaatctcattcaggttatactacctgactaaatttaatcatactttcatgtatttgtttcctcagttggacctaagttactgtatttgtttttcttatttttttattattgtacagtttctttacctttcaagtataaatgtgtatataaaatgtaaatacaaagaattcactaaaaaccactcataacaattactgtgtaaataaaactggtaagcagagta

SEQ ID NO: 42250 - DNA, 840 bp, Homo sapiens
tagtctctacaatattgtcagactgatctctgcaaaactcaaaagtcaaattactcttctactttaaacttccagtagctcccggattcatttaagggtagaatctaaatcctttggcatagcacttaagaccatttccaagggagtggctctaccatggagccctagagactctacatgtgtctacatgggatgcacaggcaaagcttggactgccatatgacctaaatctgggtggaatgccctgtgatcctcctaggaacatggcaagggaggaaatcttcagagaaggcttcgcgaggttgttttctcatctgcctctatcttgtggggatgctgccatgaggcggttttctgatataactcccaggttccagaggaacatgagacttccaacttaacccctaggcttccgtagggcagaactgcagctctatagccatttagctgcagtctggaattgactggccagcaatagggtgtatcacaactcttgctgaagccatctgaccccttttgtttcagtgccatccttttggtgtgtgggataaggactcatagggctgacacctttagcttctcttttcttcactatgtatataagtaataatctggctgaatctaaaattagttcattatttctttaccagctgaatctgtaagtgttagacttggacggtcctttgtgtttggcacctttcataatctgattcaatcaaagcctttaaccctgatctatttactagtctaaacaactatctcattacaaaattaacatatgatattgtgaaagtctgcttctttatctgactatccattttctgctctatacaaatacag

SEQ ID NO: 42251 - DNA, 195 bp, Homo sapiens
caaaataaaactgcaattgtcaacattagaacatcattaaaaagtttacctgtcatcatctgcctgcttcttttaatgaattatttcacatgacagaagaattttaaagtagaaatatgtagggactgtacagaaaatccaggatttagtaaacatgtgatttcagtacagggcttttcttgaactttttactcc

SEQ ID NO: 42252 - DNA, 880 bp, Homo sapiens
tatattaataaatttttttaaatgtattaatatctgctcttactgagagagttttcagcctgctgaatagtcagttttacagtactagctaaaccttcttttctttttttttttgagatggagtctcactctgtcttccaggctggagtgcagtggtgtgatcttggctcactgcagcctccgcctcccgagttcaaacaattctcctgcctcagcctccctagcagctgggattacaggcgcgtgccaccacgcccagctaatttttgtacttttagtagagatggtgtttcaccatgttggccaggctgctcttgaactcctgaccttggtgatccacccgccttggcctcccaaagtgctgggattacaggcatgagccaccgtgtccagccttgcaaaccttcttaatagaggcaggcagagagctgagaaaaactatggtaagaatgagtcattgagttcctttctgcttgttatctgttgagcaaattgatatcacatgaatagaaaagctagcttggaagtagaatgatcttttttattttttgacacattcccagtaccatcagtgtctttatggctgttccaggctacattaatgttcaattctatattctctataaatcataactcacctttgtctcatttttaccagttttattttcttgtcattggagaatttctggtattgtggtaatagagtaaatgaattcttaagtgttgaaggtttaacactacaaaggtatgtcaagtcaggttgtttctcaggttcttttttgggaggttatacttcatggtagaggataaggctcaaacgggaaattgtgacattttaataaattttaattttaataaaattttagtaaatttcagctct

SEQ ID NO: 42253 - DNA, 592 bp, Homo sapiens
tgtcaatcaagtcactctgccactcacaatcccccagtgactccctacatctctcagagtaaaagccagagtcattatttattctggcttcagtgccctatatactctgacttctgttatctccgctatctcaccttctactttcccccttcacttcattccagtgcatgaaatctatctagttcacctagattttctcctatgttatctttcagaagttttacagttttgtgttttgcatttaggtctatgatccattttgagtaaatttttttcaaaagatataaggtctgtatctagattattttttgcatatgaatgtccagttattccagcactgtttattgaaaaggccattgtttctcattccagccataatgttttctttgttgtttcttgaaaatagcagacaggttctgtctctctcccctcactagagtgtaagctcagtgagaacaaagatttccatttgttttattcactgcttgtccccagtgcctaccacagtgtctggaacatagtgaatgtttactaaatattacatgaatgaacgaatatgtgttgaggacccggccgaggttgagtcagctct

SEQ ID NO: 42254 - DNA, 808 bp, Homo sapiens
aatgagagctaagctacgggtcagcccactgaggctggcagagatcaagctacctgcccaggtccacactacaggtggactgagactcacacctcaagtgccctggagtccccataaatctcattaaggatgctggctcatctgctttggggtgattcaggctttgagggtcatagcaagcaacaaacccaggccaggctagatcagcacagaacaagattatagagtccttcccagaattgtggggcctgagactgctgtggcacttctctaagcctctgcagggaacccttctctggccccagccctctcttcctcagaattctttagttggggggtcctggcctttcagatcccatttctccggatggaggattaaaaatacctatgtcatcaaatacaagacatctttgggagtgagatgcgctatcattttgtgaattaccatggaattcattaatttgatgacactctggatttaaacagtcagggtgacctccaggttgataaactgtgaaaaatggtaatactatagtaataagaataagtgatatttattacaattaaaaagaaaaaaagaaaacgctgggaaatctctgcactacccttccttacgtgcaatgacgggggcaatcttaatcagttcaatcaatgcaagtggaaataactgaagaatgagtggttgaatacttagatttcattttgcttcaaaccgatcatctttacaagtgtttcttaattcaaggctaaaagctggggatatgggacttctgtatgaaaaacagtctttagcatcagagcacctcta

SEQ ID NO: 42255 - DNA, 388 bp, Homo sapiens
attttagtagagatggggtttcaccatattggccaggctggtctctaactcctgactttgtggcctacctgcctcggcctcccaaagtgctgggagtgagcctctgcgcccagctgaaagtggttctttttttagcctgcctgttctcattgcttttttttctgttatagatctttcttaaaaaatggaagtagaagacttctttcctttgtactcagtgaggtttctcagtggtgcagatctaccctgggggaaaagaggcaagtgagaggcttgtggaccttgataagctgctggatctagcataccccgagtggtacagcctcgggtactgcctgcttcccagagcctgtggtccccatctctcagggggcacattattcatgcc

SEQ ID NO: 42256 - DNA, 792 bp, Homo sapiens
agaaagaaaataagttccagattctagtccacttagagatatgtttcttggtaaaaattaaagctgcactgtggccaagtgcagtggctcaagcctgtaatcccagcactttggaaggctgaggtgggagaattgcttgcgcccaggagttcaagaccagtctggacaacgttgtgagaccccatctcaatttttttttttaaaaaaagctgcattgtgagtttgatccctctgaccccaaacactcctcccaaacaggtccctctctcaccctgccaccacaggtgtctttctggatctcacctctataccctcccctgcccaaggataaaaatctccacaacttagcagggcatgtgtagccttgcatgctccataggctggcctcatctcttcctgttccccacaacagtcacactaaatcacagtcttgtccttctctgtaagctcacacctcctggctgaccatcctgctactcctcctggaatactctttccctcttctctgctcttgaagttctgccttgggacttggcaaggcatcagcctccacccctagatggtgttccctgagcctggcccaaagctgagagctagggggtgtccttgctctgggcttccatgttgtacggcgcttacctagtatgagaggttaacactgttaacctctccacgggttaatcctgtatccttagcacctgtcccatagcaaacactccataagtatctgttgccaaaactgaatgaagtttcgtacccaaggtcctgatacaccacactcagaaaattgag

SEQ ID NO: 42257 - DNA, 406 bp, Homo sapiens
aataaagacttttatcatgcaggccactttatttaactgttacttaaagctcaaaatattctgagtgagataaaaggacccaggagaatactatgcaagccattaaatagaataaaatagaattataagtgctgccgtgcaaagatatctaagatgaccaggcgtgttggctcacgtctgtaatcccagcactttgggaggctgaggtgaaaggatcacttgagtccaggagtttgagaccaacctggccaacatggtgaaactctgtctctactaaaaatacaaaaattagctgggtgtggtggcgcatgcctgtagtcccagctacttgggaggtcaaggctgcaatgagccatgattatgtcactgcactccagtctgagtgacagagcaagactctgtcacc

SEQ ID NO: 42258 - DNA, 760 bp, Homo sapiens
aaactgagatgtaaggaggttaagtgacttgtccaaggtcacacgggaagaggctgagccaagattcaaagtctgacttcacagtactggttctgctctatcatgggaagtgtctcctcactgcacacacttccaggttcagacaaaccggaaaggaaacccaccatgcaggactgtccatgtgatggctcttcccgtggctccatttctaagcgcctccgaggacctcatcgtggcccaggaccgcaagccaaggccaccccagtgtccttaccatcctgggaatgggaggagtcaggcccagccttgtcctgtctgcccccctggaagccttccctgagcactggcctcttatttacccgtctttgtctctggcttgttggtatctgtcccttgtctgattagggaacgcctgaggtcaggatctttgcctccccaatcagattgtcaggcaggagtgggggtagtgcagatgctgggtcatttctacatgtgagaccaaatagtggtcctgtttaagttgatccccttgaaagaaaattctggaaaagctcctcagatgcacagatacacagaatcagaccttgggcaaagtgtgtagttgtgcttttgaagctgtgcaaccttggacaaactacttgacttctctgtgcctcagtttccttatttgtgaaatgaggggtagtcatgataccttccccatgaggttgatgggaggattgagttaatatttataaagcatttcagacagtgccagaga

SEQ ID NO: 42259 - DNA, 436 bp, Homo sapiens
gcaagtaatcaatggtatttatttaagtgctcttggtaaagataatgtgaatagagaaatctgcttatttctagcataaaattgcttattaagcaaaataatagagcactgcaaattaactagtaaaaaattgaaatctttaactttcacaccttcatttgatatttactgaatactttggggactagattatatgtaatttagttcaacttttgtttaaaataggaaaatgaactttgaaaataagtacttttaaaaatattttagaatgcaagatagttttcatggaaactttcatggaatcatattctttatattttagaatcaaggtatgttcctacttggtacttgatcaaggaaatacctaaatcaagaaccattccaaatggctgtttattaagtgtgatggtttactaatgtcaacaaaagtgaaaaa

SEQ ID NO: 42260 - DNA, 291 bp, Homo sapiens
agactgtgtctcccaaaattcttgtgttggaaacttagttcccaatgtaatgatactggcaggtgtggcctagtggggggtgtttagatcatgagggcttcagcctcatgaatggattaatgttgatatctcaggagtgagtttcctcttgctctctgtagccctctctcttgccacatgatgacttccaccaggttatgactcaacaggaaggccctcacaagatgtggaacctcaatcttagacttcccagcctccagaagtgagccaaataaatttctgttcattata

SEQ ID NO: 42261 - DNA, 428 bp, Homo sapiens
caagccccttaaaagtttgttggaattagcatctttttcacatacctgagtcttaaggttcattcgtgtttctccctggaccgtccactcctgctccaacttctcactaacaaaactattgtctgtgacctttctaacccccagaacagcataaggtacacaaacttctgctctgccttaggtgttagggacgtcattaatgcttactggaaaagcacaccccagagagctgggttttggctgtggcaggtaaaaaaatctttcagatcttgcaatgctggaaaccttaaaccttttggttttttagctaaagtgattggcaacagaatgtgacatctgaggttgcatggcctgcaatagccataattaaccacatgagctcacattttcccactggagattcagtggtcttggggtgatgaaagtga

SEQ ID NO: 42262 - DNA, 520 bp, Homo sapiens
tgaatgaatagtttaggtcatatttttttctgggagattatgaaaatcaagttatctatttttttgttttgaacagtaataaataagctagtttcgcaaactgggaatactgtttatattatgcagatgatttcttgtcatttccagcttgccaaagtaaacataagatgattgattaggattaaaatacattttctggccagttctaaaaatatatatattaggaatgctgattgtacattttcaaatcaagcaaatgtattgcctttccaattcaatacataaatgctcctgttaaacactggtgaagcatctgtttttatactttatagggagattagtggcaactctgcttgtctgttaaaaaattcatgcaactgtgtattttatggtcgactgacatatttctgtcttaattccataggaaaaattattctatgtctttaaaattgcctgctttgggtttactttacagatggtataagattagaataaagtttctcgattaattcaaaactga

SEQ ID NO: 42263 - DNA, 635 bp, Homo sapiens
aggccggcccctgatggatccccaccgactgtggctgtctcaggaacctgcatggctttcacttgcacactcatgccccgtcagacctgtgtgaattggttagtgttaaggccctaagcactcatttgcgtaatgagagtctttcacttagaaactagctcatcctgctgaccctctgggccagcatttagcatctgtacctggagcctcggctgtgggaactctggccaccggtctaggcattatcatgaggggagccctgttagaacagaggattctcaaaggcttatttcttccctctgacagtcatgaagtgggttacattcatgtaagttggaggagatttattcagtgcttgctctgaatgacgaagttggcctgtctaagggaagctcagatgccatggaatgcagttcccagcccacttcagtccctgtgaaatctgtcagcggatgccttttaaggatgcagtctaatttgtggagagtaagatataaggcttaggggtgatgaagatcacagctctgaattgaagcagattttagagctattagaatcctatgcagtgcacctatcaaaacatacatttctgatgaaagaaattttattccgaagtcaaattatagttgtttcaa

SEQ ID NO: 42264 - DNA, 1416 bp, Homo sapiens
ccgcagagctgatggcattgagatccattcccggaggggtcagctcctgacgggttcctgagccagtcttaacctgggcaaaggagatgaggagccgagcctgatgcattgtgatggccatctgcccagaattggcccaaacggacaaaagtgctcttgcaaacctttctgatgagactgagactttgaagaactttactgatgaggtacagacttccagctcattcagctcctctggaggacggcagtcctcgcccctgacctctgggagcaaactggagagggaaaagcagactccaagcttggaacaaggagacacacaatctgagcttttggactataaaaattatgaaaagaagttgagtaaaaaatggatcaactacctcaagctcaaagactctaactttgaacggcaccaaccagacaccaaacttccaacagaaatcactcgggtatcagatgaagaattgaatgccctgcagtcttattgcaccatgaagataaatttgattcatcgtagaggggattctaagaagaagacgagcagcagacataaaaagctgcatcttggattggatgtagaggcttcagagagagatgcctttagttgtactgtacccgatgaacttttgaacagaatctactttaaaaacatgaggacaacgccaaaacaggaggcagcagctaagcaacacatatcttatcagtgtccctattgtaacaggaaaagagcggagctggccctgtctgcctttctgaaacaaaagaagactttactggagtcatttctactccaagagagaatagatgaacatcttcataccaaagactttctcacccgtattggagaagcacatcaagactttcccaggctttcagatgaccccagaataatctggaaaagactgactgagaaaagtcatatcagatactctggttttgaaagatcagagacagagcagaagatgcagcgagatggaaatagtgcttgtcatttaccattttctctgccatttctcaagcgacttactctaatcaaaccagagctggtgattgttaatgataatgtgtaatgtggatagatgtctttgttgtgtatttgagtaattaccataatttctacaggcacttgggaaactaacttaagactttactatgcttccttcacagatttgaggactaagaactttcactttttttttcctattatagaaggcactgttgtagttggaatagttataaaaacttttacaaaattccaagagaactatgttggtagtttgggccaggatgttgatggtacagaagcaaagtagtatggggatgtaagagaaacttaaaaagtaataactgtctttggcgatcaaatggctatggggaattaataaatagtagatgtttgaaatgttaaaaagg

SEQ ID NO: 42265 - DNA, 460 bp, Homo sapiens
tgtgttctgaagagatcattattagtgtctggctgggagatttaacctgtctgctcctcagtttatctgctagttggagaaagcttcagaaatggccttctactttgggagccttgaaccttgaagccttcctcctatatcttataacccagccgaggttatgcaggagtcccctcctgtgcccttcgttgcattttcagtccaccttctgagggttgccaggtggaatatgtgcatgacctggaggtgtccaggctctggtggcccacaagtctgactgcacatcacagtcacctggtagactttgaatttgtttcttagggtattaaaacaaataagtggaagaagaaataaaagtggcccataatttcatggtcctgacaatcccctactgacattaaaaaaataaagcaataggtgcacttggctagagaatgcatatagtgctaactaagaagaa

SEQ ID NO: 42266 - DNA, 184 bp, Homo sapiens
cctgtactcaatgaaattttcctgtacctacccatgagtgcaccttttggcttaagctagtgactttttatgtactacagccccagtaaagagatggagaaactgggaagtaaattgtagttagggttggagagttgcctcaggcatgaaaggttgggatttgagaaatatggaaggactttta

SEQ ID NO: 42267 - DNA, 456 bp, Homo sapiens
cgcaaggctaggtggcagctgtctgtggggagcttctgtctcatttcatctgggcttgggatgaatggaaaggctcgtgcatctgattgatgagcactagcttgtagatgacagcataggccttctgcttcctaactcttgtcagcctgctccaagcactggctttccagcaagcagctatttcctcagccctttcttcttccccagtcaggcaggctttaacctaagcccaaactaaatgccagcagtattctccaagctcttgattcctatctactgattggctggcatagcctcatggagactgtagtcaaagaagagtgtttaggctctaagtatgagaagattcaaggattgtattgacaagagagcaaacatagaatttttgtacaatgcagagagatcagagaaatggaaagagacggagaccaggagagacaacaagaaaaagaagag

SEQ ID NO: 42268 - DNA, 284 bp, Homo sapiens
aagagattctcctgcttcagcctcccaagtagctgggactacaggtgcacaccatcacacctggctaatttttgtatttttagtagagacggggtttcaccatgttggccaggctggtctcaaactcctgacctcaagtgatccgcccgcctcagcctcccaaagtgctgggattacaggcgtgagccactgtgcctggctgagcattttgtttattaacagggccccccaagatgcacactgtaggtgaaaggtaatggaccagaggagaacaatgtggctga

SEQ ID NO: 42269 - DNA, 576 bp, Homo sapiens
tttcttagtttcttagtcatgtattaggtgtcaaccaagacagggaatacagacagagcagtaaagagttcagccccagactcaatcctatatgtgatttttgggcccatccataaacaatgacaaagacttgaccaagtgggtcccacagggagagctgccctccccacactagtgcatagtcctctaatggcagtttcagtaagggctgcagggccatgctcacacacagatcagcatcacttgactggtgcctcccctggaggcctctccactgtgggaccttggcagaccttccccaggcatgtttgcccaagacctccttttcatggggagaggaggaggagtcttgaagacaattgtcttccttctgattcaatactcagtgcttttccgctcccagccttttcctgaccttccataaaactgcaggagcctgttgttcagggttcctttgatagtgagacaactccacatctgtgctgacccatgtgatccttgatagagctgtttcatgaaggaaaaaaaggatggggactggaccgtcagggctttttccagtttaacctcaaaggt

SEQ ID NO: 42270 - DNA, 421 bp, Homo sapiens
ttttttttttttgggaatactagcatccctttgtatgttactaagtttgatttaaaaaagaattctatggtcaaataatcttggaaaacaatgagtaaaataaagttaaatatatatctttacggcagactcctccccatctctacctttctcctatcactatgaaaactgtcacaaattgcaaatggtgcaaaagagtaaggttttctcttactcctatccctacttgttctatttagacttataagcaaattcttttgaaagttttctcagagtctttaaaaacatgcattgtggattactaattggaagacctggtatattttattcttatttaaagtaatatttttttgtgaggatcatattcaacacctcagactgggaaacaatgttctacaacagtaagacttacttacttgtc

SEQ ID NO: 42271 - DNA, 229 bp, Homo sapiens
ctgaaaactaagtctgacagaacgtctgttggcaaaattcacgtgaaatttccctaaggcaggtggaactggttgaagaaaaccaatgttttcttggttttcagtggtacggcgtggtgattatagttaacaataatgtatacttgaaatttgctaagagaatagatttaagtattctcactacaggaaaaaaagggaactgtgtgaggtgctagatagttaattagtt

SEQ ID NO: 42272 - DNA, 288 bp, Homo sapiens
aaacagtttacaagtattttaggactattatcagctaagcactaaatcagtcatcgagaattattccatgtttttatgcagagtttaaatacaaggaatgtactcttttagataaatagatcctaaagcatgttttctaatcaagaaatgtctcaaggggctaggtgtgctggctcaacgtctataatcttagcactttgggaaacagagggtggagaatcactggagccccaggagttcaagaccagcctgggtaacatagtgaggtttcatctctacaaaaaataa

SEQ ID NO: 42273 - DNA, 783 bp, Homo sapiens
gtgtgcaaggacttgggactgccaaggtgaacacagtgatctgtgctagagctggccaatgaggaagggcagatgtgcagacctaagggactaagggacatgccagggaggaaatgggcaagatccaggtgacagagtgtcgggtgggggtgtggggatgtgaaaaggtggcttcctggagtggtctgaaggctgaggcctcggtgcaggtaaaagcagcagagcttcttgaattataatgtgcctgggagtcacctaggaatgtggttcgaatgcgggttctgatttgtggtctggggtgaggcatgagactgtgcatttctaataagctcctgggtgacctgtatggtgatgatcctcggacactccgagcgacaagagcttagatggcattctttgcctctgctgtgcttagtctatggcacactaatctgtacacacacatctctgtcccctcaatcctccccatgagcctgcattcccctggcagccctggcaaggtacacgtctgtacaatgctatctatgacccccgtgttctcttaaaggcagagggagaaacactccatcttggagccacagccttgcactttgtgtcttcacgagggctgcggcacattggccctgggtccatcaggaaaacaaaaggagctctcttcagagaccacccaacttaccatgcagccgagcctttcctgctgaagcaaccagattgccttatgggtacagggcaagggggcaagaaacccagtgcagaaagtggtctagtggctaaaaaccattt

SEQ ID NO: 42274 - DNA, 385 bp, Homo sapiens
gcatcctgttcagttgatgggtagcgtttcctatgaatacagagatatgttctgcaagccaaaataaatacgtaagtgaataaagctgaaatgaagcaaataaccagccgggtgaacaggactcagcagaagaaaccattgaggccggagatctgacttgcaagtcctgttgcatctttcagttcttgaacgtggtttgggaaccttgcctttcccttttgtcctgtgcctttgtggccatctcctgcacaaagttggttttcttttatgggccagtctaagtcctggtgttaagaatacagcaggaaacaaaaaagacacaggccctcctctccaggagctccctgtggggtcagggggaaagaccttgatcaaaataaagtgg

SEQ ID NO: 42275 - DNA, 520 bp, Homo sapiens
tctttcattcaatccaaagaagaccttcaaactcacttgcctgaggcactcataagctctaggtttttcatcctcatgaaagaaagataagatttactattgagaagtgagaaatcctgcagtaaaaactcagtgagggttatcggtttgtatcctttaactaagtcaatcctgcctttgtagaatcttaatttattattatcaacttatttgcctcttcaactatagtccataatgccaaactgattgtcatgtgttagcattactacatctaaagtataagagagggtgctgtgctctaaatgtttctgttccttcaaaattcacgttgaaatagtaactcccaaaatgattagattagaaagtgtgaaatttgggaggtgattagatcacaagggcagcaccctcatgaatgggattagtgcccttataaaagaggcctcagagagacctttgtcccttctaccacatgaggatgtggcaagaaggtgtcatctatgaaatagaaaagtggaccttc

SEQ ID NO: 42276 - DNA, 458 bp, Homo sapiens
aagccaagtgggctggtacagcagctatagccacatcccacataacttaaggaaaattcctccacaaaaggagctgaaacccaggaaaatgcattctgctcaatatcatgtaaagcaataatttactcaattaactaaaaagagagcaggcaaaattcaattcaaaagagaacccaaaacattgatgtagaaatataaaagttaaatttttttgttactggttatcatttatcaaagtttatcttattattatttccatccaagtttaacccctacttaatgcttttaactacctgtgcaggtcaattgtaccttaatgaaactaatgtttcctcaaacacgggtgagatatgctacgtgaaaaatactacattctagatgtttctgccttcctaccctaacccgtatctaataccacatagcagagagatagacaagctgctcttttatgacaacat

SEQ ID NO: 42277 - DNA, 791 bp, Homo sapiens
aaaaaaaaagaatttagtaaaaacaaagaaaagaaactgataggacatgttaggccgagcgtggtggttcatgcctgtaatcccagcactttggaaggctgaggcatgagaaccgcctaaacccaagaggcggagtttgcagtgaggcaagattgcgccagtgcactccagcctgggcaacagagggagactctgtctcaaaacaaacaaacaaaaacatgttaatggcagtgtgccttatttcatccagcacacaaactcaagcacctcatcatttcttatcttttttttttttttttagatggagtcttgctctgttgcccaggctcgagtacagtggtgcaatctcggctcactgcaacctccacctcctgggttcaagccattctcctcctcagctatttgtgggactgaagcgatggcttgagcctgggagctccaggctgcagtgagcagagatcacaccactgcattccagcctgggcaacaaagaccctgtctcaaaaaacaaaacaaacaaacaaaaaaacccaaaaatgtatatatatatgtatacatatatgtatgtgtgtatatatatttcaaatacataacataaaagcacctttccaaaaaatattagattgacaatggtgtattaaaataaacaatattctaattttcccagtcctttctgagtatatcagtaaacaagctgtctctaagttaaagtgtaattgcttttaattgatagtcatttgctaaaccttggcaaagtctttttggcatactgtaatcacccaacgggttct

SEQ ID NO: 42278 - DNA, 543 bp, Homo sapiens
cgtcctcctcggcctctcaaaatgctgggattacaagcatgaggcattgctcctggctctgattttttaaatctaatttagcattagaacctagtgtcacagggatgggtgttaacacatgtacttgaatagaaaaatttcagggctggacgtggtgactcatgctgtaatcccagcactttgggaggctgagatgggagaattgcttgagtctgagagtttgagatcagcctgggcaacaaagaccctgtctcaaaaaacaaaacaaacaaacaaaaaaacccaaaaatgtatatatatatgtatacatatatgtatgtgtgtatatatatttcaaatacataacataaaagcacctttccaaaaaatattagattgacaatggtgtattaaaataaacaatattctaattttcccagtcctttctgagtatatcagtaaacaagctgtctctaagttaaagtgtaattgcttttaattgatagtcatttgctaaaccttggcaaagtctttttggcatactgtaatcacccaacgggttct

SEQ ID NO: 42279 - DNA, 298 bp, Homo sapiens
atatacaaaattagtcataaaaagatgcatgaccacagatgtgaagaagattaaatgattactaatggatgctgtgttcaactcatgctattaaattgcttctgtttctaattttatttgaaattttatttgaaacagatgcctttctaggaaagtatgccaaatgtaacttaagatgaggtaaaaaagaaacctgaacaaaccggtaactgtggaagaaattgaaaaagttctcaaagaattatctcttcaaatgtttctagatctagatggtcttgcaggaaggtgttttaaactt

SEQ ID NO: 42280 - DNA, 579 bp, Homo sapiens
  misc_feature (568)..(569): n is a, c, g, or t
  misc_feature (571)..(571): n is a, c, g, or t
  misc_feature (573)..(575): n is a, c, g, or t
  misc_feature (578)..(578): n is a, c, g, or t
cctcttctcccttcccacgacaagccatagaattacaagcacaggtataaatatctttcagctgattaaatggtgtcctgccaaaagaagatttgttttgagtataatttcttggatgctcttctaaaggagaatgatctttctttagaggcctccatggaaacgcagtgttacattttccattcttttagagaagggtaacaaaagaactatcttcctgctgaaatcaagaaatcgagggttggaggatcctaagctgtccagaaccctatgactgagtcagctggtaattcctggtaagaacttggcgtttttgaagccgcctgggccggataagtcaggaggtccaaagcagccttccagatcaagtcctgcagtggaagcacctcctcccatcctccctccaaatcaggaaatgtgctcagagctaggtttggggacaatttgaacagacagtctttgttccctgcccagcacattcccacctggtgggagctaaaagccgcagcagggaagggtctatccctctgagggtcgggaacataacggggctgcagcgttcggcccnntngnnnttnt

SEQ ID NO: 42281 - DNA, 1068 bp, Homo sapiens
aaaaacaacatcaaacagaacatagtaaatatatctgtaatgtatacttttttctagtttgggactgcatcatccacatagcttcttttctgtcctctagacaagggctccaggagtaagtggcagatttggttctgagagctaagctcaccaacttgtctccccctcaacagatgagggaagggcagggagcccgttcagtgactcctggcgctgcagaatcactcatctttggaggtgagcagagagagctctgaggagtttccttcttgcaactcaggcggagctttctttaactcaggagcagcctccattgctcccgccaacccctcaccatggccccttgtccccttgtcccaaccatagcatagagatgacaagagagaggcagtcctatttctgagactggaccaattaaaatgactgcactggctcaaaggactctgaacctgtcttgtcctgggtcctccagttgttggaagccactcttttccccaaccatgctgaaatgccacctttaccacacactgatgtcttacatagacttagatctatttctggaacttctcttctcttcgcttacttgggtgtctcatctggcaccagccatacaattttaactattgtcaatttctaatgtcttattatgtggtgggatgagtcccttcactcttcttttacaaaatttcctagttattctctcacatctattcttccacataaactttaaattgtgcccagtcctccaccccctgtcccattcccacccccaaattctgggctctgtcattccctgtgccatcatcttccccccattgtaattactgtccactcagggctgtgaaatagactatgttctataaagagggacaaaaagggcatcctgatcttgagagaagcctgctgttcctcccatcatttcacctgccccctaagcccaggagttgtcatgagaggtcaccaggcccccactcaatctcagcttgggaaccaaagtcacccaccttggttgtgttggggtggacccgccatctgtccctggtccagacgagaaagaggagtctctcc

SEQ ID NO: 42282 - DNA, 162 bp, Homo sapiens
gcatatgcagcaaacgaataagtctatctagctttctggattctgagaattgtcacctttcaggccagtttccaattgttcattcacttcactaagagctatgtttaagtgcctgtgtgtgtgccagggaccatactaggcactaggctatggcagtgaagc

SEQ ID NO: 42283 - DNA, 427 bp, Homo sapiens
gttaattcttactcattcttctaatttagctgagatgtcaacttcttttagaaagccttaattcctccttccccagactactctcacagcagagttatcagttatcactgtacttgcctcatgacgttttgtttacccacctctacccaaaaggaccaagttctttgagggcaaagatttctaccttagctcttcaatcctacatctagcactgagtgtagcagcacacagtggatgctgaattaatgaattcataaacttgccacatctattgaagcctcaatataaatggcaaaatgtggcaatcctatttatttatttatttatttattgagatggagtctcgctgtcacccaggttggagtgcagtagagcgatctcggctcactgcaattccagcctggcaacagagcgagactcaatctca

SEQ ID NO: 42284 - DNA, 148 bp, Homo sapiens
ctaccttgataaatatttcaaatgcattgaaaagaaactgtactataaatgctgtttggtgagtgttctgtaagtgtcagatcaaagttgttgctactgtatttctgattttctgtatgcttgcgttttttttttttttttttttttg

SEQ ID NO: 42285 - DNA, 529 bp, Homo sapiens
taaatatatagaaatcctaaagggtccctgtgacataagaaatacacatttggtctctgccccaggttcctggcacagagcttctaaaatgctagtaacttcctgagtggtaggggtgaggggaacatcttttgttatacataagaagcccttttcaaacagatctgagtttatgctaatgatgtgactggcagaggatgggggctggttgccagagaaaccaaccatgtgattagaaggttgaaactttcagccttatcttcctaccgggaggggacaggggctgaagactgagctcatcatcaatgatttaatcaattgtgcccatgtaatggagcctccacttccaaacgaagggtttcagagagcttctaggttggtgaacacatccatgtaccaggaggtctaccccactccacggggacagaaactcttgtgtaggggacccttttagatttcattctatatacctcttcagctggctgttcattttataatcaaccaataaatgttaagtaaagtgtttctc

SEQ ID NO: 42286 - DNA, 374 bp, Homo sapiens
tgatctctttttttttttgagatggactctcactctgtcgcccaggctggagtgcagtggcgcaacctcgcctcactgcaacctctgcctcctgggttcaagcgattctcctccctcagcctcccgagtagctggtgggcatgggcgcctgccaccatgcccggctaatttttcatatttttagtagagatggggtttcaccatgttggccaggctggtctcgaactcctggcctcaagtgatcctcctgcctcagcctcccacagcactggaattacaggcatgagtcactgttcccggtccagctgaggattttgacagggattggtttatgtctatatgtgaactggggagtattggaatattgacatcgt

SEQ ID NO: 42287 - DNA, 382 bp, Homo sapiens
taaaaagttgtgaggactgggggaggccagctcagccccaacaacttctgagcctccatggtctggctggctgactctggcctggacagtctctactcctaaggcatttttatgactgcctgaaacaaaacaggccatttccaagactggcactggttcagaacaaccacaagagatagggatggctggagtttcagtgctgcagggagtttcaagttctgcaagggaatctcctgcctagcccatgcaagtgattatacacaaggccaagcacagaatgggttcagctaccttctgagcacacatgtagctgtgtgtggggctgcagggctgcagggctggggagcatccaggaggcccaacctattacgcaggcccttcc

SEQ ID NO: 42288 - DNA, 386 bp, Homo sapiens
gagtaggaatgtgttcggggtggcaaagggttgctagtcatataggctcgtgttttgaggcagaatttaaacaaggaggtaaagcccaggccctgacacaagggctctgcactacagggaggctgagctgggcagcctctgttcttcccaagcctgcatcttcatcttgatccatagtcccacagtcttcattctcctcaactctgcacaaaagatcatataaaatacttcatgaaggctgggctccatggctcacgcctgcaatcccagcactttggaaggccatggcaggtggatcacttgaggtcaggagttcgagaccagcctggtcaacaaggtgaaaccctgtctctgctaaaaatacaaaaattagccaggcatggtgg

SEQ ID NO: 42289 - DNA, 375 bp, Homo sapiens
tgagatggagtcttgctctgtcgccaggctggagtgcagtggcgcgatcttggttcactgcaacctccgcctcccgggttcaagcaattctgcaacagcctccagagtaggtgggactacgggcgcctgccaccacgcctggctaatttttttggtatttttagtagatggggtttcaccatgttggccaggatggtctcgaactcctgacctcatgtgatccacccgccttggcctcccgaagtgctgggattacaggtgtgagccactgcacccagccagcagaagtttaaaatatataaattacatgaataaactcttcatgggtcagggattgatctagatgtcaaaaggaacccaaatatgtacaaaaac

SEQ ID NO: 42290 - DNA, 332 bp, Homo sapiens
aaacacatgcaggattaaaaaaaaaaaaaaaagaaatccatacctagaaacattatagtgagactgtaggaaaccaaagacacagagaaatatcttaaatacaactgctatggtttagatacttgttccctccaaaattcatgttgaaatttaatccccatgtgacagtatcgagagggggtctttaagagataatcgggtcatgagggctctgccctcataaatggattaatccatttctgaattaataggttatggattaatgtgttatcacaggagtgggactgtgactttataggaagaagacagagctgagctagcatgctcagccc

SEQ ID NO: 42291 - DNA, 421 bp, Homo sapiens
actggaagggagcatgaagaatcttctgaggttatggttatattgacccagatcaaaaaatccagatatacatgtattgacaatggaaaaacacacacgactcaatactgatgttgtgtgcactcttctgtatttttttgaaatttttattatcgaaaaagaaaaaaatatcagtctcagtccactgctgaagtcttcctttgtttcagaaccctcctctgatgaaaatgaacttagatgtacatcctagaaaggcaatatggcatgccttgggattacgaattaactttagccaagaaaacaaggaattttaaatatctcatattcatctgctatttttacatggccgtcatgggtataaaatgaataaagaactgcaaagataaagggaggagaagaaaatgtggctaggaagtatctg

SEQ ID NO: 42292 - DNA, 280 bp, Homo sapiens
aaatacggtgtagtggtttggtgcacctactttggagacataaaattgagaattaattgatattatttatagaaattatcacagtactcaaataaatagtaagcaaacacttactggttgtttttattgtattatctttgtaatttaagaactaaaaggagtcacaagaagttagcataacgagcatctgacagaaaaattaactgatagaataagagataatggttcatgcagacttgaatcacatggcttattaaatcaaaggtacattaatgcttaa

SEQ ID NO: 42293 - DNA, 461 bp, Homo sapiens
caaaactagagcttttccagtccaattttaaactaattccatctcacacaaaacaagtgcacactatatcaaaatttgggggataactgctaaagcagtacttacagggaaatttatagcctatattattatacaagaagagagttcacaaataaatgacagttcattttaagaaattaggaaaaccagccaggcatgctggctcatgcctgtaatcccagtgctttgggatcacttgaagccaggagttcaagaccagcttgagcaatacagtgagactccatctccaaaaacaaaaacaaacaaaaaagttagccaggtgtgatggcacgtgcctgtggtcgcagctacttgggaggctgaggattacttgagcccaggagttcaaggttgcagtgagctatcatagtgccactgcattctatcctgggttgacagagagagaccctgtctcaaaacaa

SEQ ID NO: 42294 - DNA, 335 bp, Homo sapiens
taatatcacatgagatgatagaaaagttacgtattaatgttgtcctgctgccttcacctatttcttattatatgctccattcaacccagaatttatagatttgaatatcttaattttaattttgaaggataaaacatgtatttatgaatttgttttaaatggctaaagggtaacattcagcagtatagcactggaacaatttccatttggtttaaaaaaacaacaacatatatgtggaacacagttcacattttttttattttgcgcaacttcgatgctttcaacactgcatacattaccaaaagcacaaaaatagatgctgtactatcaaattg

SEQ ID NO: 42295 - DNA, 349 bp, Homo sapiens
aaatgaaaaaaactccctttcccagtatcagaatacactgtaaatcctcattatttaaaacagtatagtagttttataggaagagaaaattatttctatggaacagactatgtagttcaaaaatagacttgtgtatgtgaataatcagttggaaaaaattgaggattcaataaattataaaattggttatttagtatccatttagaaaaaggttagatcattgtatcatacaatacacagaaagtttattacagataaactgcttcagcggaaaccataaaacgtcaactagcttctaggattttttctttaagattatggtgggaaaagcctttcttagcataataaa

SEQ ID NO: 42296 - DNA, 1070 bp, Homo sapiens
tttcaaaaagtcagatgactaagggccttggagcgtttttgtgtttgagatattagctccggtcaattccaaagagtaccagattctttcaaaaagtcagatgagtaagggcgctagccagttaagtgaggcatctcaattgcaagattttctctgcatcggtcaggttagtgatattaacagcgaaaagagatttttgttaaggggaaagtaattaagttaacactgtggatcaccttcggccaagggacacgactggagattaaacgtaagtaatttttcactattgtcttctgaaatttgggtctgatggccagtattgacttttagaggcttaaataggagtttggtaaagattggtaaatgagggcatttaagatttgccatgggttgcaaaagttaaactcagcttcaaaaatggatttggagaaaaaaagattaaattgctctaaactgaatgacacaaagtaaaaaaaaaaagtgtaactaaaaaggaacccttgtatttctaaggagcaaaagtaaatttatttttgttcactcttgccaaatattgtattggttgttgctgattatgcatgatacagaaaagtggaaaaatacattttttagtctttctcccttttgtttgataaattattttgtcagacaacaataaaaatcaatagcacgccctaagaaaaatcagggaaaagtgaagtgtacctatttgctatgtagaagaggcagcttacttgaaaatcagcagcaatgttgtttttagagtctgtaataagtaataaactcaaaaagacacattctataggaataagggcttcacagatagagctcattttttaaaaatccaatttgtacattagactaaacgtgaaattatctcttattgtaatggtggaaaggtggttattcccaaaagctcaatctcaaagaaatgtgtttaaatgaaaaaaagtaaataattgcattttttaatgaccgtgggtctgtgaaaaaaataggaaatattttaaagagtatgttctttcattatcctctgttattacttgtctacatttttattctgccaagaa

SEQ ID NO: 42297 - DNA, 1355 bp, Homo sapiens
  misc_feature (107)..(107): n is a, c, g, or t
  misc_feature (113)..(113): n is a, c, g, or t
  misc_feature (117)..(117): n is a, c, g, or t
  misc_feature (119)..(119): n is a, c, g, or t
  misc_feature (122)..(122): n is a, c, g, or t
  misc_feature (126)..(126): n is a, c, g, or t
  misc_feature (187)..(187): n is a, c, g, or t
tctataacagttggtatcaggagaaagcagagttcaggctttgctcgtgatctacgatgcatccactctgagagccggggtcccatcatgtttcatgtgtccctggntctggnacananttnactntcaccatcagcagcctgcagcctgaagattttgcaacatattactgtcagcaatatgatgntctcgtgttcactcactttcggcggagggaccaaggtggagatcaaacgtaagtgcactttcctaatgctttttcttataaggttttaaatttggagcgtttttgtgtttgagatattagctccggtcaattccaaagagtaccagattctttcaaaaagtcagatgagtaagggatagaaaagtagttcatcttaaggaacagccaagcgctagccagttaagtgaggcatctcaattgcaagattttctctgcatcggtcaggttagtgatattaacagcgaaaagagatttttgttaaggggaaagtaattaagttaacactgtggatcaccttcggccaagggacacgactggagattaaacgtaagtaatttttcactattgtcttctgaaatttgggtctgatggccagtattgacttttagaggcttaaataggagtttggtaaagattggtaaatgagggcatttaagatttgccatgggttgcaaaagttaaactcagcttcaaaaatggatttggagaaaaaaagattaaattgctctaaactgaatgacacaaagtaaaaaaaaaaagtgtaactaaaaaggaacccttgtatttctaaggagcaaaagtaaatttatttttgttcactcttgccaaatattgtattggttgttgctgattatgcatgatacagaaaagtggaaaaatacattttttagtctttctcccttttgtttgataaattattttgtcagacaacaataaaaatcaatagcacgccctaagaaaaatcagggaaaagtgaagtgtacctatttgctatgtagaagaggcagcttacttgaaaatcagcagcaatgttgtttttagagtctgtaataagtaataaactcaaaaagacacattctataggaataagggcttcacagatagagctcattttttaaaaatccaatttgtacattagactaaacgtgaaattatctcttattgtaatggtggaaaggtggttattcccaaaagctcaatctcaaagaaatgtgtttaaatgaaaaaaagtaaataattgcattttttaatgaccgtgggtctgtgaaaaaaataggaaatattttaaagagtatgttctttcattatcctctgttattacttgtctacatttttattctgccaagaa

SEQ ID NO: 42298 - DNA, 869 bp, Homo sapiens
  misc_feature (86)..(86): n is a, c, g, or t
tagaggatcccctggatcgaggtgcagatgtgacatacagatgactcaaattcccccttccctggccgcctctgtcggagagaggntcaccatgacttgccgggccagcgagggaatcggcgcctttttaggatggtatcaaaagaagccgggagcagcccctagactcctcgtatatggtgcgaccaatttgcagagcggagtcccttctagattcagtggtcgtggggttgggagcgatgtcagtctcaccatcgagaatctccagccttgaagacttcgctcgtgtatatctgtccagttctcttcttccctttttcgtacggccccgggaccactctggaccacaagcgaactgtggctgcaccatctgtcttcatcttcccgccatctgatgagcagttgaaatctggaactgcctctgttgtgtgcctgctgaataacttctatcccagagaggccaaagtacagtggaaggtggataacgccctccaatcgggtaactcccaggagagtgtcacagagcaggacagcaaggacagcacctacagcctcagcagcaccctgacgctgagcaaagcagactacgagaaacacaaagtctacgcctgcgaagtcacccatcagggcctgagctcgcccgtcacaaagagcttctacaggggagagtgttagtgattatctaactgaagtaattcattctagggtagatggctgaattcccttaaccctcccaaccattttactaatttttttgtcaaacatttatcactgtatctgcccaatcattttaataaagggactcatttccagttggcagaatgtatgtatatgtgagaaagaaatatttgaaatggagatctcacaga

SEQ ID NO: 42299 - DNA, 701 bp, Homo sapiens
attagaggatccggaacgttacttgcagagtggagtccctcatgttcgctggcagtcggtctgggactcatttcaccctcacgatcgcagtcttcaagttgaaagattcttggactttactttttgtcacaaggttatgcggcccccttcaccttcggcccggggaccacagtcagtgtcaatcgaactgtggctgcaccatctgtcttcatcttcccgccatctgatgagcagttgaaatctggaactgcctctgttgtgtgcctgctgaataacttctatcccagagaggccaaagtacagtggaaggtggataacgccctccaatcgggtaactcccaggagagtgtcacagagcaggacagcaaggacagcacctacagcctcagcagcaccctgacgctgagcaaagcagactacgagaaacacaaagtctacgcctgcgaagtcacccatcagggcctgagctcgcccgtcacaaagagcttctacaggggagagtgttagtgattatctaactgaagtaattcattctagggtagatggctgaattcccttaaccctcccaaccattttactaatttttttgtcaaacatttatcactgtatctgcccaatcattttaataaagggactcatttccagttggcagaatgtatgtatatgtgagaaagaaatatttgaaatggagatctcacaga

SEQ ID NO: 42300 - DNA, 805 bp, Homo sapiens
  misc_feature (164)..(164): n is a, c, g, or t
  misc_feature (170)..(170): n is a, c, g, or t
  misc_feature (174)..(174): n is a, c, g, or t
  misc_feature (176)..(176): n is a, c, g, or t
  misc_feature (179)..(179): n is a, c, g, or t
  misc_feature (183)..(183): n is a, c, g, or t
  misc_feature (244)..(244): n is a, c, g, or t
  misc_feature (257)..(257): n is a, c, g, or t
  misc_feature (276)..(276): n is a, c, g, or t
  misc_feature (278)..(278): n is a, c, g, or t
  misc_feature (282)..(282): n is a, c, g, or t
tccggtgttcctttgtctcagggaaaagcacctctctgcaggtcagtcagagtcttacagcaatccttggctggtacagcataatctggcaggctccaggctcctcatctattgatgcaacccgaagggccatttgcatcccggacaggttcagtggcagtggntctggnacananttnactntcaccatcagcagcctgcagcctgaagattttgcaacatattactgtcagcaatatgatgntctcgtgttcacnttcggccctgggaccaaantngatntcaaacgaactgtggctgcaccatctgtcttcatcttcccgccatctgatgagcagttgaaatctggaactgcctctgttgtgtgcctgctgaataacttctatcccagagaggccaaagtacagtggaaggtggataacgccctccaatcgggtaactcccaggagagtgtcacagagcaggacagcaaggacagcacctacagcctcagcagcaccctgacgctgagcaaagcagactacgagaaacacaaagtctacgcctgcgaagtcacccatcagggcctgagctcgcccgtcacaaagagcttctacaggggagagtgttagtgattatctaactgaagtaattcattctagggtagatggctgaattcccttaaccctcccaaccattttactaatttttttgtcaaacatttatcactgtatctgcccaatcattttaataaagggactcatttccagttggcagaatgtatgtatatgtgagaaagaaatatttgaaatggagatctcacaga

SEQ ID NO: 42301 - DNA, 888 bp, Homo sapiens
ggctgggcccccacttacagagtaaggggacacaacggacccacatgggcacctttgggacaagagattttgcttgagacagctcccattgcatcaggagtccgtgtctgtgtacagggtaagccgaccccaatcccagagaccacagggtcgggggaaggcccatgcaggctcagtgagcaggggtggcatccgaaacccggccagcacgctggaaactgcctgacacctttttggctttggcagaaagccagtgggcattgatgaacccattggccttgtctagggctcctcagtgacaagcagggctgcctccgccgtactgtggagcaaggcaggccaagccctaggaactcctgctggagacaaacgaactgtggctgcaccatctgtcttcatcttcccgccatctgatgagcagttgaaatctggaactgcctctgttgtgtgcctgctgaataacttctatcccagagaggccaaagtacagtggaaggtggataacgccctccaatcgggtaactcccaggagagtgtcacagagcaggacagcaaggacagcacctacagcctcagcagcaccctgacgctgagcaaagcagactacgagaaacacaaagtctacgcctgcgaagtcacccatcagggcctgagctcgcccgtcacaaagagcttctacaggggagagtgttagtgattatctaactgaagtaattcattctagggtagatggctgaattcccttaaccctcccaaccattttactaatttttttgtcaaacatttatcactgtatctgcccaatcattttaataaagggactcatttccagttggcagaatgtatgtatatgtgagaaagaaatatttgaaatggagatctcacaga

SEQ ID NO: 42302 - DNA, 489 bp, Homo sapiens
gcaaagtcaccagagtctagatccgggccaaacaccctgaatttggggctagcccaggctggtcagtgggccccagttggaccccagaaaggtcactataaatggtcagccttggggagagggcctgccagggtccaaggattcacaggctgagttgtcctggtatcattacaagagcagcacttactgggcgttcaccgggccaacagctccacatacaatgccccttccattgcacaataagcccgtgaggcacatatgattatttcccatactcatccatatttggaaaaactgagccttggcattagtggtgacagggctgtggcagagcctgtgcacccatccaccaggccagacaaggccctgggcaggaggagaggaaaagaaaggggaactgctcccagcagagcctcgttctatgctgtcgggctgtgcttcacccaagttatttcattttccccgacttgtctctcagagagttgaggc

SEQ ID NO: 42303 - DNA, 976 bp, Homo sapiens
attgatggatattctctcattaacccattcctagcttcctagcacataagattaccatgactgaccacaagcaattattttataaattattatgaataactgcaaatgttcccccaagaaaacatttcaggaaggactttgctgtcttgatttccttgcttgacaccagcccagctgccaccccagctccagggaattccttccactgcagggaatttttctgctagtcttccagggcttatctttgtaaatggacgatactccagtctccattccctggagctcttgcctcttcctgttggggtgcacccctccagtcacaccaagcaaagcttccttcctttcttctgtccctctcacttgccatggctccatggttacaacatacacccttgacacttacctgaaaagaatctctgagtctataagatgctcagacatgactctcctcatcattaaggaacttagtttagatgatttctctgattgtttccagttctaaaaaagtattattttatatttaacaatagtatagcatcaacttacatcctaaaatccttttggttccttgcaaattgtctttttgcctcctttataacatcacggtatgttggagcaggtagtgtgctaggcttattattaaggaatgattttcaattaggaacatttgggaagtaaacagtacccttcacagaggaaccaaggggaccgtgtgaccttcacttttcagtaatgaagagtctcaagtataaacatgaatattatgtctggagttacactcagaggactgaaagaagaaaacatcactttaaacttgtgtcccattatctcaaccacagcaaccatagggcactatgatttaatagtttcataaatcctgtaattaccttttgtatgtgtttgttttaaaagcagcaacttgttaaaggtaaatattaaaaattaccaaaatattaaaaatgtaccaaaattcatt

SEQ ID NO: 42304 - DNA, 364 bp, Homo sapiens
gaaagattgaaagactgctagatatctgatcaatatgcatcagcagctaattagaaaatataataatgatgataataacagtaataaacccataattaaaaccaacaaaaatgctttgagataagaaatatttatcaaaaggaagagatcatgtcttttgtgggaacatgagtggactggaggctattatcctcagcaaactaacgcagaacagaaaactaaatatcacatgttctcacttataagtgggagctaaatgatgagaatatacggacacaaagaaggaaacaacagacactggggcctacttaagggcaaagggtgggggggggagaggagcagaagagacaactattgggaactg

SEQ ID NO: 42305 - DNA, 455 bp, Homo sapiens
gctatgttcccaatgcatcctccttaaattctccttatgttgaaatcctaaccgccaaaattatgttatttggaggtcggcctttgggaggtaaacaggtcatgaaggtgggactctcttgaatgggattagtgcccttataaaagactttttgcacttactatctaccttcccctctccttctacccctcattttactcagagcctgagagagctgcttatccttttgccatgtgggatcatattaaaaaggtgtccgttgtcagggaagggaacatcacacaccggggcctgttggggttagggggctaggggagggataccattaggagaaataggtaatgtaggtgacgggttgatgggtgcggcaaaaccaccatggcacgtgtatacctatataacaaaccagcacattctacacatgtatcccagaacttaaagtataatttaaaaaa

SEQ ID NO: 42306 - DNA, 491 bp, Homo sapiens
ggctcaagcagtcctcctgccttcgcctcccaaagtgctgggattacaggtgtgagccaccacaccaggccccaaaatattttcaatgttatatactcttggtatctgtattttcaccctggaatagaggttccacaaaggtagtcaaggttatggttctgctacctcatcctcattttcattgtttattattattattagctaatacttatatgctacttactatgtactacactgtactaagcatttcatgcttattagatcatttaatcttcaacctaatgagataggtgtatatatatatacagatgaagaaactgaggcgcagagaggctaagtgactggataaaagtcatacagctagtacacggtagggctgtggtttggacccaggcattctggttccagaagactgcactcaggactattaatttttaaaagattgaacacggtagggaaaaaaaaaaaacaaacccacaaatattttaacc

SEQ ID NO: 42307 - DNA, 490 bp, Homo sapiens
tagctgatcagaggatcccagtcgtacgaatgagctccccaagctcccaagggagtataggcgtgagtcaccatgcctggccagaaaccttattttgtggtagttgttcagctataccttgcagaattttttatgtgaatcctcagtaaatcccaaacagcttctctcagtactaacacatggctgataaatggtactgaattctttgtaaatctcaccaatctcaacagaatttctggttcggggtaaaaaaaaaaatttccgtttactttctgtagaaaatacccactcagaatccactctctgttatgtgtaacaatggacagaaattttactgttgttggtacaaaacaatgactcatcccaaatcatctcttggaattaagaatgtaatcgtaatacactcatactcatatgtacgtgctcagtcgaacggactgcagtccgttcgactgagctcgtgatgtgcccgcctgggcctcccaaagtg

SEQ ID NO: 42308 - DNA, 301 bp, Homo sapiens
atgccctctatgctccaatataatggtgctgcctggcatcattgaaaacattaaaaaaacttttctaaaaagtatttgaggactgggcatggtggctcatgcctataatcccaacactttggaaggctggtctcaagcagtccttctgcctcagctccccaagctcccaagggagtataggcgtgagtcaccatgcctggccagaaaccttattttgtggtagttgttcagctataccttgcagtaagccaagatcgtgccactgcactccagtgtgggtgacagagcgagactccatctc

SEQ ID NO: 42309 - DNA, 627 bp, Homo sapiens
tttttaagagttggagtctctttctctctattgcgtaggctggagtgccacagtcgttgggactacaggtactgccaccatgcctaattaaaaaaaattaaaagatggggtcttgctgtgttgtccaggctggtcttgaactcctggtctcaagcagtccttctgcctcagctccccaagctcccaagggagtataggcgtgagtcaccatgcctggccagaaaccttattttgtggtagttgttcagctataccttgcagaattttttatgtgaatcctcagtaaatcccaaacagcttctctcagtactaacacatggctgataaatggtactgaattctttgtaaatctcaccaatctcaacagaatttctggttcggggtaaaaaaaaaaatttccgtttactttctgtagaaaatacccactcagaatccactctctgttatgtgtaacaatggacagaaattttactgttgttggtacaaaacaatgactcatcccaaatcatctcttggaattaagaatgtaatcgtaatacactcatactcatatgtacgtgctcagtcgaacggactgcagtccgttcgactgagctcgtgatgtgcccgcctgggcctcccaaagtg

SEQ ID NO: 42310 - DNA, 234 bp, Homo sapiens
ccttccccaaattagattttttatacctcctttcatgccctagttttaaaaattgttttcccaaatttttattttgaaaaatttcagacccaaagcaaagtagaaagaatagtatggtaatgtctttccctccttgcctaagtttaccaattgttacttgatatagatatgtaaacctttttcccctaagccttgtgaaaggaaatcacagacttagagacacttaatctctaa

SEQ ID NO: 42311 - DNA, 379 bp, Homo sapiens
gtatgtccaaacaagtctaaaattactctttcaataactaaaattcttttttagtggtacataaaataactatttgtcttacaatcaatggtgtctaagagtaaataaaaaggataacgaaatactgtagcagcacctactaatgcagcactgactctcgtccaggcactcttctgagtgctttgctggtcttcctcacagtaaccccatgaagtaggcacaattattaccctattttacagatgaggaaactgagccacaagtgaagccattagtaagtgctagtaagcggcagagtcaagattccaagccagaccctctggttcccaataccccgctcctacccaccacgctacactgcctgcctagtgaacagacc

SEQ ID NO: 42312 - DNA, 354 bp, Homo sapiens
ccccaggaatcactgccccagtgcagcaggagaagcgccttccctcatgccctaagcctgccttttctgttgtcccccagctcctgggccaggtggagccccccctgaagctggtttctacctgccctcgcctccccactgcagcccacagttcggctttcagggctgaacccagagcccagaggatggagaagccagaaagcggggaggtaagggagagggcgtctaggcacaccacagaggtgattgggctgtgacggggacaatccgcacaacacgagctaagctcacacccctagggagtgatttttccggactgcccccatcccaatctccacctcctctgctttactt

SEQ ID NO: 42313 - DNA, 504 bp, Homo sapiens
aattcttccaccagcatgcataattgagagagatgtgttaattacccttacatgacagctggtaggacttcctagacaaactctgagaggagtattgatctggaatcattgtaagtcactgtactgtggtgatataaaggtaaagccctcgcaacagttttgaatgagcaggtcaatgtgtggggcctctgtgaactggggcctgcaggcatgtggcagccagccagtgttcgtccagcaacaaaaggaccagtgtggttctttgcatgacattttaatgagtgatacaaggaaaatcccaaagatgtaatcccttttattataatagctctatggctcaaaatgggttgttatcaaagagaaacacaattccagaaagtgaggataagatttttgtttttatcccctgtatctgtgaacagcattctcatcattgactgttatttaagggaactgagtgcacagcgtttgactcagcactgtggacattttgaagagggagca

SEQ ID NO: 42314 - DNA, 852 bp, Homo sapiens
agcgggcatgcgcgctcgcgctcccgccctctagctgcgctcggctgagtcagtcagtctgtcggagtctgtcctcggagcaggcggagtaaagggacttgagcgagccagttgccggattattctatttcccctccctctctcccgccccgtatctcttttcacccttctcccaccctcgctcgcgtagccatggcggagccgtcggcggccactcagtcccattccatctcctcgtcgtccttcggagccgagccgtccgcgcccggcggcggcgggagcccaggagcctgccccgccctggggacgaagagctgcagctcctcctgtgcggtgcacgatctgattttctggagagatgtgaagaagactgggtttgtctttggcaccacgctgatcatgctgctttccctggcagctttcagtgtcatcagtgtggtttcttacctcatcctggctcttctctctgtcaccatcagcttcaggatctacaagtccgtcatccaagctgtacagaagtcagaagaaggccatccattcaagcctacccttggtacgttagacacttacatcctgttccctcagcacacgcctttatcgcatcacactccaccactgtacattgcctgcgcacctgcgcttggacgaccaagttaccaaaccttgtgtgtcacaccgtgaacataatccttccgcgtcgaaataagcaggaatgctacctggcagcgtggtgctcacgaacagaacattcgtgggcgatcatgaacattgccgtcagacaagggaccttgcagctaggatcgtaccacgtggctgacacaatagaagttgagacccgctagttggactcta

SEQ ID NO: 42315 - DNA, 642 bp, Homo sapiens
ttcacccagggaaccaactttggacatgttttcgaattttaatccaacccaatatagggaattttggccctcgagcccaaaaattgggcaccagccactggcgagtttaaagtaagggctatgatatttgatggtcccaaagtacggcagctgcaaaaagtagtggaaggaaattgtctacgtgtcttggaaaaattagttaggaatttggatgggtaaaaggtacccttgccttactccatcttattttcttagccccctttgagtgttttaactggtttcatgtcctagtaggaagtgcattctccatcctcatcctctgccctcccaggaagtcagtgattgtctttttgggcttcccctccaaaggaccttctgcagtggaagtgccacatccagttcttttcttttgttgctgctgtgtttagataattgaagagatctttgtgccacacaggatttttttttttttttaagaaaaacctatagatgaaaaattactaatgaaactgtgtgtacgtgtctgtgcgtgcaacataaaaatacagtagcacctaaggagcttgaatcttggttcctgtaaaatttcaaattgatgtggtattaataaaaaaaaaaaactaccacaaacaatgactgtgg

SEQ ID NO: 42316 - DNA, 918 bp, Homo sapiens
cttcatctctactaaaaatataaaaattagcccagtgtgggccaccatacccagccgggagaatgcatttcacattgcttatgcaagtccaggactgtcctctagcatcacagttaaaataaaaacctagagcaaatgctaatgttttcactttctttctttttcccctccttttctcaataggatccaagcaaaactccctggaatcgccaaaaaaaaggcagaataagtacatggaaaccagaaatgcaacagttactaaaacaccatttaatagttataacgtcgttacttgtactatgaaggaaaatactcagtgtcagcttgagcctgcattccaagctttttttttaatttggtgttttctcccatcctttccctttaaccctcagtatcaagcacaaaaattgatggactgataaaagaactatcttagaactcagaagaagaaagaatcaaattcataggataagtcaataccttaatggtggtagagcctttacctgtagcttgaaaggggaaagattggaggtaagagagaaaatgaaagaacacctctgggtccttctgtccagttttcagcactagtcttactcagctatccattatagtttggcccttaagaagtcatgattaacttatgaaaaaattatttggggacaggagtgtgataccttccttggtttttttttgcagccctcaaatcctatcttcctgccccacaagtgtgagcagctacccctgatactccttttctttaatgatttaactatcaacttgataaataacttataggtgatagtgataattcctgattcaagaatgcatctgataaaaaagaatagaaatggaaagtgggactgagagggagtcagcaggcatgctgcggtggcaggtcactccctctgccactatccc

SEQ ID NO: 42317 - DNA, 2660 bp, Homo sapiens
agcgggcatgcgcgctcgcgctcccgccctctagctgcgctcggctgagtcagtcagtctgtcggagtctgtcctcggagcaggcggagtaaagggacttgagcgagccagttgccggattattctatttcccctccctctctcccgccccgtatctcttttcacccttctcccaccctcgctcgcgtagccatggcggagccgtcggcggccactcagtcccattccatctcctcgtcgtccttcggagccgagccgtccgcgcccggcggcggcgggagcccaggagcctgccccgccctggggacgaagagctgcagctcctcctgtgcggattcctttgtttcttcctcttcctctcagcctgtatctctattttcgacctcacaagtgcacgatctgattttctggagagatgtgaagaagactgggtttgtctttggcaccacgctgatcatgctgctttccctggcagctttcagtgtcatcagtgtggtttcttacctcatcctggctcttctctctgtcaccatcagcttcaggatctacaagtccgtcatccaagctgtacagaagtcagaagaaggccatccattcaaagcctacctggacgtagacattactctgtcctcagaagctttccataattacatgaatgctgccatggtgcacatcaacagggccctgaaactcattattcgtctctttctggtagaagatctggttgactccttgaagctggctgtcttcatgtggctgatgacctatgttggtgctgtttttaacggaatcacccttctaattcttgctgaactgctcattttcagtgtcccgattgtctatgagaagtacaagacccagattgatcactatgttggcatcgcccgagatcagaccaagtcaattgttgaaaagatccaagcaaaactccctggaatcgccaaaaaaaaggcagaataagtacatggaaaccagaaatgcaacagttactaaaacaccatttaatagttataacgtcgttacttgtactatgaaggaaaatactcagtgtcagcttgagcctgcattccaagctttttttttaatttggtgttttctcccatcctttccctttaaccctcagtatcaagcacaaaaattgatggactgataaaagaactatcttagaactcagaagaagaaagaatcaaattcataggataagtcaataccttaatggtggtagagcctttacctgtagcttgaaaggggaaagattggaggtaagagagaaaatgaaagaacacctctgggtccttctgtccagttttcagcactagtcttactcagctatccattatagttttgcccttaagaagtcatgattaacttatgaaaaaattatttggggacaggagtgtgataccttccttggtttttttttgcagccctcaaatcctatcttcctgccccacaatgtgagcagtacccctgatactccttttctttaatgatttaactatcaacttgataaataacttataggtgatagtgataattcctgattccaagaatgccatctgataaaaaagaatagaaatggaaagtgggactgagagggagtcagcaggcatgctgcggtggcggtcactccctctgccactatccccagggaaggaaaggctccgccatttgggaaagtggtttctacgtcactggacaccggttctgagcattagtttgagaactcgttcccgaatgtgctttcctccctctcccctgcccacctcaagtttaataaataaggttgtacttttcttactataaaataaatgtctgtaactgctgtgcactgctgtaaacttgttagagaaaaaaataacctgcatgtgggctcctcagttattgagtttttgtgatcctatctcagtctgggggggaacattctcaagaggtgaaatacagaaagcctttttttcttgatcttttcccgagattcaaatctccgattcccatttgggggcaagtttttttcttcaccttcaatatgagaattcagcgaacttgaaagaaaaatcatctgtgagttccttcaggttctcactcatagtcatgatccttcagagggaatatgcactggcgagtttaaagtaagggctatgatatttgatggtcccaaagtacggcagctgcaaaaagtagtggaaggaaattgtctacgtgtcttggaaaaattagttaggaatttggatgggtaaaaggtacccttgccttactccatcttattttcttagccccctttgagtgttttaactggtttcatgtcctagtaggaagtgcattctccatcctcatcctctgccctcccaggaagtcagtgattgtctttttgggcttcccctccaaaggaccttctgcagtggaagtgccacatccagttcttttcttttgttgctgctgtgtttagataattgaagagatctttgtgccacacaggatttttttttttttttaagaaaaacctatagatgaaaaattactaatgaaactgtgtgtacgtgtctgtgcgtgcaacataaaaatacagtagcacctaaggagcttgaatcttggttcctgtaaaatttcaaattgatgtggtattaataaaaaaaaaaaactaccacaaacaatgactgtgg

SEQ ID NO: 42318 - DNA, 2287 bp, Homo sapiens
cgcggtgactctagcggatccctttagtgtactgtgggagagatgtgaagaagactgggtttgtctttggcaccacgctgatcatgctgctttccctggcagctttcagtgtcatcagtgtggtttcttacctcatcctggctcttctctctgtcaccatcagcttcaggatctacaagtccgtcatccaagctgtacagaagtcagaagaaggccatccattcaaagcctacctggacgtagacattactctgtcctcagaagctttccataattacatgaatgctgccatggtgcacatcaacagggccctgaaactcattattcgtctctttctggtagaagatctggttgactccttgaagctggctgtcttcatgtggctgatgacctatgttggtgctgtttttaacggaatcacccttctaattcttgctgaactgctcattttcagtgtcccgattgtctatgagaagtacaagacccagattgatcactatgttggcatcgcccgagatcagaccaagtcaattgttgaaaagatccaagcaaaactccctggaatcgccaaaaaaaaggcagaataagtacatggaaaccagaaatgcaacagttactaaaacaccatttaatagttataacgtcgttacttgtactatgaaggaaaatactcagtgtcagcttgagcctgcattccaagctttttttttaatttggtgttttctcccatcctttccctttaaccctcagtatcaagcacaaaaattgatggactgataaaagaactatcttagaactcagaagaagaaagaatcaaattcataggataagtcaataccttaatggtggtagagcctttacctgtagcttgaaaggggaaagattggaggtaagagagaaaatgaaagaacacctctgggtccttctgtccagttttcagcactagtcttactcagctatccattatagttttgcccttaagaagtcatgattaacttatgaaaaaattatttggggacaggagtgtgataccttccttggtttttttttgcagccctcaaatcctatcttcctgccccacaatgtgagcagtacccctgatactccttttctttaatgatttaactatcaacttgataaataacttataggtgatagtgataattcctgattccaagaatgccatctgataaaaaagaatagaaatggaaagtgggactgagagggagtcagcaggcatgctgcggtggcggtcactccctctgccactatccccagggaaggaaaggctccgccatttgggaaagtggtttctacgtcactggacaccggttctgagcattagtttgagaactcgttcccgaatgtgctttcctccctctcccctgcccacctcaagtttaataaataaggttgtacttttcttactataaaataaatgtctgtaactgctgtgcactgctgtaaacttgttagagaaaaaaataacctgcatgtgggctcctcagttattgagtttttgtgatcctatctcagtctgggggggaacattctcaagaggtgaaatacagaaagcctttttttcttgatcttttcccgagattcaaatctccgattcccatttgggggcaagtttttttcttcaccttcaatatgagaattcagcgaacttgaaagaaaaatcatctgtgagttccttcaggttctcactcatagtcatgatccttcagagggaatatgcactggcgagtttaaagtaagggctatgatatttgatggtcccaaagtacggcagctgcaaaaagtagtggaaggaaattgtctacgtgtcttggaaaaattagttaggaatttggatgggtaaaaggtacccttgccttactccatcttattttcttagccccctttgagtgttttaactggtttcatgtcctagtaggaagtgcattctccatcctcatcctctgccctcccaggaagtcagtgattgtctttttgggcttcccctccaaaggaccttctgcagtggaagtgccacatccagttcttttcttttgttgctgctgtgtttagataattgaagagatctttgtgccacacaggatttttttttttttttaagaaaaacctatagatgaaaaattactaatgaaactgtgtgtacgtgtctgtgcgtgcaacataaaaatacagtagcacctaaggagcttgaatcttggttcctgtaaaatttcaaattgatgtggtattaataaaaaaaaaaaactaccacaaacaatgactgtgg

SEQ ID NO: 42319 - DNA, 2603 bp, Homo sapiens
agcgggcatgcgcgctcgcgctcccgccctctagctgcgctcggctgagtcagtcagtctgtcggagtctgtcctcggagcaggcggagtaaagggacttgagcgagccagttgccggattattctatttcccctccctctctcccgccccgtatctcttttcacccttctcccaccctcgctcgcgtagccatggcggagccgtcggcggccactcagtcccattccatctcctcgtcgtccttcggagccgagccgtccgcgcccggcggcggcgggagcccaggagcctgccccgccctggggacgaagagctgcagctcctcctgtgcggtgcacgatctgattttctggagagatgtgaagaagactgggtttgtctttggcaccacgctgatcatgctgctttccctggcagctttcagtgtcatcagtgtggtttcttacctcatcctggctcttctctctgtcaccatcagcttcaggatctacaagtccgtcatccaagctgtacagaagtcagaagaaggccatccattcaaagcctacctggacgtagacattactctgtcctcagaagctttccataattacatgaatgctgccatggtgcacatcaacagggccctgaaactcattattcgtctctttctggtagaagatctggttgactccttgaagctggctgtcttcatgtggctgatgacctatgttggtgctgtttttaacggaatcacccttctaattcttgctgaactgctcattttcagtgtcccgattgtctatgagaagtacaagacccagattgatcactatgttggcatcgcccgagatcagaccaagtcaattgttgaaaagatccaagcaaaactccctggaatcgccaaaaaaaaggcagaataagtacatggaaaccagaaatgcaacagttactaaaacaccatttaatagttataacgtcgttacttgtactatgaaggaaaatactcagtgtcagcttgagcctgcattccaagctttttttttaatttggtgttttctcccatcctttccctttaaccctcagtatcaagcacaaaaattgatggactgataaaagaactatcttagaactcagaagaagaaagaatcaaattcataggataagtcaataccttaatggtggtagagcctttacctgtagcttgaaaggggaaagattggaggtaagagagaaaatgaaagaacacctctgggtccttctgtccagttttcagcactagtcttactcagctatccattatagttttgcccttaagaagtcatgattaacttatgaaaaaattatttggggacaggagtgtgataccttccttggtttttttttgcagccctcaaatcctatcttcctgccccacaatgtgagcagtacccctgatactccttttctttaatgatttaactatcaacttgataaataacttataggtgatagtgataattcctgattccaagaatgccatctgataaaaaagaatagaaatggaaagtgggactgagagggagtcagcaggcatgctgcggtggcggtcactccctctgccactatccccagggaaggaaaggctccgccatttgggaaagtggtttctacgtcactggacaccggttctgagcattagtttgagaactcgttcccgaatgtgctttcctccctctcccctgcccacctcaagtttaataaataaggttgtacttttcttactataaaataaatgtctgtaactgctgtgcactgctgtaaacttgttagagaaaaaaataacctgcatgtgggctcctcagttattgagtttttgtgatcctatctcagtctgggggggaacattctcaagaggtgaaatacagaaagcctttttttcttgatcttttcccgagattcaaatctccgattcccatttgggggcaagtttttttcttcaccttcaatatgagaattcagcgaacttgaaagaaaaatcatctgtgagttccttcaggttctcactcatagtcatgatccttcagagggaatatgcactggcgagtttaaagtaagggctatgatatttgatggtcccaaagtacggcagctgcaaaaagtagtggaaggaaattgtctacgtgtcttggaaaaattagttaggaatttggatgggtaaaaggtacccttgccttactccatcttattttcttagccccctttgagtgttttaactggtttcatgtcctagtaggaagtgcattctccatcctcatcctctgccctcccaggaagtcagtgattgtctttttgggcttcccctccaaaggaccttctgcagtggaagtgccacatccagttcttttcttttgttgctgctgtgtttagataattgaagagatctttgtgccacacaggatttttttttttttttaagaaaaacctatagatgaaaaattactaatgaaactgtgtgtacgtgtctgtgcgtgcaacataaaaatacagtagcacctaaggagcttgaatcttggttcctgtaaaatttcaaattgatgtggtattaataaaaaaaaaaaactaccacaaacaatgactgtgg

SEQ ID NO: 42320 - DNA, 768 bp, Homo sapiens
  misc_feature (426)..(426): n is a, c, g, or t
  misc_feature (450)..(450): n is a, c, g, or t
  misc_feature (536)..(536): n is a, c, g, or t
  misc_feature (546)..(546): n is a, c, g, or t
  misc_feature (591)..(591): n is a, c, g, or t
  misc_feature (595)..(595): n is a, c, g, or t
agcgggcatgcgcgctcgcgctcccgccctctagctgcgctcggctgagtcagtcagtctgtcggagtctgtcctcggagcaggcggagtaaagggacttgagcgagccagttgccggattattctatttcccctccctctctcccgccccgtatctcttttcacccttctcccaccctcgctcgcgtagccatggcggagccgtcggcggccactcagtcccattccatctcctcgtcgtccttcggagccgagccgtccgcgcccggcggcggcgggagcccaggagcctgccccgccctggggacgaagagctgcagctcctcctgtgcggctgacttgggcaacagcagtgactacaagtgccatactgaccaattggaagagtctttgcttatcggagctgttctaaaaggcttattagtntaggtcttcattctatttaatgtnttcatgcctttataaactttttacttccagccaatttttcccattgtcttggtacaggtcagctgtgtccaagttagtaagggttncagctagccnaaaaatggtatatcatttgctgaaattctaaacaaaataattaangttnaagcacagatgatgcatgctacccttagtgttgctaccaatgtggggaaaagcttgactcgatagtacatgcagtcagcgcctgcatcttcacaatcacctgagaaatgaaatgcaaggactgagctctggtttggccctcataagctggtccccagaaaaacaagatataac

SEQ ID NO: 42321 - DNA, 419 bp, Homo sapiens
tgtcagtgctaaaaagaggccgctaaccaaccaccacaaaagacatctcagatatttagagccctttccctctccctttccccattggtttcactttttgagggaaattcttatgcttttctcttataaattgccattgataaggttgtaataaacatcagagtttagaggaaggcaaagaataatagttttagctgtggaacggatgtgagctgatccttgggttcaacaatcattttgaaattgaggtttacccatagattccattagcctatatagagaagtgcattatttggtgtaaagtacctcctgtgttcacttagtgcccattcttagccttatatttcctgacgtgcatgtggacttcttttttcagtgattaccacacataaatttgttcttttccatttttgttatga

SEQ ID NO: 42322 - DNA, 320 bp, Homo sapiens
tttttttttttaagttcagaggtacaagttcaggggtactgaaatgacttccaaaaacatttctccagatttctcatctctcccagcttcaagcctctatttccaaaagcatacactacatgtccatctagatatcttactaaataactcactatctatgtgtcccaaacagtggtggcaacaagggatgaccaggtcaagattgatcatttctctactaggcacctctcacaactataccaaagaaagaaaatcatatgtccgtactgcaaatgcagcaacttcttctaccatcttaggccccacacatataaattcag

SEQ ID NO: 42323 - DNA, 553 bp, Homo sapiens
aggggtgcatgaaggccccagcccagccagtgacacagaggttgggaagaccagggcgtgaagcttctgtgcttggagaacaggagggcttgtggagctgtggttgatggcgtgtccaggaagcctggccaggctggggtctggcaacagcctcaccacgatggcatggcggtgggcccggcctctacccgctgcgccacagctcctggctcctggctccaggtcatctctgcccacagccagtgtctctggtgagcctgggcaggtgggaggccgaagctgtgccccactggtttggatgctgagctctggggtgacctgcaccctgtagtcctacagttcacacgctatggatgcctgaagggatgggtgtcccgtttctgaaacccacagagcagccttgattgggaggcgtcctgtgcccatctcgtgccccccgtccttctcctgcgtccaggttctggttctgccgcctcctccgcacgctgctcaccagcctgctaagtggatgtgaataaacaatcatgcagggtttggtgcattctttcctgga

SEQ ID NO: 42324 - DNA, 356 bp, Homo sapiens
gtggtgtggagggcagaggcagtggtgggaagcctgtgtgtggccgacgcatgcttttacgctgtcatcacggccttgctttctatagcagggatctgagaagcaggcaggcagctgctctgcccgagactgtcaggagttggtggatgtgaatccatgtctgaagggatgggtgtcccgtttctgaaacccacagagcagccttgattgggaggcgtcctgtgcccatctcgtgccccccgtccttctcctgcgtccaggttctggttctgccgcctcctccgcacgctgctcaccagcctgctaagtggatgtgaataaacaatcatgcagggtttggtgcattctttcctgga

SEQ ID NO: 42325 - DNA, 808 bp, Homo sapiens
cttttgccagaggaacatcaaagggcagagcaaacagagaactagggggataagagagaagaaaagaagaatggagagagaggtttgcccagaaggaaaacgaagagccagattgaaatctgactctggcttgagaacaggacgggtcccagagtttgaccactgccagaatccagtgtttcaagatggagttggtgaagcatccaagattttggatcctgggcctcagtgacactccatcacccaactaaaaagatgttctctgggacctctctcaggctgatgttcttctcatcaagctcccgaatgtgtctcgcactattggacactttttgggggtacacaggtcttctctcctcccctcctgcagaggcaccaaaaccaagaccaaatgggggttctctagccgccaacttgaaacgctctgagacttctgtgtatttgatgcttcttcaagtcagctctgacgtggccaattccctgacctgggaaatatttacatagtactctagatcattccttcttcctagtaactgcaactttgttgcttctgtgtttgactcacagccactttcccccatgcggaagtgagtgggtgtacgtgagggtgtgagtggggtgtgtgcgtgggcgtgtgggcgtgaggtgtgtgtttaaatataatcacaccataatttattcagctatatggagtagtagactagaaagagaaactggtatttgctttaactacctgctgcttgtaagcgcttcctctgtaactcaggcgtaactgttatacattaaaagaaattaaaagcattttgaa

SEQ ID NO: 42326 - DNA, 358 bp, Homo sapiens
cctggcctatttccactacttttgattgaactttaatgtgacttaatttgtctggtgatgaaagaagttttcaaagggagggaatcatctttttcactattgtaaagataaataagcaagtcgaacttgccctctttcccatatgatgaatcctgtaactttaatgcattcagcataacagatgcagtagttttaaagattactggacagaatatttccgccttaaaagttgtttctctgccaggcatggtggcttatgcctataatcttagcactttgggaggccaaggtgggaggattgcttgaggccaggagttcaagaccagcctaagcaacatagcaagactccgtctcttaa

SEQ ID NO: 42327 - DNA, 336 bp, Homo sapiens
gcagtaagttgtactaacttcaaaccacaaacatgctagaaatcctgactatacccttataccttgtgcttttatttgtagacaatgattgagagtcaggttttagtggctccattggctattcattgaaatagcccacctgccctaattattgcccaagaaaacaatgacttaactaatttcactaataaagtgccctataaatcttctaataccacatgaggtaagagacatgtatccatgtttggacagatgaggacacagaaaaggtagataactagcttaatgtcccactgcttgttttatttattttttgagatggaatttcgctcttgt

SEQ ID NO: 42328 - DNA, 409 bp, Homo sapiens
tactgagtgggtcccctgatagtattaaatgcagcctccttggcctgtcatttggagccctctgtgatttggccttaacccccagctccctcaaccaacttggttcccattacttcgctttataccagtgaaggtatacctggtctactaggctggaatgcacttccttccccagcgcccccagcatgcccctccctgctttctttaccttcattctccaatgcaaaatgtcatctctcccatgaagtattttttgattcccccagttagatgtgcttcatgccacctctagaccctcttcactcttctgtgtctggtaggaagggactgtggagtgtggagggcgagtgcggctttggggccagacactcccgctcccctctgtctatggagaacctgggtcagggga

SEQ ID NO: 42329 - DNA, 703 bp, Homo sapiens
actctttatgtctcaagaacaggttgtcttcatttattcaagtcatgctttatgttacttaagtgttattattaaactgtcttcatgtatatcttacacagatagtggtaattttattcttagttatatactctttgtgagtgaggttgtaaattgggtctttcattatatattctgtcatttgagaagaaatttaattgtatatgttatattccttatataaccatttaccctttgaaatctcttatttgtagtaattttgcagttgattcctttggtctttctaggtatgaaatcatattatcagttaataatgatcatttgcctctttctttccttttctaatatggtaccacttccagaacagtgccaagtaagagtgatgctagcagccacccttatcttactcctgatgttaatggaagtgcttttattttgtcattaaaaatgatttttaagagacagggtctcccttaagagggttggccagacctagtggctcaaacttataatcccagcactttggaaggccgaggcaggtggattgcttgagctcagcagttcaagaccagcccaggcaacatagtgagacctcgtctctactaaaaattcaacaaagaaaattagcctggaagtaattacctgggactacaggcatgcactgtaaataaataaataaataaataaataaataaataaataa

SEQ ID NO: 42330 - DNA, 217 bp, Homo sapiens
gaatttgacattatatttaatcattgcatggtctttcaacgtataagaaactgaaatccttggtagataagcagcctggggcatttctttcttcaccactttcctgaaggcttccagggtagaaatacagagtgataggatgatctggggtgagcacggttattggctgtctatttctagttaaagtcactgcttgctttgggaagtttgtacagag

SEQ ID NO: 42331 - DNA, 406 bp, Homo sapiens
gtttatgcactgtgctatatatttccttatttacacagcctgttaagcatttatatggctttttttcctatgctaaaagggccttgtgtgcaatgccttttaggttcttgtcttttgcctctttatcatcttatacttttacaaagctctcagcctacaaactatgaggccagaagctagatgagcaaacttgagaactgcatctaaattaaatgtaactgttcttcaattgagggtcttatgatcatttctctgtagaaagtatacgagctttaccacatataatctatgattgtaatctattggttcttaagcttggctgtatgttataatcaacttggagctttaacagtcactaatgctgaaatcttaccccacctcccaaactgatttaattggtcttgag

SEQ ID NO: 42332 - DNA, 448 bp, Homo sapiens
gtctatgggcagaggggtggctccctactctgcaccctatgtactttgttcactacctctgtgagagaactaacatttcctctctccacccacagcctatgggccagttcatctccccatgctggatttcagcttataccccagcatggctcctgagcagtacaaggtggtatagtcagagctttgggaggctgggaactgagcagaagagctggatagtttaggcaaggaatgatcaaggccccaactgaagcaaagtggaaatgatttccatggccagttgaaaacaaccctgtggcattgcacagtgggaatccatgaagataaagagccagaagatatgagtgtgactcctggctccgtcactcttgatctgagtgactcgagaaagtcccttaacatctctgagcctgcttctccatccaaccaatggataagataatgtatg

SEQ ID NO: 42333 - DNA, 579 bp, Homo sapiens
cttccaaagtggctgtaacagtttgcattttcaccagcaatgagtgagacttcctgttactccacatccttgccaacatttggtgttgccagtattttgaattttgggtattttaataggtgcatagtagaatcttattgttttagtttgcaatttcctaatgacatatggcattgggcatcttatgcttgtttgtcacgtatgtatcttctttgataaggtgtctgctcagatctgttacccattgggttttttttattgatgatttttcagtgttctttatatattttagatatcagccctttatcagattatgtattttgcagatattttctcccagacagtggcttgtcttttcattcatttaacaatgtctttcattgagcagacatttgtaatgaaaaaatttcgactgttcagtttttttcagggatcgtgcttttagcattgtacccaaaaagtcatcaccaaacacaagttcacctagattttctcctatgttatcttccagaagttttacagttttgtgttttgcatttaggtctatgatccattttgagtaaatttttgtgaaagata

SEQ ID NO: 42334 - DNA, 384 bp, Homo sapiens
gtttttcgtatgtccaagatactgtaaaaggtacttctggattttgtagacgtgtgtacagtgtgggccacgttagccagttgtttgtgcctggctacttcaaaactcagcgaaagtgtttgcttttccagcagtgatgagaattctgacctagggcctgtgacaacagtttttgcttgctcgttgtattgcatttcaatctgtggactcggtcagtcatatgttacttaagaccttccagatttttttttcctgtcttagctttttctctcttttaattacgtggtgtagtcctcatcagtttgcagtctccctgtcctctaaaatctgttttgtttttttccatgatgttaaaaaaacaaaaaaatgttaaattttcttata

SEQ ID NO: 42335 - DNA, 415 bp, Homo sapiens
tggagcactgctttgttactgttagaagcaccattaaggcagtgacttgtttacattgttttagggcagctcacctctacagctgctctacctttcatgatcaacagaaataaaacaaactcagttcaggccctctttattaagcaattacttccttctgatgtacactaaaaaatgcatttagttacactgagatgctctcttgtttcagacaatacgaagaaaaataaactatttctctttcaagggtcatcatatctataatgggtggtttatagtaagtagctttcttgtttccttgggcaaaagaagcttcagaattttccttagccctctcagttttctggggaaagtgtggctaaacaaatttccaggttttctcgggctttacctcctcattaaataacagtgatag

SEQ ID NO: 42336 - DNA, 325 bp, Homo sapiens
aatctctacttgggaccttgcccctgaggcgcaagggtcaggctatgtgggaccccctcccttttgcattgttgcatggttttaacatcattaacttggaacaaaaacacattatagagtatggtttttaagaaataattttgtttggggaagaaaattcaaattgacaaatggcagttaaaatttggattcttttgcagttatggtacttgctattcatgcaaatcagtatccacccagggtgctcctgtttgacattgccagtggatttgataagatcttatgaaccatgccatctcttctagtttcctctgagttgactgga

SEQ ID NO: 42337 - DNA, 355 bp, Homo sapiens
tctcaccatgttggtcaggctggtcttgaactcctgaccttgtgatctgcctgcctcggcctcccaaagtgcagccactgcgcccggccaggctgaccattttgtatgggaaagtcagcactttcgtgaatgaacacattgatcaagccactgaggaaaatgtgattcaaatcataaggaggccaggacgaaggtcacacaaagagcccctgactctaatctacaatcatgacgaagggggccccagtccagttctaggagaagcctccctgccacatcctgtgacaagtttcacaccagcagggatcttgctgagccagttaggtgggctgagtccagccctggaagatgggcc

SEQ ID NO: 42338 - DNA, 632 bp, Homo sapiens
tttgttctgtagaagaaaattctttttcatttttgtcaatataaagaattgcctttttaggaaacaaatatagttatgccttattttcttgagtataaaacttagacatgtttactctccttctgggcaataccagggcattggaacaattttaattccactggtccctcatcagtttatttttgaaatttaatctaatagacttttaaacacataagacattattctatgttatgatcatggttcatttagatatgtctacatattcacatattctttgtgaaacgttttttcttgtatcttctgcccatttgggatcatcatcttgtacttcctctagaagttcctttcatgcggtctactggtgggaaactctttggagtttttatttttgtttttgtgcagaaatgtctttgtttgtttaatgtagtaatagatgagaatctacatttcctccattctggaatgatattttcactggatataaaattttgtgttggtggttattttcctttagcacactgaagataaacttccaccaccctctagcatctattgctgttcttgagaggttaactgttagtcttaatacagttcttttgatgataatttatattccccctccccccacc

SEQ ID NO: 42339 - DNA, 2080 bp, Homo sapiens
tctagggggcatctgtgctaactgacctgggattatgttggatggcatatgactgcaaattcaaagaaaccaatttataataagtttatagtaagttaaaggtttgttttactctcatgtgaagggaatctggaggaaggaaagccagggctggagtggctgcctttgatcatgggagcacactccttctgcccgatcattgggagcacactccttctgcctgatcgttgggagcacactcctgcctgatcatgggcgcacgctccttctgcccgatcgttgggagcacactccttctgcccaatcattgggctcacgctccttctgcccgatcgctgggctcacgctccttctgcccgatcttgggcgcacgctccttctgcccgatcgttgggcgcacgctccttctgcccgatcgttgggcgcatgctccttctgcccgatcgttgggagcacgctcattctgcccgattgttgggagcacgctccttctgcccgatcgttgggcgcacgctccttctgcccgatcgttgggcgcacgcttcttctgcctgatcgttgggcgcacgctccttctgcctgatcgttgggcgcacgctccttctgcctgatcgttgggagcacgctccttctgcctgattgttggaagcacgctccttctgccttcagactccttgatttttagtgcagtttccatcactgaggctgcctcatgggctgagatggctgttgaagcactgaacctcacatccacaattcaggcaggaagcagaaggaagggcaatgggcaaaggggctgtgccttgcagccgatccagcctccctttgctgcagaggaggcagggaaatgcggtatttactgggaacattgctgcccctcctccaaattgagggtcttggctcgaaggacaaaagccagaaaggataggtggattagtgcttcttaaacttttgcgtgcatcagaatcacccagaaagatgttaaaactcactcttcaaggccccatccccagagattcggattctggggatttggaatctggggtggggtctgaagaatctgcattttttaacaaactcccaggtgacatagatggcatcaattctcaagccatattttgagtagcactgacactcttccaataggtggtactttgacttgtcagggaagttctattgctctgataacttaaaaccaacccaaccagaagctcacaaaaactagcagcctgtgaaaaatgatcaccattttcctagagctccgagacaactagtggtagtgcaacagtaacccaaaaatgtcaatgaaaatatttccttccccagaaactgcttggtttcactcaggtcctgtccttatgggcctgtgtctggttgcagggcttgaagtatttcggaagctcagcagaggttgaaccctttcccctgggggttggtgatctttgttttggccatttccacctggtgaagattttcatagacaaatatgcttgtggcatcctgtaattcattgtgccttatgatggacctctgattctataagcttccccctagctagggatgcacgggggtgatcaagacatgactagatgtgaacctgacctgcagacagtccacctgaacgtgcctggaaatgtctcccgaaaaggatgaaaagcctcctcctttagacaaggaagacagagtggagcaaatttctctacatagatctcattcgaaaacaaatttacagaatgcagaatggctactgtgtgtcttgtgctatgctaggtctctctctctctaagtggactctgaccctgtccaaaacattgtgcttttgcatgtagctgtgtcgcatttaggcccagctctaagaaccgtttggaaataaatcacatagagcctttgattgtgaggcaggcttaaagtacattttgtttgatttgcagaggcatggtgaggaatttatatgcatggctgttgtggcagcagcgagatttccaaaaagatgaatgatgaaatgaaacagactgaagctatctcacaaatgttaaatggagaaataaaagttgttatagtcattgctaaaaaaaaaaga

SEQ ID NO: 42340 - DNA, 498 bp, Homo sapiens
ttatccctctgctccgtggaagctgttaagtggggagctattgaagaaggacttacaatgtttgtttcccgtctctcagggattactgtcctatgctggccaatgtctaatgtgtaaagaccattgatttacatgcttttctgtttattaattatttcaggcagtgggtaaatgtattccctattatttcaccttgactcaaaaccctgcctactcgtttttaaagtttaagctcaagcattaaatcctctccaaagtgtttcatattccattttctattcaggaatgatttgtttgcaaagaccacaagctctttcaaaaaagctgtaattggccaggtgtggtggctcacgcctgtaatcccattcagcactttgggaggccggggcaggaagattgcttgaggcaagattgcttgaggagtctctaactcctcaagcaggagttagagaccaggctgggcaacataccaagacctcatctttgttaaaaattgaa

SEQ ID NO: 42341 - DNA, 421 bp, Homo sapiens
tatatttttataggtaacgcttcagtgaatatcttaggaagtctttaattcagtaacctggagatacattgtattagaagaaatgtgttaaatttcatatttataaaagagccaatagatttttgttgtgaaaagatttattttaaataatatgaacatccaggcccagtggcttacacctgtaatcccagcactttgggaggctgaggtgggctgatcactggagtccaggagttcaagaccagcctgggcaacatagtgggaccccatctcttaaaaaaaatacaaaaattatttagacgttgtagtgctggcctgctgtcccagctactccggaggctgagcttgaacctgggaggctgaagctgcagtgagccgtgatcgcacaccactccagcgtgagctacagagtctcaaaaaa

SEQ ID NO: 42342 - DNA, 375 bp, Homo sapiens
actcagccctggactgtggctgccaaccagcaccagaaatgaacaaggcctcacagtggccctgctgtagggggagaagaagaagtcagcatgcatgaggagatggcccagaatggggacagcagggacaagccacccccaaaaagggttgctcactcaaggaccatctgtgacactgtgtttcctaatggaggagggctggggaccagggctgatgctcaagaccggggctcggatcagcactgctcagcagccataggaccctgggctgccccagccttaatttcctcctctgcaggatggggagagccaggccactttacacagggcactgttaggggcaggctctgtgaccatgcacgctctctaggtaaa

SEQ ID NO: 42343 - DNA, 535 bp, Homo sapiens
  misc_feature (490)..(490): n is a, c, g, or t
actcagccctggactgtggctgccaaccagcaccagaaatgaacaaggcctcacagtggccctgctgtagggggagaagaagaagtcagcatgcatgaggagatggcccagaatggggacagcagggacaagccacccccaaaaagggttgctcactcaaggaccatctgtgacactgtgtttcctaatggaggagggctggggaccagggctgatgctcaagaccggggctcggatcagcactgctcagcagccataggacccctcttccccagcccagtcacagggaagaaaggagggggagaagggaccagagagggcaagtctgccccccttaggagaaagcaccaaagggtggaaggaaggtttccgcatcccctcgctctggaagctgggagctgagggaagagcaaggggttgagcctggtgggggcttcatgtccgcacagcactggagcagacaagatggtgtgggggaaagggcagcaanggtgctctctctcagtccctcttccccagcggggatcctctgatc

SEQ ID NO: 42344 - DNA, 1578 bp, Homo sapiens
  misc_feature (1413)..(1413): n is a, c, g, or t
  misc_feature (1423)..(1423): n is a, c, g, or t
tcagaattgagcttttgttcctgcatctcagaaataccaggaagaagtcagcatctcattaaacaggagttgtctaaactgtggaagaaaatatcccccattctttatcctacgctgaatccacaagtcttcccatcttccaccatcttctgacagttccataatatattggtatccctcacagggcagggacaggaaggaaataaatctttctgccacttgtttccaaccgaaaaggaaaaaagttaaaaattactaaagtgttctgaaaagagatttcaagtggtctgtgctgcttttttgccttgttacgcacataacttgtgactggctagataggccacgtgtatttatcagccaagattccattgcagcagatgatttcaaaacctctttgtgtgctgggccgtgctaggtagctggaatatctgaggtaaattaagcactgatttgttcccagagttgtgcataattctttaaaagtaggctcgtttttttcgtttttttgtccaggatcacctaagtgaagtactcgtggttctaagttgctaacccagggaaagaggatattttcctgtcctaaccttggtttttgaaatatgcttctcctgtgtgccctctctggggtatctggcccacagtagattgctcagcagatatttgaatgagcagatgctttgctttgtcctcctgtgccaggctcctccccacatcctctggatcagctccacgtgcctagattcagactccgtgattcaccgtgggggcccttaataggcattcagtctgaaagaaggtggaggagaataatgtctcccaggatcaaatgagactcagggctgttccttcaaagacagaaacttgcagagctgcacagcagcagggaaacattgagaagggggtggaaatttgatgtactgtgaataatgaaggccggatctttaaaaagaaaaagggacggggtgctggcagaaacccagctctgcgctagcacaatctgtacacctggctgcctttgcccttgagcttctatttcttggggatggggagggcaaaaaagtttgccccagacactggcttctgtttgaacaggaagtggggagtcagtgatcccagaggggacttcagcatcaggacatatgctttggtggcctcagcagacctggcctaggcaggctttcaggtggcacccaggggctttatggcctgcaggtaaggccccttcatccgggtcagacttagcaaataaaaatataggacactcaattaagtttgcattttggataaacagtgaagaagttcctagtgtaagtatgtcccagttctatgtggctgccctacctgggcttgcctctgctggtactagctgcccagagaccttcaggcctgccacgggctgccgggacctctttnggatttcttntaagtaactgctccatactcccctgccttccccttggccatcaagatgatgtggaacatctcggcaggttcctccagcgaagcatcttgaacacaatgagccaggagctggtcccagcgagccgagtggccttgggctggggagtatggagcagt

SEQ ID NO: 42345 - DNA, 1475 bp, Homo sapiens
tcagaattgagcttttgttcctgcatctcagaaataccaggaagaagtcagcatctcattaaacaggagttgtctaaactgtggaagaaaatatcccccattctttatcctacgctgaatccacaagtcttcccatcttccaccatcttctgacagttccataatatattggtatccctcacagggcagggacaggaaggaaataaatctttctgccacttgtttccaaccgaaaaggaaaaaagttaaaaattactaaagtgttctgaaaagagatttcaagtggtctgtgctgcttttttgccttgttacgcacataacttgtgactggctagataggccacgtgtatttatcagccaagattccattgcagcagatgatttcaaaacctctttgtgtgctgggccgtgctaggtagctggaatatctgaggtaaattaagcactgatttgttcccagagttgtgcataattctttaaaagtaggctcgtttttttcgtttttttgtccaggatcacctaagtgaagtactcgtggttctaagttgctaacccagggaaagaggatattttcctgtcctaaccttggtttttgaaatatgcttctcctgtgtgccctctctggggtatctggcccacagtagattgctcagcagatatttgaatgagcagatgctttgctttgtcctcctgtgccaggctcctccccacatcctctggatcagctccacgtgcctagattcagactccgtgattcaccgtgggggcccttaataggcattcagtctgaaagaaggtggaggagaataatgtctcccaggatcaaatgagactcagggctgttccttcaaagacagaaacttgcagagctgcacagcagcagggaaacattgagaagggggtggaaatttgatgtactgtgaataatgaaggccggatctttaaaaagaaaaagggacggggtgctggcagaaacccagctctgcgctagcacaatctgtacacctggctgcctttgcccttgagcttctatttcttggggatggggagggcaaaaaagtttgccccagacactggcttctgtttgaacaggaagtggggagtcagtgatcccagaggggacttcagcatcaggacatatgctttggtggcctcagcagacctggcctaggcaggctttcaggtggcacccaggggctttatggcctgcaggtaaggccccttcatccgggtcagacttagcaaataaaaatataggacactcaattaagtttgcattttggataaacagtgaagaagttcctagtgtaagtatgtcccagttctatgtggctgccctacctgggcttgcctctgctggtactagctgcccagagaccttcaggcctgccacgggctgccgggacctctattatttaatataatatttccttattctattcttactgtagattgagtttattatctttatctcc

SEQ ID NO: 42346 - DNA, 250 bp, Homo sapiens
gagcgaggtgatctagaggatcccagatgatgagagaacccccaagattagtgcaagagatatttgtgtgagggaatgagcacttctaagtcagtgaaagctaccaacctgtatataccctctgacttttttttggagacaaaattttgctcttgttgcccaggctggagtacaatggcgcgatctcagctcaccgcaacctctgcctcctggattcaaatgattctcctgcctcagcctcctgagtagc

SEQ ID NO: 42347 - DNA, 1046 bp, Homo sapiens
  misc_feature (55)..(56): n is a, c, g, or t
  misc_feature (60)..(60): n is a, c, g, or t
  misc_feature (64)..(64): n is a, c, g, or t
  misc_feature (76)..(76): n is a, c, g, or t
  misc_feature (78)..(79): n is a, c, g, or t
  misc_feature (81)..(81): n is a, c, g, or t
cacaataacaacaacaaaaagatatgtagttataaattataaataattagaaaannttcntaanactaaacaaagnannantctaatcagaatatatcataaggactcaacccctaaaggagatttgtgaagatgaaatgtgatgattttgtccaggcatggtggcttattcctgtaattaatgccagcactttgggaggccgaggcagatggattgcttgcacctaggagtccaggaccagcctgagcaacataacaaaaccgcatctctgcaaaaaatgcaaaaattagttgagcgtggtgcacgtctgattctcccatttcagcctcccaagtagctgggactataggctcgtgccatcatgcctggctaatttttttattttttgtagaaatggggtttcaccatgttgcccaggctggtctctaattcctggactcaagcagtccaccagcctcagccttccagagtgctgggattacaggcatgagactgcaactggccacgccttttttttgtttaatgaaaccaatgacaatgtaaaagtctgtgctttagcatttcttcttaaagaacgatgaaactctttgatgaattaagatggaagattagctgagctgaacttactattgatagcgtgtaaactggttgcatctatttggagttcttactgtgacgagaggtctctgaaagggaatgtatttgttgaaaagtctttgggtacaaaacaagaaagggtaaccctttatcaaaaagaccaaagaaattctcattgtcctaggtcatgaaataatactcagggcatcctcctcacaacttggaaaatatagaacttgtgcattacctcatcccactggcttccagattatatgtgcaagagatatttgtgtgagggaatgagcacttctaagtcagtgaaagctaccaacctgtatataccctctgacttttttttggagacaaaattttgctcttgttgcccaggagtgagctgagattgtgccactgcacttcagcctgggctacagaatgagacctatccaaa

SEQ ID NO: 42348 - DNA, 767 bp, Homo sapiens
  misc_feature (109)..(110): n is a, c, g, or t
  misc_feature (114)..(114): n is a, c, g, or t
  misc_feature (118)..(118): n is a, c, g, or t
  misc_feature (130)..(130): n is a, c, g, or t
  misc_feature (132)..(133): n is a, c, g, or t
  misc_feature (135)..(135): n is a, c, g, or t
gaaaaatgatatatctccgctaagatgagatgatccgttagataaaactagacatagtaaacaaagataattgtggttaataaaattactaaacaataaattagaaaannttcntaanactaaacaaagnannantctaatcagaatatatcataaggactcaacccctaaaggagatttgtgaagatgaaatgtgatgattttaggcatgagactgcaactggccacgccttttttttgtttaatgaaaccaatgacaatgtaaaagtctgtgctttagcatttcttcttaaagaacgatgaaactctttgatgaattaagatggaagattagctgagctgaacttactattgatagcgtgtaaactggttgcatctatttggagttcttactgtgacgagaggtctctgaaagggaatgtatttgttgaaaagtctttgggtacaaaacaagaaagggtaaccctttatcaaaaagaccaaagaaattctcattgtcctaggtcatgaaataatactcagggcatcctcctcacaacttggaaaatatagaacttgtgcattacctcatcccactggcttccagattatatgtgcaagagatatttgtgtgagggaatgagcacttctaagtcagtgaaagctaccaacctgtatataccctctgacttttttttggagacaaaattttgctcttgttgcccaggagtgagctgagattgtgccactgcacttcagcctgggctacagaatgagacctatccaaa

SEQ ID NO: 42349 - DNA, 708 bp, Homo sapiens
  misc_feature (55)..(56): n is a, c, g, or t
  misc_feature (60)..(60): n is a, c, g, or t
  misc_feature (64)..(64): n is a, c, g, or t
  misc_feature (76)..(76): n is a, c, g, or t
  misc_feature (78)..(79): n is a, c, g, or t
  misc_feature (81)..(81): n is a, c, g, or t
cacaataacaacaacaaaaagatatgtagttataaattataaataattagaaaannttcntaanactaaacaaagnannantctaatcagaatatatcataaggactcaacccctaaaggagatttgtgaagatgaaatgtgatgattttgtccaggcatggtggcttattcctgtaattaatgccagcactttgggaggccgaggcagatggattgcttgcacctaggagtccaggaccagcctgagcaacataacaaaaccgcatctctgcaaaaaatgcaaaaattagttgagcgtggtgcacgtctgattctcccatttcagcctcccaagtagctgggactataggctcgtgccatcatgcctggctaatttttttattttttgtagaaatggggtttcaccatgttgcccaggctggtctctaattcctggactcaagcagtccaccagcctcagccttccagagtgctgggattacaggcatgagactgcaactggccacgccttttttttgtttaatgaaaccaatgacaatgtaaaagtctgtgctttagcatttcttcttaaagaacgatgaaactctttgatgaattaagatggaagattagctgagctgaacttactattgatagcgtgtaaactgagtgagctgagattgtgccactgcacttcagcctgggctacagaatgagacctatccaaa

SEQ ID NO: 42350 - DNA, 354 bp, Homo sapiens
ctctctcatctagcttcctgacagtagcatttggggaaatataattcttcttttcattttgccctctctctgcccctttcagttgaaactagcaatgtacctgctagtatagttttctcaaaaactttgtgagcctcctgtgaatcctattggggttaaatccactttaaaaacccacagccacaaatgtctttgaggaaagcccttctgtaccttgagttcgtgctgagatagctgagggacaatgttcttcagcttcctagaggctacattgcttgcctgagggaatctgtgagacttaacctgaatccctttgcgtgactgaatattaattcaatttatttttctaagaat

SEQ ID NO: 42351 - DNA, 846 bp, Homo sapiens
ataagtactatggagcacctttgagaaacgtaggtgcaaaatcatatgttgcctattcccccatattttcttgaggcagggaaagataccactactaattctcactgcttacaggcataatcagaaatggttttttgtttgcctgtttttccttctggctagtaagaagcgtaaaagagataatgaaatatttgtggtcaaaagaaagatgcaagggaaattccaaatagtatggagtaacattatttaaactttaatacatgtttaagcatccccaagggagcttgttaacagtacagattcctgggcccccagagggtctgtggttgagcccaggaatgtgcatttttattttattgagcactctgcctgactctggctcaggtagtccctgggaaactcttcaggaaacattcctgtagaaaatatatctatttaaatatcatctgttttatcccacaatgtttgtttcgtgttgcaagccattatcttctaggcatgggtaatccacattgagaggaaaatccacacaacattgtgcctgatttgctgccacctgtgtttgtgctggatcttgccagtgttagctttattttctttcaactggcaaaattctgataaagcatatagcttcacagtagagcaaaatgggtgacttaattgaaagtcatgactttcagcagtctaattatgctcatattttattttcttatagagagctgtctttattgtgtgtaattcccggaagaatgtaaagatttatctaattcctattgctctgccagttgtgttcaatgcaagcattgaagtaaaataaaaataacctttttaatatgtgtatttctg

SEQ ID NO: 42352 - DNA, 792 bp, Homo sapiens
ataagtactatggagcacctttgagaaacgtaggtgcaaaatcatatgttgcctattcccccatattttcttgaggcagggaaagataccactactaattctcactgcttacaggcataatcagaaatggttttttgtttgcctgtttttccttctggctagtaagaagcgtaaaagagataatgaaatatttgtggtcaaaagaaagatgcaagggaaattccaaatagtatggagtaacattatttaaactttaatacatgtttaagcatccccaagggagcttgttaacagtacagattcctgggcccccagagggtctgtggttgagcccaggaatgtgcatttttattttattgagcactctgcctgactctggctcaggtagtccctgggaaactcttcaggaaacattcctgtagaaaatatatctatttaaatatcatctgttttatcccacaatgtttgtttcgtgttgcaagccattatcttctaggcatgggtaatccacattgagaggttgccagtgttagctttattttctttcaactggcaaaattctgataaagcatatagcttcacagtagagcaaaatgggtgacttaattgaaagtcatgactttcagcagtctaattatgctcatattttattttcttatagagagctgtctttattgtgtgtaattcccggaagaatgtaaagatttatctaattcctattgctctgccagttgtgttcaatgcaagcattgaagtaaaataaaaataacctttttaatatgtgtatttctg

SEQ ID NO: 42353 - DNA, 980 bp, Homo sapiens
gaggagttggcgagcgcagaggttaataacctagcgcggcgtttctggtggccaggcatcccggtcctcgcgcgtggcgcagcctcccagcgccggaccgacccatgtcgcgcccgcattgggtcccgggaccccggcgggagtgccgcgtccgtcctttccagtcgccgggagtctgagtcgcgggccacgcgggagtggcggtggagagcccgccggtcgttatgaggacggatctaaaatgaccagcaaacggaaaccttgccaaacgcagctcaggagatccatcagtgagcagttgcgggactccacggccagagcctgggatctgctgtggaagaacgtccgggagaggcggctggcaggactatctcttgagctgggcagtgaccaccacatggggcagaagaaagttctagagaagaaggtctgatgcctagaaagaaggaaaggacaccactggtgaagcgggagatttaaccttctttgaactcctcccttttttccttacttgaactgtaaagcaagtggtttgctaggtgttctgcccttaaacccatgcacccacatcctcatcagcctgaaagcattctggggaagatgcccagaatctatagcaccttgagagaaggtcactagcaagctaaattagaagtggagattatggatgattccaacactcaatgttgtaagcatacaatgttcattccacattttctctccaacacagtggccacatttagtgtgcacctaagaaataaacagacttttttggtttggacccagaaataaattgtggtaacccagcagttttgactgttgatgtttaaaaacctgtacatgcactgtagacctcaattaataacaattagtaactttccctgttatcatgctaaattgtatattctacatgatggatggtgttagagaaatttttgtggtctagtaaacttttgttgcttcataacttcaaaaactta

SEQ ID NO: 42354 - DNA, 324 bp, Homo sapiens
tctccaatctcttagttgcgctttagtttattttgaagactttgatttaagtaaaataagtgaaagcattgtaaccactattctgtgtgctccgtaacatgctaatcctgctttatgtttttttttttaacaccaagttatcatggaacaaggatggaagcacctatttcttctctaagatttttcaagaaatttttggccatatttttcagcagattgttcagttattagtatgctgttatctcatcatttcacacttgcatttatgaaatgaaactgttagtgtgagtcacagtgacacttagccaccttgcaggcatttta

SEQ ID NO: 42355 - DNA, 229 bp, Homo sapiens
tacagggagtcagtcttggtgcaaggtgaggccacagagctgtaatgggcctgaccagcctcgcactgtacaagcaccaatctagagctaggactgaagctgcaagatgactgacaggactctgggggcattagctccctccaacaaatggtggtctcacgtttcaagggctgtggtcacctccttcctcgtgacacccctggacatggtggaaggtccatttgcagcc

SEQ ID NO: 42356 - DNA, 1524 bp, Homo sapiens
gatatacattgtttgcaaagtaaatgaaacaggttaacttcctggatgcttacttttagcagaaatatatcagatagcaaacttgctgacagatgaatcacagctttgcccacctgtaatgaggatacactgctggatcccagattctgtttctggcgtctgcatacgcaagtccccaactcgctgaggagagctgttcagctatggctgctgtcacacattacctgtatctttgccagtttagctggatgctcattcagtctgtgaatttctggtacgtgctggtgatgaatgatgagcacacagagaggcgatatctgctgtttttccttctgagttggggactaccagcttttgtggtgattctcctcatagttattttgaaaggaatctatcatcagagcatgtcacagatctatggactcattcatggtgacctgtgttttattccaaacgtctatgctgctttgttcactgcagctcttgttcctttgacgtgcctcgtggtggtgttcgtggtgttcatccatgcctaccaggtgaagccacagtggaaagcatatgatgatgtcttcagaggaaggacaaatgctgcagaaattccactgattttatatctctttgctctgatttccgtgacatggctttggggaggactacacatggcctacagacacttctggatgttggttctctttgtcattttcaacagtctgcagggactttatgttttcatggtttatttcattttacacaaccaaatgtgttgccctatgaaggccagttacactgtggaaatgaatgggcatcctggacccagcacagcctttttcacgcccgggagtggaatgcctcctgctggaggggaaatcagcaagtccacccagaatctcatcggtgctatggaggaggtgccacctgactgggagagagcatccttccaacagggcagtcaggccagccctgatttaaagccaagtccacaaaatggagccacgttcccgtcctctggaggatatggccaggggtcactgatagccgatgaggagtcccaggagtttgatgatttaatatttgcattaaaaactggtgctggtctcagtgtcagtgataatgaatctggtcaaggcagccaggaggggggcaccttgactgactcccagatcgtggagctcaggaggatacccatcgccgacactcacctgtagcacctcactaaccattcgactgagcacactttcatatttgtatcagcttttgtgctaaaactctctaagtacatccacctgtgtaataggaacctgtgaattgtactggatgattaatacaaacgtgattgttgtatttggagtataaattactgattgtatgtgacctgaaaattcactgctataagaaaggtggagtcagtttgtatcagttaataggatgttcatattccaaggatattagttgtttttttaatcatcctatatggctaacattgtttaatgaaagtaataatcaataaagcaatagaatcta

SEQ ID NO: 42357 - DNA, 1743 bp, Homo sapiens
gatatacattgtttgcaaagtaaatgaaacaggttaacttcctggatgcttacttttagcagaaatatatcagatagcaaacttgctgacagatgaatcacagctttgcccacctgtaatgaggatacactgctggatcccagattctgtttctggcgtctgcatacgcaagtccccaactcgctgaggagagctgttcagctatggctgctgtcacacattacctgtatctttgccagtttagctggatgctcattcagtctgtgaatttctggtacgtgctggtgatgaatgatgagcacacagagaggcgatatctgctgtttttccttctgagttggggactaccagcttttgtggtgattctcctcatagttattttgaaaggaatctatcatcagagcatgtcacagatctatggactcattcatggtgacctgtgttttattccaaacgtctatgctgctttgttcactgcagctcttgttcctttgacgtgcctcgtggtggtgttcgtggtgttcatccatgcctaccaggtgaagccacagtggaaagcatatgatgatgtcttcagaggaaggacaaatgctgcagaaattccactgattttatatctctttgctctgatttccgtgacatggctttggggaggactacacatggcctacagacacttctggatgttggttctctttgtcattttcaacagtctgcagggactttatgttttcatggtttatttcattttacacaaccaaatgtgttgccctatgaaggccagttacactgtggaaatgaatgggcatcctggacccagcacagcctttttcacgcccgggagtggaatgcctcctgctggaggggaaatcagcaagtccacccagaatctcatcggtgctatggaggaggtgccacctgactgggagagagcatccttccaacagggcagtcaggccagccctgatttaaagccaagtccacaaaatggagccacgttcccgtcctctggaggatatggccaggggtcactgatagccgatgaggagtcccaggagtttgatgatttaatatttgcattaaaaactggtgctggtctcagtgtcagtgataatgaatctggtcaaggcagccaggaggggggcaccttgactgactcccagatcgtggagctcaggaggatacccatcgccgacactcacctgtagcacctcactaaccattcgactgagcacactttcatatttgtatcagcttttgtgctaaaactctctaagtacatccacctgtgtaataggaacctgtgaattgtactggatgattaatacaaacgtgattgttgtatttggagtataaattactgattgtatgtgacctgaaaattcactgctataagaaaggtggagtcagtttgtatcagttaataggatgttcatattccaaggatattagttgtttttttaatcatcctatatggctaacattgtttaatgaaagtaataatcaataaagcaatagaatctatttggtatcatccagcttcattattgataaagaaacattgtgcatgggcaaaaaaagctaactctatatgtagatgatgacaagcaccctgtgccatcttgcatgaatccaggtgatccagattcaagacttcactgcaactagaagactttaattctgaaaactgtaaaatggtctgtctgttgatgatcctgcacataaatgttgattggagtactg

SEQ ID NO: 42358 - DNA, 1469 bp, Homo sapiens
gatatacattgtttgcaaagtaaatgaaacaggttaacttcctggatgcttacttttagcagaaatatatcagatagcaaacttgctgacagatgaatcacagctttgcccacctgtaatgaggatacactgctggatcccagattctgtttctggcgtctgcatacgcaagtccccaactcgctgaggagagctgttcagctatggctgctgtcacacattacctgtatctttgccagtttagctggatgctcattcagtctgtgaatttctggtacgtgctggtgatgaatgatgagcacacagagaggcgatatctgctgtttttccttctgagttggggactaccagcttttgtggtgattctcctcatagttattttgaaaggaatctatcatcagagcatgtcacagatctatggactcattcatggtgacctgtgttttattccaaacgtctatgctgctttgttcactgcagctcttgttcctttgacgtgcctcgtggtggtgttcgtggtgttcatccatgcctaccaggtgaagccacagtggaaagcatatgatgatgtcttcagaggaaggacaaatgctgcagaaattccactgattttatatctctttgctctgatttccgtgacatggctttggggaggactacacatggcctacagacacttctggatgttggttctctttgtcattttcaacagtctgcagggactttatgttttcatggtttatttcattttacacaaccaaatgtgttgccctatgaaggccagttacactgtggaaatgaatgggcatcctggacccagcacagcctttttcacgcccgggagtggaatgcctcctgctggaggggaaatcagcaagtccacccagaatctcatcggtgctatggaggaggtgccacctgactgggagagagcatccttccaacagggcagtcaggccagccctgatttaaagccaagtccacaaaatggagccacgttcccgtcctctggaggatatggccaggggtcactgatagccgatgaggagtcccaggagtttgatgatttaatatttgcattaaaaactggtgctggtctcagtgtcagtgataatgaatctggtcaaggcagccaggaggggggcaccttgactgactcccagatcgtggagctcaggaggatacccatcgccgacactcacctgtgctaaaactctctaagtacatccacctgtgtaataggaacctgtgaattgtactggatgattaatacaaacgtgattgttgtatttggagtataaattactgattgtatgtgacctgaaaattcactgctataagaaaggtggagtcagtttgtatcagttaataggatgttcatattccaaggatattagttgtttttttaatcatcctatatggctaacattgtttaatgaaagtaataatcaataaagcaatagaatcta

SEQ ID NO: 42359 - DNA, 1566 bp, Homo sapiens
ttggcttctgccctcaaccaaaatggcgctagctcggaagctgccgaggtgctaggagttgccgaagcaagtccggaagctaccgagcgagtccggaagttgccgaaagggagcagcggggaaggaggatggcggatatcatcgcaagactccgggaggacgggatccaaaaacgtgtgatacaggaaggccgaggagagctcccggactttcaagatgggaccaaggccacgttccactaccggacgctgcacagtgacgacgagggcaccgtgctggacgacagccgggctcgtggcaagcccatggagctcatcattggcaagaagttcaagctgcctgtgtgggagaccatcgtgtgcaccatgcgagaaggggagattgcccagttcctctgtgacatcaagcatgtggtcctgtacccgctggtggccaagagtctccgcaacatcgcggtgggcaaggaccccctggagggccagcggcactgctgcggtgttgcacagatgcgtgaacacagctccctgggccatgctgacctggacgccctgcagcagaacccccagcccctcatcttccacatggagatgctgaaggtggagagccctggcacgtaccagcaggacccatgggccatgacagacgaagagaaggcaaaggcagtgccacttatccaccaggagggcaaccggttgtaccgcgaggggcatgtgaaggaggctgctgccaagtactacgatgccattgcctgcctcaagaacctgcagatgaaggaacagcctgggtcccctgaatggatccagctggacaagcagatcacgccgctgctgctcaactactgccagtgcaagctggtggtcgaggagtactacgaggtgctggaccactgctcttccatcctcaacaagtacgacgacaacgtcaaggcctacttcaagcggggcaaggcccacgcggccgtgtggaatgcccaggaggcccaggctgactttgccaaagtgctggagctggacccagccctggcgcctgtggtgagccgagagctgcgggccctggaggcacggatccggcagaaggacgaagaggacaaagcccggttccgggggatcttctcccattgacaggagcacttggccctgccttacctgccaagcccactgctgcagctgccagcccccctgcccgtgctgcgtcatgcttctgtgtatataaaggcctttatttatctctctctctgagtctgctgagctgctccactgggagagccgggtcatcacctggcattcctggtacttgggtggctgttgggaggcaaagaatcagggttcaaatcctagcccctccacccaccagctctgaggctctggtgtccctgttagagaaattacgatgagctctttcaccaaggaagtgtctctcgctggccagggctggggcgccccaggagcccacagtcttaagggggagatgaagtgggtacaagctaggtagctgggcacctgagggaggtagtctcctggtgctgccctcccactccagcctcggatcccatggtctcctggcctc

SEQ ID NO: 42360 - DNA, 745 bp, Homo sapiens
ggaaacccagggccgggagtggtcctcgggtatctgggtttcaaggctcatgatcctttgtagatggaagggccttctgaaaacacttagaccaactgccgctgtttagagtggaaaaccaagaccctgggacgtgcaaagccggagaacgggcccagaggccacgttccactaccggacgctgcacagtgacgacgagggcaccgtgctggacgacagccgggctcgtggcaagcccatggagctcatcattggcaagaagttcaagctgcctgtgtgggagaccatcgtgtgcaccatgcgagaaggggagattgcccagttcctctgtgacatcaagcatgtggtcctgtacccgctggtggccaagagtctccgcaacatcgcggtgggcaaggaccccctggagggccagcggcactgctgcggtgttgcacagatgcgtgaacacagctccctgggccatgctgacctggacgccctgcagcagaacccccagcccctcatcttccacatggagatgctgaaggtggagagccctggcacgtaccagcaggacccatgggccatgacagacgaagagaaggcaaaggcagtgccacttatccaccaggagggcaaccggttgtaccgcgaggggcatgtgaaggaggctgctgccaagtactacgatgccattgcctgcctcaagaacctgcagatgaagtcccctgtaggatctagtaaacaacagtaccgctgcttg

SEQ ID NO: 42361 - DNA, 1231 bp, Homo sapiens
ttggcttctgccctcaaccaaaatggcgctagctcggaagctgccgaggtgctaggagttgccgaagcaagtccggaagctaccgagcgagtccggaagttgccgaaagggagcagcggggaaggaggatggcggatatcatcgcaagactccgggaggacgggatccaaaaacgtgtgatacaggaaggccgaggagagctcccggactttcaagatgggaccaaggccacgttccactaccggacgctgcacagtgacgacgagggcaccgtgctggacgacagccgggctcgtggcaagcccatggagctcatcattggcaagaagttcaagctgcctgtgtgggagaccatcgtgtgcaccatgcgagaaggggagattgcccagttcctctgtgacatcaagcatgtggtcctgtacccgctggtggccaagagtctccgcaacatcgcggtgggcaaggaccccctggagggccagcggcactgctgcggtgttgcacagatgcgtgaacacagctccctgggccatgctgacctggacgccctgcagcagaacccccagcccctcatcttccacatggagatgctgaaggtggagagccctggcacgtaccagcaggacccatgggccatgacagacgaagagaaggcaaaggcagtgccacttatccaccaggagggcaaccggttgtaccgcgaggggcatgtgaaggaggctgctgccaagtactacgatgccattgcctgcctcaagaacctgcagatgaaggaacagcctgggtcccctgaatggatccagctggacaagcagatcacgccgctgctgctcaactactgccagtgcaagctggtggtcgaggagtactacgaggtgctggaccactgctcttccatcctcaacaagtacgacgacaacgtcaaggcctacttcaagcggggcaaggcccacgcggccgtgtggaatgcccaggaggcccaggctgactttgccaaagtgctggagctggacccagccctggcgcctgtggtgagccgagagctgcgggccctggaggcacggatccggcagaaggacgaagaggacaaagcccggttccgggggatcttctcccattgacaggagcacttggccctgccttacctgccaagcccactgctgcagctgccagcccccctgcccgtgctgcgtcatgcttctgtgtatataaaggcctttatttatctctc

SEQ ID NO: 42362 - DNA, 1909 bp, Homo sapiens
ttggcttctgccctcaaccaaaatggcgctagctcggaagctgccgaggtgctaggagttgccgaagcaagtccggaagctaccgagcgagtccggaagttgccgaaagggagcagcggggaaggaggatggcggatatcatcgcaagactccgggaggacgggatccaaaaacgtgtgatacaggaaggccgaggagagctcccggactttcaagatgggaccaaggccacgttccactaccggacgctgcacagtgacgacgagggcaccgtgctggacgacagccgggctcgtggcaagcccatggagctcatcattggcaagaagttcaagctgcctgtgtgggagaccatcgtgtgcaccatgcgagaaggggagattgcccagttcctctgtgacatcaagcatgtggtcctgtacccgctggtggccaagagtctccgcaacatcgcggtgggcaaggaccccctggagggccagcggcactgctgcggtgttgcacagatgcgtgaacacagctccctgggccatgctgacctggacgccctgcagcagaacccccagcccctcatcttccacatggagatgctgaaggtggagagccctggcacgtaccagcaggacccatgggccatgacagacgaagagaaggcaaaggcagtgccacttatccaccaggagggcaaccggttgtaccgcgaggggcatgtgaaggaggctgctgccaagtactacgatgccattgcctgcctcaagaacctgcagatgaaggaacagcctgggtcccctgaatggatccagctggacaagcagatcacgccgctgctgctcaactactgccagtgcaagctggtggtcgaggagtactacgaggtgctggaccactgctcttccatcctcaacaagtacgacgacaacgtcaaggcctacttcaagcggggcaaggcccacgcggccgtgtggaatgcccaggaggcccaggctgactttgccaaagtgctggagctggacccagccctggcgcctgtggtgagccgagagctgcgggccctggaggcacggatccggcagaaggacgaagaggacaaagcccggttccgggggatcttctcccattgacaggagcacttggccctgccttacctgccaagcccactgctgcagctgccagcccccctgcccgtgctgcgtcatgcttctgtgtatataaaggcctttatttatctctcaaaaaaaaaaaaaaaaaaaaaaaaaaaaaaaaaaaaaaaaaaaaaaaaaaaaaaaaaaagagagagggggggcgcgcgcgccccaagagagtctctctccccgcggggggcgcgccccaggttccgcgcgccgctccacccgcgtgttttgtgtgtgtgaacaaagaggggcgccccacataaggagaggagacgtctatattattataaagcgctagagagcgaacggcggcgcgcgccttttttcttacacaaacgactgtgtgcggagagagggagagacacaagccgtgcgcaaccacggcgagagacctcttttgagggagagaggagacccccttatatctctctcgcgggggggggggggagccaccatatatctgtggcgcgacaaatactctctcccccacacagagagagatttttatcaaacgagctcatctccacgagagggagacacatatctatctccatatctcttctaccacgcgcgtgtgctgtatctcctgcgcgctgtgctacaacaacacaaccgcgacagaaattgtcctggtcgcgcgcgcgacaaaggaagaatttttgtgcgcccgcctcccccggggggcgcacttccgctgcttcaccacagacaaattttttttatcccccgggccgtactgatattttacaataagttgg

SEQ ID NO: 42363 - DNA, 1178 bp, Homo sapiens
  misc_feature (1157)..(1157): n is a, c, g, or t
ttggcttctgccctcaaccaaaatggcgctagctcggaagctgccgaggtgctaggagttgccgaagcaagtccggaagctaccgagcgagtccggaagttgccgaaagggagcagcggggaaggaggatggcggatatcatcgcaagactccgggaggacgggatccaaaaacgtgtgatacaggaaggccgaggagagctcccggactttcaagatgggaccaaggccacgttccactaccggacgctgcacagtgacgacgagggcaccgtgctggacgacagccgggctcgtggcaagcccatggagctcatcattggcaagaagttcaagctgcctgtgtgggagaccatcgtgtgcaccatgcgagaaggggagattgcccagttcctctgtgacatcaagcatgtggtcctgtacccgctggtggccaagagtctccgcaacatcgcggtgggcaaggaccccctggagggccagcggcactgctgcggtgttgcacagatgcgtgaacacagctccctgggccatgctgacctggacgccctgcagcagaacccccagcccctcatcttccacatggagatgctgaaggtggagagccctggcacgtaccagcaggacccatgggccatgacagacgaagagaaggcaaaggcagtgccacttatccaccaggagggcaaccggttgtaccgcgaggggcatgtgaaggaggctgctgccaagtactacgatgccattgcctgcctcaagaacctgcagatgaaggaacagcctgggtcccctgaatggatccagctggacaagcagatcacgccgctgctgctcaactactgccagtgcaagctggtggtcgaggagtactacgaggtgctggaccactgctcttccatcctcaacaagtacgacgacaacgtcaaggcctacttcaagcggggcaaggcccacgcggccgtgtggaatgcccaggaggcccaggctgactttgccaaagtgctggagctggacccagccctggcgcctgtggtgagccgagagctgcgggccctggaggcacggatccggcagaaggacgaagaggacaaagcccggttccgggggatcttctcccattgacaggagcacttggccctgacacatatacacacatanacacacacacacacacacaca

SEQ ID NO: 42364 - DNA, 1021 bp, Homo sapiens
ttggcttctgccctcaaccaaaatggcgctagctcggaagctgccgaggtgctaggagttgccgaagcaagtccggaagctaccgagcgagtccggaagttgccgaaagggagcagcggggaaggaggatggcggatatcatcgcaagactccgggaggacgggatccaaaaacgtgtgatacaggaaggccgaggagagctcccggactttcaagatgggaccaaggccacgttccactaccggacgctgcacagtgacgacgagggcaccgtgctggacgacagccgggctcgtggcaagcccatggagctcatcattggcaagaagttcaagctgcctgtgtgggagaccatcgtgtgcaccatgcgagaaggggagattgcccagttcctctgtgacatcaagcatgtggtcctgtacccgctggtggccaagagtctccgcaacatcgcggtgggcaaggaccccctggagggccagcggcactgctgcggtgttgcacagatgcgtgaacacagctccctgggccatgctgacctggacgccctgcagcagaacccccagcccctcatcttccacatggagatgctgaaggtggagagccctggcacgtaccagcaggacccatgggccatgacagacgaagagaaggcaaaggcagtgccacttatccaccaggagggcaaccggttgtaccgcgaggggcatgtgaaggaggctgctgccaagtactacgatgccattgcctgcctcaagaacctgcagatgaaggctgactttgccaaagtgctggagctggacccagccctggcgcctgtggtgagccgagagctgcgggccctggaggcacggatccggcagaaggacgaagaggacaaagcccggttccgggggatcttctcccattgacaggagcacttggccctgccttacctgccaagcccactgctgcagctgccagcccccctgcccgtgctgcgtcatgcttctgtgtatataaaggcctttatttatctctc

SEQ ID NO: 42365 - DNA, 812 bp, Homo sapiens
ttggcttctgccctcaaccaaaatggcgctagctcggaagctgccgaggtgctaggagttgccgaagcaagtccggaagctaccgagcgagtccggaagttgccgaaagggagcagcggggaaggaggatggcggatatcatcgcaagactccgggaggacgggatccaaaaacgtgtgatacaggaaggccgaggagagctcccggactttcaagatgggaccaaggccacgttccactaccggacgctgcacagtgacgacgagggcaccgtgctggacgacagccgggctcgtggcaagcccatggagctcatcattggcaagaagttcaagctgcctgtgtgggagaccatcgtgtgcaccatgcgagaaggggagattgcccagttcctctgtgacatcaagcatgtggtcctgtacccgctggtggccaagagtctccgcaacatcgcggtgggcaaggaccccctggagggccagcggcactgctgcggtgttgcacagatgcgtgaacacagctccctgggccatgctgacctggacgccctgcagcagaacccccagcccctcatcttccacatggagatgctgaaggtggagagccctggcacgtaccagcaggacccatgggccatgacagacgaagagaaggcaaaggcagtgccacttatccaccaggagggcaaccggttgtaccgcgaggggcatgtgaaggaggctgctgccaagtactacgatgccattgcctgcctcaagaacctgcagatgaagtcccctgtaggatctagtaaacaacagtaccgctgcttg

SEQ ID NO: 42366 - DNA, 711 bp, Homo sapiens
cgtggtgaattcgtcgtcgtggtccatggtgcagcagaacccccagcccctcatcttccacatggagatgctgaaggtggagagccctggcacgtaccagcaggacccatgggccatgacagacgaagagaaggcaaaggcagtgccacttatccaccaggagggcaaccggttgtaccgcgaggggcatgtgaaggaggctgctgccaagtactacgatgccattgcctgcctcaagaacctgcagatgaaggaacagcctgggtcccctgaatggatccagctggacaagcagatcacgccgctgctgctcaactactgccagtgcaagctggtggtcgaggagtactacgaggtgctggaccactgctcttccatcctcaacaagtacgacgacaacgtcaaggcctacttcaagcggggcaaggcccacgcggccgtgtggaatgcccaggaggcccaggctgactttgccaaagtgctggagctggacccagccctggcgcctgtggtgagccgagagctgcgggccctggaggcacggatccggcagaaggacgaagaggacaaagcccggttccgggggatcttctcccattgacaggagcacttggccctgccttacctgccaagcccactgctgcagctgccagcccccctgcccgtgctgcgtcatgcttctgtgtatataaaggcctttatttatctctc

SEQ ID NO: 42367 - DNA, 865 bp, Homo sapiens
ttggcttctgccctcaaccaaaatggcgctagctcggaagctgccgaggtgctaggagttgccgaagcaagtccggaagctaccgagcgagtccggaagttgccgaaagggagcagcggggaaggaggatggcggatatcatcgcaagactccgggaggacgggatccaaaaacgtgtgatacaggaaggccgaggagagctcccggactttcaagatgggaccaaggccacgttccactaccggacgctgcacagtgacgacgagggcaccgtgctggacgacagccgggctcgtggcaagcccatggagctcatcattggcaagaagttcaagctgcctgtgtgggagaccatcgtgtgcaccatgcgagaaggggagattgcccagttcctctgtgacatcaagcatgtggtcctgtacccgctggtggccaagagtctccgcaacatcgcggtgggcaaggaccccctggagggccagcggcactgctgcggtgttgcacagatgcgtgaacacagctccctgggccatgctgacctggacgcccacaacgtcaaggcctacttcaagcggggcaaggcccacgcggccgtgtggaatgcccaggaggcccaggctgactttgccaaagtgctggagctggacccagccctggcgcctgtggtgagccgagagctgcgggccctggaggcacggatccggcagaaggacgaagaggacaaagcccggttccgggggatcttctcccattgacaggagcacttggccctgccttacctgccaagcccactgctgcagctgccagcccccctgcccgtgctgcgtcatgcttctgtgtatataaaggcctttatttatctctc

SEQ ID NO: 42368 - DNA, 538 bp, Homo sapiens
ttagcacttggcacagtgctgggcacacaggagatgtgacatcgatgtttgtttgatgctttttgagtgacaagtagctctgctgctggtgtgtgatgtctgggggcccagccagcccagatgtgggtcaggtctgctgctgacggacgcagctgtggtgtccccgagccccgctgtgatatgccccatgccctgcaggtggagagccctggcacgtaccagcaggacccatgggccatgacagacgaagagaaggcaaaggggccgtgtggaatgcccaggaggcccaggctgactttgccaaagtgctggagctggacccagccctggcgcctgtggtgagccgagagctgcgggccctggaggcacggatccggcagaaggacgaagaggacaaagcccggttccgggggatcttctcccattgacaggagcacttggccctgccttacctgccaagcccactgctgcagctgccagcccccctgcccgtgctgcgtcatgcttctgtgtatataaaggcctttatttatctctc

SEQ ID NO: 42369 - DNA, 1266 bp, Homo sapiens
  misc_feature (1251)..(1251): n is a, c, g, or t
  misc_feature (1263)..(1263): n is a, c, g, or t
ttggcttctgccctcaaccaaaatggcgctagctcggaagctgccgaggtgctaggagttgccgaagcaagtccggaagctaccgagcgagtccggaagttgccgaaagggagcagcggggaaggaggatggcggatatcatcgcaagactccgggaggacgggatccaaaaacgtgtgatacaggaaggccgaggagagctcccggactttcaagatgggaccaaggccacgttccactaccggacgctgcacagtgacgacgagggcaccgtgctggacgacagccgggctcgtggcaagcccatggagctcatcattggcaagaagttcaagctgcctgtgtgggagaccatcgtgtgcaccatgcgagaaggggagattgcccagttcctctgtgacatcaagcatgtggtcctgtacccgctggtggccaagagtctccgcaacatcgcggtgggcaaggaccccctggagggccagcggcactgctgcggtgttgcacagatgcgtgaacacagctccctgggccatgctgacctggacgccctgcagcagaacccccagcccctcatcttccacatggagatgctgaaggtggagagccctggcacgtaccagcaggacccatgggccatgacagacgaagagaaggcaaaggcagtgccacttatccaccaggagggcaaccggttgtaccgcgaggggcatgtgaaggaggctgctgccaagtactacgatgccattgcctgcctcaagaacctgcagatgaaggaacagcctgggtcccctgaatggatccagctggacaagcagatcacgccgctgctgctcaactactgccagtgcaagctggtggtcgaggagtactacgaggtgctggaccactgctcttccatcctcaacaagtacgacgacaacgtcaaggcctacttcaagcggggcaaggcccacgcggccgtgtggaatgcccaggaggcccaggctgactttgccaaagtgctggagctggacccagccctggcgcctgtggtgagccgagagctgcgggccctggaggcacggatccggcagaaggacgaagaggacaaagcccggttccgggggatcttctcccattgacaggagcacttggccctgccttacctgccaagcccactgctgcagctgccagcccccctgcccgtgctgcgtcatgcttctgtgtatataaaggcctttatttatctctcaaaaaaaaaaaacacacaanaaacacaacacnaca

SEQ ID NO: 42370 - DNA, 1325 bp, Homo sapiens
  misc_feature (1310)..(1310): n is a, c, g, or t
  misc_feature (1322)..(1322): n is a, c, g, or t
ttggcttctgccctcaaccaaaatggcgctagctcggaagctgccgaggtgctaggagttgccgaagcaagtccggaagctaccgagcgagtccggaagttgccgaaagggagcagcggggaaggaggatggcggatatcatcgcaagactccgggaggacgggatccaaaaacgtgtgatacaggaaggccgaggagagctcccggactttcaagatgggaccaaggccacgttccactaccggacgctgcacagtgacgacgagggcaccgtgctggacgacagccgggctcgtggcaagcccatggagctcatcattggcaagaagttcaagctgcctgtgtgggagaccatcgtgtgcaccatgcgagaaggggagattgcccagttcctctgtgacatcaagcatgtggtcctgtacccgctggtggccaagagtctccgcaacatcgcggtgggcaaggaccccctggagggccagcggcactgctgcggtgttgcacagatgcgtgaacacagctccctgggccatgctgacctggacgccctgcagcagaacccccagcccctcatcttccacatggagatgctgaaggtggagagccctggcacgtaccagcaggacccatgggccatgacagacgaagagaaggcaaaggcagtgccacttatccaccaggagggcaaccggttgtaccgcgaggggcatgtgaaggaggctgctgccaagtactacgatgccattgcctgcctcaagaacctgcagatgaaggaacagcctgggtcccctgaatggatccagctggacaagcagatcacgccgctgctgctcaactactgccagtgcaagctggtggtcgaggagtactacgaggtgctggaccactgctcttccatcctcaacaagtacgacgacaacgtcaaggcctacttcaagcggggcaaggcccacgcggccgtgtggaatgcccaggaggcccaggctgactttgccaaagtgctggagctggacccagccctggcgcctgtggtgagccgagagctgcgggccctggaggcacggatccggcagaaggacgaagaggacaaagcccggttccgggggatcttctcccattgacaggagcacttggccctgccttacctgccaagcccactgctgcagctgccagcccccctgcccgtgctgcgtcatgcttctgtgtatataaaggcctttatttatctctcaaaaaaaaaaaaaaaaaaaaaaaaaaaaaaaaaaaaaaaaaaaaaaaaaaaaaaaaaaaaaaaaaaaaaaacacacaanaaacacaacacnaca

SEQ ID NO: 42371 - DNA, 1144 bp, Homo sapiens
tgacctagaggacccgtcagttccagcagcggggaaggaggatggcggatatcatcgcaagactccgggaggacgggatccaaaaacgtgtgatacaggaaggccgaggagagctcccggactttcaagatgggaccaaggccacgttccactaccggacgctgcacagtgacgacgagggcaccgtgctggacgacagccgggctcgtggcaagcccatggagctcatcattggcaagaagttcaagctgcctgtgtgggagaccatcgtgtgcaccatgcgagaaggggagattgcccagttcctctgtgacatcaagcatgtggtcctgtacccgctggtggccaagagtctccgcaacatcgcggtgggcaaggaccccctggagggccagcggcactgctgcggtgttgcacagatgcgtgaacacagctccctgggccatgctgacctggacgccctgcagcagaacccccagcccctcatcttccacatggagatgctgaaggtggagagccctggcacgtaccagcaggacccatgggccatgacagacgaagagaaggcaaaggcagtgccacttatccaccaggagggcaaccggttgtaccgcgaggggcatgtgaaggaggctgctgccaagtactacgatgccattgcctgcctcaagaacctgcagatgaaggaacagcctgggtcccctgaatggatccagctggacaagcagatcacgccgctgctgctcaactactgccagtgcaagctggtggtcgaggagtactacgaggtgctggaccactgctcttccatcctcaacaagtacgacgacaacgtcaaggcctacttcaagcggggcaaggcccacgcggccgtgtggaatgcccaggaggcccaggctgactttgccaaagtgctggagctggacccagccctggcgcctgtggtgagccgagagctgcgggccctggaggcacggatccggcagaaggacgaagaggacaaagcccggttccgggggatcttctcccattgacaggagcacttggccctgccttacctgccaagcccactgctgcagctgccagcccccctgcccgtgctgcgtcatgcttctgtgtatataaaggcctttatttatctctc

SEQ ID NO: 42372 - DNA, 1042 bp, Homo sapiens
ttggcttctgccctcaaccaaaatggcgctagctcggaagctgccgaggtgctaggagttgccgaagcaagtccggaagctaccgagcgagtccggaagttgccgaaagggagcagcggggaaggaggatggcggatatcatcgcaagactccgggaggacgggatccaaaaacgtgtgatacaggaaggccgaggagagctcccggactttcaagatgggaccaaggccacgttccactaccggacgctgcacagtgacgacgagggcaccgtgctggacgacagccgggctcgtggcaagcccatggagctcatcattggcaagaagttcaagctgcctgtgtgggagaccatcgtgtgcaccatgcgagaaggggagattgcccagttcctctgtgacatcaaggtggagagccctggcacgtaccagcaggacccatgggccatgacagacgaagagaaggcaaaggcagtgccacttatccaccaggagggcaaccggttgtaccgcgaggggcatgtgaaggaggctgctgccaagtactacgatgccattgcctgcctcaagaacctgcagatgaaggaacagcctgggtcccctgaatggatccagctggacaagcagatcacgccgctgctgctcaactactgccagtgcaagctggtggtcgaggagtactacgaggtgctggaccactgctcttccatcctcaacaagtacgacgacaacgtcaaggcctacttcaagcggggcaaggcccacgcggccgtgtggaatgcccaggaggcccaggctgactttgccaaagtgctggagctggacccagccctggcgcctgtggtgagccgagagctgcgggccctggaggcacggatccggcagaaggacgaagaggacaaagcccggttccgggggatcttctcccattgacaggagcacttggccctgccttacctgccaagcccactgctgcagctgccagcccccctgcccgtgctgcgtcatgcttctgtgtatataaaggcctttatttatctctc

SEQ ID NO: 42373 - DNA, 789 bp, Homo sapiens
ttggcttctgccctcaaccaaaatggcgctagctcggaagctgccgaggtgctaggagttgccgaagcaagtccggaagctaccgagcgagtccggaagttgccgaaagggagcagcggggaaggaggatggcggatatcatcgcaagactccgggaggacgggatccaaaaacgtgtgatacaggaaggccgaggagagctcccggactttcaagatgggaccaaggccacgttccactaccggacgctgcacagtgacgacgagggcaccgtgctggacgacagccgggctcgtggcaagcccatggagctcatcattggcaagaagttcaagctgcctgtgtgggagaccatcgtgtgcaccatgcgagaaggggagattgcccagttcctctgtgacatcaagcatgtggtcctgtacccgctggtggccaagagtctccgcaacatcgcggtgggcaaggaccccctggagggccagcggcactgctgcggtgttgcacagatgcgtgaacacagctccctgggccatgctgacctggacgccctgcagcagaacccccagcccctcatcttccacatggagatgctgaaggtggagagccctggcacgtaccagcaggacccatgggccatgacagacgaagagaaggcaaaggggggatcttctcccattgacaggagcacttggccctgccttacctgccaagcccactgctgcagctgccagcccccctgcccgtgctgcgtcatgcttctgtgtatataaaggcctttatttatctctc

SEQ ID NO: 42374 - DNA, 660 bp, Homo sapiens
ttggcttctgccctcaaccaaaatggcgctagctcggaagctgccgaggtgctaggagttgccgaagcaagtccggaagctaccgagcgagtccggaagttgccgaaagggagcagcggggaaggaggatggcggatatcatcgcaagactccgggaggacgggatccaaaaacgtgtgatacaggaaggccgaggagagctcccggactttcaagatgggaccaaggccacgttccactaccggacgctgcacagtgacgacgagggcaccgtgctggacgacagccgggctcgtggcaagcccatggagctcatcattggcaagaagttcaagctgcctgtgtgggagaccatcgtgtgcaccatgcgagaaggggagattgcccagttcctctgtgacatcaagcatgtggtcctgtacccgctggtggccaagagtctccgcaacatcgcggtgggcaaggaccccctggagggccagcggcactgctgcggtgttgcacagatgcgtgaacacagctccctgggccatgctgacctggacgccctcgcccctgagttgcagctcgcccctgagttagctgcagctcgcccctgagttagttgcggctcgcccctgagttagtcgcagctcgcccctgagttagttgcggctcgcc

SEQ ID NO: 42375 - DNA, 1206 bp, Homo sapiens
caaagcccagctacaggcgggcgactgcggggggcccctgaggcggcgggggccatggctggggtcgcgtgcttgggaaaagctgccgacgcagatgaatggtgcgacagcggcctgggctccctgggtccggacgcagcggcccccggaggacctgggttgggcgcggagttgggcccggggctgtcgtgggctcccctcgtcttcggctacgtcactgaggatggggacacggcactgcacttggctgtgattcatcagcatgaacccttcctggattttcttctaggcttctcggccggcactgagtacatggacctgcagaatgacctaggccagacagccctgcacctggcagccatcctgggggagacatccacggtggagaagctgtacgcagcaggcgccgggctgtgtgtggcggagcgtaggggccacacggcgctgcacctggcctgccgtgtgggggcacacgcctgtgcccgtgccctgcttcagccccgcccccggcgccccagggaagcccccgacacctacctcgctcagggccctgaccgtactcccgacaccaaccatacccctgtcgccttgtaccccgattccgacttggagaaggaagaagaggagagtgaggaggactggaagctgcagctggaggctgaaaactacgagggccacaccccactccacgtggccgttatccacaaagatgtggagatggtccggctgctccgagatgctggagctgaccttgacaaaccggagcccacgtgcggccggagcccccttcatttggcagtggaggcccaggcagccgatgtgctggagcttctcctgagggcaggcgcgaaccctgctgcccgcatgtacggtggccgcaccccactcggcagtgccatgctccggcccaaccccatcctcgcccgcctcctccgtgcacacggagcccctgagcccgagggcgaggacgagaaatccggcccctgcagcagcagtagcgacagcgacagcggagacgagggcgatgaatacgacgacattgtggttcacagcagccgcagccaaacccggctgcctcccaccccagcctcaaaacctcttcctgacgacccccgccccgtgtgatttgtttcattgttaatataatttccagtttaataaacaaaaccctagttctgacaaccagaaaaaaaactgatcttgtct

SEQ ID NO: 42376 - DNA, 388 bp, Homo sapiens
ggtccggaattcccggttcgactactactactaaattcgcggccgcgtcgacgttctgagagctaggaaactgggaggttgagccaggagcaggggaacttgggctttgaggcgagacctaattcttagggtgctctatgaggacatgggtggtgggcaaagtgacagccgcctgagcccctctgcctggtcccctttgcccccagatgaatacgacgacattgtggttcacagcagccgcagccaaacccggctgcctcccaccccagcctcaaaacctcttcctgacgacccccgccccgtgtgatttgtttcattgttaatataatttccagtttaataaacaaaaccctagttctgacaaccagaaaaaaaactgatcttgtct

SEQ ID NO: 42377 - DNA, 373 bp, Homo sapiens
caaagcccagctacaggcgggcgactgcggggggcccctgaggcggcgggggccatggctggggtcgcgtgcttgggaaaagctgccgacgcagatgaatggtgcacacggagcccctgagcccgagggcgaggacgagaaatccggcccctgcagcagcagtagcgacagcgacagcggagacgagggcgatgaatacgacgacattgtggttcacagcagccgcagccaaacccggctgcctcccaccccagcctcaaaacctcttcctgacgacccccgccccgtgtgatttgtttcattgttaatataatttccagtttaataaacaaaaccctagttctgacaaccagaaaaaaaactgatcttgtct

SEQ ID NO: 42378 - DNA, 2276 bp, Homo sapiens
caaagcccagctacaggcgggcgactgcggggggcccctgaggcggcgggggccatggctggggtcgcgtgcttgggaaaagctgccgacgcagatgaatggtgcgacagcggcctgggctccctgggtccggacgcagcggcccccggaggacctgggttgggcgcggagttgggcccggggctgtcgtgggctcccctcgtcttcggctacgtcactgaggatggggacacggcactgcacttggctgtgattcatcagcatgaacccttcctggattttcttctaggcttctcggccggcactgagtacatggacctgcagaatgacctaggccagacagccctgcacctggcagccatcctgggggagacatccacggtggagaagctgtacgcagcaggcgccgggctgtgtgtggcggagcgtaggggccacacggcgctgcacctggcctgccgtgtgggggcacacgcctgtgcccgtgccctgcttcagccccgcccccggcgccccagggaagcccccgacacctacctcgctcagggccctgaccgtactcccgacaccaaccatacccctgtcgccttgtaccccgattccgacttggagaaggaagaagaggagagtgaggaggactggaagctgcagctggaggctgaaaactacgagggccacaccccactccacgtggccgttatccacaaagatgtggagatggtccggctgctccgagatgctggagctgaccttgacaaaccggagcccacgtgcggccggagcccccttcatttggcagtggaggcccaggcagccgatgtgctggagcttctcctgagggcaggcgcgaaccctgctgcccgcatgtacggtggccgcaccccactcggcagtgccatgctccggcccaaccccatcctcgcccgcctcctccgtgcacacggagcccctgagcccgagggcgaggacgagaaatccggcccctgcagcagcagtagcgacagcgacagcggagacgagggcgtgagtcaggaggagagacagggcagcccagctggggggtcaggatagaccggcaggcaagaagcccaagaagataattaggcaccgaccttgggctgctgttagagaactcaggcagcagcgccagtgacacggggcactagtcaggagagacctggacaggggtggtgggaagagcttgggcagaagtggctgaaaaactaaggcagtggcaaaggtagaactcaggcaggggtggagaaaaggcgttggtcgcagtgattggtgaacacagcgggggtgggtggtagcgctgggggtgattttaggcagcaagaattggagaactcacactgcgaaaagaaaaccttgggtggcagtgatttgaacaccggcagtgctggggcaggacccgagccagcggtggggagagatatagtcagagaacccagcaatacagatccgtccttgggcaaggcgcggtgctggatgatgggtgcggaggaatttgggtaaaggcagagggaaggggtggaggagggccagctcagttgccgaaactctggagtggcggctggctagaaattggtctgtagaaatgaccttgaaaatggagttctggccaggtgcggtggctcacgcctgtaatcccagcactttgggaggccgaggcaggcagatcacgaggtcaggagttcgagaccagcctggccaacatggcaagaccctgtctctactaaaaatacaaaaattagctgggcgtggtggcgcatgcctataatcccagctacttgggaggctgaggtaggagaattgcttgaacctgggaggtggaggttgcagtgaacctagatcacgccactgcattccagcctgggcaacagagcgagactccatcttaaaaaaaaaaaaaaaaaaaagaaagaaaagaaaatggagttctgagagctaggaaactgggaggttgagccaggagcaggggaacttgggctttgaggcgagacctaattcttagggtgctctatgaggacatgggtggtgggcaaagtgacagccgcctgagcccctctgcctggtcccctttgcccccagatgaatacgacgacattgtggttcacagcagccgcagccaaacccggctgcctcccaccccagcctcaaaacctcttcctgacgacccccgccccgtgtgatttgtttcattgttaatataatttccagtttaataaacaaaaccctagttctgacaaccagaaaaaaaactgatcttgtct

SEQ ID NO: 42379 - DNA, 1360 bp, Homo sapiens
caaagcccagctacaggcgggcgactgcggggggcccctgaggcggcgggggccatggctggggtcgcgtgcttgggaaaagctgccgacgcagatgaatggtgcgacagcggcctgggctccctgggtccggacgcagcggcccccggaggacctgggttgggcgcggagttgggcccggggctgtcgtgggctcccctcgtcttcggctacgtcactgaggatggggacacggcactgcacttggctgtgattcatcagcatgaacccttcctggattttcttctaggcttctcggccggcactgagtacatggacctgcagaatgacctaggccagacagccctgcacctggcagccatcctgggggagacatccacggtggagaagctgtacgcagcaggcgccgggctgtgtgtggcggagcgtaggggccacacggcgctgcacctggcctgccgtgtgggggcacacgcctgtgcccgtgccctgcttcagccccgcccccggcgccccagggaagcccccgacacctacctcgctcagggccctgaccgtactcccgacaccaaccatacccctgtcgccttgtaccccgattccgacttggagaaggaagaagaggagagtgaggaggactggaagctgcagctggaggctgaaaactacgagggccacaccccactccacgtggccgttatccacaaagatgtggagatggtccggctgctccgagatgctggagctgaccttgacaaaccggagcccacgtgcggccggagcccccttcatttggcagtggaggcccaggcagccgatgtgctggagcttctcctgagggcaggcgcgaaccctgctgcccgcatgtacggtggccgcaccccactcggcagtgccatgctccggcccaaccccatcctcgcccgcctcctccgtgcacacggagcccctgagcccgagggcgaggacgagaaatccggcccctgcagcagcagtagcgacagcgacagcggagacgagggcgtgagtcaggaggagagacagggcagcccagctggggggtcaggatagaccggcaggcaagaagcccaagaagataattaggcaccgaccttgggctgctgttagagaactcaggcagcagcgccagtgacacggggcactagtcaggagagacgatgaatacgacgacattgtggttcacagcagccgcagccaaacccggctgcctcccaccccagcctcaaaacctcttcctgacgacccccgccccgtgtgatttgtttcattgttaatataatttccagtttaataaacaaaaccctagttctgacaaccagaaaaaaaactgatcttgtct

SEQ ID NO: 42380 - DNA, 1150 bp, Homo sapiens
caaagcccagctacaggcgggcgactgcggggggcccctgaggcggcgggggccatggctggggtcgcgtgcttgggaaaagctgccgacgcagatgaatggtgcgacagcggcctgggctccctgggtccggacgcagcggcccccggaggacctgggttgggcgcggagttgggcccggggctgtcgtgggctcccctcgtcttcggctacgtcactgaggatggggacacgcttctcggccggcactgagtacatggacctgcagaatgacctaggccagacagccctgcacctggcagccatcctgggggagacatccacggtggagaagctgtacgcagcaggcgccgggctgtgtgtggcggagcgtaggggccacacggcgctgcacctggcctgccgtgtgggggcacacgcctgtgcccgtgccctgcttcagccccgcccccggcgccccagggaagcccccgacacctacctcgctcagggccctgaccgtactcccgacaccaaccatacccctgtcgccttgtaccccgattccgacttggagaaggaagaagaggagagtgaggaggactggaagctgcagctggaggctgaaaactacgagggccacaccccactccacgtggccgttatccacaaagatgtggagatggtccggctgctccgagatgctggagctgaccttgacaaaccggagcccacgtgcggccggagcccccttcatttggcagtggaggcccaggcagccgatgtgctggagcttctcctgagggcaggcgcgaaccctgctgcccgcatgtacggtggccgcaccccactcggcagtgccatgctccggcccaaccccatcctcgcccgcctcctccgtgcacacggagcccctgagcccgagggcgaggacgagaaatccggcccctgcagcagcagtagcgacagcgacagcggagacgagggcgatgaatacgacgacattgtggttcacagcagccgcagccaaacccggctgcctcccaccccagcctcaaaacctcttcctgacgacccccgccccgtgtgatttgtttcattgttaatataatttccagtttaataaacaaaaccctagttctgacaaccagaaaaaaaactgatcttgtct

SEQ ID NO: 42381 - DNA, 1013 bp, Homo sapiens
cagacgcgctttcgtacaacacccagagcgccccagttagggcactgcacttggctgtgattcatcagcatgaacccttcctggattttcttctaggcttctcggccggcactgagtacatggacctgcagaatgacctaggccagacagccctgcacctggcagccatcctgggggagacatccacggtggagaagctgtacgcagcaggcgccgggctgtgtgtggcggagcgtaggggccacacggcgctgcacctggcctgccgtgtgggggcacacgcctgtgcccgtgccctgcttcagccccgcccccggcgccccagggaagcccccgacacctacctcgctcagggccctgaccgtactcccgacaccaaccatacccctgtcgccttgtaccccgattccgacttggagaaggaagaagaggagagtgaggaggactggaagctgcagctggaggctgaaaactacgagggccacaccccactccacgtggccgttatccacaaagatgtggagatggtccggctgctccgagatgctggagctgaccttgacaaaccggagcccacgtgcggccggagcccccttcatttggcagtggaggcccaggcagccgatgtgctggagcttctcctgagggcaggcgcgaaccctgctgcccgcatgtacggtggccgcaccccactcggcagtgccatgctccggcccaaccccatcctcgcccgcctcctccgtgcacacggagcccctgagcccgagggcgaggacgagaaatccggcccctgcagcagcagtagcgacagcgacagcggagacgagggcgatgaatacgacgacattgtggttcacagcagccgcagccaaacccggctgcctcccaccccagcctcaaaacctcttcctgacgacccccgccccgtgtgatttgtttcattgttaatataatttccagtttaataaacaaaaccctagttctgacaaccagaaaaaaaactgatcttgtct

SEQ ID NO: 42382 - DNA, 1076 bp, Homo sapiens
cagacgcgctttcgtacaacacccagagcgccccagttaggtaagaaagcgcgcgaggaccggactacgagtcccagaaggcgtggcgtcagcagccatgttgggcactgcacttggctgtgattcatcagcatgaacccttcctggattttcttctaggcttctcggccggcactgagtacatggacctgcagaatgacctaggccagacagccctgcacctggcagccatcctgggggagacatccacggtggagaagctgtacgcagcaggcgccgggctgtgtgtggcggagcgtaggggccacacggcgctgcacctggcctgccgtgtgggggcacacgcctgtgcccgtgccctgcttcagccccgcccccggcgccccagggaagcccccgacacctacctcgctcagggccctgaccgtactcccgacaccaaccatacccctgtcgccttgtaccccgattccgacttggagaaggaagaagaggagagtgaggaggactggaagctgcagctggaggctgaaaactacgagggccacaccccactccacgtggccgttatccacaaagatgtggagatggtccggctgctccgagatgctggagctgaccttgacaaaccggagcccacgtgcggccggagcccccttcatttggcagtggaggcccaggcagccgatgtgctggagcttctcctgagggcaggcgcgaaccctgctgcccgcatgtacggtggccgcaccccactcggcagtgccatgctccggcccaaccccatcctcgcccgcctcctccgtgcacacggagcccctgagcccgagggcgaggacgagaaatccggcccctgcagcagcagtagcgacagcgacagcggagacgagggcgatgaatacgacgacattgtggttcacagcagccgcagccaaacccggctgcctcccaccccagcctcaaaacctcttcctgacgacccccgccccgtgtgatttgtttcattgttaatataatttccagtttaataaacaaaaccctagttctgacaaccagaaaaaaaactgatcttgtct

SEQ ID NO: 42383 - DNA, 1358 bp, Homo sapiens
gtggcagtcaagtgtggggcccacctcgtgtttcctgtctttcaggggtcactgtgattcattgcacgatgtccagtgtcttcaacactgttgcttcatataccgtatttcgtctgactcttgtttgtttgtttgtttgtttcacgtgggagtgaattctggtccatgttacttcattttgggcagaagtggaaatcccactgaataaacattgattccacgaatttgctgatgaaactctgacctctgacctcccagatagctgacagggggttccagaactgtggtcacaaggcctagcatacagtaggcgccccatgtttgttcaatgaaggaatgcaagaggacttgaactttgccctctcaccccggtctttgtccccagggcactgcacttggctgtgattcatcagcatgaacccttcctggattttcttctaggcttctcggccggcactgagtacatggacctgcagaatgacctaggccagacagccctgcacctggcagccatcctgggggagacatccacggtggagaagctgtacgcagcaggcgccgggctgtgtgtggcggagcgtaggggccacacggcgctgcacctggcctgccgtgtgggggcacacgcctgtgcccgtgccctgcttcagccccgcccccggcgccccagggaagcccccgacacctacctcgctcagggccctgaccgtactcccgacaccaaccatacccctgtcgccttgtaccccgattccgacttggagaaggaagaagaggagagtgaggaggactggaagctgcagctggaggctgaaaactacgagggccacaccccactccacgtggccgttatccacaaagatgtggagatggtccggctgctccgagatgctggagctgaccttgacaaaccggagcccacgtgcggccggagcccccttcatttggcagtggaggcccaggcagccgatgtgctggagcttctcctgagggcaggcgcgaaccctgctgcccgcatgtacggtggccgcaccccactcggcagtgccatgctccggcccaaccccatcctcgcccgcctcctccgtgcacacggagcccctgagcccgagggcgaggacgagaaatccggcccctgcagcagcagtagcgacagcgacagcggagacgagggcgatgaatacgacgacattgtggttcacagcagccgcagccaaacccggctgcctcccaccccagcctcaaaacctcttcctgacgacccccgccccgtgtgatttgtttcattgttaatataatttccagtttaataaacaaaaccctagttctgacaaccagaaaaaaaactgatcttgtct

SEQ ID NO: 42384 - DNA, 1229 bp, Homo sapiens
caaagcccagctacaggcgggcgactgcggggggcccctgaggcggcgggggccatggctggggtcgcgtgcttgggaaaagctgccgacgcagatgaatggtgcgacagcggcctgggctccctgggtccggacgcagcggcccccggaggacctgggttgggcgcggagttgggcccggggctgtcgtgggctcccctcgtcttcggctacgtcactgaggatggggacacggcactgcacttggctgtgattcatcagcatgaacccttcctggattttcttctaggcttctcggccggcactgagtacatggacctgcagaatgacctaggccagacagccctgcacctggcagccatcctgggggagacatccacggtggagaagctgtacgcagcaggcgccgggctgtgtgtggcggagcgtaggggccacacggcgctgcacctggcctgccgtgtgggggcacacgcctgtgcccgtgccctgcttcagccccgcccccggcgccccagggaagcccccgacacctacctcgctcagggccctgaccgtactcccgacaccaaccatacccctgtcgccttgtaccccgattccgacttggagaaggaagaagaggagagtgaggaggactggaagctgcagctggaggctgaaaactacgagggccacaccccactccacgtggccgttatccacaaagatgtggagatggtccggctgctccgagatgctggagctgaccttgacaaaccggagcccacgtgcggccggagcccccttcatttggcagtggaggcccaggcagccgatgtgctggagcttctcctgagggcaggcgcgaaccctgctgcccgcatgtacggtggccgcaccccactcggcagtgccatgctccggcccaaccccatcctcgcccgcctcctccgtgcacacggagcccctgagcccgagggcgaggacgagaaatccggcccctgcagcagcagtagcgacatgacagccgcctgagcccctctgcctggtcccctttgcccccagatgaatacgacgacattgtggttcacagcagccgcagccaaacccggctgcctcccaccccagcctcaaaacctcttcctgacgacccccgccccgtgtgatttgtttcattgttaatataatttccagtttaataaacaaaaccctagttctgacaaccagaaaaaaaactgatcttgtct

SEQ ID NO: 42385 - DNA, 1084 bp, Homo sapiens
tcgctattcatcggcacccagtgctatgatttcttctcttacatgcgatgaggtgccgatgaatagcgtcctgtattgttatttttcgtcactacctccccgggtcgggggtgggtggtagcgctgggggtgattttaggcagcaagaattggagaactcacactgcgaaaagaaaaccttgggtggcagtgatttgaacaccggcagtgctggggcaggacccgagccagcggtggggagagatatagtcagagaacccagcaatacagatccgtccttgggcaaggcgcggtgctggatgatgggtgcggaggaatttgggtaaaggcagagggaaggggtggaggagggccagctcagttgccgaaactctggagtggcggctggctagaaattggtctgtagaaatgaccttgaaaatggagttctggccaggtgcggtggctcacgcctgtaatcccagcactttgggaggccgaggcaggcagatcacgaggtcaggagttcgagaccagcctggccaacatggcaagaccctgtctctactaaaaatacaaaaattagctgggcgtggtggcgcatgcctataatcccagctacttgggaggctgaggtaggagaattgcttgaacctgggaggtggaggttgcagtgaacctagatcacgccactgcattccagcctgggcaacagagcgagactccatcttaaaaaaaaaaaaaaaaaaaagaaagaaaagaaaatggagttctgagagctaggaaactgggaggttgagccaggagcaggggaacttgggctttgaggcgagacctaattcttagggtgctctatgaggacatgggtggtgggcaaagtgacagccgcctgagcccctctgcctggtcccctttgcccccagatgaatacgacgacattgtggttcacagcagccgcagccaaacccggctgcctcccaccccagcctcaaaacctcttcctgacgacccccgccccgtgtgatttgtttcattgttaatataatttccagtttaataaacaaaaccctagttctgacaaccagaaaaaaaactgatcttgtct

SEQ ID NO: 42386 - DNA, 590 bp, Homo sapiens
caaagcccagctacaggcgggcgactgcggggggcccctgaggcggcgggggccatggctggggtcgcgtgcttgggaaaagctgccgacgcagatgaatggtgcgacagcggcctgggctccctgggtccggacgcagcggcccccggaggacctgggttgggcgcggagttgggcccggggctgtcgtgggctcccctcgtcttcggctacgtcactgaggatggggacacgtgagtgaaccttaggctgccaaacggagccctaggacccggcgtcacattcctcattaatctctgatccctgaggcttcctaacctcatactcctaaatctgacttccgatgctgaacttcctgacctctaacccccgagtcctaacttttaacaaaaccaatcttctatctagctatgatcctaacccaatcatttcttaccttcttttcttgaactatgattctcagctcctggaatccacattgtatccactgatacccaaacctgactccagtcctgagacttctgttagaactgtggcttctcctgacttctaacctccaaatatgatctttgattcttagttcccgattt

SEQ ID NO: 42387 - DNA, 403 bp, Homo sapiens
cttggctggagccaggctggccttcagggttggtcagtctccacaggggactctggcctcccgtgggctgccacagggccaaccccagtgaaagaaatgaaatgactgaatatgttcatgtcattagaaaaaggatgcagcagggggtggggaggagttggttaatggaatcaaatttgcagcaagataggagtctagtgtttggcggcactgtagggtgactattgctaacaataatttactgtgtattttcaagtagctagaagagagaattttgaatgttcctgtcaacctaaataacaaagacaggctcgctaaagatatttaatcaaaagtagggcattgcaacaggaatatgtgtgctgtagtaaactgtgtgcatattccaggaggtaaagaaaaa

SEQ ID NO: 42388 - DNA, 352 bp, Homo sapiens
aggaggctgaggcaggagaatcacttgaacctgggaggtggaggttgcagtgaaccagatcgcgccatgcactccagcctgggcaacagagaaagactccgtctaaaaaaaaaaagaagaagaaagaaaagaaaatacagcaatatatgtaactgtattgaacatcttcaaggcaggaaccatgctagatacatatttgtatgccctgcagactcggtagcactttatttatttgctaacattttattgtgctgcttactgtatgccaagcacgttacaagtacacctaacatattaacgaatgtccattcaaaaacacttggtaaaaacgttatatttaaatctattcaat

SEQ ID NO: 42389 - DNA, 419 bp, Homo sapiens
actcgacaaaggatgatgtggtgaccaaagaagtctgcatactatgttgcatttgcttggggatcccagaccaccaatgtgaattgtcacggagacccctaccaatacctactgtgcttcatgaatgaacggcattcaagatccctagagtaagcacagcagatggacggcggtgttatggggctttctcgtgaggcccgtccacgtaaccagtgacagcgagcctatgaggggtgcagccaggcttgcagctttctgaggctccggcttaatgcagcagagactttagagctgtattgtccaatacagtagccactagccaggtgggtgaatacaacgaggaaatgaattttaaattttaattaattcaaatagtcacatgtagtcaatgtccaataggatagccactaacgtcgacg

SEQ ID NO: 42390 - DNA, 425 bp, Homo sapiens
caccaccacacccggctaatttttgtatttttagtagacatggggtttcgccacgttggccaggctggtctcgcactcctgacctcaagtgatccacctgcctccgcctcccaaagtgctgggattacagcgtgagccactgcaaccagccagtactatgtatataattattattattgaaaatctgtgagaacaatcaaattgcagctgcgactcactgagtatttacccagggcagggctatgccaagcacttactcatcatcttgtgcaatccttacaaaaatcctagcaaacatcgataggcctggggaaatcaaggctcagagaggccaaccaacttgcccaaagtcatagagtgaaggcaggtatgacccagagcccatgtctaccatgtctacacttcactgcctccctgcatgtcag

SEQ ID NO: 42391 - DNA, 366 bp, Homo sapiens
tccacagttcctgccgcatgggaggcatggccccggggtcctggtggccactcgtgcctggtggagagcgagggcagcctgacggagaacatctgggccttcgctggcatctccaggccctgtgccctggccctgttgcggagagacgtgctgggggccttcctgctgtggcctgagctgggtgctagcggccagtggtgtctgtccgtgcgcacgagtgcggcgtggtgccccaccaggtcttccggaaccacctgggccgctactgcttggagcacctgccggcagagttccccagcctggaggctctggtggagaaccacgcggttactgaacgtagcctcttctgtcccctcgacatgggcc

SEQ ID NO: 42392 - DNA, 716 bp, Homo sapiens
actaaacgtaagcttcagaaaccgaaacttaatagaagagctcaagagccgcggccagacgtttgcggagtccagggtctttcggagttgaatttgcagctgggctccttcactttggtctcggcttttatctgcctccctgagtacgctgagttcgcatgctgcccgtgtaactgtttgtttgtttgtttgtttgtttgtttgagatagcgtctcactgtgtcacccagtcgtgatctcaagggatgcgcccgcctctgcctcccaaggtgctgggattacaggcggaaacttaagtccctgcttccactccagtcttttgatttcaacaagcaacactgcaatggctatacatctatggctgttatttctgtttggggtgtaaactgagaaatttggagctaaaatctatatacattttaagttttgacgggatattgcccaaatagctttaaaaatccactcttaccccacaattgtaggagactgcttctcttccataccttcgccaatggtgctttgtaataaggacccaataaagacaagagtggtattggggatctaggcagaaaatgtcaaacacccataccttaaacattttgtcccctttgaattcattcagcaaatattgacaaacaactgtaagagccagactttgttcaaagtactgtcaatataacaataaagaaaacagacacgggccttaaacttattga

SEQ ID NO: 42393 - DNA, 482 bp, Homo sapiens
aaagtgttcagcattttagaatgagaagacagactccttcctaatctaatctgtggatgtcatcctagtgaaacctgaacagaggaactgaagttagaagatatgaaaacaaatgtacaataatgagacagtgggccgtggctggaggagagcaatctgtgtgtcattactgattgctcactgtgctccagaccagacactgagcccggaggctttctgtatttcacctcatttcattttcacaccagccataggaggtagataccatcctccccttttaagaggagaaaactgagtcttgcctgagttctattaaatgacagaaccaagattcaaagctaaatacatctgatttcaaagctctaaaaaggtacaaaaaagcaacacatcacatagattgacctcaggcagagtccattatatgtaatctatgaatatatatgtatttatatttgtgtgttttatataatacattatacatt

SEQ ID NO: 42394 - DNA, 4110 bp, Homo sapiens
ctgagtctgcaggtgacactgcttaggtacggagcgcggagtcggagcggggacgcgccgggctgcagctctgggatgcaatccgcctgcctcgcaagctgctcgccgctgcgctggcagcgcttacgctgagctcggaggatcccattaggacttgcccggggatgtgcacctgccgtgcgctccgaggtcagtggcaggtctgcaggcagccgagggagcggtgaagccggaagacctgtctctgcccatgtgcaaggcagtgatttcgggtgagagagcgggtgggtgagtctctttagagttggaaagaaggcaaaatcttgggtttctcctcggcggagggacaggggactcccccagttgggtcttgcacttcccttacctctcccaccccgcgtgcgccccggcccagtgccgaagccccacttcaaagatgctctgggagaccgggatcctggctgctcagcgggaaggcagcaggcaagtggtctaacgttggcggcggtggcggtggcggcggcggcggcaccgacagtaaagcggggagcaagagaatttgaaaagagacatccgctccctctcacacgctgagggggaggcattcgcgtttccccaaatgagaaagaaccacaagaaatcatgaagtaaaaactttggaaagctgccactggagatgttgcacaaaaacctggaatcttttaggagtctcctcccagtcgttgaaggtttggggagcagctgatacagcaaggagggctcttgcaaggattcaagctccgagccctggaggagcagcacggagcgggagagcgtggcgagagaatgaagaaaccaatcgcccgggagaagcatgaggtggcagtgtggcactcggtttagagggcttcggccggcggtggccccatggacagccctgctggcactgggcctgcctggctgggtgttggctgtctcagccacggcggctgctgtggtccccgagcagcatgcctccgtagctggccagcatcccctggactggctgctcacagaccggggccccttccaccgcgctcaggagtatgctgacttcatggagcggtaccgccagggtttcaccaccaggtacaggatttatagggagtttgcccgttggaaggtgaacaacttggctctggaaaggaaggacttcttcagtttgccattgcctcttgccccagagtttatccggaacattcgcctccttggaaggagacccaatctgcaacaggttacagaaaatctgattaaaaagtacggcactcatttcttactttctgccacccttggaggagaagagtccctgaccatttttgtggacaagcagaaactgggaagaaagacagagacaacaggaggtgcctctataatcgggggcagtgggaacagcacagctgtgtccctggagaccctgcaccagctggccgcctcctacttcatcgacagagagagcacgctgcgacggctgcaccatatccagatagccacgggggccatcaaggtcaccgagaccaggaccggtcctctgggctgcagcaactatgacaatctggactcagtcagttctgtcttggtacagagtccagagaacaaagtacagttacttggccttcaggtgctgctgcctgagtatctgcgtgagcgctttgtagctgcagcactcagctacatcacatgcagctctgagggtgagctcgtctgcaaggagaatgactgctggtgcaagtgcagccccaccttccctgaatgcaactgccctgatgctgacatccaggccatggaggacagcctgctgcagatccaggactcctgggccactcacaaccggcagtttgaagagtcagaagagttccaggccctgctgaaaaggctgcccgatgaccggttcctgaactccacagctatctcccagttctgggccatggacaccagccttcagcaccgctaccagcagctgggagctggcttgaaagtgctgttcaaaaagacccatcggatcctacgccggctcttcaacctctgcaagcgctgccatcgccagcctcgcttccgcctgcccaaggagaggtccttgtcctactggtggaaccgaatccagtccctcctctactgtggggaaagcacctttcctggcactttcctggaacagagccacagctgcacctgcccctatgaccaatcttcctgccagggccccatcccatgtgccttgggcgaagggcccgcgtgtgcccactgtgctccagacaatagcacacgctgtgggagctgcaacccgggctatgtgctggcccaggggctgtgccggccagaggtggccgagtccctggaaaactttcttgggctggagacagacttgcaggacctggagctaaagtacctgctgcagaagcaggatagccgcattgaggtacactccatcttcatcagcaatgacatgcggctgggcagctggtttgacccttcctggaggaagcgcatgctgctcaccctgaagagcaacaagtacaagcctgggctggtgcacgtgatgttggccttgtccttgcagatctgtctcaccaagaacagcaccctggagcctgtcatggccatctacgtcaacccctttgggggcagccactctgagagctggttcatgcctgtgaatgagggcagctttcctgactgggaaaggactaacgtggatgcagctgcccagtgccaaaactggactatcaccttggggaataggtggaagactttctttgagacagttcatgtttacctacggagccgaatcaagtccctggatgacagctccaatgagacaatctactatgagcccctggagatgactgatccctctaagaatttgggttacatgaaaattaacaccttgcaggtctttggctacagcctgccctttgacccagatgctatccgggacttaattctccagttggactacccatatactcaaggttcccaggactctgcactcttgcagctcattgagctcagggaccgggtgaaccagctttctccacctggcaaagtccgacttgaccttttctcctgcttgctccggcatcggcttaagctggccaacaatgaggtgggcaggatccagtcctccctgagggctttcaattctaagctgccaaaccctgtggaatatgagaccggcaaactctgtagctaatgggcggcccacttcagcactgggcaaggaggggatccatgaatctggggtacaaagataatctaagccctcaccttagtgccaacagggtgtgctcccacgagactttcagcatccagtagatgggacctcgaggctcgagctgaagcaggcgagagagaaacagctactgcgtgcgtgcgcgcacgcatacacacacacacacacacactggcacagggaggctacaactaagcagcctcagatctgtaaagttgattggtgctttctaaaatgaatgcaattgaaagaaaggagccaaggaagagattaagaaaaagaaccagctgaaccatgaaacaaacaaaaatcctaaaagtgattcttgtcattcaagaaagcaagaggggacaacaatgggaggggtcggagctcttccttcccctctgtggagtcacttttgtattctttttaaccagatttcttaaaatgttgttgttttgtgaatcctgacattggttcttacttttgtatgctgcctcctctgtgccctcccagacgctgactgggaaacacaagaagtacaaccaacaggaaccagcgccaagggcaggcagcggcctccttgctcccctcccttactcctccctctgctgcctcctccccccaccaagtttcagggccctggattgttcccagttcccattgtggtcccttcagagctcctttccaacagcatctctctgtcgaagaaagaagctctgtcaagttagagagagacaatgtgtaggaaatgttcttttttaaaaaaaaataacaaaaacaaaacaaaactatttattttgtgattgttttccttgttaatctgctccaaccacctgaacatctaagtaaacatttatctggtttaatatatttttggaaaa

SEQ ID NO: 42395 - DNA, 5199 bp, Homo sapiens
ctgagtctgcaggtgacactgcttaggtacggagcgcggagtcggagcggggacgcgccgggctgcagctctgggatgcaatccgcctgcctcgcaagctgctcgccgctgcgctggcagcgcttacgctgagctcggaggatcccattaggacttgcccggggatgtgcacctgccgtgcgctccgaggtcagtggcaggtctgcaggcagccgagggagcggtgaagccggaagacctgtctctgcccatgtgcaaggcagtgatttcgggtgagagagcgggtgggtgagtctctttagagttggaaagaaggcaaaatcttgggtttctcctcggcggagggacaggggactcccccagttgggtcttgcacttcccttacctctcccaccccgcgtgcgccccggcccagtgccgaagccccacttcaaagatgctctgggagaccgggatcctggctgctcagcgggaaggcagcaggcaagtggtctaacgttggcggcggtggcggtggcggcggcggcggcaccgacagtaaagcggggagcaagagaatttgaaaagagacatccgctccctctcacacgctgagggggaggcattcgcgtttccccaaatgagaaagaaccacaagaaatcatgaagtaaaaactttggaaagctgccactggagatgttgcacaaaaacctggaatcttttaggagtctcctcccagtcgttgaaggtttggggagcagctgatacagcaaggagggctcttgcaaggattcaagctccgagccctggaggagcagcacggagcgggagagcgtggcgagagaatgaagaaaccaatcgcccgggagaagcatgaggtggcagtgtggcactcggtttagagggcttcggccggcggtggccccatggacagccctgctggcactgggcctgcctggctgggtgttggctgtctcagccacggcggctgctgtggtccccgagcagcatgcctccgtagctggccagcatcccctggactggctgctcacagaccggggccccttccaccgcgctcaggagtatgctgacttcatggagcggtaccgccagggtttcaccaccaggtacaggatttatagggagtttgcccgttggaaggtgaacaacttggctctggaaaggaaggacttcttcagtttgccattgcctcttgccccagagtttatccggaacattcgcctccttggaaggagacccaatctgcaacaggttacagaaaatctgattaaaaagtacggcactcatttcttactttctgccacccttggaggagaagagtccctgaccatttttgtggacaagcagaaactgggaagaaagacagagacaacaggaggtgcctctataatcgggggcagtgggaacagcacagctgtgtccctggagaccctgcaccagctggccgcctcctacttcatcgacagagagagcacgctgcgacggctgcaccatatccagatagccacgggggccatcaaggtcaccgagaccaggaccggtcctctgggctgcagcaactatgacaatctggactcagtcagttctgtcttggtacagagtccagagaacaaagtacagttacttggccttcaggtgctgctgcctgagtatctgcgtgagcgctttgtagctgcagcactcagctacatcacatgcagctctgagggtgagctcgtctgcaaggagaatgactgctggtgcaagtgcagccccaccttccctgaatgcaactgccctgatgctgacatccaggccatggaggacagcctgctgcagatccaggactcctgggccactcacaaccggcagtttgaagagtcagaagagttccaggccctgctgaaaaggctgcccgatgaccggttcctgaactccacagctatctcccagttctgggccatggacaccagccttcagcaccgctaccagcagctgggagctggcttgaaagtgctgttcaaaaagacccatcggatcctacgccggctcttcaacctctgcaagcgctgccatcgccagcctcgcttccgcctgcccaaggagaggtccttgtcctactggtggaaccgaatccagtccctcctctactgtggggaaagcacctttcctggcactttcctggaacagagccacagctgcacctgcccctatgaccaatcttcctgccagggccccatcccatgtgccttgggcgaagggcccgcgtgtgcccactgtgctccagacaatagcacacgctgtgggagctgcaacccgggctatgtgctggcccaggggctgtgccggccagaggtggccgagtccctggaaaactttcttgggctggagacagacttgcaggacctggagctaaagtacctgctgcagaagcaggatagccgcattgaggtacactccatcttcatcagcaatgacatgcggctgggcagctggtttgacccttcctggaggaagcgcatgctgctcaccctgaagagcaacaagtacaagcctgggctggtgcacgtgatgttggccttgtccttgcagatctgtctcaccaagaacagcaccctggagcctgtcatggccatctacgtcaacccctttgggggcagccactctgagagctggttcatgcctgtgaatgagggcagctttcctgactgggaaaggactaacgtggatgcagctgcccagtgccaaaactggactatcaccttggggaataggtggaagactttctttgagacagttcatgtttacctacggagccgaatcaagtccctggatgacagctccaatgagacaatctactatgagcccctggagatgactgatccctctaagaatttgggttacatgaaaattaacaccttgcaggtctttggctacagcctgccctttgacccagatgctatccgggacttaattctccagttggactacccatatactcaaggttcccaggactctgcactcttgcagctcattgagctcagggaccgggtgaaccagctttctccacctggcaaagtccgacttgaccttttctcctgcttgctccggcatcggcttaagctggccaacaatgaggtgggcaggatccagtcctccctgagggctttcaattctaagctgccaaaccctgtggaatatgagaccggcaaactctgtagctaatgggcggcccacttcagcactgggcaaggaggggatccatgaatctggggtacaaagataatctaagccctcaccttagtgccaacagggtgtgctcccacgagactttcagcatccagtagatgggacctcgaggctcgagctgaagcaggcgagagagaaacagctactgcgtgcgtgcgcgcacgcatacacacacacacacacacactggcacagggaggctacaactaagcagcctcagatctgtaaagttgattggtgctttctaaaatgaatgcaattgaaagaaaggagccaaggaagagattaagaaaaagaaccagctgaaccatgaaacaaacaaaaatcctaaaagtgattcttgtcattcaagaaagcaagaggggacaacaatgggaggggtcggagctcttccttcccctctgtggagtcacttttgtattctttttaaccagatttcttaaaatgttgttgttttgtgaatcctgacattggttcttacttttgtatgctgcctcctctgtgccctcccagacgctgactgggaaacacaagaagtacaaccaacaggaaccagcgccaagggcaggcagcggcctccttgctcccctcccttactcctccctctgctgcctcctccccccaccaagtttcagggccctggattgttcccagttcccattgtggtcccttcagagctcctttccaacagcatctctctgtcgaagaaagaagctctgtcaagttagagagagacaatgtgtaggaaatgttcttttttaaaaaaaaataacaaaaacaaaacaaaactaaaaaaaaaaaaaaaaaaaaaaaaaaaaaaaaaaaaaaaaaacaaaaaaaaaaaaaaccaacacaaacgaaagagcaagagaagaaaagaaaagaaagaaagaggaggggggggggccccccccaggcgcccggcggcgcgccgccctcgccccacggcgcagacatcgcgcgtcacgacgaggacggctcaagcagacgacgcgctaacacaccaccacgcactgcgccacagcgacacgcaccccccctcccgcgaagcacgacccgcacccggcaacagctgaggaaaggcacacacactggagaggccacacacacggccggccacacgatgaaacaaaccgccgcccgcagccacccacaccccgccagcgacacacatggggccaccccgccccgatgacggaccggctcaaacggcgcgcgccacacaaagacaacatatgccaacccccccgtacgaccacggaccaaccaaagcacagagccggagacgccgcgcgaccacgcgcccacagcgcacccgagacctcagccagcacgcccgccgaggcgacgcgatacacacgcgaaccggccgcgcagaggcctagagccgctgctccccccagcacagggaccacaacgagccacgcgaagggcggcacacccacgaaaaggacacggcgcgaagcgcacccgaccgggaaagaagcaggaacggaggtgaagggcgcgggcaaggagcgaacggaagcaacgccaacacccaccgcacgtcacgccacgaagccgggaggggaggcagccataggagggccccgacaaccgcgccgacgcgcagacacgcagaacccagcaaccacgcggccccgcccgcaggcgagacgggcgtcaagaacagccgctcccgggccccgcgacccgcggggcgcgagcgcggccgagcggcggcctcgagacgcgcaccccgcacgagccggcgccgcaccaggactggccggtaggcgagccacgtggcccgcgagccccacacgcagcaccgttggacggctcgacacagccgccgtccgcacgcggagggagcggtggcaggccacggcgcccgcaccggccggcggacagagggcgccggaccgcaacgcgtgagcaacgcgcaacagaagaccgcacgccaccaccgaccaccaatacacgca

SEQ ID NO: 42396 - DNA, 3050 bp, Homo sapiens
ggggaggagggagatgccccttcaaggcttttgcccttcctgagggagcagaaaaagccacgaagactcctcgtaaacaacttgagagagagaattgtgtctcccctatgaagatggattgcttgagacagagttcaatagaagatgttaaacagataagctgagggcagggggactgagctttggaagagggcctttcaggcagcgaggccgctggcctgtggctccctctgatgagcttcttctaaagatggagaagagtccctgaccatttttgtggacaagcagaaactgggaagaaagacagagacaacaggaggtgcctctataatcgggggcagtgggaacagcacagctgtgtccctggagaccctgcaccagctggccgcctcctacttcatcgacagagagagcacgctgcgacggctgcaccatatccagatagccacgggggccatcaaggtcaccgagaccaggaccggtcctctgggctgcagcaactatgacaatctggactcagtcagttctgtcttggtacagagtccagagaacaaagtacagttacttggccttcaggtgctgctgcctgagtatctgcgtgagcgctttgtagctgcagcactcagctacatcacatgcagctctgagggtgagctcgtctgcaaggagaatgactgctggtgcaagtgcagccccaccttccctgaatgcaactgccctgatgctgacatccaggccatggaggacagcctgctgcagatccaggactcctgggccactcacaaccggcagtttgaagagtcagaagagttccaggccctgctgaaaaggctgcccgatgaccggttcctgaactccacagctatctcccagttctgggccatggacaccagccttcagcaccgctaccagcagctgggagctggcttgaaagtgctgttcaaaaagacccatcggatcctacgccggctcttcaacctctgcaagcgctgccatcgccagcctcgcttccgcctgcccaaggagaggtccttgtcctactggtggaaccgaatccagtccctcctctactgtggggaaagcacctttcctggcactttcctggaacagagccacagctgcacctgcccctatgaccaatcttcctgccagggccccatcccatgtgccttgggcgaagggcccgcgtgtgcccactgtgctccagacaatagcacacgctgtgggagctgcaacccgggctatgtgctggcccaggggctgtgccggccagaggtggccgagtccctggaaaactttcttgggctggagacagacttgcaggacctggagctaaagtacctgctgcagaagcaggatagccgcattgaggtacactccatcttcatcagcaatgacatgcggctgggcagctggtttgacccttcctggaggaagcgcatgctgctcaccctgaagagcaacaagtacaagcctgggctggtgcacgtgatgttggccttgtccttgcagatctgtctcaccaagaacagcaccctggagcctgtcatggccatctacgtcaacccctttgggggcagccactctgagagctggttcatgcctgtgaatgagggcagctttcctgactgggaaaggactaacgtggatgcagctgcccagtgccaaaactggactatcaccttggggaataggtggaagactttctttgagacagttcatgtttacctacggagccgaatcaagtccctggatgacagctccaatgagacaatctactatgagcccctggagatgactgatccctctaagaatttgggttacatgaaaattaacaccttgcaggtctttggctacagcctgccctttgacccagatgctatccgggacttaattctccagttggactacccatatactcaaggttcccaggactctgcactcttgcagctcattgagctcagggaccgggtgaaccagctttctccacctggcaaagtccgacttgaccttttctcctgcttgctccggcatcggcttaagctggccaacaatgaggtgggcaggatccagtcctccctgagggctttcaattctaagctgccaaaccctgtggaatatgagaccggcaaactctgtagctaatgggcggcccacttcagcactgggcaaggaggggatccatgaatctggggtacaaagataatctaagccctcaccttagtgccaacagggtgtgctcccacgagactttcagcatccagtagatgggacctcgaggctcgagctgaagcaggcgagagagaaacagctactgcgtgcgtgcgcgcacgcatacacacacacacacacacactggcacagggaggctacaactaagcagcctcagatctgtaaagttgattggtgctttctaaaatgaatgcaattgaaagaaaggagccaaggaagagattaagaaaaagaaccagctgaaccatgaaacaaacaaaaatcctaaaagtgattcttgtcattcaagaaagcaagaggggacaacaatgggaggggtcggagctcttccttcccctctgtggagtcacttttgtattctttttaaccagatttcttaaaatgttgttgttttgtgaatcctgacattggttcttacttttgtatgctgcctcctctgtgccctcccagacgctgactgggaaacacaagaagtacaaccaacaggaaccagcgccaagggcaggcagcggcctccttgctcccctcccttactcctccctctgctgcctcctccccccaccaagtttcagggccctggattgttcccagttcccattgtggtcccttcagagctcctttccaacagcatctctctgtcgaagaaagaagctctgtcaagttagagagagacaatgtgtaggaaatgttcttttttaaaaaaaaataacaaaaacaaaacaaaactatttattttgtgattgttttccttgttaatctgctccaaccacctgaacatctaagtaaacatttatctggtttaatatatttttggaaaa

SEQ ID NO: 42397 - DNA, 337 bp, Homo sapiens
tattgtggaaagtactgcatgctttggcataaaaatgtggagaaagaacaataaaagatagcctgtaggtgggacatgcgactcccacctgtatcccagttgttagggaggcgaggcaggagggtcatttgaggccaggagtttgagcccagcctgattaacatagtgaggcccgtgtctgtaaaaggaattttggaaaaattagctgggtgaggtggcacacccctgtagtcccagctatttcaggaggctgagatagaagaatccttagagcccaggagccggagctgcagtgagtcatgattgtgcccctgcagtccagcctgggtgacagagt

SEQ ID NO: 42398 - DNA, 269 bp, Homo sapiens
ctcaagataaagcttttccactcttctgtctgcttactgattcagggtggcaggcacaaaacaaaacgttccggttatattttccatcctgtttatatttaaattggctgtttattctttaataaagtgtataactgttggtctataacattatgaatgtgggattaagtggttagacttagcaggaatttgaaaatcagggtccaaatgtactaccctaagtacagtagcagaattacttctataaagaaaacttccctaagttacag

SEQ ID NO: 42399 - DNA, 468 bp, Homo sapiens
tgtaaagcttgtagtaaacatatggtacatagtaagcatcaataactcttggctccctgtcattgcgacatagctgccacccttcactcagcatacgtttaccacccttcactcagtatacgtttattgtacatgtctacgtgctgggaacatgaagataaataagacatggtctctagccttagggaacttatattctaacatgcatgtaacatatatgtaaaatgaaagttcttattctctcatctttccagctacttaaactttatccatagcccagtttactttcctcccatgtcagctaacttctgcatgataaaggacaggctttcatatcttagctatttctgtctaacagtgattcagtacttaccatgtaccccaaatgttgttaagaactggaatgcaaagatggtgtgtaagacagtctgtatctgtgagaagctaacattctgtagggagattaaa

SEQ ID NO: 42400 - DNA, 467 bp, Homo sapiens
taaatatttcaatgcactaacattcatcagacctaagtgtcctctaagaattattaaaagttttacctttctcctttaaaacaccaggagctagtaggacaatgttaaatttatatttttagattattttctagatatctggaataaatacaaactatatttcagagttttcaaaaaataacagttgtactcgttttttctttgagagaggtttggccatacaattatagtatgtatttagctaaaaagcaattaatataattatagcagagttaagaatttatatcagatcacgaataacattttaatgtttcaacaaaatatcccagaatttgaattggaaggattgttttgagttgctccaatccaaagtgcttttttacatatctgagggaaaaggtaaagagaggacatatgaattgcctaagacaactaattcatggcatattatacttatacagctattt

SEQ ID NO: 42401 - DNA, 1200 bp, Homo sapiens
cacacaaaaggccaaaggtgcacgattctcctcggggctccttcctctccgctcccttcccaaccaagaaggacacgcagaactttgctggagagatcaatgtttctagaacaccctgaaacaaaagtcctgatatgtgcaaataatacacacccacaaaagaaaataacctctttgcgctgacaccctgcctctccgaagaggacgttttctccctacttggaatttccatcagcacctgggttggtaccaaactcaggacgtggtggacacgctctctgactctgtatttcaggaagctgccaatcaatagagatttaaagcttctgacttccgcatatccgaataccaggtaggaaacatctgctttggagtaagagaaggccccagtacctgctttttctccggaaccgtgagagggagccatggggaggagaccagaatttcagccttcctatctccctttaccacaaggacgccttgaggacccaagtcaaattgagatctttcaaccacgggctcggaaacccgctttctgtgtccacttcaaccaaacacgtctaacaggcaggaatttagaggtggccaaggtaacgagaactagtggttttcaccctgtttggtgaccttcatagggcttatttatgcacttcaagcgcatgacctaatacatgttggtttggcttctcttctcgtaatagcagcctgtaaaaagcttttgagaattccccgtgttttctcatttgtgggtcaagaaaataaaatcgatatctaagtaaccttaaaaaaatggcctgcacaatctaaaaatttggaatgtttccactaggactaaggatatctctgaaagcctcaaagatcatcaaaatgaagtccaacatttgctgtttttaaggtgagatatttggtaacggagtatgagagaactggctaagggggctttttgacataagtcaaacaatgacatttaaaactcacgtaaaagcaattactgtgtggaatttttctgtgtttttctcatttcttaaacagaagtgtatatgttttcagcatagcttcttgctgtaattttctttcttgacaaacccacatcttaccatgaaacccaaagtatgcatgctgcagaaacaataatggttgaaacagacccggctgtctctggcatgatttttctttacaaaattaaaatgtcttttggct

SEQ ID NO: 42402 - DNA, 429 bp, Homo sapiens
tcttttttttttgagacggagtctcactctgttgcccagggtggagtgcagtggcgtgatcttggctcactgcaagctccgcctcctgggttcacgccattctcctgcctcagcctcctgagtagctgatactacaggtgcccgccaccacgcctggctaattttttgtatttttagtagagacggggtttcaccgtgttagccaggatggtctccatctcctgacctcgtgatccgcctgcctcagcctcccaaagtgctaggattataggcatgaaccaccgagccctgcctgtattttctttttcaaattaattttcctttccttttctctcctgttaatctccaattgatgttggcagtgtaagctgaagtacccattcctcagacactgtagtagtctgggacgtgattttggttctccgctct

SEQ ID NO: 42403 - DNA, 779 bp, Homo sapiens
cttatccctagggataaccacttgccatttttttacaatttcaattttttatgattataaaagtcatacacatttaaaaatacttcaaaataaatacaaaataaaaataaatgcttcattgcttaggttaccttggtacatgcaaggtctgagaccacatccatcaatgcagtttgctgcgtggattaccagatctctccaacattgacctcaattttttactctgagagcaaacagaatgggcaagggctgacctgaaatccttttgaaacacaagctggatcctagggctttgacctccactgctcactgccacatgggatccgtctctgtgccccactctgccccagccccactggccttcctgctgctgctcacacaggcctactcttaaggcctttgcatactctgttccctgcagaggcctctgcctctgaacaaatgtgggacccatctctgccaaggctgggaagcaaacagcccccactttgccttgtcagcctgtgtttgcaccattcctgtggtggcctctcccagctgctttcacgtgggatttgagctctgggaagctggaagtttgtggagtccacttccctcattttgcatatatggatgataaagcccacaggcaagggctctgacaaaaggaaagattccttccatttggcattgtgatgcagaggctgtcacagacaagcctgggaatttgggatacatcttgctgagcctagagacagaaaagagcttctaggctgccttccctgagccccgggccaggc

SEQ ID NO: 42404 - DNA, 327 bp, Homo sapiens
gtggagaaggtacagtctgtagaggtccaaaactcctgctgcattcaggttattctaattaagtgaagacaatgggaccatgctggggaccaaagatgaggctaatgtgaaggtataaaccacggaaacctagtactacttgactgttaggagcagtggtgacacaggtgctcccagaaccagcaatgccaggctagggagttttgagtccactccaggaacaatgggaacctcccaggagccccttatccaggcttatctgccccagatcactggagacagcctgcagaccaaaaccccagagagatgcagtggtgattccaactg

SEQ ID NO: 42405 - DNA, 456 bp, Homo sapiens
aagttattaaaataagaggtccttgatggcaaaaataataaaatggctctttggtggttaaaaggaccaatttggtccaatctcaactctttaaataaaaaggaattttgcttgaggtaagtaatttagttcctttgtggaaagttctttgacttctaagatgattcagagtttggaattactgatttagtcttctgactgtatcaggagtctttaaatatacattttcaattcaattaataagtcatgagttcagttaatttatcatcagtgcaatcagaaaccatcaaagtagactgagttgccagcctttacttctggctaatcctgacacatttcacatgtcatggattcctgaaattctgaagctgagattgctaatggttcagattggttactggatcattgtgttcctaaagaaaaattatacagctcgcttcaatgatgcagtttccc

SEQ ID NO: 42406 - DNA, 384 bp, Homo sapiens
tcatttcctcaacttcactactgtgtcgccctgtgggacagggaagtccaagtcggggaagaagcctgtggggaggggttggtgggagatggggagcccatatggcccagtgagtcaggaaaatagggtccagaggcagggaacataaggccaattcgcacttgagccataacaggaaatgtcctctccataggacgtatgccgtaaatgactttgtaactttacttcatccttttcgtttatatagggcgtacctcaagtagagggtatttaaacacaaaaactctgtaatggggcctttgagcccctattctcaggcccgttctcctcccacaccgtggagttgactttcattttcaataaatcccttccttccttccttta

SEQ ID NO: 42407 - DNA, 626 bp, Homo sapiens
tgaaaaagttcttcttctctacatcttcctcccactcctacaacccttgatccccacgtgagatctcatttcctccagctgggtcttctgcagagtgattagagcttctgccctccttgcagcatctctattgtaaaaggattgctgaagcttattaagccttgcagctcctaggaggaaaggtaccatatagaaataaaacaaatcaacaaattagtgtgttttgtagaagttgaataggactccacctatctgcatgagtgtgcacactgtgcagtcgcacaggcagtctcaaatgggaatttggaaaaagctaagctttttcacttgagaaaggtttacatattctttgcacctgggcacacacagcacaggctgttctcaggactcccaccagattaggcctgggacatgacagagcctgtcaggtccacgtttgctttccagtctccttgcttccagtctagctgtggcctgactccaagtccagtgtaagatttttttttttcagcaataaggaatcggttcattcacctgtacgaaaaccagtgggaggatcatgcataaggctcatatccttgctgtgaatttcaaaggactggctaagtaaataaaattatcatgcc

SEQ ID NO: 42408 - DNA, 2972 bp, Homo sapiens
  misc_feature (1336)..(1336): n is a, c, g, or t
cggagtaccgggatctcggtttccaaggactgtaacgccttcaaccgcccgccgcgatagagtgcccacgaccctgcctcgggaatcccgctctgcaccgccccaccagacccggactcggagccgcgagcggcccgagatgagcagcaatgactcctcccttatggctgggatcatttactatagccaggaaaagtacttccaccatgtgcagcaggctgcagctgtgggcctggaaaaattcagcaatgaccctgtgttgaagttctttaaagcctatggagtcctcaaagaaggcaatgtacttcatgatgcagcagaactactcagaggccctggaggtggtgaaccagatcactgtgacttcagggagcttcctgccagccctcgtcctgaagatgcagctgttcttagctcggcaggactgggagcagacagtagaaatgggacacagaatcctagaaaaagatgagagcaatattgatgcctgccaaattctaaccgtgcatgagcttgcaagagaaggaaacatgaccacagtaagttctttgaagactcagaaggtgatccttgaaacagaatcaaggaggaacccttcatgacctgtgcacctgacccaaagcccttgtagggagctcctggatctcagcttcctcttttctaccccacccctatactcgctgccaaggaggcctgctctggtttgactctttgagttgtgtagcttgggagtcaggcagcatcaggcagtgagattgattctaggctctgccatgtgctatctgtggaagcctgggcaggtgtccccacctggataagccgcaggcttcctgtttgtaaaatagacagaattccacacaggactaaatgtgataagaagtgggagagtttggaacagtccctggcacactacagtaattccatcaatgttaactgatagtagaagtcgtggtagtatttctgaattcaggaaatgccttttttttaggggatagttggaactgctcaggcattggccaggtaatactgggccccaaacatgctcgtaagtcttgtagttttccaaagaaaccaaaaatagccctcaaatgcagtcagaaacacctagaattcttagtgaaacctcaatacccagacaggttctcattttcagaaaggtttgtttttagccaaagcattgccttttagatcagtgaaatatattgcctctatggagagcatggcaaaccaggagtctctaaggggtcatggtgggaaggggaagcttctggtttcttctgcacagctctgagattgtggattttgtgggatggggtgaggtagaggggagagtccntatttgggagaaaaaggccccagcccttttcgtctctgggtaggaataagagaataggactatcctcagctccctgtgactccagatccctaagcaggccttcctggggcctggcctgaaagttaatcccaggggcagacttagcatttagctaactgagatttagcattagccccttttttactcccacttcaaaccttgggacctccccaccgaccccgggctggctacccagttctaattttgttcatacttactgaacagagtggacccataccatccttggttttgcttttggcacttctctgcagctgggaactaagaattccttactcctgggtggggagtgggaaagaacctaagctttggaatctgtcagtgacctaggtggctgggtgacctcagaccaattgcctaacctttctaacctttcatgtgttggacaggaaggtttggaaagttcgaatagttatactgacttacatttgattcatgtcaaaatggagcagaggcttctgggccagcactagttagtttgctgctggcctggcaggctgcactgtggacacagtgagggctagctcctggctctgcctgggtgggtctgaaaaggcaacttctcttcacaaactcaggaacagggctactctatgggttagccctgctccataaggagcagtcaaaaaaaaaagaaaaaaaagaaaaaaaaaaaacaaattcaagaacagagggcagtgccagctctgggtgaataatgtccccaggagttccacttataggcctttgaagtaattctgatgcctggaccactccaattcacttaaatctgaatttctggggggttgtgcctgggcatgggcattttttaaatctcccagctgatgctactatgcagtcagggttgagaaccacggcgcaactctgaccttgcaccttgcatgttgacattctctgttttgtccctgcaggctaccaatcacgttagaaatctgattaaggcactagagacaagggaacccgaaaatccaagcctccatcttaaaaaaattattgtggttagccgactggtaagaaggttctttcctggttctgaaatggtgcttctccctgctttccttagaggagaactgtgctcccccaggaagctccttgagtgccttacccctcccttctggctcaaacttgtcctttagggtagtggctcatatcctgctgtgcctacttgcctctggctgataactgtgacatgtgggttctacatccttagcctaggtgccccctcagagatgccatgaagatcagggagacggggtctgaaagtgcttttggagtgggctgtgccttatttggggaaagcgggtggtattgcagctgttatgcagcagagccacacccagctctagcctctagtgcctgggtgcccatctcccatattcttttttgtggaggtgacctgagaaggctggcctgcctaggcctctcaaacatcagggaaggttcaactagaccaggttgccaacaaatctgtatctctttcagacccttcagccccaaagcaagatttactagaagtagttgctgtaagaatgaaggcaactctgggaccccaggaaccagaactgtggagttgcatagg

SEQ ID NO: 42409 - DNA, 3139 bp, Homo sapiens
  misc_feature (1503)..(1503): n is a, c, g, or t
cggagtaccgggatctcggtttccaaggactgtaacgccttcaaccgcccgccgcgatagagtgcccacgaccctgcctcgggaatcccgctctgcaccgccccaccagacccggactcggagccgcgagcggcccgagatgagcagcaatgactcctcccttatggctgggatcatttactatagccaggaaaagtacttccaccatgtgcagcaggctgcagctgtgggcctggaaaaattcagcaatgaccctgtgttgaagttctttaaagcctatggagtcctcaaagaagaccgagaagcaattcaggagcttgagtacagcctgaaggaaatacgcaagacagtcagtgggactgcactgtactatgctggccttttcctctggctcataggccgccatgacaaggccaaagagtacattgaccgcatgctgaagatttctagaggcttcagagaggcaatgtacttcatgatgcagcagaactactcagaggccctggaggtggtgaaccagatcactgtgacttcagggagcttcctgccagccctcgtcctgaagatgcagctgttcttagctcggcaggactgggagcagacagtagaaatgggacacagaatcctagaaaaagatgagagcaatattgatgcctgccaaattctaaccgtgcatgagcttgcaagagaaggaaacatgaccacagtaagttctttgaagactcagaaggtgatccttgaaacagaatcaaggaggaacccttcatgacctgtgcacctgacccaaagcccttgtagggagctcctggatctcagcttcctcttttctaccccacccctatactcgctgccaaggaggcctgctctggtttgactctttgagttgtgtagcttgggagtcaggcagcatcaggcagtgagattgattctaggctctgccatgtgctatctgtggaagcctgggcaggtgtccccacctggataagccgcaggcttcctgtttgtaaaatagacagaattccacacaggactaaatgtgataagaagtgggagagtttggaacagtccctggcacactacagtaattccatcaatgttaactgatagtagaagtcgtggtagtatttctgaattcaggaaatgccttttttttaggggatagttggaactgctcaggcattggccaggtaatactgggccccaaacatgctcgtaagtcttgtagttttccaaagaaaccaaaaatagccctcaaatgcagtcagaaacacctagaattcttagtgaaacctcaatacccagacaggttctcattttcagaaaggtttgtttttagccaaagcattgccttttagatcagtgaaatatattgcctctatggagagcatggcaaaccaggagtctctaaggggtcatggtgggaaggggaagcttctggtttcttctgcacagctctgagattgtggattttgtgggatggggtgaggtagaggggagagtccntatttgggagaaaaaggccccagcccttttcgtctctgggtaggaataagagaataggactatcctcagctccctgtgactccagatccctaagcaggccttcctggggcctggcctgaaagttaatcccaggggcagacttagcatttagctaactgagatttagcattagccccttttttactcccacttcaaaccttgggacctccccaccgaccccgggctggctacccagttctaattttgttcatacttactgaacagagtggacccataccatccttggttttgcttttggcacttctctgcagctgggaactaagaattccttactcctgggtggggagtgggaaagaacctaagctttggaatctgtcagtgacctaggtggctgggtgacctcagaccaattgcctaacctttctaacctttcatgtgttggacaggaaggtttggaaagttcgaatagttatactgacttacatttgattcatgtcaaaatggagcagaggcttctgggccagcactagttagtttgctgctggcctggcaggctgcactgtggacacagtgagggctagctcctggctctgcctgggtgggtctgaaaaggcaacttctcttcacaaactcaggaacagggctactctatgggttagccctgctccataaggagcagtcaaaaaaaaaagaaaaaaaagaaaaaaaaaaaacaaattcaagaacagagggcagtgccagctctgggtgaataatgtccccaggagttccacttataggcctttgaagtaattctgatgcctggaccactccaattcacttaaatctgaatttctggggggttgtgcctgggcatgggcattttttaaatctcccagctgatgctactatgcagtcagggttgagaaccacggcgcaactctgaccttgcaccttgcatgttgacattctctgttttgtccctgcaggctaccaatcacgttagaaatctgattaaggcactagagacaagggaacccgaaaatccaagcctccatcttaaaaaaattattgtggttagccgactggtaagaaggttctttcctggttctgaaatggtgcttctccctgctttccttagaggagaactgtgctcccccaggaagctccttgagtgccttacccctcccttctggctcaaacttgtcctttagggtagtggctcatatcctgctgtgcctacttgcctctggctgataactgtgacatgtgggttctacatccttagcctaggtgccccctcagagatgccatgaagatcagggagacggggtctgaaagtgcttttggagtgggctgtgccttatttggggaaagcgggtggtattgcagctgttatgcagcagagccacacccagctctagcctctagtgcctgggtgcccatctcccatattcttttttgtggaggtgacctgagaaggctggcctgcctaggcctctcaaacatcagggaaggttcaactagaccaggttgccaacaaatctgtatctctttcagacccttcagccccaaagcaagatttactagaagtagttgctgtaagaatgaaggcaactctgggaccccaggaaccagaactgtggagttgcatagg

SEQ ID NO: 42410 - DNA, 3373 bp, Homo sapiens
  misc_feature (1737)..(1737): n is a, c, g, or t
cggagtaccgggatctcggtttccaaggactgtaacgccttcaaccgcccgccgcgatagagtgcccacgaccctgcctcgggaatcccgctctgcaccgccccaccagacccggactcggagccgcgagcggcccgagatgagcagcaatgactcctcccttatggctgggatcatttactatagccaggaaaagtacttccaccatgtgcagcaggctgcagctgtgggcctggaaaaattcagcaatgaccctgtgttgaagttctttaaagcctatggagtcctcaaagaagagcacatccaggatgccatcagtgacctggaaagcatcaggcatcacccagacgtgtccctgtgctccaccatggccctcatttatgctcacaaaagatgtgaaatcattgaccgagaagcaattcaggagcttgagtacagcctgaaggaaatacgcaagacagtcagtgggactgcactgtactatgctggccttttcctctggctcataggccgccatgacaaggccaaagagtacattgaccgcatgctgaagatttctagaggcttcagagaggcctatgtgctcagaggctgggtggacctgacctcagacaagccccacactgcgaagaaagccattgagtacctggaacaaggaattcaggacaccaaagatgtgctggggctgatgggaaaggcaatgtacttcatgatgcagcagaactactcagaggccctggaggtggtgaaccagatcactgtgacttcagggagcttcctgccagccctcgtcctgaagatgcagctgttcttagctcggcaggactgggagcagacagtagaaatgggacacagaatcctagaaaaagatgagagcaatattgatgcctgccaaattctaaccgtgcatgagcttgcaagagaaggaaacatgaccacagtaagttctttgaagactcagaaggtgatccttgaaacagaatcaaggaggaacccttcatgacctgtgcacctgacccaaagcccttgtagggagctcctggatctcagcttcctcttttctaccccacccctatactcgctgccaaggaggcctgctctggtttgactctttgagttgtgtagcttgggagtcaggcagcatcaggcagtgagattgattctaggctctgccatgtgctatctgtggaagcctgggcaggtgtccccacctggataagccgcaggcttcctgtttgtaaaatagacagaattccacacaggactaaatgtgataagaagtgggagagtttggaacagtccctggcacactacagtaattccatcaatgttaactgatagtagaagtcgtggtagtatttctgaattcaggaaatgccttttttttaggggatagttggaactgctcaggcattggccaggtaatactgggccccaaacatgctcgtaagtcttgtagttttccaaagaaaccaaaaatagccctcaaatgcagtcagaaacacctagaattcttagtgaaacctcaatacccagacaggttctcattttcagaaaggtttgtttttagccaaagcattgccttttagatcagtgaaatatattgcctctatggagagcatggcaaaccaggagtctctaaggggtcatggtgggaaggggaagcttctggtttcttctgcacagctctgagattgtggattttgtgggatggggtgaggtagaggggagagtccntatttgggagaaaaaggccccagcccttttcgtctctgggtaggaataagagaataggactatcctcagctccctgtgactccagatccctaagcaggccttcctggggcctggcctgaaagttaatcccaggggcagacttagcatttagctaactgagatttagcattagccccttttttactcccacttcaaaccttgggacctccccaccgaccccgggctggctacccagttctaattttgttcatacttactgaacagagtggacccataccatccttggttttgcttttggcacttctctgcagctgggaactaagaattccttactcctgggtggggagtgggaaagaacctaagctttggaatctgtcagtgacctaggtggctgggtgacctcagaccaattgcctaacctttctaacctttcatgtgttggacaggaaggtttggaaagttcgaatagttatactgacttacatttgattcatgtcaaaatggagcagaggcttctgggccagcactagttagtttgctgctggcctggcaggctgcactgtggacacagtgagggctagctcctggctctgcctgggtgggtctgaaaaggcaacttctcttcacaaactcaggaacagggctactctatgggttagccctgctccataaggagcagtcaaaaaaaaaagaaaaaaaagaaaaaaaaaaaacaaattcaagaacagagggcagtgccagctctgggtgaataatgtccccaggagttccacttataggcctttgaagtaattctgatgcctggaccactccaattcacttaaatctgaatttctggggggttgtgcctgggcatgggcattttttaaatctcccagctgatgctactatgcagtcagggttgagaaccacggcgcaactctgaccttgcaccttgcatgttgacattctctgttttgtccctgcaggctaccaatcacgttagaaatctgattaaggcactagagacaagggaacccgaaaatccaagcctccatcttaaaaaaattattgtggttagccgactggtaagaaggttctttcctggttctgaaatggtgcttctccctgctttccttagaggagaactgtgctcccccaggaagctccttgagtgccttacccctcccttctggctcaaacttgtcctttagggtagtggctcatatcctgctgtgcctacttgcctctggctgataactgtgacatgtgggttctacatccttagcctaggtgccccctcagagatgccatgaagatcagggagacggggtctgaaagtgcttttggagtgggctgtgccttatttggggaaagcgggtggtattgcagctgttatgcagcagagccacacccagctctagcctctagtgcctgggtgcccatctcccatattcttttttgtggaggtgacctgagaaggctggcctgcctaggcctctcaaacatcagggaaggttcaactagaccaggttgccaacaaatctgtatctctttcagacccttcagccccaaagcaagatttactagaagtagttgctgtaagaatgaaggcaactctgggaccccaggaaccagaactgtggagttgcatagg

SEQ ID NO: 42411 - DNA, 872 bp, Homo sapiens
cggagtaccgggatctcggtttccaaggactgtaacgccttcaaccgcccgccgcgatagagtgcccacgaccctgcctcgggaatcccgctctgcaccgccccaccagacccggactcggagccgcgagcggcccgagatgagcagcaatgactcctcccttatggctgggatcatttactatagccaggaaaagtacttccaccatgtgcagcaggctgcagctgtgggcctggaaaaattcagcaatgaccctgtgttgaagttctttaaagcctatggagtcctcaaagaagagcacatccaggatgccatcagtgacctggaaagcatcaggcatcacccagacgtgtccctgtgctccaccatggccctcatttatgctcacaaaagatgtgaaatcattgaccgagaagcaattcaggagcttgagtacagcctgaaggaaatacgcaagacagtcagtgggactgcactgtactatgctggccttttcctctggctcataggccgccatgacaaggccaaagagtacattgaccgcatgctgaagatttctagaggcttcagagaggcctatgtgctcagaggctgggtggacctgacctcagacaagccccacactgcgaagaaagccattgagtacctggaacaaggaattcaggacaccaaagatgtgctggggctgatgggaaaggcaatgtacttcatgatgcagcagaactactcagaggccctggaggtggtgaaccagatcactgtgacttcagggagcttcctgccagccctcgtcctgaagatgcagctgttcttagctcggcaggactgggagcagacagtagaaatgggacacaggtgagctactgcacaaa

SEQ ID NO: 42412 - DNA, 697 bp, Homo sapiens
gggcaccagacgagttgttaagttgtaaatatgaaaatttattttgcataggaaacaataatctctggtaaaaatcattactgcatataacaaaacaatgccttcaattaaagggggaaagtgagtttttaaacattggggttaatttagaagaaaatacagtatataataatctcaacatcatgttaaggaacatgattattttttaagatgacccctttgattgtatttcacaggattattgaacatggggaaggaagaggcctcacttgaggaagtgttagtctatctcaatcaaatctactgtgggcagatttctattgaaacctcccaacttcagagccaggatgagaaagactggtttgccaagcggtttgaggaactgcaaaaggagacgtttaccacagaagagcgaaaacatctgtcgaaactaatgctggaatctcaggctggagtgcagtggcgaaatctcagctcactgcaacctctgcctcctgggttcaagtgattctcctgcctcagcctcccgagtagctgggactacaggcacgtgccaccacgcccagctaatttttgtatttttagtagagacagggtttcaccatgttggccagcctggtctcaaactcctgacctcaagtgatcctcccacctcagcctcccaaagtgctgagattacaggcatgagccactatac

SEQ ID NO: 42413 - DNA, 5282 bp, Homo sapiens
  misc_feature (2)..(2): n is a, c, g, or t
  misc_feature (24)..(24): n is a, c, g, or t
anggctaggtacgaggctggtgtnaatcggccgaggcagggccggtgggatcccctcgggctcccgccttagcatgctggccgggacatctggtgaacatggcctctgctactgcggcagcagcacgacggggcctcggccgggctctccctctcctctggcgtggctaccagaccgagcggggcgtttacggctaccggccgaggaagcccgagagccgcgagccccagggcgccctggagcgccccccagttgatcatggccttgccaggttggtgacagtatattgtgagcatggtcataaagctgccaaaatcaaccccctcttcaccggacaagccctgctggagaatgtgcctgaaatccaagccctggtgcagacactgcagggacccttccacacggcaggattattgaacatggggaaggaagaggcctcacttgaggaagtgttagtctatctcaatcaaatctactgtgggcagatttctattgaaacctcccaacttcagagccaggatgagaaagactggtttgccaagcggtttgaggaactgcaaaaggagacgtttaccacagaagagcgaaaacatctgtcgaaactaatgctggaatctcaggagtttgaccactttctggccaccaagttctcgacagtgaagcgatatggaggcgaaggggctgaaagcatgatgggctttttccacgagctgctgaaaatgtcggcctacagcgggatcactgatgtcattattgggatgccccatagagggaggctgaatttattgacaggccttctgcagttccctccagagctgatgttccgtaaaatgcgaggcttaagtgaatttccagagaatttctcagccactggagacgtcctgtctcacctgacctcctctgtggacctgtactttggggcgcaccatcccctccatgtgacaatgttgcccaatccctcgcacctggaggccgtcaaccccgtggccgtgggcaaaactcgcggcaggcagcagtctcgccaagacggcgattactctccagacaactcagcccagccgggggacagggtcatttgcttacaggtccatggtgatgcttctttctgtggtcaagggattgttcctgaaacattcacgctgtccaatctcccacatttcagaattggtgggagtgtgcatttgattgttaataaccagctgggttacaccactccagctgaaagaggaaggtcttctttatactgcagtgatattgggaagcttgtgggctgtgccatcatccatgtcaatggagacagcccagaggaagtggtccgtgccacacgactggcttttgaataccaacgccagttccgcaaggatgtgattattgatctgttgtgctacaggcagtggggccacaatgagctggatgagccattctacaccaaccccatcatgtacaaaatcatcagagctcgaaagagcattccagacacatatgcagagcacctcattgctggcggactcatgacgcaggaggaggtgtctgaaataaaatcctcctactatgccaagttgaatgatcacttaaataacatggcccactacaggccccctgccctgaacctgcaggcccactggcagggcctggctcagccagaagcgcaaatcaccacctggagtacaggtgtgcccctcgacctcctgcggtttgttggcatgaagtctgtagaggtgccaagagagctgcagatgcacagtcacctgctgaagacacatgttcagtccagaatggagaagatgatggacggaatcaagctagactgggccaccgcggaagctcttgccttgggttctttacttgctcaaggttttaatgttcgtctaagtggccaagatgttggtcgtggaactttcagtcagaggcatgcaatggtggtttgccaggagacggatgacacctacatccccctgaaccatatggacccaaatcagaaggggtttctagaggtcagcaacagccccctgtcagaagaggccgtcctgggattcgaatatgggatgagcattgagagcccaaagttactgcccctgtgggaggcacagtttggcgatttcttcaatggtgcccagatcatctttgacacattcatctctggaggagaggccaagtggctcctacaaagcggcattgtcatcctccttccacatggctacgatggggctgggccagaccactcatcctgtcgaatagagcgtttcctgcagatgtgtgacagtgcggaagagggggtggacggagacactgtgaacatgtttgtggttcacccaacaactcctgcacagtatttccacttgcttaggagacagatggtccggaacttcagaaaaccactcattgttgcttcccctaagatgttactcaggctcccggcagccgtgtcaactcttcaagaaatggcaccaggaacaacatttaacccggtcattggtgattcatctgtggatccaaaaaaggttaagaccctcgtgttctgctccggcaaacatttctactccctggtgaaacaaagagaatctctgggggccaagaagcatgactttgccatcatccgagtagaggaactctgccccttcccgttggattctttacagcaagagatgagcaaatacaaacatgttaaagatcatatttggagtcaggaggaacctcagaacatgggtccgtggtcgtttgtttctccaaggtttgaaaagcagctggcctgcaagctccgtctggtgggccggccccctttgccagtacccgctgtaggaattggcacagttcacttgcaccagcatgaagatatcctcgccaagaccttcgcttgatgatgacttttgaagaaacactatttctctttaagaaaatggccattaaggccgggtggggtggcacatgcctgtaatcccagcactttgggaggccaaggctggtggatcacctgaggtcaggagttcgagaccagcctggccaacacggtgaaaccccgcctctactaaaaatacaaaaaatagccgggtgtggtggtgggcacctgtgatcccagcttcctgggaggctgaggcaagagaatcgcttgaatctgggaggcggaggttgcagtgagccaggatcacaccattgctgtccagcctgggtgacagagcaagactgcgtttcaaaaaaaaaaaaaaaaaaacccattaaaagaggcctccttcctccactctctcaacccctctgttgggtaacatgaaaagactgtattcctctaagatgttgggattgatatacgtgatttaatctgcaataggtggaataaccaggggaactggttatgaatatgtgaatgcaaccagcaaatttatccttgaaggtgtgatggtagaaataggaaaacaacaaaagaaaaacaataacaaaaaaagaaagtgtgatggctgggtgcagtggctcacgcctgtaatcccagcactttgggaggcttaggcggctggatcacctgaggtcaggagttcaagaccagcctggtcaacgtggtgaaacgccgtttctactaaaaatatgaaaattagttgggtgtggtggcatgcgcttgtagtctcagctactccggaggctgaggcaggagaattgcttgaacctggaaggcagaggttgcagtgagccgaaatggcgccactgtactccaacctgggcgacagagcaagactccatctcataaattaaaaggaaagtatgatagtgttatggattttagctctgagtgagctggaaaactaggtcattatctagatgatttcagacttgaccctaattgaccatatatgaccaggaaacacttctgagtttacagctccgtggagatgacctcaacactgcctcttgatttgtttgatgcatgtcactttcattaattttccccctcctttttgaaagtcctgtggcagtactaatattttcattttatgtaatctctggtgctgctttccagtcactgtatgaagtgttatccccaacactagcaaatctaggtcctactaaatacaaatctctgggtggatgatcttctagtactgtatttttaaattaaggagttttagttataatgaaattgatttgtagtctgttttgccgtaaacttgtttttctttaaattgttcttacagtgatatcttactatttttaactgtctggggtttctgatatggggatttcagcccctggttaatcagtcttgtccctacaagtccctgatgcagtatgtttatttgtgatgtttaaagaacatttcttggctgggcgctgcggcttgcgcctgtaatctcagcactttgggaggctgaggtgggtggatcacctgaggttgggagttcgagaccagcctgacaaaacatagtgaaaccccgtctctactaaaaatacaaaaattagctgggcgtggtggtgggtgtctgtaatcccagctattcgggaggctgaggcaggagaatcgcttgaacccaggaggtggaggttgcagtgagctgagatcctgccactgcactccagtctgggtgacagagcaagactccatctcaaaaaataaataaatagaaagagagagagaggaaaaaaaaaagaaaagaacacttctttatttgagggactttcccaacaccaggtgcttggggatttcttagagatcaccaaccgactccctcactgtgaaattaaaccaagtactggaaacgtaactaaacagcgaaccatgtagcttcacctgactcagtgctgggggcctctaccatctactgtgcttgtgtcatgatgctttttctctgaagtggtgtgggaagtaccaggggactggcagaagcccaggccctctctacttttaccagcaactgatcatgtctttcagaatccatgtacatataggctgttctagccacagtggtagatttatgattcacatccgaaagtgtgccttagttatcaatttaacatttctctagtattcatatcccttttcttaccatatacctcagtgtatccttcctgtgtcaagccttataaatcatgtaatttagtgccactcatgtaaatcagtaaaatcacaaaggtctatttaatgaaaacgatttaccaatgttgtttttttttaacaagaaaaaaaataaaagcacattgtcattttttttcctcagaaactcctggacttcttgaattaaaagatttcaaaagtctaagcacaaaaatgagatggaagattagatctttgtaaaaggtta

SEQ ID NO: 42414 - DNA, 4229 bp, Homo sapiens
  misc_feature (2)..(2): n is a, c, g, or t
  misc_feature (24)..(24): n is a, c, g, or t
anggctaggtacgaggctggtgtnaatcggccgaggcagggccggtgggatcccctcgggctcccgccttagcatgctggccgggacatctggtgaacatggcctctgctactgcggcagcagcacgacggggcctcggccgggctctccctctcctctggcgtggctaccagaccgagcggggcgtttacggctaccggccgaggaagcccgagagccgcgagccccagggcgccctggagcgccccccagttgatcatggccttgccaggttggtgacagtatattgtgagcatggtcataaagctgccaaaatcaaccccctcttcaccggacaagccctgctggagaatgtgcctgaaatccaagccctggtgcagacactgcagggacccttccacacggcaggattattgaacatggggaaggaagaggcctcacttgaggaagtgttagtctatctcaatcaaatctactgtgggcagatttctattgaaacctcccaacttcagagccaggatgagaaagactggtttgccaagcggtttgaggaactgcaaaaggagacgtttaccacagaagagcgaaaacatctgtcgaaactaatgctggaatctcaggagtttgaccactttctggccaccaagttctcgacagtgaagcgatatggaggcgaaggggctgaaagcatgatgggctttttccacgagctgctgaaaatgtcggcctacagcgggatcactgatgtcattattgggatgccccatagagggaggctgaatttattgacaggccttctgcagttccctccagagctgatgttccgtaaaatgcgaggcttaagtgaatttccagagaatttctcagccactggagacgtcctgtctcacctgacctcctctgtggacctgtactttggggcgcaccatcccctccatgtgacaatgttgcccaatccctcgcacctggaggccgtcaaccccgtggccgtgggcaaaactcgcggcaggcagcagtctcgccaagacggcgattactctccagacaactcagcccagccgggggacagggtcatttgcttacaggtccatggtgatgcttctttctgtggtcaagggattgttcctgaaacattcacgctgtccaatctcccacatttcagaattggtgggagtgtgcatttgattgttaataaccagctgggttacaccactccagctgaaagaggaaggtcttctttatactgcagtgatattgggaagcttgtgggctgtgccatcatccatgtcaatggagacagcccagaggaagtggtccgtgccacacgactggcttttgaataccaacgccagttccgcaaggatgtgattattgatctgttgtgctacaggcagtggggccacaatgagctggatgagccattctacaccaaccccatcatgtacaaaatcatcagagctcgaaagagcattccagacacatatgcagagcacctcattgctggcggactcatgacgcaggaggaggtgtctgaaataaaatcctcctactatgccaagttgaatgatcacttaaataacatggcccactacaggccccctgccctgaacctgcaggcccactggcagggcctggctcagccagaagcgcaaatcaccacctggagtacaggtgtgcccctcgacctcctgcggtttgttggcatgaagtctgtagaggtgccaagagagctgcagatgcacagtcacctgctgaagacacatgttcagtccagaatggagaagatgatggacggaatcaagctagactgggccaccgcggaagctcttgccttgggttctttacttgctcaaggttttaatgttcgtctaagtggccaagatgttggtcgtggaactttcagtcagaggcatgcaatggtggtttgccaggagacggatgacacctacatccccctgaaccatatggacccaaatcagaaggggtttctagaggtcagcaacagccccctgtcagaagaggccgtcctgggattcgaatatgggatgagcattgagagcccaaagttactgcccctgtgggaggcacagtttggcgatttcttcaatggtgcccagatcatctttgacacattcatctctggaggagaggccaagtggctcctacaaagcggcattgtcatcctccttccacatggctacgatggggctgggccagaccactcatcctgtcgaatagagcgtttcctgcagatgtgtgacagtgcggaagagggggtggacggagacactgtgaacatgtttgtggttcacccaacaactcctgcacagtatttccacttgcttaggagacagatggtccggaacttcagaaaaccactcattgttgcttcccctaagatgttactcaggctcccggcagccgtgtcaactcttcaagaaatggcaccaggaacaacatttaacccggtcattggtgattcatctgtggatccaaaaaaggttaagaccctcgtgttctgctccggcaaacatttctactccctggtgaaacaaagagaatctctgggggccaagaagcatgactttgccatcatccgagtagaggaactctgccccttcccgttggattctttacagcaagagatgagcaaatacaaacatgttaaagatcatatttggagtcaggaggaacctcagaacatgggtccgtggtcgtttgtttctccaaggtttgaaaagcagctggcctgcaagctccgtctggtgggccggccccctttgccagtacccgctgtaggaattggcacagttcacttgcaccagcatgaagatatcctcgccaagaccttcgcttgatgatgacttttgaagaaacactatttctctttaagaaaatggccattaaggccgggtggggtggcacatgcctgtaatcccagcactttgggaggccaaggctggtggatcacctgaggtcaggagttcgagaccagcctggccaacacggtgaaaccccgcctctactaaaaatacaaaaaatagccgggtgtggtggtgggcacctgtgatcccagcttcctgggaggctgaggcaagagaatcgcttgaatctgggaggcggaggttgcagtgagccaggatcacaccattgctgtccagcctgggtgacagagcaagactgcgtttcaaaaaaaaaaaaaaaaaaacccattaaaagaggcctccttcctccactctctcaacccctctgttgggtaacatgaaaagactgtattcctctaagatgttgggattgatatacgtgatttaatctgcaataggtggaataaccaggggaactggttatgaatatgtgaatgcaaccagcaaatttatccttgaaggtgtgatggtagaaataggaaaacaacaaaagaaaaacaataacaaaaaaagaaagtgtgatggctgggtgcagtggctcacgcctgtaatcccagcactttgggaggcttaggcggctggatcacctgaggtcaggagttcaagaccagcctggtcaacgtggtgaaacgccgtttctactaaaaatatgaaaattagttgggtgtggtggcatgcgcttgtagtctcagctactccggaggctgaggcaggagaattgcttgaacctggaaggcagaggttgcagtgagccgaaatggcgccactgtactccaacctgggcgacagagcaagactccatctcataaattaaaaggaaagtatgatagtgttatggattttagctctgagtgagctggaaaactaggtcattatctagatgatttcagacttgaccctaattgaccatatatgaccaggaaacacttctgagtttacagctccgtggagatgacctcaacactgcctcttgatttgtttgatgcatgtcactttcattaattttccccctcctttttgaaagtcctgtggcagtactaatattttcattttatgtaatctctggtgctgctttccagtcactgtatgaagtgttatccccaacactagcaaatctaggtcctactaaatacaaatctctgggtggatgatcttctagtactgtatttttaaattaaggagttttagttataatgaaattgatttgtagtctgttttgccgtaaacttgtttttctttaaattgttcttacagtgatatcttactatttttaactgtaggagcataatcggtaccgagctcgat

SEQ ID NO: 42415 - DNA, 4827 bp, Homo sapiens
  misc_feature (2)..(2): n is a, c, g, or t
  misc_feature (24)..(24): n is a, c, g, or t
anggctaggtacgaggctggtgtnaatcggccgaggattgaaacctcccaacttcagagccaggatgagaaagactggtttgccaagcggtttgaggaactgcaaaaggagacgtttaccacagaagagcgaaaacatctgtcgaaactaatgctggaatctcaggagtttgaccactttctggccaccaagttctcgacagtgaagcgatatggaggcgaaggggctgaaagcatgatgggctttttccacgagctgctgaaaatgtcggcctacagcgggatcactgatgtcattattgggatgccccatagagggaggctgaatttattgacaggccttctgcagttccctccagagctgatgttccgtaaaatgcgaggcttaagtgaatttccagagaatttctcagccactggagacgtcctgtctcacctgacctcctctgtggacctgtactttggggcgcaccatcccctccatgtgacaatgttgcccaatccctcgcacctggaggccgtcaaccccgtggccgtgggcaaaactcgcggcaggcagcagtctcgccaagacggcgattactctccagacaactcagcccagccgggggacagggtcatttgcttacaggtccatggtgatgcttctttctgtggtcaagggattgttcctgaaacattcacgctgtccaatctcccacatttcagaattggtgggagtgtgcatttgattgttaataaccagctgggttacaccactccagctgaaagaggaaggtcttctttatactgcagtgatattgggaagcttgtgggctgtgccatcatccatgtcaatggagacagcccagaggaagtggtccgtgccacacgactggcttttgaataccaacgccagttccgcaaggatgtgattattgatctgttgtgctacaggcagtggggccacaatgagctggatgagccattctacaccaaccccatcatgtacaaaatcatcagagctcgaaagagcattccagacacatatgcagagcacctcattgctggcggactcatgacgcaggaggaggtgtctgaaataaaatcctcctactatgccaagttgaatgatcacttaaataacatggcccactacaggccccctgccctgaacctgcaggcccactggcagggcctggctcagccagaagcgcaaatcaccacctggagtacaggtgtgcccctcgacctcctgcggtttgttggcatgaagtctgtagaggtgccaagagagctgcagatgcacagtcacctgctgaagacacatgttcagtccagaatggagaagatgatggacggaatcaagctagactgggccaccgcggaagctcttgccttgggttctttacttgctcaaggttttaatgttcgtctaagtggccaagatgttggtcgtggaactttcagtcagaggcatgcaatggtggtttgccaggagacggatgacacctacatccccctgaaccatatggacccaaatcagaaggggtttctagaggtcagcaacagccccctgtcagaagaggccgtcctgggattcgaatatgggatgagcattgagagcccaaagttactgcccctgtgggaggcacagtttggcgatttcttcaatggtgcccagatcatctttgacacattcatctctggaggagaggccaagtggctcctacaaagcggcattgtcatcctccttccacatggctacgatggggctgggccagaccactcatcctgtcgaatagagcgtttcctgcagatgtgtgacagtgcggaagagggggtggacggagacactgtgaacatgtttgtggttcacccaacaactcctgcacagtatttccacttgcttaggagacagatggtccggaacttcagaaaaccactcattgttgcttcccctaagatgttactcaggctcccggcagccgtgtcaactcttcaagaaatggcaccaggaacaacatttaacccggtcattggtgattcatctgtggatccaaaaaaggttaagaccctcgtgttctgctccggcaaacatttctactccctggtgaaacaaagagaatctctgggggccaagaagcatgactttgccatcatccgagtagaggaactctgccccttcccgttggattctttacagcaagagatgagcaaatacaaacatgttaaagatcatatttggagtcaggaggaacctcagaacatgggtccgtggtcgtttgtttctccaaggtttgaaaagcagctggcctgcaagctccgtctggtgggccggccccctttgccagtacccgctgtaggaattggcacagttcacttgcaccagcatgaagatatcctcgccaagaccttcgcttgatgatgacttttgaagaaacactatttctctttaagaaaatggccattaaggccgggtggggtggcacatgcctgtaatcccagcactttgggaggccaaggctggtggatcacctgaggtcaggagttcgagaccagcctggccaacacggtgaaaccccgcctctactaaaaatacaaaaaatagccgggtgtggtggtgggcacctgtgatcccagcttcctgggaggctgaggcaagagaatcgcttgaatctgggaggcggaggttgcagtgagccaggatcacaccattgctgtccagcctgggtgacagagcaagactgcgtttcaaaaaaaaaaaaaaaaaaacccattaaaagaggcctccttcctccactctctcaacccctctgttgggtaacatgaaaagactgtattcctctaagatgttgggattgatatacgtgatttaatctgcaataggtggaataaccaggggaactggttatgaatatgtgaatgcaaccagcaaatttatccttgaaggtgtgatggtagaaataggaaaacaacaaaagaaaaacaataacaaaaaaagaaagtgtgatggctgggtgcagtggctcacgcctgtaatcccagcactttgggaggcttaggcggctggatcacctgaggtcaggagttcaagaccagcctggtcaacgtggtgaaacgccgtttctactaaaaatatgaaaattagttgggtgtggtggcatgcgcttgtagtctcagctactccggaggctgaggcaggagaattgcttgaacctggaaggcagaggttgcagtgagccgaaatggcgccactgtactccaacctgggcgacagagcaagactccatctcataaattaaaaggaaagtatgatagtgttatggattttagctctgagtgagctggaaaactaggtcattatctagatgatttcagacttgaccctaattgaccatatatgaccaggaaacacttctgagtttacagctccgtggagatgacctcaacactgcctcttgatttgtttgatgcatgtcactttcattaattttccccctcctttttgaaagtcctgtggcagtactaatattttcattttatgtaatctctggtgctgctttccagtcactgtatgaagtgttatccccaacactagcaaatctaggtcctactaaatacaaatctctgggtggatgatcttctagtactgtatttttaaattaaggagttttagttataatgaaattgatttgtagtctgttttgccgtaaacttgtttttctttaaattgttcttacagtgatatcttactatttttaactgtctggggtttctgatatggggatttcagcccctggttaatcagtcttgtccctacaagtccctgatgcagtatgtttatttgtgatgtttaaagaacatttcttggctgggcgctgcggcttgcgcctgtaatctcagcactttgggaggctgaggtgggtggatcacctgaggttgggagttcgagaccagcctgacaaaacatagtgaaaccccgtctctactaaaaatacaaaaattagctgggcgtggtggtgggtgtctgtaatcccagctattcgggaggctgaggcaggagaatcgcttgaacccaggaggtggaggttgcagtgagctgagatcctgccactgcactccagtctgggtgacagagcaagactccatctcaaaaaataaataaatagaaagagagagagaggaaaaaaaaaagaaaagaacacttctttatttgagggactttcccaacaccaggtgcttggggatttcttagagatcaccaaccgactccctcactgtgaaattaaaccaagtactggaaacgtaactaaacagcgaaccatgtagcttcacctgactcagtgctgggggcctctaccatctactgtgcttgtgtcatgatgctttttctctgaagtggtgtgggaagtaccaggggactggcagaagcccaggccctctctacttttaccagcaactgatcatgtctttcagaatccatgtacatataggctgttctagccacagtggtagatttatgattcacatccgaaagtgtgccttagttatcaatttaacatttctctagtattcatatcccttttcttaccatatacctcagtgtatccttcctgtgtcaagccttataaatcatgtaatttagtgccactcatgtaaatcagtaaaatcacaaaggtctatttaatgaaaacgatttaccaatgttgtttttttttaacaagaaaaaaaataaaagcacattgtcattttttttcctcagaaactcctggacttcttgaattaaaagatttcaaaagtctaagcacaaaaatgagatggaagattagatctttgtaaaaggtta

SEQ ID NO: 42416 - DNA, 4769 bp, Homo sapiens
acctgcaatcccagcactttgggaggctaaggcaagaggagtgcttgagcccaggagttcaagaccatgggtaacctcgcaaaactctgtccctacaaaaataaaaattaggtggcatggtctctacaaacatgaaaattaggtggtgcacctatgctcccaaagtgctggaattacaggcataagccaccactcctggctttaaattttcttttttgttgtatgatttcaactcagcacttcttccctagactccattgtgatgaatgccatttttttccttttgaatgtatccacaatagctgatgttccgtaaaatgcgaggcttaagtgaatttccagagaatttctcagccactggagacgtcctgtctcacctgacctcctctgtggacctgtactttggggcgcaccatcccctccatgtgacaatgttgcccaatccctcgcacctggaggccgtcaaccccgtggccgtgggcaaaactcgcggcaggcagcagtctcgccaagacggcgattactctccagacaactcagcccagccgggggacagggtcatttgcttacaggtccatggtgatgcttctttctgtggtcaagggattgttcctgaaacattcacgctgtccaatctcccacatttcagaattggtgggagtgtgcatttgattgttaataaccagctgggttacaccactccagctgaaagaggaaggtcttctttatactgcagtgatattgggaagcttgtgggctgtgccatcatccatgtcaatggagacagcccagaggaagtggtccgtgccacacgactggcttttgaataccaacgccagttccgcaaggatgtgattattgatctgttgtgctacaggcagtggggccacaatgagctggatgagccattctacaccaaccccatcatgtacaaaatcatcagagctcgaaagagcattccagacacatatgcagagcacctcattgctggcggactcatgacgcaggaggaggtgtctgaaataaaatcctcctactatgccaagttgaatgatcacttaaataacatggcccactacaggccccctgccctgaacctgcaggcccactggcagggcctggctcagccagaagcgcaaatcaccacctggagtacaggtgtgcccctcgacctcctgcggtttgttggcatgaagtctgtagaggtgccaagagagctgcagatgcacagtcacctgctgaagacacatgttcagtccagaatggagaagatgatggacggaatcaagctagactgggccaccgcggaagctcttgccttgggttctttacttgctcaaggttttaatgttcgtctaagtggccaagatgttggtcgtggaactttcagtcagaggcatgcaatggtggtttgccaggagacggatgacacctacatccccctgaaccatatggacccaaatcagaaggggtttctagaggtcagcaacagccccctgtcagaagaggccgtcctgggattcgaatatgggatgagcattgagagcccaaagttactgcccctgtgggaggcacagtttggcgatttcttcaatggtgcccagatcatctttgacacattcatctctggaggagaggccaagtggctcctacaaagcggcattgtcatcctccttccacatggctacgatggggctgggccagaccactcatcctgtcgaatagagcgtttcctgcagatgtgtgacagtgcggaagagggggtggacggagacactgtgaacatgtttgtggttcacccaacaactcctgcacagtatttccacttgcttaggagacagatggtccggaacttcagaaaaccactcattgttgcttcccctaagatgttactcaggctcccggcagccgtgtcaactcttcaagaaatggcaccaggaacaacatttaacccggtcattggtgattcatctgtggatccaaaaaaggttaagaccctcgtgttctgctccggcaaacatttctactccctggtgaaacaaagagaatctctgggggccaagaagcatgactttgccatcatccgagtagaggaactctgccccttcccgttggattctttacagcaagagatgagcaaatacaaacatgttaaagatcatatttggagtcaggaggaacctcagaacatgggtccgtggtcgtttgtttctccaaggtttgaaaagcagctggcctgcaagctccgtctggtgggccggccccctttgccagtacccgctgtaggaattggcacagttcacttgcaccagcatgaagatatcctcgccaagaccttcgcttgatgatgacttttgaagaaacactatttctctttaagaaaatggccattaaggccgggtggggtggcacatgcctgtaatcccagcactttgggaggccaaggctggtggatcacctgaggtcaggagttcgagaccagcctggccaacacggtgaaaccccgcctctactaaaaatacaaaaaatagccgggtgtggtggtgggcacctgtgatcccagcttcctgggaggctgaggcaagagaatcgcttgaatctgggaggcggaggttgcagtgagccaggatcacaccattgctgtccagcctgggtgacagagcaagactgcgtttcaaaaaaaaaaaaaaaaaaacccattaaaagaggcctccttcctccactctctcaacccctctgttgggtaacatgaaaagactgtattcctctaagatgttgggattgatatacgtgatttaatctgcaataggtggaataaccaggggaactggttatgaatatgtgaatgcaaccagcaaatttatccttgaaggtgtgatggtagaaataggaaaacaacaaaagaaaaacaataacaaaaaaagaaagtgtgatggctgggtgcagtggctcacgcctgtaatcccagcactttgggaggcttaggcggctggatcacctgaggtcaggagttcaagaccagcctggtcaacgtggtgaaacgccgtttctactaaaaatatgaaaattagttgggtgtggtggcatgcgcttgtagtctcagctactccggaggctgaggcaggagaattgcttgaacctggaaggcagaggttgcagtgagccgaaatggcgccactgtactccaacctgggcgacagagcaagactccatctcataaattaaaaggaaagtatgatagtgttatggattttagctctgagtgagctggaaaactaggtcattatctagatgatttcagacttgaccctaattgaccatatatgaccaggaaacacttctgagtttacagctccgtggagatgacctcaacactgcctcttgatttgtttgatgcatgtcactttcattaattttccccctcctttttgaaagtcctgtggcagtactaatattttcattttatgtaatctctggtgctgctttccagtcactgtatgaagtgttatccccaacactagcaaatctaggtcctactaaatacaaatctctgggtggatgatcttctagtactgtatttttaaattaaggagttttagttataatgaaattgatttgtagtctgttttgccgtaaacttgtttttctttaaattgttcttacagtgatatcttactatttttaactgtctggggtttctgatatggggatttcagcccctggttaatcagtcttgtccctacaagtccctgatgcagtatgtttatttgtgatgtttaaagaacatttcttggctgggcgctgcggcttgcgcctgtaatctcagcactttgggaggctgaggtgggtggatcacctgaggttgggagttcgagaccagcctgacaaaacatagtgaaaccccgtctctactaaaaatacaaaaattagctgggcgtggtggtgggtgtctgtaatcccagctattcgggaggctgaggcaggagaatcgcttgaacccaggaggtggaggttgcagtgagctgagatcctgccactgcactccagtctgggtgacagagcaagactccatctcaaaaaataaataaatagaaagagagagagaggaaaaaaaaaagaaaagaacacttctttatttgagggactttcccaacaccaggtgcttggggatttcttagagatcaccaaccgactccctcactgtgaaattaaaccaagtactggaaacgtaactaaacagcgaaccatgtagcttcacctgactcagtgctgggggcctctaccatctactgtgcttgtgtcatgatgctttttctctgaagtggtgtgggaagtaccaggggactggcagaagcccaggccctctctacttttaccagcaactgatcatgtctttcagaatccatgtacatataggctgttctagccacagtggtagatttatgattcacatccgaaagtgtgccttagttatcaatttaacatttctctagtattcatatcccttttcttaccatatacctcagtgtatccttcctgtgtcaagccttataaatcatgtaatttagtgccactcatgtaaatcagtaaaatcacaaaggtctatttaatgaaaacgatttaccaatgttgtttttttttaacaagaaaaaaaataaaagcacattgtcattttttttcctcagaaactcctggacttcttgaattaaaagatttcaaaagtctaagcacaaaaatgagatggaagattagatctttgtaaaaggtta

SEQ ID NO: 42417 - DNA, 5032 bp, Homo sapiens
  misc_feature (2)..(2): n is a, c, g, or t
  misc_feature (24)..(24): n is a, c, g, or t
anggctaggtacgaggctggtgtnaatcggccgaggcagggccggtgggatcccctcgggctcccgccttagcatgctggccgggacatctggtgaacatggcctctgctactgcggcagcagcacgacggggcctcggccgggctctccctctcctctggcgtggctaccagaccgagcggggcgtttacggctaccggccgaggaagcccgagagccgcgagccccagggcgccctggagcgccccccagttgatcatggccttgccaggttggtgacagtatattgtgagcatggtcataaagctgccaaaatcaaccccctcttcaccggacaagccctgctggagaatgtgcctgaaatccaagccctggtgcagacactgcagggacccttccacacggcaggattattgaacatggggaaggaagaggcctcacttgaggaagtgttagtctatctcaatcaaatctactgtgggcagatttctattgaaacctcccaacttcagagccaggatgagaaagactggtttgccaagcggtttgaggaactgcaaaaggagacgtttaccacagaagagcgaaaacatctgtcgaaactaatgctggaatctcaggagtttgaccactttctggccaccaagttctcgacagtgaagcgatatggaggcgaaggggctgaaagcatgatgggctttttccacgagctgctgaaaatgtcggcctacagcgggatcactgatgtcattattgggatgccccatagagggaggctgaatttattgacaggccttctgcagttccctccagagctgatgttccgtaaaatgcgaggcttaagtgaatttccagagaatttctcagccactggagacgtcctgtctcacctgacctcctctgtggacctgtactttggggcgcaccatcccctccatgtgacaatgttgcccaatccctcgcacctggaggccgtcaaccccgtggccgtgggcaaaactcgcggcaggcagcagtctcgccaagacggcgattactctccagacaactcagcccagccgggggacagggtcatttgcttacaggtccatggtgatgcttctttctgtggtcaagggattgttcctgaaacattcacgctgtccaatctcccacatttcagaattggtgggagtgtgcatttgattgttaataaccagctgggttacaccactccagctgaaagaggaaggtcttctttatactgcagtgatattgggaagcttgtgggctgtgccatcatccatgtcaatggagacagcccagaggaagtggtccgtgccacacgactggcttttgaataccaacgccagttccgcaaggatgtgattattgatctgttgtgctacaggcagtggggccacaatgagctggatgagccattctacaccaaccccatcatgtacaaaatcatcagagctcgaaagagcattccagacacatatgcagagcacctcattgctggcggactcatgacgcaggaggaggtgtctgaaataaaatcctcctactatgccaagttgaatgatcacttaaataacatggcccactacaggccccctgccctgaacctgcaggcccactggcagggcctggctcagccagaagcgcaaatcaccacctggagtacaggtgtgcccctcgacctcctgcggtttgttggcatgaagtctgtagaggtgccaagagagctgcagatgcacagtcacctgctgaagacacatgttcagtccagaatggagaagatgatggacggaatcaagctagactgggccaccgcggaagctcttgccttgggttctttacttgctcaaggttttaatgttcgtctaagtggccaagatgttggtcgtggaactttcagtcagaggcatgcaatggtggtttgccaggagacggatgacacctacatccccctgaaccatatggacccaaatcagaaggggtttctagaggtcagcaacagccccctgtcagaagaggccgtcctgggattcgaatatgggatgagcattgagagcccaaagttactgcccctgtgggaggcacagtttggcgatttcttcaatggtgcccagatcatctttgacacattcatctctggaggagaggccaagtggctcctacaaagcggcattgtcatcctccttccacatggctacgatggggctgggccagaccactcatcctgtcgaatagagcgtttcctgcagatgtgtgacagtgcggaagagggggtggacggagacactgtgaacatgtttgtggttcacccaacaactcctgcacagtatttccacttgcttaggagacagatggtccggaacttcagaaaaccactcattgttgcttcccctaagatgttactcaggctcccggcagccgtgtcaactcttcaagaaatggcaccaggaacaacatttaacccggtcattggtgattcatctgtggatccaaaaaaggttaagaccctcgtgttctgctccggcaaacatttctactccctggtgaaacaaagagaatctctgggggccaagaagcatgactttgccatcatccgagtagaggaactctgccccttcccgttggattctttacagcaagagatgagcaaatacaaacatgttaaagatcatatttggagtcaggaggaacctcagaacatgggtccgtggtcgtttgtttctccaaggtttgaaaagcagctggcctgcaaggtaatcacacgttttctctggtagtgttttgtgttttgtgtgcatgttgtttttcttttctttctttctttcttttttttttttgagacagaagaatcgcttgaatctgggaggcggaggttgcagtgagccaggatcacaccattgctgtccagcctgggtgacagagcaagactgcgtttcaaaaaaaaaaaaaaaaaaacccattaaaagaggcctccttcctccactctctcaacccctctgttgggtaacatgaaaagactgtattcctctaagatgttgggattgatatacgtgatttaatctgcaataggtggaataaccaggggaactggttatgaatatgtgaatgcaaccagcaaatttatccttgaaggtgtgatggtagaaataggaaaacaacaaaagaaaaacaataacaaaaaaagaaagtgtgatggctgggtgcagtggctcacgcctgtaatcccagcactttgggaggcttaggcggctggatcacctgaggtcaggagttcaagaccagcctggtcaacgtggtgaaacgccgtttctactaaaaatatgaaaattagttgggtgtggtggcatgcgcttgtagtctcagctactccggaggctgaggcaggagaattgcttgaacctggaaggcagaggttgcagtgagccgaaatggcgccactgtactccaacctgggcgacagagcaagactccatctcataaattaaaaggaaagtatgatagtgttatggattttagctctgagtgagctggaaaactaggtcattatctagatgatttcagacttgaccctaattgaccatatatgaccaggaaacacttctgagtttacagctccgtggagatgacctcaacactgcctcttgatttgtttgatgcatgtcactttcattaattttccccctcctttttgaaagtcctgtggcagtactaatattttcattttatgtaatctctggtgctgctttccagtcactgtatgaagtgttatccccaacactagcaaatctaggtcctactaaatacaaatctctgggtggatgatcttctagtactgtatttttaaattaaggagttttagttataatgaaattgatttgtagtctgttttgccgtaaacttgtttttctttaaattgttcttacagtgatatcttactatttttaactgtctggggtttctgatatggggatttcagcccctggttaatcagtcttgtccctacaagtccctgatgcagtatgtttatttgtgatgtttaaagaacatttcttggctgggcgctgcggcttgcgcctgtaatctcagcactttgggaggctgaggtgggtggatcacctgaggttgggagttcgagaccagcctgacaaaacatagtgaaaccccgtctctactaaaaatacaaaaattagctgggcgtggtggtgggtgtctgtaatcccagctattcgggaggctgaggcaggagaatcgcttgaacccaggaggtggaggttgcagtgagctgagatcctgccactgcactccagtctgggtgacagagcaagactccatctcaaaaaataaataaatagaaagagagagagaggaaaaaaaaaagaaaagaacacttctttatttgagggactttcccaacaccaggtgcttggggatttcttagagatcaccaaccgactccctcactgtgaaattaaaccaagtactggaaacgtaactaaacagcgaaccatgtagcttcacctgactcagtgctgggggcctctaccatctactgtgcttgtgtcatgatgctttttctctgaagtggtgtgggaagtaccaggggactggcagaagcccaggccctctctacttttaccagcaactgatcatgtctttcagaatccatgtacatataggctgttctagccacagtggtagatttatgattcacatccgaaagtgtgccttagttatcaatttaacatttctctagtattcatatcccttttcttaccatatacctcagtgtatccttcctgtgtcaagccttataaatcatgtaatttagtgccactcatgtaaatcagtaaaatcacaaaggtctatttaatgaaaacgatttaccaatgttgtttttttttaacaagaaaaaaaataaaagcacattgtcattttttttcctcagaaactcctggacttcttgaattaaaagatttcaaaagtctaagcacaaaaatgagatggaagattagatctttgtaaaaggtta

SEQ ID NO: 42418 - DNA, 1514 bp, Homo sapiens
cgcttattttttttctgccatcggccgcgatccgcctgattgtgtttcatcgccctcgtgcttttatgatgagaaatgtggttttgtgggttgtgcactctctggaatatctacactttttttgctgctgatcatttgctggtgtgtgagtgtacctaccgctttggcagagaatgactctgcagttaagctaagggcgtgttcagattgtggaggaaaagtggccgccattttagacttgccgcatatgttatccccaacactagcaaatctaggtcctactaaatacaaatctctgggtggatgatcttctagtactgtatttttaaattaaggagttttagttataatgaaattgatttgtagtctgttttgccgtaaacttgtttttctttaaattgttcttacagtgatatcttactatttttaactgtctggggtttctgatatggggatttcagcccctggttaatcagtcttgtccctacaagtccctgatgcagtatgtttatttgtgatgtttaaagaacatttcttggctgggcgctgcggcttgcgcctgtaatctcagcactttgggaggctgaggtgggtggatcacctgaggttgggagttcgagaccagcctgacaaaacatagtgaaaccccgtctctactaaaaatacaaaaattagctgggcgtggtggtgggtgtctgtaatcccagctattcgggaggctgaggcaggagaatcgcttgaacccaggaggtggaggttgcagtgagctgagatcctgccactgcactccagtctgggtgacagagcaagactccatctcaaaaaataaataaatagaaagagagagagaggaaaaaaaaaagaaaagaacacttctttatttgagggactttcccaacaccaggtgcttggggatttcttagagatcaccaaccgactccctcactgtgaaattaaaccaagtactggaaacgtaactaaacagcgaaccatgtagcttcacctgactcagtgctgggggcctctaccatctactgtgcttgtgtcatgatgctttttctctgaagtggtgtgggaagtaccaggggactggcagaagcccaggccctctctacttttaccagcaactgatcatgtctttcagaatccatgtacatataggctgttctagccacagtggtagatttatgattcacatccgaaagtgtgccttagttatcaatttaacatttctctagtattcatatcccttttcttaccatatacctcagtgtatccttcctgtgtcaagccttataaatcatgtaatttagtgccactcatgtaaatcagtaaaatcacaaaggtctatttaatgaaaacgatttaccaatgttgtttttttttaacaagaaaaaaaataaaagcacattgtcattttttttcctcagaaactcctggacttcttgaattaaaagatttcaaaagtctaagcacaaaaatgagatggaagattagatctttgtaaaaggtta

SEQ ID NO: 42419 - DNA, 2248 bp, Homo sapiens
  misc_feature (2)..(2): n is a, c, g, or t
  misc_feature (24)..(24): n is a, c, g, or t
anggctaggtacgaggctggtgtnaatcggccgaggcagggccggtgggatcccctcgggctcccgccttagcatgctggccgggacatctggtgaacatggcctctgctactgcggcagcagcacgacggggcctcggccgggctctccctctcctctggcgtggctaccagaccgagcggggcgtttacggctaccggccgaggaagcccgagagccgcgagccccagggcgccctggagcgccccccagttgatcatggccttgccaggttggtgacagtatattgtgagcatggtcataaagctgccaaaatcaaccccctcttcaccggacaagccctgctggagaatgtgcctgaaatccaagccctggtgcagacactgcagggacccttccacacggcaggattattgaacatggggaaggaagaggcctcacttgaggaagtgttagtctatctcaatcaaatctactgtgggcagatttctattgaaacctcccaacttcagagccaggatgagaaagactggtttgccaagcggtttgaggaactgcaaaaggagacgtttaccacagaagagcgaaaacatctgtcgaaactaatgctggaatctcaggagtttgaccactttctggccaccaagttctcgacagtgaagcgatatggaggcgaaggggctgaaagcatgatgggctttttccacgagctgctgaaaatgtcggcctacagcgggatcactgatgtcattattgggatgccccatagagggaggctgaatttattgacaggccttctgcagttccctccagagctgatgttccgtaaaatgcgaggcttaagtgaatttccagagaatttctcagccactggagacgtcctgtctcacctgacctcctctgtggacctgtactttggggcgcaccatcccctccatgtgacaatgttgcccaatccctcgcacctggaggccgtcaaccccgtggccgtgggcaaaactcgcggcaggcagcagtctcgccaagacggcgattactctccagacaactcagcccagccgggggacagggtcatttgcttacaggtccatggtgatgcttctttctgtggtcaagggattgttcctgaaacattcacgctgtccaatctcccacatttcagaattggtgggagtgtgcatttgattgttaataaccagctgggttacaccactccagctgaaagaggaaggtcttctttatactgcagtgatattgggaagcttgtgggctgtgccatcatccatgtcaatggagacagcccagaggaagtggtccgtgccacacgactggcttttgaataccaacgccagttccgcaaggatgtgattattgatctgttgtgctacaggcagtggggccacaatgagctggatgagccattctacaccaaccccatcatgtacaaaatcatcagagctcgaaagagcattccagacacatatgcagagcacctcattgctggcggactcatgacgcaggaggaggtgtctgaaataaaatcctcctactatgccaagttgaatgatcacttaaataacatggcccactacaggccccctgccctgaacctgcaggcccactggcagggcctggctcagccagaagcgcaaatcaccacctggagtacaggtgtgcccctcgacctcctgcggtttgttggcatgaagtctgtagaggtgccaagagagctgcagatgcacagtcacctgctgaagacacatgttcagtccagaatggagaagatgatggacggaatcaagctagactgggccaccgcggaagctcttgccttgggttctttacttgctcaaggttttaatgttcgtctaagtggccaagatgttggtcgtggaactttcagtcagaggcatgcaatggtggtttgccaggagacggatgacacctacatccccctgaaccatatggacccaaatcagaaggggtttctagaggtcagcaacagccccctgtcagaagaggccgtcctgggattcgaatatgggatgagcattgagagcccaaagttactgcccctgtgggaggcacagtttggcgatttcttcaatggtgcccagatcatctttgacacattcatctctggagagaggccaagtggctcctacaaagcggctgtgcagacattcaattgttattaaaaaaaacaaacagcaatcacaccacagacagaaaaccaaccaacaaaggg

SEQ ID NO: 42420 - DNA, 1794 bp, Homo sapiens
  misc_feature (2)..(2): n is a, c, g, or t
  misc_feature (24)..(24): n is a, c, g, or t
anggctaggtacgaggctggtgtnaatcggccgaggcagggccggtgggatcccctcgggctcccgccttagcatgctggccgggacatctggtgaacatggcctctgctactgcggcagcagcacgacggggcctcggccgggctctccctctcctctggcgtggctaccagaccgagcggggcgtttacggctaccggccgaggaagcccgagagccgcgagccccagggcgccctggagcgccccccagttgatcatggccttgccaggttggtgacagtatattgtgagcatggtcataaagctgccaaaatcaaccccctcttcaccggacaagccctgctggagaatgtgcctgaaatccaagccctggtgcagacactgcagggacccttccacacggcaggattattgaacatggggaaggaagaggcctcacttgaggaagtgttagtctatctcaatcaaatctactgtgggcagatttctattgaaacctcccaacttcagagccaggatgagaaagactggtttgccaagcggtttgaggaactgcaaaaggagacgtttaccacagaagagcgaaaacatctgtcgaaactaatgctggaatctcaggagtttgaccactttctggccaccaagttctcgacagtgaagcgatatggaggcgaaggggctgaaagcatgatgggctttttccacgagctgctgaaaatgtcggcctacagcgggatcactgatgtcattattgggatgccccatagagggaggctgaatttattgacaggccttctgcagttccctccagagctgatgttccgtaaaatgcgaggcttaagtgaatttccagagaatttctcagccactggagacgtcctgtctcacctgacctcctctgtggacctgtactttggggcgcaccatcccctccatgtgacaatgttgcccaatccctcgcacctggaggccgtcaaccccgtggccgtgggcaaaactcgcggcaggcagcagtctcgccaagacggcgattactctccagacaactcagcccagccgggggacagggtcatttgcttacaggtacttggagcttctgaaattgaggccagaggtggggaaaactgggaagaatgtgtgggttgggagggctgaaagcacatggcagacattcatgatgaaactgagatgaccttttggaaaaagattctgggattgttttaaaaactaacaggagattcatgaggtttagtcttcaggcaactggctttagcctggggcttccacttctgttttccttgcatggcttatgaattaacttggggtttgggctggcaaacctgctccttcttagagcacagatgtcattatctctctggaagtatggccttcttggaaactttgtggttcccatacatataacaagacaagcgtgaaaaaaaaaaagactttaagtgtggttttacttcgtttcttgtttactttattatcttttcttttttatggctttttttttgagaccgagtctcactctgtcactcaggctggagtgcagtggcgaaatctcagctcactgcaacctctgcctcctgggttcaagtgattctcctgcctcagcctcccgagtagctgggactacaggcacgtgccaccacgcccagctaatttttgtatttttagtagagacagggtttcaccatgttggccagcctggtctcaaactcctgacctcaagtgatcctcccacctcagcctcccaaagtgctgagattacaggcatgagccactatac

SEQ ID NO: 42421 - DNA, 837 bp, Homo sapiens
  misc_feature (650)..(650): n is a, c, g, or t
agcggagtctgcgcggggttgggcggagcctgcgcggggccggtaggatcgcgtcgggagccggtaccgaggcccgagccgcgggagtcgagcgaagacagcgccgaggccgggtttccccctgggcctccccagcagcagccatgggcatcaaatttttagaagttatcaaaccattctgtgcagttctaccagaaattcagaaaccggaaaggaaaatccagtttagagagaaggttctgtggactgctataacgctcttcattttcttagtgtgttgtcagatcccactgtttggaatcatgtcatcagattctgcagatcctttctactggatgagagttattctggcttccaatagaggaactttaatggaattgggtatctccccaattgtaacatctggtttgattatgcagttgttagctggagccaaaatcattgaagttggagatacaccgaaagatagagctttattcaatggagcccagaaactgtttggtatgatcattaccattgggcaagccattgtgtatgtcatgacggggatgtatggggaccctgcagaaatgggtgccggaatctgtctcctgatcatcattcagttgttgtgctggtttgattgtgctgctgttagatgagctgctacngaagggttacggcttggggtctgggatttccctctttattgccaccaaacatctgtgagaaccatgtctggaagggcttaagtcccactaccattaacactggcagagggtactgagtttgaaggtgcagttcatagcttctgtccattgtgggccacaggaaggacaagtcgagcttacgggaagc

SEQ ID NO: 42422 - DNA, 5177 bp, Homo sapiens
  misc_feature (2)..(2): n is a, c, g, or t
  misc_feature (24)..(24): n is a, c, g, or t
anggctaggtacgaggctggtgtnaatcggccgaggcagggccggtgggatcccctcgggctcccgccttagcatgctggccgggacatctggtgaacatggcctctgctactgcggcagcagcacgacggggcctcggccgggctctccctctcctctggcgtggctaccagaccgagcggggcgtttacggctaccggccgaggaagcccgagagccgcgagccccagggcgccctggagcgccccccagttgatcatggccttgccaggttggtgacagtatattgtgagcatggtcataaagctgccaaaatcaaccccctcttcaccggacaagccctgctggagaatgtgcctgaaatccaagccctggtgcagacactgcagggacccttccacacggcaggattattgaacatggggaaggaagaggcctcacttgaggaagtgttagtctatctcaatcaaatctactgtgggcagatttctattgaaacctcccaacttcagagccaggatgagaaagactggtttgccaagcggtttgaggaactgcaaaaggagacgtttaccacagaagagcgaaaacatctgtcgaaactaatgctggaatctcaggagtttgaccactttctggccaccaagttctcgacagtgaagcgatatggaggcgaaggggctgaaagcatgatgggctttttccacgagctgctgaaaatgtcggcctacagcgggatcactgatgtcattattgggatgccccatagagggaggctgaatttattgacaggccttctgcagttccctccagagctgatgttccgtaaaatgcgaggcttaagtgaatttccagagaatttctcagccactggagacgtcctgtctcacctgacctcctctgtggacctgtactttggggcgcaccatcccctccatgtgacaatgttgcccaatccctcgcacctggaggccgtcaaccccgtggccgtgggcaaaactcgcggcaggcagcagtctcgccaagacggcgattactctccagacaactcagcccagccgggggacagggtcatttgcttacaggtccatggtgatgcttctttctgtggtcaagggattgttcctgaaacattcacgctgtccaatctcccacatttcagaattggtgggagtgtgcatttgattgttaataaccagctgggttacaccactccagctgaaagaggaaggtcttctttatactgcagtgatattgggaagcttgtgggctgtgccatcatccatgtcaatggagacagcccagaggaagtggtccgtgccacacgactggcttttgaataccaacgccagttccgcaaggatgtgattattgatctgttgtgctacaggcagtggggccacaatgagctggatgagccattctacaccaaccccatcatgtacaaaatcatcagagctcgaaagagcattccagacacatatgcagagcacctcattgctggcggactcatgacgcaggaggaggtgtctgaaataaaatcctcctactatgccaagttgaatgatcacttaaataacatggcccactacaggccccctgccctgaacctgcaggcccactggcagggcctggctcagccagaagcgcaaatcaccacctggagtacaggtgtgcccctcgacctcctgcggtttgttggcatgaagtctgtagaggtgccaagagagctgcagatgcacagtcacctgctgaagacacatgttcagtccagaatggagaagatgatggacggaatcaagctagactgggccaccgcggaagctcttgccttgggttctttacttgctcaaggttttaatgttcgtctaagtggccaagatgttggtcgtggaactttcagtcagaggcatgcaatggtggtttgccaggagacggatgacacctacatccccctgaaccatatggacccaaatcagaaggggtttctagaggtcagcaacagccccctgtcagaagaggccgtcctgggattcgaatatgggatgagcattgagagcccaaagttactgcccctgtgggaggcacagtttggcgatttcttcaatggtgcccagatcatctttgacacattcatctctggaggagaggccaagtggctcctacaaagcggcattgtcatcctccttccacatggctacgatggggctgggccagaccactcatcctgtcgaatagagcgtttcctgcagatgtgtgacagtgcggaagagggggtggacggagacactgtgaacatgtttgtggttcacccaacaactcctgcacagtatttccacttgcttaggagacagatggtccggaacttcagaaaaccactcattgttgcttcccctaagatgttactcaggctcccggcagccgtgtcaactcttcaagaaatggcaccaggaacaacatttaacccggtcattggtgattcatctgtggatccaaaaaaggttaagaccctcgtgttctgctccggcaaacatttctactccctggtgaaacaaagagaatctctgggggccaagaagcatgactttgccatcatccgagtagaggaactctgccccttcccgttggattctttacagcaagagatgagcaaatacaaacatgttaaagatcatatttggagtcaggaggaacctcagaacatgggtccgtggtcgtttgtttctccaaggtttgaaaagcagctggcctgcaagctccgtctggtgggccggccccctttgccagtacccgctgtaggaattggcacagttcacttgcaccagcatgaagatatcctcgccaagaccttcgcttgatgatgacttttgaagaaacactatttctctttaagaaaatggccattaaggccgggtggggtggcacatgcctgtaatcccagcactttgggaggccaaggctggtggatcacctgaggtcaggagttcgagaccagcctggccaacacggtgaaaccccgcctctactaaaaatacaaaaaatagccgggtgtggtggtgggcacctgtgatcccagcttcctgggaggctgaggcaagagaatcgcttgaatctgggaggcggaggttgcagtgagccaggatcacaccattgctgtccagcctgggtgacagagcaagactgcgtttcaaaaaaaaaaaaaaaaaaacccattaaaagaggcctccttcctccactctctcaacccctctgttgggtaacatgaaaagactgtattcctctaagatgttgggattgatatacgtgatttaatctgcaataggtggaataaccaggggaactggttatgaatatgtgaatgcaaccagcaaatttatccttgaaggtgtgatggtagaaataggaaaacaacaaaagaaaaacaataacaaaaaaagaaagtgtgatggctgggtgcagtggctcacgcctgtaatcccagcactttgggaggcttaggcggctggatcacctgaggtcaggagttcaagaccagcctggtcaacgtggtgaaacgccgtttctactaaaaatatgaaaattagttgggtgtggtggcatgcgcttgtagtctcagctactccggaggctgaggcaggagaattgcttgaacctggaaggcagaggttgcagtgagccgaaatggcgccactgtactccaacctgggcgacagagcaagactccatctcataaattaaaaggaaagtatgatagtgttatggattttagctctgagtgagctggaaaactaggtcattatctagatgatttcagacttgaccctaattgaccatatatgaccaggaaacacttctgagtttacagctccgtggagatgacctcaacactgcctcttgatttgtttgatgcatgtcactttcattaattttccccctcctttttgaaagtcctgtggcagtactaatattttcattttatgtaatctctggtgctgctttccagtcactgtatgaagtgttatccccaacactagcaaatctaggtcctactaaatacaaatctctgggtggatgatcttctagtactgtatttttaaattaaggagttttagttataatgaaattgatttgtagtctgttttgccgtaaacttgtttttctttaaattgttcttacagtgatatcttactatttttaactgtctggggtttctgatatggggatttcagcccctggttaatcagtcttgtccctacaagtccctgatgcagtatgtttatttgtgatgtttaaagaacatttcttggctgggcgctgcggcttgcgcctgtaatctcagcactttgggaggctgaggtgggtggatcacctgaggttgggagttcgagaccagcctgacaaaacatagtgaaaccccgtctctactaaaaatacaaaaattagctgggcgtggtggtgggtgtctgtaatcccagctattcgggaggctgaggcaggagaatcgcttgaacccaggaggtggaggttgcagtgagctgagatcctgccactgcactccagtctgggtgacagagcaagactccatctcaaaaaataaataaatagaaagagagagagaggaaaaaaaaaagaaaagaacacttctttatttgagggactttcccaacaccaggtgcttggggatttcttagagatcaccaaccgactccctcactgtgaaattaaaccaagtactggaaacgtaactaaacagcgaaccatgtagcttcacctgactcagtgctgggggcctctaccatctactgtgcttgtgtcatgatgctttttctctgaagtggtgtgggaagtaccaggggactggcagaagcccaggccctctctacttttaccagcaactgatcatgtctttcagaatccatgtacatatacctcagtgtatccttcctgtgtcaagccttataaatcatgtaatttagtgccactcatgtaaatcagtaaaatcacaaaggtctatttaatgaaaacgatttaccaatgttgtttttttttaacaagaaaaaaaataaaagcacattgtcattttttttcctcagaaactcctggacttcttgaattaaaagatttcaaaagtctaagcacaaaaatgagatggaagattagatctttgtaaaaggtta

SEQ ID NO: 42423 - DNA, 4227 bp, Homo sapiens
  misc_feature (2)..(2): n is a, c, g, or t
  misc_feature (24)..(24): n is a, c, g, or t
anggctaggtacgaggctggtgtnaatcggccgaggcagggccggtgggatcccctcgggctcccgccttagcatgctggccgggacatctggtgaacatggcctctgctactgcggcagcagcacgacggggcctcggccgggctctccctctcctctggcgtggctaccagaccgagcggggcgtttacggctaccggccgaggaagcccgagagccgcgagccccagggcgccctggagcgccccccagttgatcatggccttgccaggttggtgacagtatattgtgagcatggtcataaagctgccaaaatcaaccccctcttcaccggacaagccctgctggagaatgtgcctgaaatccaagccctggtgcagacactgcagggacccttccacacggcaggattattgaacatggggaaggaagaggcctcacttgaggaagtgttagtctatctcaatcaaatctactgtgggcagatttctattgaaacctcccaacttcagagccaggatgagaaagactggtttgccaagcggtttgaggaactgcaaaaggagacgtttaccacagaagagcgaaaacatctgtcgaaactaatgctggaatctcaggagtttgaccactttctggccaccaagttctcgacagtgaagcgatatggaggcgaaggggctgaaagcatgatgggctttttccacgagctgctgaaaatgtcggcctacagcgggatcactgatgtcattattgggatgccccatagagggaggctgaatttattgacaggccttctgcagttccctccagagctgatgttccgtaaaatgcgaggcttaagtgaatttccagagaatttctcagccactggagacgtcctgtctcacctgacctcctctgtggacctgtactttggggcgcaccatcccctccatgtgacaatgttgcccaatccctcgcacctggaggccgtcaaccccgtggccgtgggcaaaactcgcggcaggcagcagtctcgccaagacggcgattactctccagacaactcagcccagccgggggacagggtcatttgcttacaggtccatggtgatgcttctttctgtggtcaagggattgttcctgaaacattcacgctgtccaatctcccacatttcagaattggtgggagtgtgcatttgattgttaataaccagctgggttacaccactccagctgaaagaggaaggtcttctttatactgcagtgatattgggaagcttgtgggctgtgccatcatccatgtcaatggagacagcccagaggaagtggtccgtgccacacgactggcttttgaataccaacgccagttccgcaaggatgtgattattgatctgttgtgctacaggcagtggggccacaatgagctggatgagccattctacaccaaccccatcatgtacaaaatcatcagagctcgaaagagcattccagacacatatgcagagcacctcattgctggcggactcatgacgcaggaggaggtgtctgaaataaaatcctcctactatgccaagttgaatgatcacttaaataacatggcccactacaggccccctgccctgaacctgcaggcccactggcagggcctggctcagccagaagcgcaaatcaccacctggagtacaggtgtgcccctcgacctcctgcggtttgttggcatgaagtctgtagaggtgccaagagagctgcagatgcacagtcacctgctgaagacacatgttcagtccagaatggagaagatgatggacggaatcaagctagactgggccaccgcggaagctcttgccttgggttctttacttgctcaaggttttaatgttcgtctaagtggccaagatgttggtcgtggaactttcagtcagaggcatgcaatggtggtttgccaggagacggatgacacctacatccccctgaaccatatggacccaaatcagaaggggtttctagaggtcagcaacagccccctgtcagaagaggccgtcctgggattcgaatatgggatgagcattgagagcccaaagttactgcccctgtgggaggcacagtttggcgatttcttcaatggtgcccagatcatctttgacacattcatctctggaggagaggccaagtggctcctacaaagcggcattgtcatcctccttccacatggctacgatggggctgggccagaccactcatcctgtcgaatagagcgtttcctgcagatgtgtgacagtgcggaagagggggtggacggagacactgtgaacatgtttgtggttcacccaacaactcctgcacagtatttccacttgcttaggagacagatggtccggaacttcagaaaaccactcattgttgcttcccctaagatgttactcaggctcccggcagccgtgtcaactcttcaagaaatggcaccaggaacaacatttaacccggtcattggtgattcatctgtggatccaaaaaaggttaagaccctcgtgttctgctccggcaaacatttctactccctggtgaaacaaagagaatctctgggggccaagaagcatgactttgccatcatccgagtagaggaactctgccccttcccgttggattctttacagcaagagatgagcaaatacaaacatgttaaagatcatatttggagtcaggaggaacctcagaacatgggtccgtggtcgtttgtttctccaaggtttgaaaagcagctggcctgcaagctccgtctggtgggccggccccctttgccagtacccgctgtaggaattggcacagttcacttgcaccagcatgaagatatcctcgccaagaccttcgcttgatgatgacttttgaagaaacactatttctctttaagaaaatggccattaaggccgggtggggtggcacatgcctgtaatcccagcactttgggaggccaaggctggtggatcacctgaggtcaggagttcgagaccagcctggccaacacggtgaaaccccgcctctactaaaaatacaaaaaatagccgggtgtggtggtgggcacctgtgatcccagcttcctgggaggctgaggcaagagaatcgcttgaatctgggaggcggaggttgcagtgagccaggatcacaccattgctgtccagcctgggtgacagagcaagactgcgtttcaaaaaaaaaaaaaaaaaaacccattaaaagaggcctccttcctccactctctcaacccctctgttgggtaacatgaaaagactgtattcctctaagatgttgggattgatatacgtgatttaatctgcaataggtggaataaccaggggaactggttatgaatatgtgaatgcaaccagcaaatttatccttgaaggtgtgatggtagaaataggaaaacaacaaaagaaaaacaataacaaaaaaagaaagtgtgatggctgggtgcagtggctcacgcctgtaatcccagcactttgggaggcttaggcggctggatcacctgaggtcaggagttcaagaccagcctggtcaacgtggtgaaacgccgtttctactaaaaatatgaaaattagttgggtgtggtggcatgcgcttgtagtctcagctactccggaggctgaggcaggagaattgcttgaacctggaaggcagaggttgcagtgagccgaaatggcgccactgtactccaacctgggcgacagagcaagactccatctcataaattaaaaggaaagtatgatagtgttatggattttagctctgagtgagctggaaaactaggtcattatctagatgatttcagacttgaccctaattgaccatatatgaccaggaaacacttctgagtttacagctccgtggagatgacctcaacactgcctcttgatttgtttgatgcatgtcactttcattaattttccccctcctttttgaaagtcctgtggcagtactaatattttcattttatgtaatctctggtgctgctttccagtcactgtatgaagtgttatccccaacactagcaaatctaggtcctactaaatacaaatctctgggtggatgatcttctagtactgtatttttaaattaaggagttttagttataatgaaattgatttgtagtctgttttgccgtaaacttgtttttctttaaattgttcttacagtgatatcttactatttttaactgtcctcaagaaagcacgggatcctctg

SEQ ID NO: 42424 - DNA, 5131 bp, Homo sapiens
  misc_feature (2)..(2): n is a, c, g, or t
  misc_feature (24)..(24): n is a, c, g, or t
anggctaggtacgaggctggtgtnaatcggccgaggcagggccggtgggatcccctcgggctcccgccttagcatgctggccgggacatctggtgaacatggcctctgctactgcggcagcagcacgacggggcctcggccgggctctccctctcctctggcgtggctaccagaccgagcggggcgtttacggctaccggccgaggaagcccgagagccgcgagccccagggcgccctggagcgccccccagttgatcatggccttgccaggttggtgacagtatattgtgagcatggtcataaagctgccaaaatcaaccccctcttcaccggacaagccctgctggagaatgtgcctgaaatccaagccctggtgcagacactgcagggacccttccacacggcaggattattgaacatggggaaggaagaggcctcacttgaggaagtgttagtctatctcaatcaaatctactgtgggcagatttctattgaaacctcccaacttcagagccaggatgagaaagactggtttgccaagcggtttgaggaactgcaaaaggagacgtttaccacagaagagcgaaaacatctgtcgaaactaatgctggaatctcaggagtttgaccactttctggccaccaagttctcgacagtgaagcgatatggaggcgaaggggctgaaagcatgatgggctttttccacgagctgctgaaaatgtcggcctacagcgggatcactgatgtcattattgggatgccccatagagggaggctgaatttattgacaggccttctgcagttccctccagagctgatgttccgtaaaatgcgaggcttaagtgaatttccagagaatttctcagccactggagacgtcctgtctcacctgacctcctctgtggacctgtactttggggcgcaccatcccctccatgtgacaatgttgcccaatccctcgcacctggaggccgtcaaccccgtggccgtgggcaaaactcgcggcaggcagcagtctcgccaagacggcgattactctccagacaactcagcccagccgggggacagggtcatttgcttacaggtccatggtgatgcttctttctgtggtcaagggattgttcctgaaacattcacgctgtccaatctcccacatttcagaattggtgggagtgtgcatttgattgttaataaccagctgggttacaccactccagctgaaagaggaaggtcttctttatactgcagtgatattgggaagcttgtgggctgtgccatcatccatgtcaatggagacagcccagaggaagtggtccgtgccacacgactggcttttgaataccaacgccagttccgcaaggatgtgattattgatctgttgtgctacaggcagtggggccacaatgagctggatgagccattctacaccaaccccatcatgtacaaaatcatcagagctcgaaagagcattccagacacatatgcagagcacctcattgctggcggactcatgacgcaggaggaggtgtctgaaataaaatcctcctactatgccaagttgaatgatcacttaaataacatggcccactacaggccccctgccctgaacctgcaggcccactggcagggcctggctcagccagaagcgcaaatcaccacctggagtacaggtgtgcccctcgacctcctgcggtttgttggcatgaagtctgtagaggtgccaagagagctgcagatgcacagtcacctgctgaagacacatgttcagtccagaatggagaagatgatggacggaatcaagctagactgggccaccgcggaagctcttgccttgggttctttacttgctcaaggttttaatgttcgtctaagtggccaagatgttggtcgtggaactttcagtcagaggcatgcaatggtggtttgccaggagacggatgacacctacatccccctgaaccatatggacccaaatcagaaggggtttctagaggagaggccaagtggctcctacaaagcggcattgtcatcctccttccacatggctacgatggggctgggccagaccactcatcctgtcgaatagagcgtttcctgcagatgtgtgacagtgcggaagagggggtggacggagacactgtgaacatgtttgtggttcacccaacaactcctgcacagtatttccacttgcttaggagacagatggtccggaacttcagaaaaccactcattgttgcttcccctaagatgttactcaggctcccggcagccgtgtcaactcttcaagaaatggcaccaggaacaacatttaacccggtcattggtgattcatctgtggatccaaaaaaggttaagaccctcgtgttctgctccggcaaacatttctactccctggtgaaacaaagagaatctctgggggccaagaagcatgactttgccatcatccgagtagaggaactctgccccttcccgttggattctttacagcaagagatgagcaaatacaaacatgttaaagatcatatttggagtcaggaggaacctcagaacatgggtccgtggtcgtttgtttctccaaggtttgaaaagcagctggcctgcaagctccgtctggtgggccggccccctttgccagtacccgctgtaggaattggcacagttcacttgcaccagcatgaagatatcctcgccaagaccttcgcttgatgatgacttttgaagaaacactatttctctttaagaaaatggccattaaggccgggtggggtggcacatgcctgtaatcccagcactttgggaggccaaggctggtggatcacctgaggtcaggagttcgagaccagcctggccaacacggtgaaaccccgcctctactaaaaatacaaaaaatagccgggtgtggtggtgggcacctgtgatcccagcttcctgggaggctgaggcaagagaatcgcttgaatctgggaggcggaggttgcagtgagccaggatcacaccattgctgtccagcctgggtgacagagcaagactgcgtttcaaaaaaaaaaaaaaaaaaacccattaaaagaggcctccttcctccactctctcaacccctctgttgggtaacatgaaaagactgtattcctctaagatgttgggattgatatacgtgatttaatctgcaataggtggaataaccaggggaactggttatgaatatgtgaatgcaaccagcaaatttatccttgaaggtgtgatggtagaaataggaaaacaacaaaagaaaaacaataacaaaaaaagaaagtgtgatggctgggtgcagtggctcacgcctgtaatcccagcactttgggaggcttaggcggctggatcacctgaggtcaggagttcaagaccagcctggtcaacgtggtgaaacgccgtttctactaaaaatatgaaaattagttgggtgtggtggcatgcgcttgtagtctcagctactccggaggctgaggcaggagaattgcttgaacctggaaggcagaggttgcagtgagccgaaatggcgccactgtactccaacctgggcgacagagcaagactccatctcataaattaaaaggaaagtatgatagtgttatggattttagctctgagtgagctggaaaactaggtcattatctagatgatttcagacttgaccctaattgaccatatatgaccaggaaacacttctgagtttacagctccgtggagatgacctcaacactgcctcttgatttgtttgatgcatgtcactttcattaattttccccctcctttttgaaagtcctgtggcagtactaatattttcattttatgtaatctctggtgctgctttccagtcactgtatgaagtgttatccccaacactagcaaatctaggtcctactaaatacaaatctctgggtggatgatcttctagtactgtatttttaaattaaggagttttagttataatgaaattgatttgtagtctgttttgccgtaaacttgtttttctttaaattgttcttacagtgatatcttactatttttaactgtctggggtttctgatatggggatttcagcccctggttaatcagtcttgtccctacaagtccctgatgcagtatgtttatttgtgatgtttaaagaacatttcttggctgggcgctgcggcttgcgcctgtaatctcagcactttgggaggctgaggtgggtggatcacctgaggttgggagttcgagaccagcctgacaaaacatagtgaaaccccgtctctactaaaaatacaaaaattagctgggcgtggtggtgggtgtctgtaatcccagctattcgggaggctgaggcaggagaatcgcttgaacccaggaggtggaggttgcagtgagctgagatcctgccactgcactccagtctgggtgacagagcaagactccatctcaaaaaataaataaatagaaagagagagagaggaaaaaaaaaagaaaagaacacttctttatttgagggactttcccaacaccaggtgcttggggatttcttagagatcaccaaccgactccctcactgtgaaattaaaccaagtactggaaacgtaactaaacagcgaaccatgtagcttcacctgactcagtgctgggggcctctaccatctactgtgcttgtgtcatgatgctttttctctgaagtggtgtgggaagtaccaggggactggcagaagcccaggccctctctacttttaccagcaactgatcatgtctttcagaatccatgtacatataggctgttctagccacagtggtagatttatgattcacatccgaaagtgtgccttagttatcaatttaacatttctctagtattcatatcccttttcttaccatatacctcagtgtatccttcctgtgtcaagccttataaatcatgtaatttagtgccactcatgtaaatcagtaaaatcacaaaggtctatttaatgaaaacgatttaccaatgttgtttttttttaacaagaaaaaaaataaaagcacattgtcattttttttcctcagaaactcctggacttcttgaattaaaagatttcaaaagtctaagcacaaaaatgagatggaagattagatctttgtaaaaggtta

SEQ ID NO: 42425 - DNA, 5337 bp, Homo sapiens
  misc_feature (2)..(2): n is a, c, g, or t
  misc_feature (24)..(24): n is a, c, g, or t
anggctaggtacgaggctggtgtnaatcggccgaggcagggccggtgggatcccctcgggctcccgccttagcatgctggccgggacatctggtgaacatggcctctgctactgcggcagcagcacgacggggcctcggccgggctctccctctcctctggcgtggctaccagaccgagcggggcgtttacggctaccggccgaggaagcccgagagccgcgagccccagggcgccctggagcgccccccagttgatcatggccttgccaggttggtgacagtatattgtgagcatggtcataaagctgccaaaatcaaccccctcttcaccggacaagccctgctggagaatgtgcctgaaatccaagccctggtgcagacactgcagggacccttccacacggcaggattattgaacatggggaaggaagaggcctcacttgaggaagtgttagtctatctcaatcaaatctactgtgggcagatttctattgaaacctcccaacttcagagccaggatgagaaagactggtttgccaagcggtttgaggaactgcaaaaggagacgtttaccacagaagagcgaaaacatctgtcgaaactaatgctggaatctcaggagtttgaccactttctggccaccaagttctcgacagtgaagcgatatggaggcgaaggggctgaaagcatgatgggctttttccacgagctgctgaaaatgtcggcctacagcgggatcactgatgtcattattgggatgccccatagagggaggctgaatttattgacaggccttctgcagttccctccagagctgatgttccgtaaaatgcgaggcttaagtgaatttccagagaatttctcagccactggagacgtcctgtctcacctgacctcctctgtggacctgtactttggggcgcaccatcccctccatgtgacaatgttgcccaatccctcgcacctggaggccgtcaaccccgtggccgtgggcaaaactcgcggcaggcagcagtctcgccaagacggcgattactctccagacaactcagcccagccgggggacagggtcatttgcttacaggtccatggtgatgcttctttctgtggtcaagggattgttcctgaaacattcacgctgtccaatctcccacatttcagaattggtgggagtgtgcatttgattgttaataaccagctgggttacaccactccagctgaaagaggaaggtcttctttatactgcagtgatattgggaagcttgtgggctgtgccatcatccatgtcaatggagacagcccagaggaagtggtccgtgccacacgactggcttttgaataccaacgccagttccgcaaggatgtgattattgatctgttgtgctacaggcagtggggccacaatgagctggatgagccattctacaccaaccccatcatgtacaaaatcatcagagctcgaaagagcattccagacacatatgcagagcacctcattgctggcggactcatgacgcaggaggaggtgtctgaaataaaatcctcctactatgccaagttgaatgatcacttaaataacatggcccactacaggccccctgccctgaacctgcaggcccactggcagggcctggctcagccagaagcgcaaatcaccacctggagtacaggtgtgcccctcgacctcctgcggtttgttggcatgaagtctgtagaggtgccaagagagctgcagatgcacagtcacctgctgaagacacatgttcagtccagaatggagaagatgatggacggaatcaagctagactgggccaccgcggaagctcttgccttgggttctttacttgctcaaggttttaatgttcgtctaagtggccaagatgttggtcgtggaactttcagtcagaggcatgcaatggtggtttgccaggagacggatgacacctacatccccctgaaccatatggacccaaatcagaaggggtttctagaggtcagcaacagccccctgtcagaagaggccgtcctgggattcgaatatgggatgagcattgagagcccaaagttactgcccctgtgggaggcacagtttggcgatttcttcaatggtgcccagatcatctttgacacattcatctctggaggagaggccaagtggctcctacaaagcggcattgtcatcctccttccacatggctacgatggggctgggccagaccactcatcctgtcgaatagagcgtttcctgcagatgtgtgacagtgcggaagagggggtggacggagacactgtgaacatgtttgtggttcacccaacaactcctgcacagtatttccacttgcttaggagacagatggtccggaacttcagaaaaccactcattgttgcttcccctaagatgttactcaggctcccggcagccgtgtcaactcttcaagaaatggcaccaggaacaacatttaacccggtcattggtgattcatctgtggatccaaaaaaggttaagaccctcgtgttctgctccggcaaacatttctactccctggtgaaacaaagagaatctctgggggccaagaagcatgactttgccatcatccgagtagaggaactctgccccttcccgttggattctttacagcaagagatgagcaaatacaaacatgttaaagatcatatttggagtcaggaggaacctcagaacatgggtccgtggtcgtttgtttctccaaggtttgaaaagcagctggcctgcaagtcaaatttttagaagttatcaaaccattctgtgcagttctaccagaaattcagaaaccggaaaggaaaatccagtttagagagaaggttctgtggactgctataacgctcttcattttcttagtgtgttgtcagatcccactgtttggaatcatgtcatcagattctgcagatcctttctactggatgagagttattctggcttccaatagaggaactttaatggaattgggtatctccccaattgtaacatctggtttgattatgcagttgttagctggagccaaaatcattgaagttggagatacaccgaaagatagagctttattcaatggagcccagaaactgtttggtatgatcattaccattgggcaagccattgtgtatgtcatgacggggatgtatggggaccctgcagaaatgggtgccggaatctgtctcctgatcatcattcaggtaagaaatcctatattttcctatgcagataacaaaacagtttgattcctttttccttttctaacagttctttaggtgattggcttattcattttcttacttttgaattatttaattctagtattttgatcactgaagtgatacgtgtaaaatttttttaaaaccttctgtcaccgtgacgtgttcaagttgtgttgacgtgaaaaattcaaatttattctaatagcttcataactgcacaatacaaagaattatggatcaattgtattttattgattcttaagatacacatttgtcacattttgatgtctctagaatcaggatgtttttgtacagtaaacagtgccttccacttgcggtctgccaggaggcagtcatggtggtgtcactgcctgtgcgtgtgtcagcctgttcaggtcatgctgaccttagttggctgagtgtgatcttcacagaatgggtgtttgagttcaatcgctgtctaaaggtgttcagaaaatctgttgtgatttgttattgaaatgaaagtttatgtatagaagggcaagctagatgataaatatctaccactaggtctaaaatacgtttttgtaagtagaaaattaaaattctttgcaataaggtattgtgccataagttaattggcagtattcttttcttagtagtacacaaaataatgatgttttacatggtaatgtcttagagtcagtgaaacactgtttatacacacataaatatattccatgggttttttaaatggatgcttaggaatggaatttttaaaggtcaacataattattagtgtcctaagtatctttttttttttttttttgagacggagtctcactctgtactccagcctgcgtgacagagcgagactccgtctcagaaaaaaaaaaaaagaacataatatgtgtattgtgtctcatgtacactgttgaagaggtagcagcccatgattgatgaaatagtccagtgatcttatgagatacaagtttgttttcatgttctctctctgacattgtctatgcttagttattgtgttcatgcttattccttcatggtccaagttggctgtcccacctccaggcatcaaaccacattccaaacagcaaccaggaggaaatagtaagctgataggtcatggggaattaggttggaagccattgctttttaatttacagaagtccattctccccaggcacttctttctaagtctcattgatcagaactcaaccacgtggccaccatcagcagaaacatctctctgtagcaccgtgaaacacatgagaacataactggggatgaccgttgttacttgaactattttgaaagatctgacataaaggtcatcgccttgtgcacttcaatgggtgttactgcaaaactcccagggctaggcatggcgacatacacccgaaatctcagctatctgggaggctgaggtgggaggattgcttgagcccacgagtttgaggctgaagtgtgcctgtgaatagctactgcactccagtgcctaggacacatagggagacctcacttttttatggctgcatagtattccatggtaaagaaatgtaccacattttctttatccacttcactgttgatgggcatttatccacttcactgttggtgggaatttaggttgaatccatgtctttgctattgaagtcacactttttaatcaagttatttaactttcctgtgttcatttgtgttatataccagaacatttttatttctatggttttaatgccacctaatatgattatcaatgtgtcattctccataaatcattgtgttatacatgttaaacgattaggtattaagtgtataggtataaatcacttagaataatgactaacacattgtatgaactaaataagtactgattcatctgattcatcaaatttccattattcataccattcattatttattaagtggtgtagtatttgttcttatcaacatttgcttttctgtcctatctaaatattaatgaaacagtggatgtgggctcagtgtgctgtcttgaaataatccaaagtcaaatggcatgcttcactggtttcctttagatgcaataactcatttgactcacacaataaaaatgagtattaagt

SEQ ID NO: 42426 - DNA, 1453 bp, Homo sapiens
  misc_feature (95)..(95): n is a, c, g, or t
  misc_feature (108)..(108): n is a, c, g, or t
aacagtccctctacccatgtgccctctagagccctaccatcaaaacccgagaagaagaggggacgacactgaaggattggagactgggctggatncatgtaatggggncagcgctgctgggcccagacagactgtggtggcctgcgcagcgagcaggcgtgtgcgtgtgttggggataaatacgtgatgttatccccaacactagcaaatctaggtcctactaaatacaaatctctgggtggatgatcttctagtactgtatttttaaattaaggagttttagttataatgaaattgatttgtagtctgttttgccgtaaacttgtttttctttaaattgttcttacagtgatatcttactatttttaactgtctggggtttctgatatggggatttcagcccctggttaatcagtcttgtccctacaagtccctgatgcagtatgtttatttgtgatgtttaaagaacatttcttggctgggcgctgcggcttgcgcctgtaatctcagcactttgggaggctgaggtgggtggatcacctgaggttgggagttcgagaccagcctgacaaaacatagtgaaaccccgtctctactaaaaatacaaaaattagctgggcgtggtggtgggtgtctgtaatcccagctattcgggaggctgaggcaggagaatcgcttgaacccaggaggtggaggttgcagtgagctgagatcctgccactgcactccagtctgggtgacagagcaagactccatctcaaaaaataaataaatagaaagagagagagaggaaaaaaaaaagaaaagaacacttctttatttgagggactttcccaacaccaggtgcttggggatttcttagagatcaccaaccgactccctcactgtgaaattaaaccaagtactggaaacgtaactaaacagcgaaccatgtagcttcacctgactcagtgctgggggcctctaccatctactgtgcttgtgtcatgatgctttttctctgaagtggtgtgggaagtaccaggggactggcagaagcccaggccctctctacttttaccagcaactgatcatgtctttcagaatccatgtacatataggctgttctagccacagtggtagatttatgattcacatccgaaagtgtgccttagttatcaatttaacatttctctagtattcatatcccttttcttaccatatacctcagtgtatccttcctgtgtcaagccttataaatcatgtaatttagtgccactcatgtaaatcagtaaaatcacaaaggtctatttaatgaaaacgatttaccaatgttgtttttttttaacaagaaaaaaaataaaagcacattgtcattttttttcctcagaaactcctggacttcttgaattaaaagatttcaaaagtctaagcacaaaaatgagatggaagattagatctttgtaaaaggtta

SEQ ID NO: 42427 - DNA, 213 bp, Homo sapiens
ccggacaagccctgctggagaatgtgcctgaaatccaagccctggtgcagacactgcagggacccttccacacggcaggtatggcttctgcacagcaggcgggagctcggagctgcacaccaggccaggctcctgcctctgttcttgaagaagcagcatccccactggagctgaggctcccgcaggtgtgaggagacccgaggggcatgttga

SEQ ID NO: 42428 - DNA, 371 bp, Homo sapiens
actgtggagtgatggtgagggtatatattagagttctccagagaaacacaaccaataggatgtttatctatatacctatatatagatgtgtatataggatgtttatttatctatagagagaaaaaaaaaggagattgattgattctaaggaattggctcatgtgattgtgggctggcagaatcggaatctgtagggcagcctgacaggctggagacttcaaagaagagttggtatttcaagtcaaaatgcagtttggagacagaataccttttttgtgtgagatctaagtcttttggtcttcaactattcggatgaagcccacgtacattatggaaggtgctcctctttactcaaagtttaccgatttaag

SEQ ID NO: 42429 - DNA, 446 bp, Homo sapiens
ccttctcaagacaaattaactcacatccatcccacccaaacctggctgccctgggcctctggacagaccagaagacattcatcatttaaaggaatttaagtgtgaaacctaacctaccaatgaaccgctagttcagaaggtaaaagaattcatttctggccaggcgcggtggtcacgcctgtgatcccagcactctgggaggctgagtcaggtggatcacttgaggtcaggagtttgagagcagcctgaccaacatggtgaaaccccgtctctactaacaacaaaaaaaattagccggcgtgggggtgcacacctgtagtcccagctactcaagggactgaggcaccagagtcacttgaacccgggatgcagaggttgcagcgagccgagattgtgccactgcactcctgcctggtgacagagtgaaactgtgtctcaaaaaaaaa

SEQ ID NO: 42430 - DNA, 120 bp, Homo sapiens
tgcccccaccctccccttcaggctgggctgcacagagggatgaactgaatgggtcacattcttacccctcaagtgctttggagagagggtagaaggaaggaggagacaaaccagttatca

SEQ ID NO: 42431 - DNA, 421 bp, Homo sapiens
gtctcactctgttgcccaggctggtctataactcctggccccaaatgatcctcccatctcagcctctcaaagctctgggattgcaggtgtgaatcatctcacctagccagcaagtgatacagctgaaagaaaacaatttgactctataaagcactgagatgtttttgacttgaaacaagcaccaaagtctcagtcgtttatccagaatcacagcctccctgagatgaaaggagcctaagagatcatcaagtcagtgtgacatgatttgcaaggataccagatgatcaactcaaggctccaaaaagttgagacagaacttgaatgatggtctcctggcttgtaatcttctacacaacgtgccatcaaatggatcatttgggggtgatatattcacaagaatttggccaagttggcaaatact

SEQ ID NO: 42432 - DNA, 483 bp, Homo sapiens
atacattctggaaattgctcaagaggcagctttggcattagaatagcaactttcaaagcagtgaacgtcagcacttctatttctccttctttttggcgtgcattacatgaagctggaaggactaattggctaaatgaagggactcagtgtcgcagagttgaaatcctggcatgtaaatggagaggtggggagagactttgcatgcatatctatatggcctccctttgtgaattatcataatagaaatggttctgccccttctctagtttccctgcgagatgagttggggtgtgaagtgcatggcacagaaattcaccatgctttgtatctatgattacttgtgtctgtgtgcatcttttccactcctaaattgcatgtttacccaaagttgctgaataatacattgtttcaaaagatgtgtccctgaattaaggttgttatgtgacaattataatatgaccgtgtacagctgctaacaactgt

SEQ ID NO: 42433 - DNA, 493 bp, Homo sapiens
tcatgctattccccattaacatctggatcttcgagttggaaaggaatgtatccatccccataggctggagctatttcattggttggctggtgcttatcctatacttcacctgcgcgatcctttgctacttcaaccataaaagtttctggagtctgattctgagccaccccagtggtgccgtgtcctgcagcagcagtttcggctcagtagaagaatctccaagggcacagacgatcacagacacccccatcacccaggagggagtcctggatcctgagcagaaggatacacatgtgtaatcttttctgaactcctggcaccaagttctgtccattcatctgaccccatctcctcatcctcccccagcccttgaataggttggtcctcatcattgcaaggaatgagaaagggaggattttgcactcctctgctttctccctgccttgattgagcttgagtgatgtggaataaattgtccgtctcttcaaaaaca

SEQ ID NO: 42434 - DNA, 467 bp, Homo sapiens
gggtcttatcttccctttggtctcaccctacttgtcacttaacctcccagtcacaactttcctctcccctgtccctgtcctttcccagcgatcctttgctacttcaaccataaaagtttctggagtctgattctgagccaccccagtggtgccgtgtcctgcagcagcagtttcggctcagtagaagaatctccaagggcacagacgatcacagacacccccatcacccaggagggagtcctggatcctgagcagaaggatacacatgtgtaatcttttctgaactcctggcaccaagttctgtccattcatctgaccccatctcctcatcctcccccagcccttgaataggttggtcctcatcattgcaaggaatgagaaagggaggattttgcactcctctgctttctccctgccttgattgagcttgagtgatgtggaataaattgtccgtctcttcaaaaaca

SEQ ID NO: 42435 - DNA, 657 bp, Homo sapiens
tgatagatgtaaaatattattgtaacttatttggataaagttcttcaaaagaaacagagctatacaatgaggtaggatctggattatttgtctaagtgagagattgcgaatatcaaaatatctgtctcacttcttctgtgaatgacacagagtagaaataaattcactttaaaaatatgactgaattttgaaaatcaagactgaatctcacatagctgcagacaggaactaagccagcctctttgtatgtggtaacaagtacagtataagaatgaaagatttaccatccttgaaagctctaatgaaaatcaaatccagcaatatatattcaactgtgtacaggatttaagaaacttattttatgaaggaagtaatagtgtgtagatatagattctgaagtctttaaacgtgtcttaataaattaagattcactggcattgagctgagctaccaggtgacccttggggacaaaaaacccacacaagtgaatttcacacaccagtataccttcaacaatatacttttgacacacacaaacctttgatttggtttcagagattttgcaaaatagtaccaatgtaatttacaactgtcatctttgaaattgtgtaaaagtggaataattttctgaagaaataaatcatggtttgtcaatga

SEQ ID NO: 42436 - DNA, 327 bp, Homo sapiens
agacggagtcctgctctgtcgcccaggctggagtgcagtggcgcgatctcggcttgctgcacgctccgcctcccgggttcatgccattctcctgcctcagcctcccgagtagctgggactacaggtgcccgccgccacgcccggctaattttttgtatttttagtacagacggggtttcaccgtgttagtcaggacagtctcgatctcccgagctcgtgatccacccgcctcggcctcccaaagtgctgggattacaggcatgagccactgcgcccggccagctccaggtaatttttaatgagtagaggcgggatgtctgaggggct

SEQ ID NO: 42437 - DNA, 571 bp, Homo sapiens
aaatactcaaaaatgtgtggctgtcctcactatccatggtgatcttgaaagagagggaaaaaatgtataatacaaatgtatacatatacacacataaatatatacacacatatggatatacgtacacacatatatgtggtatgtgtattagacatatacatgtattatttatatatgtgttagatatcctacatgcctttgtgcctaaaatatatatttatttctatatatcaattatatctataataccaaagaaatggtgaatttttcagtgttattaacctggcatccagatcatgtcccttcaaggaggtctatctcaggagaaagtcaccattgtagtctggcagacaatgaacagtgcttccttgggaggccagtgggtgagctgggcaagggacaatggccgtcaggggactatcagtgctctctggtgctgggcagacagtctattgttagtgacccaagaagagtccctctgactcctgccaaagttgacagcaattggaaagacttcacccttaaagaggatatccactaatctggtccctgcttgcagctagctttaaaa

SEQ ID NO: 42438 - DNA, 1153 bp, Homo sapiens
gacttggggccggccgcgggcaggcgggcatctggcggccgaggccgggacttcggggcccctcccgggcgagtcgcggggcggcggcgggaaggggcgccgcacggaggaagtgccctcttggccgcagccagagccgcgccgcaggtgccgcgatgtcgtcctggccggggcgcgaggatgcgagggctgggggcgcgtggtggccgcgggagccgctggatcaggaactgcagcgggcccgggagcagaagcggcggcggcacgacgcccagcagctgcagcagctcaagcgcctggagtccttttatgaaaaacctcctcctgggcttatcaaggttggcattgcaaatggtacggtcaccgaacaggctacaaagaatgccctttctttatcaaagacaaccaaaagttacaacagttcagagtagcacatgaggatttcatgtatgacatcatacgagacaataaacaacatgaaaagaatgtaaggatacagcagttaaaacagttactggaggattctacctcaggtgaagataggagcagctccagttcctctgaaggtaaagagggaagcacaaatcttccaagtcaaatgagggttctgactcagagtgacaaggatgtgacttgttcaacattctcttctcaaacactgaccaaggaacagaggaagatgcagtcagagaaagtagcaggatagagacgccgagagaggagtatatgtgggtcacagcagtgagctcccacccgccttgcagtgaagatgtgaccccaggagagggagtgtctccttccaggtgctagctctggacagcagctgattttaggcaggaaagtttcttcatcgttgtcctccctgctggtcacatgagtttacgattccttagaagtgtctcccacagggtggcaggactgggagaatctctgaggcgtgtcttccaggccctcccacagcttgtgccctccacagtgtagacttgaacacttggcctcatgtgatccttccaccttggcctcccaaagcattgggattacaggcgagagccactggttggctaaaatatttatatttacctgacatgatttgttgatttgggggctagggagttcttaaaacaacaataaaaaatcttctgtggctgcattc

SEQ ID NO: 42439 - DNA, 975 bp, Homo sapiens
ttttttttttttgagatggagtttcgctcttgttgcccaggctggagtacaatggcatgatctcggctcaccgcgacctccgcctcccaggttggcattgcaaatggtacggtcaccgaacaggctacaaagaatgccctttctttatcaaagacaaccaaaagttacaacagttcagagtagcacatgaggatttcatgtatgacatcatacgagacaataaacaacatgaaaagaatgtaaggatacagcagttaaaacagttactggaggattctacctcaggtgaagataggagcagctccagttcctctgaaggtaaagagaaacacaagaaaaagaagaagaaagaaaagcataagaaaaggaagaaagaaaagaaaaagaagaaaaaacggaagcacaaatcttccaagtcaaatgagggttctgactcagagtgacaaggatgtgacttgttcaacattctcttctcaaacactgaccaaggaacagaggaagatgcagtcagagaaagtagcaggatagagacgccgagagaggagtatatgtgggtcacagcagtgagctcccacccgccttgcagtgaagatgtgaccccaggagagggagtgtctccttccaggtgctagctctggacagcagctgattttaggcaggaaagtttcttcatcgttgtcctccctgctggtcacatgagtttacgattccttagaagtgtctcccacagggtggcaggactgggagaatctctgaggcgtgtcttccaggccctcccacagcttgtgccctccacagtgtagacttgaacacttggcctcatgtgatccttccaccttggcctcccaaagcattgggattacaggcgagagccactggttggctaaaatatttatatttacctgacatgatttgttgatttgggggctagggagttcttaaaacaacaataaaaaatcttctgtggctgcattc

SEQ ID NO: 42440 - DNA, 1287 bp, Homo sapiens
gtgaacagatgtcgactcaacctgagaaagaaggtatttgttctagtgactaaatttataaatgagattcagagccacttgattaatagaagatatttactttgaaaaatacagcgagacacactaaaaaaattgaccttttgcagtacttttcattggattgcttcataatttcttggtgttggaaaattaattcctaaagcacaagattaaaggatgcttgggtaagcaattagtttacctgtcttttctgggaccttacacggttcatccatgattgcattttcttttagaattggagtttaatgaataaaaactttaatataatctactgattctttatctcactaaggtgaaacactcttatcttacagaaatatttccccttttctttgcttttaggttggcattgcaaatggtacggtcaccgaacaggctacaaagaatgccctttctttatcaaagacaaccaaaagttacaacagttcagagtagcacatgaggatttcatgtatgacatcatacgagacaataaacaacatgaaaagaatgtaaggatacagcagttaaaacagttactggaggattctacctcaggtgaagataggagcagctccagttcctctgaaggtaaagagaaacacaagaaaaagaagaagaaagaaaagcataagaaaaggaagaaagaaaagaaaaagaagaaaaaacggaagcacaaatcttccaagtcaaatgagggttctgactcagagtgacaaggatgtgacttgttcaacattctcttctcaaacactgaccaaggaacagaggaagatgcagtcagagaaagtagcaggatagagacgccgagagaggagtatatgtgggtcacagcagtgagctcccacccgccttgcagtgaagatgtgaccccaggagagggagtgtctccttccaggtgctagctctggacagcagctgattttaggcaggaaagtttcttcatcgttgtcctccctgctggtcacatgagtttacgattccttagaagtgtctcccacagggtggcaggactgggagaatctctgaggcgtgtcttccaggccctcccacagcttgtgccctccacagtgtagacttgaacacttggcctcatgtgatccttccaccttggcctcccaaagcattgggattacaggcgagagccactggttggctaaaatatttatatttacctgacatgatttgttgatttgggggctagggagttcttaaaacaacaataaaaaatcttctgtggctgcattc

SEQ ID NO: 42441 - DNA, 692 bp, Homo sapiens
taatgatagatctgtctactgtcatttaagaggaaatatacacaattctagcttataatagacagacatctactctttaaaggctggaaaaaaagggtctcacctgtggccaggagcggtggctcacgcctgtaatcccagcactttgagaggccgcggtggacagatcacgagagcttcccctgtgtctgctgtttctcaaaatgatccttagccaaaaaggtgtgctttgaggtagcatattctggtctcctacagctattcaactgaggacagagtagttatgaaaaacctcctcctgggcttatcaaggttagtgtgaagtttgtactcttggttatcccactagacatacttacagactcagtaatgcattatgaaaaatggttgcatgacatttaaatgcccttttatgaaaagcctgtttctttcctgcagatgactgaggggtcataatttttagtgttgtcacaagcctctgcctttgtggaaatttcatcagccatgtttcccttccctgaggaaccagtgcaggcccacatgggttccttggccgtggcccccttctctctgactggggaacggcatctttaagctcagctgcctccttttcttgtcagccttacttggctcagtccctcagtccatcctgtgttggtttcttgagtatcagcagctcagagagcagtcaa

SEQ ID NO: 42442 - DNA, 1825 bp, Homo sapiens
gacttggggccggccgcgggcaggcgggcatctggcggccgaggccgggacttcggggcccctcccgggcgagtcgcggggcggcggcgggaaggggcgccgcacggaggaagtgccctcttggccgcagccagagccgcgccgcaggtgccgcgatgtcgtcctggccggggcgcgaggatgcgagggctgggggcgcgtggtggccgcgggagccgctggatcaggaactgcagcgggcccgggagcagaagcggcggcggcacgacgcccagcagctgcagcagctcaagcgcctggagtccttgtgagtctcgagcagccgtctgggccgcagtccgcgcgccgcccgttttctgggaacaggggcgcccggcgccgtgttgggcgctgggctgggtcctccaagcccccaggacccaggcaggggtgcgggcctgtgaggaacctagtgcctgcgacgggacttctagtcctcactgggtggggagcgaggcccgcccggccacggaggggccctggaggccgcggcgcgggtgggcgggggcctcggcccggggaggcggcagcggcttgcgctcctcgcccccgctttggtgtgggcgtcgcctcttttggggaagccaagagttattggcgcttgctcggcatttgtggaccgaacaggcaagttcaaccgagcacgctgcccccgcgctccacctctgagttccctgggccactgcgacatggagaaaccccgttcttttcatcctctgctatggagaagggacgaggacacgggtcctgcagtgttggtgtggcgaggcccggaagaagagagaatgggcggcggggactggccacggcgctgctagaaagggtctcacctgtggccaggagcggtggctcacgcctgtaatcccagcactttgagaggccgcggtggacagatcacgaggttggcattgcaaatggtacggtcaccgaacaggctacaaagaatgccctttctttatcaaagacaaccaaaagttacaacagttcagagtagcacatgaggatttcatgtatgacatcatacgagacaataaacaacatgaaaagaatgtaaggatacagcagttaaaacagttactggaggattctacctcaggtgaagataggagcagctccagttcctctgaaggtaaagagaaacacaagaaaaagaagaagaaagaaaagcataagaaaaggaagaaagaaaagaaaaagaagaaaaaacggaagcacaaatcttccaagtcaaatgagggttctgactcagagtgacaaggatgtgacttgttcaacattctcttctcaaacactgaccaaggaacagaggaagatgcagtcagagaaagtagcaggatagagacgccgagagaggagtatatgtgggtcacagcagtgagctcccacccgccttgcagtgaagatgtgaccccaggagagggagtgtctccttccaggtgctagctctggacagcagctgattttaggcaggaaagtttcttcatcgttgtcctccctgctggtcacatgagtttacgattccttagaagtgtctcccacagggtggcaggactgggagaatctctgaggcgtgtcttccaggccctcccacagcttgtgccctccacagtgtagacttgaacacttggcctcatgtgatccttccaccttggcctcccaaagcattgggattacaggcgagagccactggttggctaaaatatttatatttacctgacatgatttgttgatttgggggctagggagttcttaaaacaacaataaaaaatcttctgtggctgcattc

SEQ ID NO: 42443 - DNA, 1413 bp, Homo sapiens
gacttggggccggccgcgggcaggcgggcatctggcggccgaggccgggacttcggggcccctcccgggcgagtcgcggggcggcggcgggaaggggcgccgcacggaggaagtgccctcttggccgcagccagagccgcgccgcaggtgccgcgatgtcgtcctggccggggcgcgaggatgcgagggctgggggcgcgtggtggccgcgggagccgctggatcaggaactgcagcgggcccgggagcagaagcggcggcggcacgacgcccagcagctgcagcagctcaagcgcctggagtccttaaagggtctcacctgtggccaggagcggtggctcacgcctgtaatcccagcactttgagaggccgcggtggacagatcacgagagcttcccctgtgtctgctgtttctcaaaatgatccttagccaaaaaggtgtgctttgaggtagcatattctggtctcctacagctattcaactgaggacagagtagttatgaaaaacctcctcctgggcttatcaaggttggcattgcaaatggtacggtcaccgaacaggctacaaagaatgccctttctttatcaaagacaaccaaaagttacaacagttcagagtagcacatgaggatttcatgtatgacatcatacgagacaataaacaacatgaaaagaatgtaaggatacagcagttaaaacagttactggaggattctacctcaggtgaagataggagcagctccagttcctctgaaggtaaagagaaacacaagaaaaagaagaagaaagaaaagcataagaaaaggaagaaagaaaagaaaaagaagaaaaaacggaagcacaaatcttccaagtcaaatgagggttctgactcagagtgacaaggatgtgacttgttcaacattctcttctcaaacactgaccaaggaacagaggaagatgcagtcagagaaagtagcaggatagagacgccgagagaggagtatatgtgggtcacagcagtgagctcccacccgccttgcagtgaagatgtgaccccaggagagggagtgtctccttccaggtgctagctctggacagcagctgattttaggcaggaaagtttcttcatcgttgtcctccctgctggtcacatgagtttacgattccttagaagtgtctcccacagggtggcaggactgggagaatctctgaggcgtgtcttccaggccctcccacagcttgtgccctccacagtgtagacttgaacacttggcctcatgtgatccttccaccttggcctcccaaagcattgggattacaggcgagagccactggttggctaaaatatttatatttacctgacatgatttgttgatttgggggctagggagttcttaaaacaacaataaaaaatcttctgtggctgcattc

SEQ ID NO: 42444 - DNA, 1223 bp, Homo sapiens
gacttggggccggccgcgggcaggcgggcatctggcggccgaggccgggacttcggggcccctcccgggcgagtcgcggggcggcggcgggaaggggcgccgcacggaggaagtgccctcttggccgcagccagagccgcgccgcaggtgccgcgatgtcgtcctggccggggcgcgaggatgcgagggctgggggcgcgtggtggccgcgggagccgctggatcaggaactgcagcgggcccgggagcagaagcggcggcggcacgacgcccagcagctgcagcagctcaagcgcctggagtccttttatgaaaaacctcctcctgggcttatcaaggttggcattgcaaatggtacggtcaccgaacaggctacaaagaatgccctttctttatcaaagacaaccaaaagttacaacagttcagagtagcacatgaggatttcatgtatgacatcatacgagacaataaacaacatgaaaagaatgtaaggatacagcagttaaaacagttactggaggattctacctcaggtgaagataggagcagctccagttcctctgaaggtaaagagaaacacaagaaaaagaagaagaaagaaaagcataagaaaaggaagaaagaaaagaaaaagaagaaaaaacggaagcacaaatcttccaagtcaaatgagggttctgactcagagtgacaaggatgtgacttgttcaacattctcttctcaaacactgaccaaggaacagaggaagatgcagtcagagaaagtagcaggatagagacgccgagagaggagtatatgtgggtcacagcagtgagctcccacccgccttgcagtgaagatgtgaccccaggagagggagtgtctccttccaggtgctagctctggacagcagctgattttaggcaggaaagtttcttcatcgttgtcctccctgctggtcacatgagtttacgattccttagaagtgtctcccacagggtggcaggactgggagaatctctgaggcgtgtcttccaggccctcccacagcttgtgccctccacagtgtagacttgaacacttggcctcatgtgatccttccaccttggcctcccaaagcattgggattacaggcgagagccactggttggctaaaatatttatatttacctgacatgatttgttgatttgggggctagggagttcttaaaacaacaataaaaaatcttctgtggctgcattc

SEQ ID NO: 42445 - DNA, 1306 bp, Homo sapiens
gacttggggccggccgcgggcaggcgggcatctggcggccgaggccgggacttcggggcccctcccgggcgagtcgcggggcggcggcgggaaggggcgccgcacggaggaagtgccctcttggccgcagccagagccgcgccgcaggtgccgcgatgtcgtcctggccggggcgcgaggatgcgagggctgggggcgcgtggtggccgcgggagccgctggatcaggaactgcagcgggcccgggagcagaagcggcggcggcacgacgcccagcagctgcagcagctcaagcgcctggagtccttaaagggtctcacctgtggccaggagcggtggctcacgcctgtaatcccagcactttgagaggccgcggtggacagatcacgagttatgaaaaacctcctcctgggcttatcaaggttggcattgcaaatggtacggtcaccgaacaggctacaaagaatgccctttctttatcaaagacaaccaaaagttacaacagttcagagtagcacatgaggatttcatgtatgacatcatacgagacaataaacaacatgaaaagaatgtaaggatacagcagttaaaacagttactggaggattctacctcaggtgaagataggagcagctccagttcctctgaaggtaaagagaaacacaagaaaaagaagaagaaagaaaagcataagaaaaggaagaaagaaaagaaaaagaagaaaaaacggaagcacaaatcttccaagtcaaatgagggttctgactcagagtgacaaggatgtgacttgttcaacattctcttctcaaacactgaccaaggaacagaggaagatgcagtcagagaaagtagcaggatagagacgccgagagaggagtatatgtgggtcacagcagtgagctcccacccgccttgcagtgaagatgtgaccccaggagagggagtgtctccttccaggtgctagctctggacagcagctgattttaggcaggaaagtttcttcatcgttgtcctccctgctggtcacatgagtttacgattccttagaagtgtctcccacagggtggcaggactgggagaatctctgaggcgtgtcttccaggccctcccacagcttgtgccctccacagtgtagacttgaacacttggcctcatgtgatccttccaccttggcctcccaaagcattgggattacaggcgagagccactggttggctaaaatatttatatttacctgacatgatttgttgatttgggggctagggagttcttaaaacaacaataaaaaatcttctgtggctgcattc

SEQ ID NO: 42446 - DNA, 1039 bp, Homo sapiens
tggggaatggtttagtaaagtatgcgtctgttagaatttataattgtaagtactgtgggaacctacagaaatgactaggacaaggaaaagaatacaaaaatggtttgtacactggttacagtcacataaacataggcattcaggtgaagaagaatggagaaaacaggtaaaaataaaaataagtactgtctttgtgatgtggttattcatgatccttccatattgcttttgaatgacatatttatctaagcaactgttgtaagttaaagctaaaactgactgttctttgatcaattttgaatgtttaggatacagcagttaaaacagttactggaggattctacctcaggtgaagataggagcagctccagttcctctgaaggtaaagagaaacacaagaaaaagaagaagaaagaaaagcataagaaaaggaagaaagaaaagaaaaagaagaaaaaacggaagcacaaatcttccaagtcaaatgagggttctgactcagagtgacaaggatgtgacttgttcaacattctcttctcaaacactgaccaaggaacagaggaagatgcagtcagagaaagtagcaggatagagacgccgagagaggagtatatgtgggtcacagcagtgagctcccacccgccttgcagtgaagatgtgaccccaggagagggagtgtctccttccaggtgctagctctggacagcagctgattttaggcaggaaagtttcttcatcgttgtcctccctgctggtcacatgagtttacgattccttagaagtgtctcccacagggtggcaggactgggagaatctctgaggcgtgtcttccaggccctcccacagcttgtgccctccacagtgtagacttgaacacttggcctcatgtgatccttccaccttggcctcccaaagcattgggattacaggcgagagccactggttggctaaaatatttatatttacctgacatgatttgttgatttgggggctagggagttcttaaaacaacaataaaaaatcttctgtggctgcattc

SEQ ID NO: 42447 - DNA, 2029 bp, Homo sapiens
gacttggggccggccgcgggcaggcgggcatctggcggccgaggccgggacttcggggcccctcccgggcgagtcgcggggcggcggcgggaaggggcgccgcacggaggaagtgccctcttggccgcagccagagccgcgccgcaggtgccgcgatgtcgtcctggccggggcgcgaggatgcgagggctgggggcgcgtggtggccgcgggagccgctggatcaggaactgcagcgggcccgggagcagaagcggcggcggcacgacgcccagcagctgcagcagctcaagcgcctggagtccttgtgagtctcgagcagccgtctgggccgcagtccgcgcgccgcccgttttctgggaacaggggcgcccggcgccgtgttgggcgctgggctgggtcctccaagcccccaggacccaggcaggggtgcgggcctgtgaggaacctagtgcctgcgacgggacttctagtcctcactgggtggggagcgaggcccgcccggccacggaggggccctggaggccgcggcgcgggtgggcgggggcctcggcccggggaggcggcagcggcttgcgctcctcgcccccgctttggtgtgggcgtcgcctcttttggggaagccaagagttattggcgcttgctcggcatttgtggaccgaacaggcaagttcaaccgagcacgctgcccccgcgctccacctctgagttccctgggccactgcgacatggagaaaccccgttcttttcatcctctgctatggagaagggacgaggacacgggtcctgcagtgttggtgtggcgaggcccggaagaagagagaatgggcggcggggactggccacggcgctgctagaaagggtctcacctgtggccaggagcggtggctcacgcctgtaatcccagcactttgagaggccgcggtggacagatcacgaggttggcattgcaaatggtacggtcaccgaacaggctacaaagaatgccctttctttatcaaagacaaccaaaagttacaacagttcagagtagcacatgaggatttcatgtatgacatcatacgagacaataaacaacatgaaaagaatgtaaggatacagcagttaaaacagttactggaggattctacctcaggtgaagataggagcagctccagttcctctgaaggtaaagagaaacacaagaaaaagaagaagaaagaaaagcataagaaaaggaagaaagaaaagaaaaagaagaaaaaacggaagcacaaatcttccaagtcaaatgagggttctgactcagagtgacaaggatgtgacttgttcaacattctcttctcaaacactgaccaaggaacagaggaagatgcagtcagagaaagtagcaggatagagacgccgagagaggagtatatgtgggtcacagcagtgagctcccacccgccttgcagtgaagatgtgaccccaggagagggagtgtctccttccaggtgctagctctggacagcagctgattttaggcaggaaagtttcttcatcgttgtcctccctgctggtcacatgagtttacgattccttagaagtgtctcccacagggtggcaggactgggagaatctctgaggcgtgtcttccaggccctcccacagcttgtgccctccacagtgtagacttgaacacttggcctcatgtgatccttccaccttggcctcccaaagcattgggattacaggcgagagccactggttggctaaaatatttatatttacctgacatgatttgttgatttgggggctagggagttcttaaaacaacaataaaaaatcttctgtggctgcattcaaaaaaaaaagaacaaaaacaactttgtgggcgccctcgggccagaaaaaagtttcaaaccatccggtgggcgcgggccagtgggtaggaccgggcaagggtccaaggaaccggcaagacaggggggtcccccaaaaaacccggggacggggtcggaccccgagggtcgggcacgggtcaaagggcagggtaaccccgggggga

SEQ ID NO: 42448 - DNA, 1358 bp, Homo sapiens
gacttggggccggccgcgggcaggcgggcatctggcggccgaggccgggacttcggggcccctcccgggcgagtcgcggggcggcggcgggaaggggcgccgcacggaggaagtgccctcttggccgcagccagagccgcgccgcaggtgccgcgatgtcgtcctggccggggcgcgaggatgcgagggctgggggcgcgtggtggccgcgggagccgctggatcaggaactgcagcgggcccgggagcagaagcggcggcggcacgacgcccagcagctgcagcagctcaagcgcctggagtccttaaagggtctcacctgtggccaggagcggtggctcacgcctgtaatcccagcactttgagaggccgcggtggacagatcacgagagcttcccctgtgtctgctgtttctcaaaatgatccttagccaaaaaggtgtgctttgaggtagcatattctggtctcctacagctattcaactgaggacagagtagttatgaaaaacctcctcctgggcttatcaaggttggcattgcaaatggtacggtcaccgaacaggctacaaagaatgccctttctttatcaaagacaaccaaaagttacaacagttcagagtagcacatgaggatttcatgtatgacatcatacgagacaataaacaacatgaaaagaatgtaaggatacagcagttaaaacagttactggaggattctacctcaggtgaagataggagcagctccagttcctctgaaggtaaagagaaacacaagaaaaagaagaagaaagaaaagcataagaaaaggaagaaagaaaagaaaaagaagaaaaaacggaagcacaaatcttccaagtcaaatgagggttctgactcagagtgacaaggatgtgacttgttcaacattctcttctcaaacactgaccaaggaacagaggaagatgcagtcagagaaagtagcaggatagagacgccgagagaggagtatatgtgggtcacagcagtgagctcccacccgccttgcagtgaagatgtgaccccaggagagggagtgtctccttccaggtgctagctctggacagcagctgattttaggcaggaaagtttcttcatcgttgtcctccctgctggtcacatgagtttacgattccttagaagtgtctcccacagggtggcaggactgggagaatctctgaggcgtgtcttccaggccctcccacagcttgtgccctccacagtgtagacttgaacacttggcctcatgtgatccttccaccttggcctcccaaagcatgatttgttgatttgggggctagggagttcttaaaacaacaataaaaaatcttctgtggctgcattc

SEQ ID NO: 42449 - DNA, 1395 bp, Homo sapiens
gacttggggccggccgcgggcaggcgggcatctggcggccgaggccgggacttcggggcccctcccgggcgagtcgcggggcggcggcgggaaggggcgccgcacggaggaagtgccctcttggccgcagccagagccgcgccgcaggtgccgcgatgtcgtcctggccggggcgcgaggatgcgagggctgggggcgcgtggtggccgcgggagccgctggatcaggaactgcagcgggcccgggagcagaagcggcggcggcacgacgcccagcagctgcagcagctcaagcgcctggagtccttgtgagtctcgagcagccgtctgggccgcagtccgcgcgccgcccgttttctgggaacaggggcgcccggcgccgtgttgggcgctgggctgggtcctccaagcccccaggacccaggcaggggtgcgggcctgtgaggaacctagtgcctgcgacgggacttctagtcctcactgggtggggagcgaggcccgcccggccacggaggggccctggaggccgcggcgcgggtgggcgggggcctcggcccggggaggcggcagcggcttgcgctcctcgcccccgctttggtgtgggcgtcgcctcttttggggaagccaagagttattggcgcttgctcggcatttgtggaccgaacaggcaagttcaaccgagcacgctgcccccgcgctccacctctgagttccctgggccactgcgacatggagaaaccccgttcttttcatcctctgctatggagaagggacgaggacacgggtcctgcagtgttggtgtggcgaggcccggaagaagagagaatgggcggcggggactggccacggcgctgctagaaagggtctcacctgtggccaggagcggtggctcacgcctgtaatcccagcactttgagaggccgcggtggacagatcacgagagcttcccctgtgtctgctgtttctcaaaatgatccttagccaaaaaggtgtgctttgaggtagcatattctggtctcctacagctattcaactgaggacagagtaggtaagattttagttgttttactacccttgtctccttccttcctatgtagtcatattataataatttttgctaaattagtagttaatattaacataagtattactttgcaatatcattcacttttgcatcaaatagtgacctatgatttattttgtatttttaaagtagttaataagagcctgggtgaccgagaaagaccgcatctccaaaaaaaaaaaaagggtctcacctgaaatggagattccctttatagatgaacatttgtcttacaaagggtgacttcggctctcttttcagagcttccctgtgtctgctgtttctcaaatgatctagccaaaaggtggcttt

SEQ ID NO: 42450 - DNA, 882 bp, Homo sapiens
acaaagagaattacctcggtatttctaaacttgagtactgttttatagtacgactcttccagtttatgcagttatttcctcatgaagaatattatttcgtgtattttctcattgggaaattatttttatagccttaatgagttatcagtgatatgacccttaaaaggattaaaacatgttgagcgtgtggctacatcaaacagtaaaagaaaaaaaaactgttttctgtaacataggggtttaattttatttaactaacggtccatgaagcctaaccaaaccttaaccttctctgtcccttaaggcacatgaggatttcatgtatgacatcatacgagacaataaacaacatgaaaagaatgtaaggtgaggttgtcctggtgatagtatctatttaaagttttaacttatataaagttggaaaaaaaccttctagcactaggagagtgatatagtaaacatggcacttcaattgtgaaatatttattgggtaggagtcatggctgacaagaccagtgttggggaatcagcaggccagcctcctcctccttgggttagcttaaagctgtaggcttggtccagttctctgaccactgcagttgatattagccacccatgttgtgctatttacttgcatggtacaattggtaccatgcaaggtaattcagtttatctcctctaacgtcttaaggatctcagcttttgttaaagattatacctagacaagattagagagtgaataatcaggagagtttgttttttcaaactggttacattaaattataattgttgagggtgtagattatctattaggaaattgagcagttggggaatggtttagtaaagtatgcgtctgttagaatttataattgtaagtactgt

SEQ ID NO: 42451 - DNA, 3038 bp, Homo sapiens
gacttggggccggccgcgggcaggcgggcatctggcggccgaggccgggacttcggggcccctcccgggcgagtcgcggggcggcggcgggaaggggcgccgcacggaggaagtgccctcttggccgcagccagagccgcgccgcaggtgccgcgatgtcgtcctggccggggcgcgaggatgcgagggctgggggcgcgtggtggccgcgggagccgctggatcaggaactgcagcgggcccgggagcagaagcggcggcggcacgacgcccagcagctgcagcagctcaagcgcctggagtccttgtgagtctcgagcagccgtctgggccgcagtccgcgcgccgcccgttttctgggaacaggggcgcccggcgccgtgttgggcgctgggctgggtcctccaagcccccaggacccaggcaggggtgcgggcctgtgaggaacctagtgcctgcgacgggacttctagtcctcactgggtggggagcgaggcccgcccggccacggaggggccctggaggccgcggcgcgggtgggcgggggcctcggcccggggaggcggcagcggcttgcgctcctcgcccccgctttggtgtgggcgtcgcctcttttggggaagccaagagttattggcgcttgctcggcatttgtggaccgaacaggcaagttcaaccgagcacgctgcccccgcgctccacctctgagttccctgggccactgcgacatggagaaaccccgttcttttcatcctctgctatggagaagggacgaggacacgggtcctgcagtgttggtgtggcgaggcccggaagaagagagaatgggcggcggggactggccacggcgctgctagaaagggtctcacctgtggccaggagcggtggctcacgcctgtaatcccagcactttgagaggccgcggtggacagatcacgaggttggcattgcaaatggtacggtcaccgaacaggctacaaagaatgccctttctttatcaaagacaaccaaaagttacaacagttcagagtagcacatgaggatttcatgtatgacatcatacgagacaataaacaacatgaaaagaatgtaaggatacagcagttaaaacagttactggaggattctacctcaggtgaagataggagcagctccagttcctctgaaggtaaagagaaacacaagaaaaagaagaagaaagaaaagcataagaaaaggaagaaagaaaagaaaaagaagaaaaaacggaagcacaaatcttccaagtcaaatgagggttctgactcagagtgacaaggatgtgacttgttcaacattctcttctcaaacactgaccaaggaacagaggaagatgcagtcagagaaagtagcaggatagagacgccgagagaggagtatatgtgggtcacagcagtgagctcccacccgccttgcagtgaagatgtgaccccaggagagggagtgtctccttccaggtgctagctctggacagcagctgattttaggcaggaaagtttcttcatcgttgtcctccctgctggtcacatgagtttacgattccttagaagtgtctcccacagggtggcaggactgggagaatctctgaggcgtgtcttccaggccctcccacagcttgtgccctccacagtgtagacttgaacacttggcctcatgtgatccttccaccttggcctcccaaagcattgggattacaggcgagagccactggttggctaaaatatttatatttacctgacatgatttgttgatttgggggctagggagttcttaaaacaacaataaaaaatcttctgtggctgcattctacttcacttgctttctactgccagagtcccatgattttcacagagtgactgactcagaaaaggtttaggaatatagggggatttctgtactaggtcaggtatccacatcccaaaatccatccctccctttcttcctcttcctgttgcctgaccacagcccacctgtgctcttgtagctgaaactaggccacagtagaggcatctcaggaggccagggtgtgtctgcagctggaggagaggaagtctatcctttgctgcgccaaagtgaagccggatcttgctcataggcaagtgtgtccctctgtggctagcactggtctcttgctgctttaggcactcagtcagggtcccagaaactcactcccattttctgccacttttcctggggtttggattccctcctttttaaggaacagccaagccaggcccagactgacccttcttcaagtctcatcagtcaatgctcctgttcttggcctcggaataccacctcaggaaaacaatcggttgagattggaatggccaggacttaactatttctgaaaactgtaaggccagtggattcagccttgccttacacttatccttgtcatgcagaacacaggccatctgtcctctgccatatgctcagcatttcttacccaggtacagccggtcctcttcttccaggaattggctactgtccctctgcaatcccattcatgataaaagcattcttatacaacacaaaagatgctgcatcaatgattctcaaacctccaagacatccaaatcaactagcatgcttaagatgcagattcctgtgctcgactcaccaacttccagaattttccattccctaggtctgaggtgaacctgggaatctgccttgctaacaaatgatgctgacactgttgatttggggaccccacttggagaacctgggctctagatctctaccctcttactgaagccttcttccacttcctgctttaactggaatccagccgtccacccctgtagcccttgcaaagtgaattgtcccttttccctcactctgtttttttctcctctgtttctagcctagattccaaggaacatcactttggcctgtcatctcccctgatctgtgatccttttgtccagctttccccaaagaagcatcaatcaaaatcttccgctttgctcctatagacagactacaggggaaaaatcccagagcccctacaaatc

SEQ ID NO: 42452 - DNA, 1351 bp, Homo sapiens
gacttggggccggccgcgggcaggcgggcatctggcggccgaggccgggacttcggggcccctcccgggcgagtcgcggggcggcggcgggaaggggcgccgcacggaggaagtgccctcttggccgcagccagagccgcgccgcaggtgccgcgatgtcgtcctggccggggcgcgaggatgcgagggctgggggcgcgtggtggccgcgggagccgctggatcaggaactgcagcgggcccgggagcagaagcggcggcggcacgacgcccagcagctgcagcagctcaagcgcctggagtccttgtgagtctcgagcagccgtctgggccgcagtccgcgcgccgcccgttttctgggaacaggggcgcccggcgccgtgttgggcgctgggctgggtcctccaagcccccaggacccaggcaggggtgcgggcctgtgaggaacctagtgcctgcgacgggacttctagtcctcactgggtggggagcgaggcccgcccggccacggaggggccctggaggccgcggcgcgggtgggcgggggcctcggcccggggaggcggcagcggcttgcgctcctcgcccccgctttggtgtgggcgtcgcctcttttggggaagccaagagttattggcgcttgctcggcatttgtggaccgaacaggcaagttcaaccgagcacgctgcccccgcgctccacctctgagttccctgggccactgcgacatggagaaaccccgttcttttcatcctctgctatggagaagggacgaggacacgggtcctgcagtgttggtgtggcgaggcccggaagaagagagaatgggcggcggggactggccacggcgctgctagaaagggtctcacctgtggccaggagcggtggctcacgcctgtaatcccagcactttgagaggccgcggtggacagatcacgagttatgaaaaacctcctcctgggcttatcaaggttagtgtgaagtttgtactcttggttatcccactagacatacttacagactcagtaatgcattatgaaaaatggttgcatgacatttaaatgcccttttatgaaaagcctgtttctttcctgcagatgactgaggggtcataatttttagtgttgtcacaagcctctgcctttgtggaaatttcatcagccatgtttcccttccctgaggaaccagtgcaggcccacatgggttccttggccgtggcccccttctctctgactggggaacggcatctttaagctcagctgcctccttttcttgtcagccttacttggctcagtccctcagtccatcctgtgttggtttcttgagtatcagcagctcagagagcagtcaa

SEQ ID NO: 42453 - DNA, 1343 bp, Homo sapiens
tgagcagcagcaagatttattgaaagagcgaaagaacaaaacttccacagcatggaaggggacccgagcgggttgccgctgccagctcgggtggcctgcttttattcccttacttggccccacccacatcctgctgattggtccattttacagagagctgattggtccattttacagagtgttgactggtccattttacaatactttagctagacagaaaagttctccaagtccccacccaacccagaagcccagccggcttcacctctcaatgggatgatctgttggtgatgggatgatctgttcagcaaaccgccatggcacacgtttacctgtgtaacaaacctgaacatcctgcacatgtacccttgaatttaaaataaaagttgaagcaaaaaatgtatttccaacgaaaatatagcatttaatgtgagatgtgccataatctctgtcctaccttcttaagggcaatggatgaaatcagtatctactggaaggagtaaaaatattaaataattgaagcaaaatggattggaagcccaaaatttggagattttcttggggtgctctgtggtaagaataatgccccccccgcaatcgtatccatggccaagtctccagaacctgtgaacatgctactttacatagcaaaagggactttgcagatgttattaaattaaggatttgcggatggggcaattattctggattatgcaggtggacctggtgcgtccttagaagaaagaggcaaaagagtcagaggagagaaggagatgtgaagaaggaagcagagagagagatttgaggctactacactgttggtttttaagatggatgaaagaattcaggcagcctctggaagctggaaaaggctatctgcctagagcctccggaggagtgtagcgtcatcaataccttgactttggctcattgaaacccatttcagacttctgacctccagaactgtaagaaagagtaaatctgtgaaattttaagtcaccaagtttgtggtaatttgttacagccactaaaagaaactagtatattccccccaaaacatatacagaatgaaagatcaataacattgcttatttattttttccttcttattatttgttgtgccttgcctttcaataaaatatgattattcataatcaaaggtgattgttacccatgatctctgatttagcaacattttcatgtaatatttcttgatttaactagattaatatcagcaaatgacttagtaagtagtgcttcaaataaaatggcataaaacaagataaactccttggaaccctttcacattgaattaaaattaaaacatcttcatgaagaaaact

SEQ ID NO: 42454 - DNA, 420 bp, Homo sapiens
catgaagttctattatgagattttaaaatcttaactgaaagcactcagaagtatttcacatttctttaatcattttattcatatggttcttattatacctatgttcttaggattgttttctgttttgtttagaagcctagaaaatgtgtagggctttcattgatcttattgaagattttaacagagttgtggacataatagattacctctcaatagcagggataaatattggtttttgatcaagaatatgaaatgagttgtttgtcctgaaccacccccaagcaggaaagacttgcagcattaccagaattttttcttttatcctttattgaaagggaaactcccagatagaatgtgtaacatacaagttggtgttaaagatgtttgttggttttgtgtttaaatgcaaagatcatgttt

SEQ ID NO: 42455 - DNA, 712 bp, Homo sapiens
acaagtttctgctttatagtgtgttcattctagtggactgttctatctcaagtataaaactgcagtagtccaaatcacatgctccctgtaatttcttatagaaacagtttcttgagaggttttatcatatatcattacaattatgtggaccttacaaattaatactttttactaagcaaaatgtttaaagactatgtgagaaaacaaggattaaactttaaattttatccttcgttcatttctaaacctggttttgagcttgtccaaaaaagggcagtttttctttccagtatttaggatgtatgttgcagtttgatagttctgtgaaacctaaataattatttaatcttaagttacagttctcagtactgtaccacctggcatattattgggtgatttattgaccctttaacattttgtcattatatgttatgttgtttttttacatctaacactttaaaagtaattttgtgaagcaactaactttataatgtatttatagaaatgtatttcttagaagtttctgtgcccaaacataaattataataggatcctacatttgaataaaaattattcttttggccgagtgcggtggctcatgcatgtaatcccagcactttggaaggccaaggtgggaggatcacttgagcccagaagttcaagatcagcttgggtaacatagtgagaccccatccatctctacaaaaaataa

SEQ ID NO: 42456 - DNA, 908 bp, Homo sapiens
attctgaggccccctctgcgagcagctaggatgtggaaagcggttcctgcttgcatctctggggcagaggcctccaccagcaggctctcctccattcctccagtcctggcggaagcaaggccctcctaggcagctggtggataacagaggagggtcctaagagcaccacaggaagaacccttggctgggccaggacttggacgttgaggtctcggtgtcccgcatgagatgtctgcagaatgagacttacagtgcgctgagccctggcaaaagtgaggacgttgtgcttcgatggagccaggagttcagcaccttgactctaggccagttcggatgagctggcgtctattctgcccacaccccagcccaacctgcccacgttctctattgttttgagaccccattgctttcaggctgccccttctgggtctgttactcggcccctactcacatttccttgggttggagcaacagtcccagagagggccacggtgggagctgcgccctccttaaaagatgactttacataaaatgttgatcttcaaaaaaaaccaacaaagacaaaaaaagagacatagaaaacataaacagaaaagaataacaagagacacaaaaacaacaaagcacaaagagtaagaagacagaaaaaacaagaggggggggccgcaaaagaaaatactaccgtaggagcgggactaacgttgtgcgtgcagacaccacagacgagtgtagagagaagagcggtggcgccacactaagagagggagtacatttatactcgcgcgtagaggggagtacatggtataaaaccgcgagcgcgagatgaaaaaagcgatccgcaagggtgtgaattgtggaagggaaacacacaaacaggggggcgaggaacaacattggcggaaaacgat

SEQ ID NO: 42457 - DNA, 547 bp, Homo sapiens
cgtgcgccccgccccgcgcctgcggctctctctgcggcttggcccgttagaggcggcttgtgtccacgggacgcgggcggatcttctccggccatgaggaagccagccgctggcttccttccctcactcctgaaggtgctgctcctgcctctggcacctgccgcagcccaggattcgactcaggcctccactccaggcagccctctctctcctaccgaatacgaacgcttcttcgcactgctgactccaacctggaaggcagagactacctgccgtctccgtgcaacccacggctgccggaatcccacactcgtccagctggaccaatatgaaaaccacggcttagtgcccgatggtgagggccagactaggggggaaaccgaggcacccagagtgttcacccaaacctcagggcaaaaacccctgtgctcatgtgaggcggggaagggcatggctggcaccacaccatgagctcgtactctccaccctccccatggcgtggagtccattgcccacagccccaccccaagctccccacgggttcatc

SEQ ID NO: 42458 - DNA, 2296 bp, Homo sapiens
cgtgcgccccgccccgcgcctgcggctctctctgcggcttggcccgttagaggcggcttgtgtccacgggacgcgggcggatcttctccggccatgaggaagccagccgctggcttccttccctcactcctgaaggtgctgctcctgcctctggcacctgccgcagcccaggattcgactcaggcctccactccaggcagccctctctctcctaccgaatacgaacgcttcttcgcactgctgactccaacctggaaggcagagactacctgccgtctccgtgcaacccacggctgccggaatcccacactcgtccagctggaccaatatgaaaaccacggcttagtgcccgatggtgctgtctgctccaacctcccttatgcctcctggtttgagtctttctgccagttcactcactaccgttgctccaaccacgtctactatgccaagagagtcctgtgttcccagccagtctctattctctcacctaacactctcaaggagatagaagcttcagctgaagtctcacccaccacgatgacctcccccatctcaccccacttcacagtgacagaacgccagaccttccagccctggcctgagaggctcagcaacaacgtggaagagctcctacaatcctccttgtccctgggaggccaggagcaagcgccagagcacaagcaggagcaaggagtggagcacaggcaggagccgacacaagaacacaagcaggaagaggggcagaaacaggaagagcaagaagaggaacaggaagaggagggaaagcaggaagaaggacaggggactaaggagggacgggaggctgtgtctcagctgcagacagactcagagcccaagtttcactctgaatctctatcttctaacccttcctcttttgctccccgggtacgagaagtagagtctactcctatgataatggagaacatccaggagctcattcgatcagcccaggaaatagatgaaatgaatgaaatatatgatgagaactcctactggagaaaccaaaaccctggcagcctcctgcagctgccccacacagaggccttgctggtgctgtgctattcgatcgtggagaatacctgcatcataacccccacagccaaggcctggaagtacatggaggaggagatccttggtttcgggaagtcggtctgtgacagccttgggcggcgacacatgtctacctgtgccctctgtgacttctgctccttgaagctggagcagtgccactcagaggccagcctgcagcggcaacaatgcgacacctcccacaagactccctttgtcagccccttgcttgcctcccagagcctgtccatcggcaaccaggtagggtccccagaatcaggccgcttttacgggctggatttgtacggtgggctccacatggacttctggtgtgcccggcttgccacgaaaggctgtgaagatgtccgagtctctgggtggctccagactgagttccttagcttccaggatggggatttccctaccaagatttgtgacacagactatatccagtacccaaactactgttccttcaaaagccagcagtgtctgatgagaaaccgcaatcggaaggtgtcccgcatgagatgtctgcagaatgagacttacagtgcgctgagccctggcaaaagtgaggacgttgtgcttcgatggagccaggagttcagcaccttgactctaggccagttcggatgagctggcgtctattctgcccacaccccagcccaacctgcccacgttctctattgttttgagaccccattgctttcaggctgccccttctgggtctgttactcggcccctactcacatttccttgggttggagcaacagtcccagagagggccacggtgggagctgcgccctccttaaaagatgactttacataaaatgttgatcttcaaaaaaaaccaacaaagacaaaaaaagagacatagaaaacataaacagaaaagaataacaagagacacaaaaacaacaaagcacaaagagtaagaagacagaaaaaacaagaggggggggccgcaaaagaaaatactaccgtaggagcgggactaacgttgtgcgtgcagacaccacagacgagtgtagagagaagagcggtggcgccacactaagagagggagtacatttatactcgcgcgtagaggggagtacatggtataaaaccgcgagcgcgagatgaaaaaagcgatccgcaagggtgtgaattgtggaagggaaacacacaaacaggggggcgaggaacaacattggcggaaaacgat

SEQ ID NO: 42459 - DNA, 1878 bp, Homo sapiens
cgtgcgccccgccccgcgcctgcggctctctctgcggcttggcccgttagaggcggcttgtgtccacgggacgcgggcggatcttctccggccatgaggaagccagccgctggcttccttccctcactcctgaaggtgctgctcctgcctctggcacctgccgcagcccaggattcgactcaggcctccactccaggcagccctctctctcctaccgaatacgaacgcttcttcgcactgctgactccaacctggaaggcagagactacctgccgtctccgtgcaacccacggctgccggaatcccacactcgtccagctggaccaatatgaaaaccacggcttagtgcccgatggtgctgtctgctccaacctcccttatgcctcctggtttgagtctttctgccagttcactcactaccgttgctccaaccacgtctactatgccaagagagtcctgtgttcccagccagtctctattctctcacctaacactctcaaggagatagaagcttcagctgaagtctcacccaccacgatgacctcccccatctcaccccacttcacagtgacagaacgccagaccttccagccctggcctgagaggctcagcaacaacgtggaagagctcctacaatcctccttgtccctgggaggccaggagcaagcgccagagcacaagcaggagcaaggagtggagcacaggcaggagccgacacaagaacacaagcaggaagaggggcagaaacaggaagagcaagaagaggaacaggaagaggagggaaagcaggaagaaggacaggggactaaggagggacgggaggctgtgtctcagctgcagacagactcagagcccaagtttcactctgaatctctatcttctaacccttcctcttttgctccccgggtacgagaagtagagtctactcctatgataatggagaacatccaggagctcattcgatcagcccaggaaatagatgaaatgaatgaaatatatgatgagaactcctactggagaaaccaaaaccctggcagcctcctgcagctgccccacacagaggccttgctggtgctgtgctattcgatcgtggagaatacctgcatcataacccccacagccaaggcctggaagtacatggaggaggagatccttggtttcgggaagtcggtctgtgacagccttgggcggcgacacatgtctacctgtgccctctgtgacttctgctccttgaagctggagcagtgccactcagaggccagcctgcagcggcaacaatgcgacacctcccacaagactccctttgtcagccccttgcttgcctcccagagcctgtccatcggcaaccaggtagggtccccagaatcaggccgcttttacgggctggatttgtacggtgggctccacatggacttctggtgtgcccggcttgccacgaaaggctgtgaagatgtccgagtctctgggtggctccagactgagttccttagcttccaggatggggatttccctaccaagatttgtgacacagactatatccagtacccaaactactgttccttcaaaagccagcagtgtctgatgagaaaccgcaatcggaagtcctggcggaagcaaggccctcctaggcagctggtggataacagaggagggtcctaagagcaccacaggaagaacccttggctgggccaggacttggacgttgaggtctcggtctgtctcctcttcttactcaccaagtagcctgggatgaggcacttccccctctgagcctcagccgcctgtttctgcatgaaaggggttgggctgcttgatgtctcctctggctttaaaaacccacatttgagtttcctccttccctctactgccctgtgccca

SEQ ID NO: 42460 - DNA, 1646 bp, Homo sapiens
cgtgcgccccgccccgcgcctgcggctctctctgcggcttggcccgttagaggcggcttgtgtccacgggacgcgggcggatcttctccggccatgaggaagccagccgctggcttccttccctcactcctgaaggtgctgctcctgcctctggcacctgccgcagcccaggattcgactcaggcctccactccaggcagccctctctctcctaccgaatacgaacgcttcttcgcactgctgactccaacctggaaggcagagactacctgccgtctccgtgcaacccacggctgccggaatcccacactcgtccagctggaccaatatgaaaaccacggcttagtgcccgatggtgctgtctgctccaacctcccttatgcctcctggtttgagtctttctgccagttcactcactaccgttgctccaaccacgtctactatgccaagagagtcctgtgttcccagccagtctctattctctcacctaacactctcaaggagatagaagcttcagctgaagtctcacccaccacgatgacctcccccatctcaccccacttcacagtgacagaacgccagaccttccagccctggcctgagaggctcagcaacaacgtggaagagctcctacaatcctccttgtccctgggaggccaggagcaagcgccagagcacaagcaggagcaaggagtggagcacaggcaggagccgacacaagaacacaagcaggaagaggggcagaaacaggaagagcaagaagaggaacaggaagaggagggaaagcaggaagaaggacaggggactaaggagggacgggaggctgtgtctcagctgcagacagactcagagcccaagtttcactctgaatctctatcttctaacccttcctcttttgctccccgggtacgagaagtagagtctactcctatgataatggagaacatccaggagctcattcgatcagcccaggaaatagatgaaatgaatgaaatatatgatgagaactcctactggagaaaccaaaaccctggcagcctcctgcagctgccccacacagaggccttgctggtgctgtgctattcgatcgtggagaatacctgcatcataacccccacagccaaggcctggaagtacatggaggaggagatccttggtttcgggaagtcggtctgtgacagccttgggcggcgacacatgtctacctgtgccctctgtgacttctgctccttgaagctggagcagtgccactcagaggccagcctgcagcggcaacaatgcgacacctcccacaagactccctttgtcagccccttgcttgcctcccagagcctgtccatcggcaaccaggtagggtccccagaatcaggccgcttttacgggctggatttgtacgtcgggcatcctctatgacataggaatagagccaggtccacgagaaagaactgcgaggacggtagactgtatagtgccggcaccagagcgagtgctgtaacgggacaggatgcgaatggcgctcaacgcaagagggtgtcgacatcgagtatcacagggcaaggatgcgacatggtcgtctcgggacaggatgccgagctggtgtctgcgggagagagccgacgagtcgggtcgtcgtccacagatatgca

SEQ ID NO: 42461 - DNA, 2407 bp, Homo sapiens
cgtgcgccccgccccgcgcctgcggctctctctgcggcttggcccgttagaggcggcttgtgtccacgggacgcgggcggatcttctccggccatgaggaagccagccgctggcttccttccctcactcctgaaggtgctgctcctgcctctggcacctgccgcagcccaggattcgactcaggcctccactccaggcagccctctctctcctaccgaatacgaacgcttcttcgcactcctgaaggtgctgctcctgcctctggcacctgccgcagcccaggattcgactcaggcctccactccaggcagccctctctctcctaccgaatacgaacgcttcttcgcactgctgactccaacctggaaggcagagactacctgccgtctccgtgcaacccacggctgccggaatcccacactcgtccagctggaccaatatgaaaaccacggcttagtgcccgatggtgctgtctgctccaacctcccttatgcctcctggtttgagtctttctgccagttcactcactaccgttgctccaaccacgtctactatgccaagagagtcctgtgttcccagccagtctctattctctcacctaacactctcaaggagatagaagcttcagctgaagtctcacccaccacgatgacctcccccatctcaccccacttcacagtgacagaacgccagaccttccagccctggcctgagaggctcagcaacaacgtggaagagctcctacaatcctccttgtccctgggaggccaggagcaagcgccagagcacaagcaggagcaaggagtggagcacaggcaggagccgacacaagaacacaagcaggaagaggggcagaaacaggaagagcaagaagaggaacaggaagaggagggaaagcaggaagaaggacaggggactaaggagggacgggaggctgtgtctcagctgcagacagactcagagcccaagtttcactctgaatctctatcttctaacccttcctcttttgctccccgggtacgagaagtagagtctactcctatgataatggagaacatccaggagctcattcgatcagcccaggaaatagatgaaatgaatgaaatatatgatgagaactcctactggagaaaccaaaaccctggcagcctcctgcagctgccccacacagaggccttgctggtgctgtgctattcgatcgtggagaatacctgcatcataacccccacagccaaggcctggaagtacatggaggaggagatccttggtttcgggaagtcggtctgtgacagccttgggcggcgacacatgtctacctgtgccctctgtgacttctgctccttgaagctggagcagtgccactcagaggccagcctgcagcggcaacaatgcgacacctcccacaagactccctttgtcagccccttgcttgcctcccagagcctgtccatcggcaaccaggtagggtccccagaatcaggccgcttttacgggctggatttgtacggtgggctccacatggacttctggtgtgcccggcttgccacgaaaggctgtgaagatgtccgagtctctgggtggctccagactgagttccttagcttccaggatggggatttccctaccaagatttgtgacacagactatatccagtacccaaactactgttccttcaaaagccagcagtgtctgatgagaaaccgcaatcggaaggtgtcccgcatgagatgtctgcagaatgagacttacagtgcgctgagccctggcaaaagtgaggacgttgtgcttcgatggagccaggagttcagcaccttgactctaggccagttcggatgagctggcgtctattctgcccacaccccagcccaacctgcccacgttctctattgttttgagaccccattgctttcaggctgccccttctgggtctgttactcggcccctactcacatttccttgggttggagcaacagtcccagagagggccacggtgggagctgcgccctccttaaaagatgactttacataaaatgttgatcttcaaaaaaaaccaacaaagacaaaaaaagagacatagaaaacataaacagaaaagaataacaagagacacaaaaacaacaaagcacaaagagtaagaagacagaaaaaacaagaggggggggccgcaaaagaaaatactaccgtaggagcgggactaacgttgtgcgtgcagacaccacagacgagtgtagagagaagagcggtggcgccacactaagagagggagtacatttatactcgcgcgtagaggggagtacatggtataaaaccgcgagcgcgagatgaaaaaagcgatccgcaagggtgtgaattgtggaagggaaacacacaaacaggggggcgaggaacaacattggcggaaaacgat

SEQ ID NO: 42462 - DNA, 516 bp, Homo sapiens
gcggcttgtgtccacgggacgcgggcggatcttctccggccatgaggaagccagccgctggcttccttccctcactcctgaagggtgagaggtttacacctgctccaacagactctccccgggctagtcctctccctcccgagagctctgcttttacggtttctggatcgcttcctcatggtggtcgcgctgggtcggctccctaggtcctgggatactcccatctccccccgcccgcggccggacctttgcctctgtctctagactccccccgccctggtcagcagggataaccctcaccccgttcctaatttgccagtctgggtctgtctgtcctggtctcggagcgggttttggggttcggtccttccatcatccgttcgcccgctccgcagtgctgctcctgcctctggcacctgccgcagcccaggattcgactcaggcctccactccaggcagccctctctctcctaccgaatacgaacgcttcttcgcactgctgactccaacctggaa

SEQ ID NO: 42463 - DNA, 2407 bp, Homo sapiens
cgtgcgccccgccccgcgcctgcggctctctctgcggcttggcccgttagaggcggcttgtgtccacgggacgcgggcggatcttctccggccatgaggaagccagccgctggcttccttccctcactcctgaaggtgctgctcctgcctctggcacctgccgcagcccaggattcgactcaggcctccactccaggcagccctctctctcctaccgaatacgaacgcttcttcgcactgctgactccaacctggaaggcagagactacctgccgtctccgtgcaacccacggctgccggaatcccacactcgtccagctggaccaatatgaaaaccacggcttagtgcccgatggtgctgtctgctccaacctcccttatgcctcctggtttgagtctttctgccagttcactcactaccgttgctccaaccacgtctactatgccaagagagtcctgtgttcccagccagtctctattctctcacctaacactctcaaggagatagaagcttcagctgaagtctcacccaccacgatgacctcccccatctcaccccacttcacagtgacagaacgccagaccttccagccctggcctgagaggctcagcaacaacgtggaagagctcctacaatcctccttgtccctgggaggccaggagcaagcgccagagcacaagcaggagcaaggagtggagcacaggcaggagccgacacaagaacacaagcaggaagaggggcagaaacaggaagagcaagaagaggaacaggaagaggagggaaagcaggaagaaggacaggggactaaggagggacgggaggctgtgtctcagctgcagacagactcagagcccaagtttcactctgaatctctatcttctaacccttcctcttttgctccccgggtacgagaagtagagtctactcctatgataatggagaacatccaggagctcattcgatcagcccaggaaatagatgaaatgaatgaaatatatgatgagaactcctactggagaaaccaaaaccctggcagcctcctgcagctgccccacacagaggccttgctggtgctgtgctattcgatcgtggagaatacctgcatcataacccccacagccaaggcctggaagtacatggaggaggagatccttggtttcgggaagtcggtctgtgacagccttgggcggcgacacatgtctacctgtgccctctgtgacttctgctccttgaagctggagcagtgccactcagaggccagcctgcagcggcaacaatgcgacacctcccacaagactccctttgtcagccccttgcttgcctcccagagcctgtccatcggcaaccaggtagggtccccagaatcaggccgcttttacgggctggatttgtacggtgggctccacatggacttctggtgtgcccggcttgccacgaaaggctgtgaagatgtccgagtctctgggtggctccagactgagttccttagcttccaggatggggatttccctaccaagatttgtgacacagactatatccagtacccaaactactgttccttcaaaagccagcagtgtctgatgagaaaccgcaatcggaagtcctggcggaagcaaggccctcctaggcagctggtggataacagaggagggtcctaagagcaccacaggaagaacccttggctgggccaggacttggacgttgaggtctcggtgtcccgcatgagatgtctgcagaatgagacttacagtgcgctgagccctggcaaaagtgaggacgttgtgcttcgatggagccaggagttcagcaccttgactctaggccagttcggatgagctggcgtctattctgcccacaccccagcccaacctgcccacgttctctattgttttgagaccccattgctttcaggctgccccttctgggtctgttactcggcccctactcacatttccttgggttggagcaacagtcccagagagggccacggtgggagctgcgccctccttaaaagatgactttacataaaatgttgatcttcaaaaaaaaccaacaaagacaaaaaaagagacatagaaaacataaacagaaaagaataacaagagacacaaaaacaacaaagcacaaagagtaagaagacagaaaaaacaagaggggggggccgcaaaagaaaatactaccgtaggagcgggactaacgttgtgcgtgcagacaccacagacgagtgtagagagaagagcggtggcgccacactaagagagggagtacatttatactcgcgcgtagaggggagtacatggtataaaaccgcgagcgcgagatgaaaaaagcgatccgcaagggtgtgaattgtggaagggaaacacacaaacaggggggcgaggaacaacattggcggaaaacgat

SEQ ID NO: 42464 - DNA, 1649 bp, Homo sapiens
cgtgcgccccgccccgcgcctgcggctctctctgcggcttggcccgttagaggcggcttgtgtccacgggacgcgggcggatcttctccggccatgaggaagccagccgctggcttccttccctcactcctgaaggtgctgctcctgcctctggcacctgccgcagcccaggattcgactcaggcctccactccaggcagccctctctctcctaccgaatacgaacgcttcttcgcactgctgactccaacctggaaggcagagactacctgccgtctccgtgcaacccacggctgccggaatcccacactcgtccagctggaccaatatgaaaaccacggcttagtgcccgatggtgctgtctgctccaacctcccttatgcctcctggtttgagtctttctgccagttcactcactaccgttgctccaaccacgtctactatgccaagagagtcctgtgttcccagccagtctctattctctcacctaacactctcaaggagatagaagcttcagctgaagtctcacccaccacgatgacctcccccatctcaccccacttcacagtgacagaacgccagaccttccagccctggcctgagaggctcagcaacaacgtggaagagctcctacaatcctccttgtccctgggaggccaggagcaagcgccagagcacaagcaggagcaaggagtggagcacaggcaggagccgacacaagaacacaagcaggaagaggggcagaaacaggaagagcaagaagaggaacaggaagaggagggaaagcaggaagaaggacaggggactaaggagggacgggaggctgtgtctcagctgcagacagactcagagcccaagtttcactctgaatctctatcttctaacccttcctcttttgctccccgggtacgagaagtagagtctactcctatgataatggagaacatccaggagctcattcgatcagcccaggaaatagatgaaatgaatgaaatatatgatgagaactcctactggagaaaccaaaaccctggcagcctcctgcagctgccccacacagaggccttgctggtgctgtgctattcgatcgtggagaatacctgcatcataacccccacagccaaggcctggaagtacatggaggaggagatccttggtttcgggaagtcggtctgtgacagccttgggcggcgacacatgtctacctgtgccctctgtgacttctgctccttgaagctggagcagtgccactcagaggccagcctgcagcggcaacaatgcgacacctcccacaagactccctttgtcagccccttgcttgcctcccagagcctgtccatcggcaaccaggtagggtccccagaatcaggccgcttttacgggctggatttgtacggtgggctccacatggacttctggtgtgcccggcttgccacgaaaggctgtgaagatgtccgagtctctgggtggctccagactgagttccttagcttccaggatggggatttccctaccaagatttgtgacacagactatatccagtacccaaactactgttccttcaaaagccagcagtgtctgatgagaaaccgcaatcggaaggtgagcacccctgccctgcccctccttctcccagcaccccctcaatc

SEQ ID NO: 42465 - DNA, 2134 bp, Homo sapiens
gctggtacaggtcccgagttttggggatctccaggcagccctctctctcctaccgaatacgaacgcttcttcgcactgctgactccaacctggaaggcagagactacctgccgtctccgtgcaacccacggctgccggaatcccacactcgtccagctggaccaatatgaaaaccacggcttagtgcccgatggtgctgtctgctccaacctcccttatgcctcctggtttgagtctttctgccagttcactcactaccgttgctccaaccacgtctactatgccaagagagtcctgtgttcccagccagtctctattctctcacctaacactctcaaggagatagaagcttcagctgaagtctcacccaccacgatgacctcccccatctcaccccacttcacagtgacagaacgccagaccttccagccctggcctgagaggctcagcaacaacgtggaagagctcctacaatcctccttgtccctgggaggccaggagcaagcgccagagcacaagcaggagcaaggagtggagcacaggcaggagccgacacaagaacacaagcaggaagaggggcagaaacaggaagagcaagaagaggaacaggaagaggagggaaagcaggaagaaggacaggggactaaggagggacgggaggctgtgtctcagctgcagacagactcagagcccaagtttcactctgaatctctatcttctaacccttcctcttttgctccccgggtacgagaagtagagtctactcctatgataatggagaacatccaggagctcattcgatcagcccaggaaatagatgaaatgaatgaaatatatgatgagaactcctactggagaaaccaaaaccctggcagcctcctgcagctgccccacacagaggccttgctggtgctgtgctattcgatcgtggagaatacctgcatcataacccccacagccaaggcctggaagtacatggaggaggagatccttggtttcgggaagtcggtctgtgacagccttgggcggcgacacatgtctacctgtgccctctgtgacttctgctccttgaagctggagcagtgccactcagaggccagcctgcagcggcaacaatgcgacacctcccacaagactccctttgtcagccccttgcttgcctcccagagcctgtccatcggcaaccaggtagggtccccagaatcaggccgcttttacgggctggatttgtacggtgggctccacatggacttctggtgtgcccggcttgccacgaaaggctgtgaagatgtccgagtctctgggtggctccagactgagttccttagcttccaggatggggatttccctaccaagatttgtgacacagactatatccagtacccaaactactgttccttcaaaagccagcagtgtctgatgagaaaccgcaatcggaaggtgtcccgcatgagatgtctgcagaatgagacttacagtgcgctgagccctggcaaaagtgaggacgttgtgcttcgatggagccaggagttcagcaccttgactctaggccagttcggatgagctggcgtctattctgcccacaccccagcccaacctgcccacgttctctattgttttgagaccccattgctttcaggctgccccttctgggtctgttactcggcccctactcacatttccttgggttggagcaacagtcccagagagggccacggtgggagctgcgccctccttaaaagatgactttacataaaatgttgatcttcaaaaaaaaccaacaaagacaaaaaaagagacatagaaaacataaacagaaaagaataacaagagacacaaaaacaacaaagcacaaagagtaagaagacagaaaaaacaagaggggggggccgcaaaagaaaatactaccgtaggagcgggactaacgttgtgcgtgcagacaccacagacgagtgtagagagaagagcggtggcgccacactaagagagggagtacatttatactcgcgcgtagaggggagtacatggtataaaaccgcgagcgcgagatgaaaaaagcgatccgcaagggtgtgaattgtggaagggaaacacacaaacaggggggcgaggaacaacattggcggaaaacgat

SEQ ID NO: 42466 - DNA, 2201 bp, Homo sapiens
cgtgcgccccgccccgcgcctgcggctctctctgcggcttggcccgttagaggcggcttgtgtccacgggacgcgggcggatcttctccggccatgaggaagccagccgctggcttccttccctcactcctgaaggtgctgctcctgcctctggcacctgccgcagcccaggattcgactcaggcctccactccaggcagccctctctctcctaccgaatacgaacgcttcttcgcactgctgactccaacctggaaggcagagactacctgccgtctccgtgcaacccacggctgccggaatcccacactcgtccagctggaccaatatgaaaaccacggcttagtgcccgatgagagtcctgtgttcccagccagtctctattctctcacctaacactctcaaggagatagaagcttcagctgaagtctcacccaccacgatgacctcccccatctcaccccacttcacagtgacagaacgccagaccttccagccctggcctgagaggctcagcaacaacgtggaagagctcctacaatcctccttgtccctgggaggccaggagcaagcgccagagcacaagcaggagcaaggagtggagcacaggcaggagccgacacaagaacacaagcaggaagaggggcagaaacaggaagagcaagaagaggaacaggaagaggagggaaagcaggaagaaggacaggggactaaggagggacgggaggctgtgtctcagctgcagacagactcagagcccaagtttcactctgaatctctatcttctaacccttcctcttttgctccccgggtacgagaagtagagtctactcctatgataatggagaacatccaggagctcattcgatcagcccaggaaatagatgaaatgaatgaaatatatgatgagaactcctactggagaaaccaaaaccctggcagcctcctgcagctgccccacacagaggccttgctggtgctgtgctattcgatcgtggagaatacctgcatcataacccccacagccaaggcctggaagtacatggaggaggagatccttggtttcgggaagtcggtctgtgacagccttgggcggcgacacatgtctacctgtgccctctgtgacttctgctccttgaagctggagcagtgccactcagaggccagcctgcagcggcaacaatgcgacacctcccacaagactccctttgtcagccccttgcttgcctcccagagcctgtccatcggcaaccaggtagggtccccagaatcaggccgcttttacgggctggatttgtacggtgggctccacatggacttctggtgtgcccggcttgccacgaaaggctgtgaagatgtccgagtctctgggtggctccagactgagttccttagcttccaggatggggatttccctaccaagatttgtgacacagactatatccagtacccaaactactgttccttcaaaagccagcagtgtctgatgagaaaccgcaatcggaaggtgtcccgcatgagatgtctgcagaatgagacttacagtgcgctgagccctggcaaaagtgaggacgttgtgcttcgatggagccaggagttcagcaccttgactctaggccagttcggatgagctggcgtctattctgcccacaccccagcccaacctgcccacgttctctattgttttgagaccccattgctttcaggctgccccttctgggtctgttactcggcccctactcacatttccttgggttggagcaacagtcccagagagggccacggtgggagctgcgccctccttaaaagatgactttacataaaatgttgatcttcaaaaaaaaccaacaaagacaaaaaaagagacatagaaaacataaacagaaaagaataacaagagacacaaaaacaacaaagcacaaagagtaagaagacagaaaaaacaagaggggggggccgcaaaagaaaatactaccgtaggagcgggactaacgttgtgcgtgcagacaccacagacgagtgtagagagaagagcggtggcgccacactaagagagggagtacatttatactcgcgcgtagaggggagtacatggtataaaaccgcgagcgcgagatgaaaaaagcgatccgcaagggtgtgaattgtggaagggaaacacacaaacaggggggcgaggaacaacattggcggaaaacgat

SEQ ID NO: 42467 - DNA, 382 bp, Homo sapiens
aactcaggggcgagctgctaactcagggcgagctgctaactcagggcgagctgctaactcaggggcgagctgctcccgaggtggccttgagaaggaagaagcaggatgacagagcctgagcagcggaaccagcctgcaccctcccttctggcccagcgacctgggctgtggctgagacaataatgaggccagaagtagccggagcctgtcaggaagggcaggggaggactgtggggtctgggctctgtcgctgtaaccatctgctcccaggctgtgtgcagaaaatggcatttacactattgtgcagctcattctcatgaaatactgccattgttgctaaataaagcttgtgtgctctgaatatagccaagcaaaaaaaaag

SEQ ID NO: 42468 - DNA, 2994 bp, Homo sapiens
agcggagagcgtcccccggcgaggacgagcgagcacggcgcccgcacctccccgcaccgcccgcgctgcgcgcccggaggagcgaccgccgcagttctcgagctccagctgcattccctccgcgtccgccccacgcttctcccgctccgggccccgcaatggcccaggcagtgtggtcgcgcctcggccgcatcctctggcttgcctgcctcctgccctgggccccggcaggggtggccgcaggcctgtatgaactcaatctcaccaccgatagccctgccaccacgggagcggtggtgaccatctcggccagcctggtggccaaggacaacggcagcctggccctgcccgctgacgcccacctctaccgcttccactggatccacaccccgctggtgcttactggcaagatggagaagggtctcagctccaccatccgtgtggtcggccacgtgcccggggaattcccggtctctgtctgggtcactgccgctgactgctggatgtgccagcctgtggccaggggctttgtggtcctccccatcacagagttcctcgtgggggaccttgttgtcacccagaacacttccctaccctggcccagctcctatctcactaagaccgtcctgaaagtctccttcctcctccacgacccgagcaacttcctcaagaccgccttgtttctctacagctgggacttcggggacgggacccagatggtgactgaagactccgtggtctattataactattccatcatcgggaccttcaccgtgaagctcaaagtggtggcggagtgggaagaggtggagccggatgccacgagggctgtgaagcagaagaccggggacttctccgcctcgctgaagctgcaggaaacccttcgaggcatccaagtgttggggcccaccctaattcagaccttccaaaagatgaccgtgaccttgaacttcctggggagccctcctctgactgtgtgctggcgtctcaagcctgagtgcctcccgctggaggaaggggagtgccaccctgtgtccgtggccagcacagcgtacaacctgacccacaccttcagggaccctggggactactgcttcagcatccgggccgagaatatcatcagcaagacacatcagtaccacaagatccaggtgtggccctccagaatccagccggctgtctttgctttcccatgtgctacacttatcactgtgatgttggccttcatcatgtacatgaccctgcggaatgccactcagcaaaaggacatggtggagaacccggagccaccctctggggtcaggtgctgctgccagatgtgctgtgggcctttcttgctggagactccatctgagtacctggaaattgttcgtgagaaccacgggctgctcccgcccctctataagtctgtcaaaacttacaccgtgtgagcactccccctccccaccccatctcagtgttaactgactgctgacttggagtttccagcagggtggtgtgcaccactgaccaggaggggttcatttgcgtggggctgttggcctggatcatccatccatctgtacagttcagccactgccacaagcccctccctctctgtcacccctgaccccagccattcacccatctgtacagtccagccactgacataagccccactcggttaccacccccttgaccccctacctttgaagaggcttcgtgcaggactttgatgcttggggtgttccgtgttgactcccaggtgggcctggctgcccactgcccattcctctcatattggcacatctgctgtccattgggggttctcagtttcctcccccagacagccctacctgtgccagagagctagaaagaaggtcataaagggttaaaaatccataactaaaggttgtacacatagatgggcacactcacagagagaagtgtgcatgtacacacaccacacacacacacacacacacacacacagaaatataaacacatgcgtcacatgggcatttcagatgatcagctctgtatctggttaagtcggttgctgggatgcaccctgcactagagctgaaaggaaatttgacctccaagcagccctgacaggttctgggcccgggccctccctttgtgctttgtctctgcagttcttgcgccctttataaggccatcctagtccctgctggctggcagggggctggatggggggcaggactaatactgagtgattgcagagtgctttataaatatcaccttattttatcgaaacccatctgtgaaactttcactgaggaaaaggccttgcagcggtagaagaggttgagtcaaggccgggcgcggtggctcacgcctgtaatcccagcactttgggaggccgaggcgggtggatcacgagatcaggagatcgagaccaccctggctaacacggtgaaaccccgtctctactaaaaaaatacaaaaagttagccgggcgtggtggtgggtgcctgtagtcccagctactcgggaggctgaggcaggagaatggtgcgaacccgggaggcggagcttgcagtgagcccagatggcgccactgcactccagcctgagtgacagagcgagactctgtctccaaaaaaaaaaaaaagaagaggttgagtcagcagggacttgggttccctgtgtgtgaggggggcattcttgcctgccagctgctcccgaggtggccttgagaaggaagaagcaggatgacagagcctgagcagcggaaccagcctgcaccctcccttctggcccagcgacctgggctgtggctgagacaataatgaggccagaagtagccggagcctgtcaggaagggcaggggaggactgtggggtctgggctctgtcgctgtaaccatctgctcccaggctgtgtgcagaaaatggcatttacactattgtgcagctcattctcatgaaatactgccattgttgctaaataaagcttgtgtgctctgaatatagccaagcaaaaaaaaag

SEQ ID NO: 42469 - DNA, 2844 bp, Homo sapiens
agcggagagcgtcccccggcgaggacgagcgagcacggcgcccgcacctccccgcaccgcccgcgctgcgcgcccggaggagcgaccgccgcagttctcgagctccagctgcattccctccgcgtccgccccacgcttctcccgctccgggccccgcaatggcccaggcagtgtggtcgcgcctcggccgcatcctctggcttgcctgcctcctgccctgggccccggcaggggtggccgcaggcctgtatgaactcaatctcaccaccgatagccctgccaccacgggagcggtggtgaccatctcggccagcctggtggccaaggacaacggcagcctggccctgcccgctgacgcccacctctaccgcttccactggatccacaccccgctggtgcttactggcaagatggagaagggtctcagctccaccatccgtgtggtcggccacgtgcccggggaattcccggtctctgtctgggtcactgccgctgactgctggatgtgccagcctgtggccaggggctttgtggtcctccccatcacagagttcctcgtgggggaccttgttgtcacccagaacacttccctaccctggcccagctcctatctcactaagaccgtcctgaaagtctccttcctcctccacgacccgagcaacttcctcaagaccgccttgtttctctacagctgggacttcggggacgggacccagatggtgactgaagactccgtggtctattataactattccatcatcgggaccttcaccgtgaagctcaaagtggtggcggagtgggaagaggtggagccggatgccacgagggctgtgaagcagaagaccggggacttctccgcctcgctgaagctgcaggaaacccttcgaggcatccaagtgttggggcccaccctaattcagaccttccaaaagatgaccgtgaccttgaacttcctggggagccctcctctgactgtgtgctggcgtctcaagcctgagtgcctcccgctggaggaaggggagtgccaccctgtgtccgtggccagcacagcgtacaacctgacccacaccttcagggaccctggggactactgcttcagcatccgggccgagaatatcatcagcaagacacatcagtaccacaagatccaggtgtggccctccagaatccagccggctgtctttgctttcccatgtgctacacttatcactgtgatgttggccttcatcatgtacatgaccctgcggaatgccactcagcaaaaggacatggtggagaacccggagccaccctctggggtcaggtgctgctgccagatgtgctgtgggcctttcttgctggagactccatctgagtacctggaaattgttcgtgagaaccacgggctgctcccgcccctctataagtctgtcaaaacttacaccgtgtgagcactccccctccccaccccatctcagtgttaactgactgctgacttggagtttccagcagggtggtgtgcaccactgaccaggaggggttcatttgcgtggggctgttggcctggatcatccatccatctgtacagttcagccactgccacaagcccctccctctctgtcacccctgaccccagccattcacccatctgtacagtccagccactgacataagccccactcggttaccacccccttgaccccctacctttgaagagagctagaaagaaggtcataaagggttaaaaatccataactaaaggttgtacacatagatgggcacactcacagagagaagtgtgcatgtacacacaccacacacacacacacacacacacacacagaaatataaacacatgcgtcacatgggcatttcagatgatcagctctgtatctggttaagtcggttgctgggatgcaccctgcactagagctgaaaggaaatttgacctccaagcagccctgacaggttctgggcccgggccctccctttgtgctttgtctctgcagttcttgcgccctttataaggccatcctagtccctgctggctggcagggggctggatggggggcaggactaatactgagtgattgcagagtgctttataaatatcaccttattttatcgaaacccatctgtgaaactttcactgaggaaaaggccttgcagcggtagaagaggttgagtcaaggccgggcgcggtggctcacgcctgtaatcccagcactttgggaggccgaggcgggtggatcacgagatcaggagatcgagaccaccctggctaacacggtgaaaccccgtctctactaaaaaaatacaaaaagttagccgggcgtggtggtgggtgcctgtagtcccagctactcgggaggctgaggcaggagaatggtgcgaacccgggaggcggagcttgcagtgagcccagatggcgccactgcactccagcctgagtgacagagcgagactctgtctccaaaaaaaaaaaaaagaagaggttgagtcagcagggacttgggttccctgtgtgtgaggggggcattcttgcctgccagctgctcccgaggtggccttgagaaggaagaagcaggatgacagagcctgagcagcggaaccagcctgcaccctcccttctggcccagcgacctgggctgtggctgagacaataatgaggccagaagtagccggagcctgtcaggaagggcaggggaggactgtggggtctgggctctgtcgctgtaaccatctgctcccaggctgtgtgcagaaaatggcatttacactattgtgcagctcattctcatgaaatactgccattgttgctaaataaagcttgtgtgctctgaatatagccaagcaaaaaaaaag

SEQ ID NO: 42470 - DNA, 1703 bp, Homo sapiens
ccccgttctgcaggaatccggttcgatgtgctgtgggcctttcttgctggagactccatctgagtacctggaaattgttcgtgagaaccacgggctgctcccgcccctctataagtctgtcaaaacttacaccgtgtgagcactccccctccccaccccatctcagtgttaactgactgctgacttggagtttccagcagggtggtgtgcaccactgaccaggaggggttcatttgcgtggggctgttggcctggatcatccatccatctgtacagttcagccactgccacaagcccctccctctctgtcacccctgaccccagccattcacccatctgtacagtccagccactgacataagccccactcggttaccacccccttgaccccctacctttgaagaggcttcgtgcaggactttgatgcttggggtgttccgtgttgactcccaggtgggcctggctgcccactgcccattcctctcatattggcacatctgctgtccattgggggttctcagtttcctcccccagacagccctacctgtgccagagagctagaaagaaggtcataaagggttaaaaatccataactaaaggttgtacacatagatgggcacactcacagagagaagtgtgcatgtacacacaccacacacacacacacacacacacacacagaaatataaacacatgcgtcacatgggcatttcagatgatcagctctgtatctggttaagtcggttgctgggatgcaccctgcactagagctgaaaggaaatttgacctccaagcagccctgacaggttctgggcccgggccctccctttgtgctttgtctctgcagttcttgcgccctttataaggccatcctagtccctgctggctggcagggggctggatggggggcaggactaatactgagtgattgcagagtgctttataaatatcaccttattttatcgaaacccatctgtgaaactttcactgaggaaaaggccttgcagcggtagaagaggttgagtcaaggccgggcgcggtggctcacgcctgtaatcccagcactttgggaggccgaggcgggtggatcacgagatcaggagatcgagaccaccctggctaacacggtgaaaccccgtctctactaaaaaaatacaaaaagttagccgggcgtggtggtgggtgcctgtagtcccagctactcgggaggctgaggcaggagaatggtgcgaacccgggaggcggagcttgcagtgagcccagatggcgccactgcactccagcctgagtgacagagcgagactctgtctccaaaaaaaaaaaaaagaagaggttgagtcagcagggacttgggttccctgtgtgtgaggggggcattcttgcctgccagctgctcccgaggtggccttgagaaggaagaagcaggatgacagagcctgagcagcggaaccagcctgcaccctcccttctggcccagcgacctgggctgtggctgagacaataatgaggccagaagtagccggagcctgtcaggaagggcaggggaggactgtggggtctgggctctgtcgctgtaaccatctgctcccaggctgtgtgcagaaaatggcatttacactattgtgcagctcattctcatgaaatactgccattgttgctaaataaagcttgtgtgctctgaatatagccaagcaaaaaaaaag

SEQ ID NO: 42471 - DNA, 1419 bp, Homo sapiens
tcggcccggtgacttgagtatccctgcactgtagatcgttccattcacccatctgtacagtccagccactgacataagccccactcggttaccacccccttgaccccctacctttgaagaggcttcgtgcaggactttgatgcttggggtgttccgtgttgactcccaggtgggcctggctgcccactgcccattcctctcatattggcacatctgctgtccattgggggttctcagtttcctcccccagacagccctacctgtgccagagagctagaaagaaggtcataaagggttaaaaatccataactaaaggttgtacacatagatgggcacactcacagagagaagtgtgcatgtacacacaccacacacacacacacacacacacacacagaaatataaacacatgcgtcacatgggcatttcagatgatcagctctgtatctggttaagtcggttgctgggatgcaccctgcactagagctgaaaggaaatttgacctccaagcagccctgacaggttctgggcccgggccctccctttgtgctttgtctctgcagttcttgcgccctttataaggccatcctagtccctgctggctggcagggggctggatggggggcaggactaatactgagtgattgcagagtgctttataaatatcaccttattttatcgaaacccatctgtgaaactttcactgaggaaaaggccttgcagcggtagaagaggttgagtcaaggccgggcgcggtggctcacgcctgtaatcccagcactttgggaggccgaggcgggtggatcacgagatcaggagatcgagaccaccctggctaacacggtgaaaccccgtctctactaaaaaaatacaaaaagttagccgggcgtggtggtgggtgcctgtagtcccagctactcgggaggctgaggcaggagaatggtgcgaacccgggaggcggagcttgcagtgagcccagatggcgccactgcactccagcctgagtgacagagcgagactctgtctccaaaaaaaaaaaaaagaagaggttgagtcagcagggacttgggttccctgtgtgtgaggggggcattcttgcctgccagctgctcccgaggtggccttgagaaggaagaagcaggatgacagagcctgagcagcggaaccagcctgcaccctcccttctggcccagcgacctgggctgtggctgagacaataatgaggccagaagtagccggagcctgtcaggaagggcaggggaggactgtggggtctgggctctgtcgctgtaaccatctgctcccaggctgtgtgcagaaaatggcatttacactattgtgcagctcattctcatgaaatactgccattgttgctaaataaagcttgtgtgctctgaatatagccaagcaaaaaaaaag

SEQ ID NO: 42472 - DNA, 2688 bp, Homo sapiens
agcggagagcgtcccccggcgaggacgagcgagcacggcgcccgcacctccccgcaccgcccgcgctgcgcgcccggaggagcgaccgccgcagttctcgagctccagctgcattccctccgcgtccgccccacgcttctcccgctccgggccccgcaatggcccaggcagtgtggtcgcgcctcggccgcatcctctggcttgcctgcctcctgccctgggccccggcaggggtggccgcagagttcctcgtgggggaccttgttgtcacccagaacacttccctaccctggcccagctcctatctcactaagaccgtcctgaaagtctccttcctcctccacgacccgagcaacttcctcaagaccgccttgtttctctacagctgggacttcggggacgggacccagatggtgactgaagactccgtggtctattataactattccatcatcgggaccttcaccgtgaagctcaaagtggtggcggagtgggaagaggtggagccggatgccacgagggctgtgaagcagaagaccggggacttctccgcctcgctgaagctgcaggaaacccttcgaggcatccaagtgttggggcccaccctaattcagaccttccaaaagatgaccgtgaccttgaacttcctggggagccctcctctgactgtgtgctggcgtctcaagcctgagtgcctcccgctggaggaaggggagtgccaccctgtgtccgtggccagcacagcgtacaacctgacccacaccttcagggaccctggggactactgcttcagcatccgggccgagaatatcatcagcaagacacatcagtaccacaagatccaggtgtggccctccagaatccagccggctgtctttgctttcccatgtgctacacttatcactgtgatgttggccttcatcatgtacatgaccctgcggaatgccactcagcaaaaggacatggtggagaacccggagccaccctctggggtcaggtgctgctgccagatgtgctgtgggcctttcttgctggagactccatctgagtacctggaaattgttcgtgagaaccacgggctgctcccgcccctctataagtctgtcaaaacttacaccgtgtgagcactccccctccccaccccatctcagtgttaactgactgctgacttggagtttccagcagggtggtgtgcaccactgaccaggaggggttcatttgcgtggggctgttggcctggatcatccatccatctgtacagttcagccactgccacaagcccctccctctctgtcacccctgaccccagccattcacccatctgtacagtccagccactgacataagccccactcggttaccacccccttgaccccctacctttgaagaggcttcgtgcaggactttgatgcttggggtgttccgtgttgactcccaggtgggcctggctgcccactgcccattcctctcatattggcacatctgctgtccattgggggttctcagtttcctcccccagacagccctacctgtgccagagagctagaaagaaggtcataaagggttaaaaatccataactaaaggttgtacacatagatgggcacactcacagagagaagtgtgcatgtacacacaccacacacacacacacacacacacacacagaaatataaacacatgcgtcacatgggcatttcagatgatcagctctgtatctggttaagtcggttgctgggatgcaccctgcactagagctgaaaggaaatttgacctccaagcagccctgacaggttctgggcccgggccctccctttgtgctttgtctctgcagttcttgcgccctttataaggccatcctagtccctgctggctggcagggggctggatggggggcaggactaatactgagtgattgcagagtgctttataaatatcaccttattttatcgaaacccatctgtgaaactttcactgaggaaaaggccttgcagcggtagaagaggttgagtcaaggccgggcgcggtggctcacgcctgtaatcccagcactttgggaggccgaggcgggtggatcacgagatcaggagatcgagaccaccctggctaacacggtgaaaccccgtctctactaaaaaaatacaaaaagttagccgggcgtggtggtgggtgcctgtagtcccagctactcgggaggctgaggcaggagaatggtgcgaacccgggaggcggagcttgcagtgagcccagatggcgccactgcactccagcctgagtgacagagcgagactctgtctccaaaaaaaaaaaaaagaagaggttgagtcagcagggacttgggttccctgtgtgtgaggggggcattcttgcctgccagctgctcccgaggtggccttgagaaggaagaagcaggatgacagagcctgagcagcggaaccagcctgcaccctcccttctggcccagcgacctgggctgtggctgagacaataatgaggccagaagtagccggagcctgtcaggaagggcaggggaggactgtggggtctgggctctgtcgctgtaaccatctgctcccaggctgtgtgcagaaaatggcatttacactattgtgcagctcattctcatgaaatactgccattgttgctaaataaagcttgtgtgctctgaatatagccaagcaaaaaaaaag

SEQ ID NO: 42473 - DNA, 400 bp, Homo sapiens
attattggaggctccatcaaacaggttctccttcctttgattaatggaaggagcccagtctttcgggtgtttctcctttgaagtatatcttactaaaatgtcttacctctgaagttcatttgcaacctcatatgcgactcttgctaatgtatatctgctcactaggtgtctagtttgaggggatgacaagagcatcatttactccctatgctcattcctgaaaccttattttattgcagtggaaactgagatctggccaaagtttgatgatttgcccaggctggcattaaaatacagttctcttctaccacccttttctgtcttcatgctatactccttgagatgatgaccacaagtttaagtttagtattgccataaagttggggttggggctttgcat

SEQ ID NO: 42474 - DNA, 681 bp, Homo sapiens
tttaaagtctgaagctcggccaggtgcggtggctcacgcctgtaatcccaaaactttggaaggctgaggcaggtggatcacctgaggtcaggaggagttcaagaccagcctggccaacgtggtgaaaccccatctctataaaagtacaaaagggcatgatggcaggtgcctgtaatctcagctactcagtaggctggagcgggagaattgcttgaacctgggaggtggaggtttcagtgagccaagatagcgccattgcactccagcgtgggcgacagcaagagacttcatttcgataaataagtaaataaataaataaagtctgaagctccactggtcactccttttattgattatttgcagctggtctaaccagttacgtatgtctggcttgattacatggccagagcaacataaaagccctgctgggaacttctgatttgagctcttccaaaaccaggatggatgcctcacatagatcatgatgattcaatccaaaggcactttgcagtgcagtccacatgtgcataaggaccatggggagcttgtatttgggaattctgagattcctgatgtttacctacctagtctttctcttgctgccctgtatcctttgcctttaaataaaaatcttaagtgataatgctctgtgaagcctggataatcctttcaaatatttgg

SEQ ID NO: 42475 - DNA, 641 bp, Homo sapiens
tttaaagtctgaagctcggccaggtgcggtggctcacgcctgtaatcccaaaactttggaaggctgaggcaggtggatcacctgaggtcaggaggagttcaagaccagcctggccaacgtggtgaaaccccatctctataaaagtacaaaagggcatgatggcaggtgcctgtaatctcagctactcagtaggctggagcgggagaattgcttgaacctgggaggtggaggtttcagtgagccaagatagcgccattgcactccagcgtgggcgacagcaagagacttcatttcgataaataagtaaataaataaataaagtctgaagctccactggtcactccttttattgattatttgcagctggtctaaccagttacgtatgtctggcttgattacatggccagagcaacataaaagccctgctgggaacttctgatttgagctcttccaaaaccaggatggatgcctcacatagatcatgatgattcaatccaaaggcactttgcagtgcagtccacatgtgcataaggaccatggggagcttgtatttgggaattctgagattcctgatgtttacctacctagtctttctcttgctgccctgtatcctttgcctttaaataaaaatcttaagtgat

SEQ ID NO: 42476 - DNA, 4676 bp, Homo sapiens
  misc_feature (1300)..(1300): n is a, c, g, or t
  misc_feature (2594)..(2594): n is a, c, g, or t
ggttggctcttgcacttcctggctctctggacttggttatgtgattgagcctccatggcctccgtgtctttgtctgtcaatgggtttgattaaagcgttgacctcataggttcttaggaggattaatgagaacattttatgtaaagctgcttacatggagccttggtatgtgccggaaagctttagccctttattaaaagtgacagcagacccagcacggtggctcatgcctgtaatcccagcactttgggaggctgaggcgggcagatcacttggggtcaggagttcgagaccagctactcgggaggcagaggcaggagaatcgcttgaacctggggtgcagaggttgcagtaagctgagctcgcaccactgcactccagcctgagtgacagagtgaaactcagtctcaaaaaaaaaaaaaaaaaaagagtggcagtagtggtgggggagacccccatcccccttgctggggtttcctaggaaagaaggctggtgagagctgttgctggtggtgggccctgagccgcagggtctgagggcctaccctgtgctaccccagagctgcctgagaactggacagacacgcgggagacgctgctggaggggatgctgttcagcctcaagtacctgggcatgacgctagtggagcagcccaagggtgaggagctgtcggccgccgccatcaagaggatcgtggctacagctaaggccagtgggaagaagctgcagaaggtgactctgaaggtgtcgccacggggaattatcctgacagacaacctcaccaaccagctcattgagaacgtgtccatatacaggatctcctattgcacagcagacaagatgcacgacaaggtgtttgcatacatcgcccagagccagcacaaccagagcctcgagtgccacgccttcctctgcaccaagcggaagatggcacaggctgttaccctcaccgtagcccaggccttcaaagtcgcctttgagttttggcaggtgtccaaggaagagaaagagaagagggacaaagccagccaagagggaggggacgtcctgggggcccgccaagactgcaccccccccttgaagagcttggtcgccactgggaacctgctggacttagaggagacggctaaggccccgctgtccacggtcagcgccaacaccaccaacatggacgaggtgccgcggccacaagccttgagtggcagcagtgttgtctgggtgagtggttgtgtggccagcagatcggtgatcctcagcctgacctctgggtgagcctggggctgctccagggaccaggcnctgggacccgtgacttgtgggcctctgggaggaccagacccagcccggtagtgcccaggcgcaggataggggatgaacaatgtcccttttgaacctgaggctgcatccccaacaggcttggctcccagcacagctgtctcctcacaatgcttggcctcttggcctgagcgtccacggctctgcccaccacaagaccagccaaaggcgcccttgttcttggtgtggcagagctcgctcctaccacccctccccctcagccgcctgaatgaggacccagagacttgggcagtcaccagcttggtccctgactccctcagggactcagggcaagccccctgacctctctgtctcagctttttcatctcagtaagggtgatgacctctgccaacggaatctccccgaggaacctgaaatttaattttaatttttcatttggaaataatttcagactgtgttacaaaattagtacagagaattcctgttcacccgtcatccagattccccaattgttaacatcttgcatgaccacattacactggtcagaatcaggaaacaaacacgatactgtgctgttatataatctatagaacttacacatttctccaggtgccccttcagtgtcctgtttctggcccaggatccattgcagaatcacatgttaacttgtcgtctctttaatttttaaaaatctgggtactgggggctcccctggtgtccctcgagcctgttctctgctgtttgggaaccacccttgccacttgcccatcctcaccagaaggccatggagggacctcacctgtcgcttttctgctgaggctgtgggactcctggcatcagttatccctcatgaacttggaattttggcttggcttttggaagtaaatgaaggcaagaaaactcccttccccaccctcttccttttggaatttgaaagccatagaagtcatcaggtccaatgccctcctcttattgaaggaaaagctgagtttcaacgtggagcagtgacttgcccaaggtctcacgggcaggtagcatggaccagggcactgaacccacctgggtctccagacaccctgggacatggcctttctcctctcccacgtctccagctttgggtccttgggctgagatgctggcgatgcacccaggcaggaggcctgcctgaggccgtgcctccaggcgcccaccctgagcttgtgtcctgagtccctgtagcttacccagggctgggacaagccccagctgtgagcatgggctcccccaaacatagttcttatctcctgctttgttttncccaaggagctggatgatggcctggatgaagcgttttcgaggcttgcccagtctcggacaaaccctcaggtcctggacactggcctgacagcccaggacatgcattacgcccagtgcctctcgcctgtcgactgggacaagcctgacagcagcggcacagagcaggatgacctcttcagcttctgagggcccggggccagccggacacaagcggccctgacacgtgatggaccaaagccacctgctgcgggggagccagttctggggcccgcctgccacctctcccagccctcagcattgtcagcctgaagatcagagctgcagccagtcaggcaggggagagatttttcttttaagccctgctctttctctgagaaccaaaagatgccttgaatatttattcagtgacttctggcttatgctcagaagccagtctgcgtcaggcacgtctcctgctgcgtgacatgtgcagtgctgtaatcggctcccgcttgctctcctggagcaagctctgccctggctgtgggtatcaggactgtgaccaaagcatttctagtcccttctctctttctaaggacccaaatttccctgggggcatcctgcttcctgaaagctgttggatttcagtgatttttccccccaccccccagcacaggagagcacccacagccgcagaaggggaatgtgtcctcctgctctgcttcctcagggcccagcaggcgggggtttgagccctggaccccaggctcttagagactaaggggcagctcctgaccaaagacgatacagcttggcactttaaagcattaacagcaggtgtgaccctgagggctcctccatggtgctgcattgagtccagctttccttctgcccttcctccaggagaaggggcccaaggtccccgtggatggtctccacctgtgcttggaaccagtgtaactggctgctccctgctcccagggactgacacggggatcatctctgtgaccgccctccgtcgggcccctgcctgccttctcccctccacgcaaggctgtgctcttcctctggtttctgtgtgtccgtttgagtgtctgcgccccgcctccccatacttcctgggatgatgtgtgaaacctgacacctagatttatttggaaatattctatgaccactttacagatgaggaaactgaggcctcaagcgtggaggggtagagtgaagagtagaacccaggtctgatgccaaagctgctttcttctctgcctcctcctcacgcaactcacacctccttttcttctagctttgttgtcctcccaggaaccaaaaaaccccagctattttctgaccaaaatgtgtttcataacaaaccatctggtgcctttccacacagaactggcaggagcctcgtgtcctgctagctgtctctcttgttgatttccgtgaaaatgcaagtgtttgaagtctgctcattccgagggtgaaacaaaatccaaccctgtcagaatcatgctgttctctttgctgacactgtgaccctgggtcgggacagaccagcagcaatctgtctttagaatctctttccttcctccccttttgcccccgtggggctcccggcatcctgaaagccagcaaagcctccagcatcttttccatcctgaggtgcctcccagtggcctggcttgtcggagcaagtttcatcagccctagggaaaacacggccctcctgggaacctccttacctggagtaaccggacaccttagacggaggtgcctgagggtggggtgggatttgcagggtcattatcagaacatgaggataacttccttgcccctgctctgtagccacctccttggcaccggcctctatttgtcataaggcggcgtgggcgaggcctgacacaggccagccttggcacgaggggggccaggggttctgagaagcgctgccctgtgagagccatgctggccttcgtctccatctctggttgacgggctgtccgtgtgcctcctgtgtgtctgcagacaagtcttgctgtgctttatttgtgaaactttaatgaggaaaaaacaaataataaatgttctcgttttgaaactcaa

SEQ ID NO: 42477 - DNA, 2883 bp, Homo sapiens
ggaaagtttttcctgacggagttttggctgcggcagcggcggcggcggccggagcgggccatggacgcgctcaagtcggcggggcgggcgctgatccggagccccagcttggccaagcagagctgggggggcggtggccggcaccgcaagctgcctgagaactggacagacacgcgggagacgctgctggaggggatgctgttcagcctcaagtacctgggcatgacgctagtggagcagcccaagggtgaggagctgtcggccgccgccatcaagaggatcgtggctacagctaaggccagtgggaagaagctgcagaaggtgactctgaaggtgtcgccacggggaattatcctgacagacaacctcaccaaccagctcattgagaacgtgtccatatacaggatctcctattgcacagcagacaagatgcacgacaaggtgtttgcatacatcgcccagagccagcacaaccagagcctcgagtgccacgccttcctctgcaccaagcggaagatggcacaggctgttaccctcaccgtagcccaggccttcaaagtcgcctttgagttttggcaggtgtccaaggaagagaaagagaagagggacaaagccagccaagagggaggggacgtcctgggggcccgccaagactgcaccccccccttgaagagcttggtcgccactgggaacctgctggacttagaggagacggctaaggccccgctgtccacggtcagcgccaacaccaccaacatggacgaggtgccgcggccacaagccttgagtggcagcagtgttgtctgggagctggatgatggcctggatgaagcgttttcgaggcttgcccagtctcggacaaaccctcaggtcctggacactggcctgacagcccaggacatgcattacgcccagtgcctctcgcctgtcgactgggacaagcctgacagcagcggcacagagcaggatgacctcttcagcttctgagggcccggggccagccggacacaagcggccctgacacgtgatggaccaaagccacctgctgcgggggagccagttctggggcccgcctgccacctctcccagccctcagcattgtcagcctgaagatcagagctgcagccagtcaggcaggggagagatttttcttttaagccctgctctttctctgagaaccaaaagatgccttgaatatttattcagtgacttctggcttatgctcagaagccagtctgcgtcaggcacgtctcctgctgcgtgacatgtgcagtgctgtaatcggctcccgcttgctctcctggagcaagctctgccctggctgtgggtatcaggactgtgaccaaagcatttctagtcccttctctctttctaaggacccaaatttccctgggggcatcctgcttcctgaaagctgttggatttcagtgatttttccccccaccccccagcacaggagagcacccacagccgcagaaggggaatgtgtcctcctgctctgcttcctcagggcccagcaggcgggggtttgagccctggaccccaggctcttagagactaaggggcagctcctgaccaaagacgatacagcttggcactttaaagcattaacagcaggtgtgaccctgagggctcctccatggtgctgcattgagtccagctttccttctgcccttcctccaggagaaggggcccaaggtccccgtggatggtctccacctgtgcttggaaccagtgtaactggctgctccctgctcccagggactgacacggggatcatctctgtgaccgccctccgtcgggcccctgcctgccttctcccctccacgcaaggctgtgctcttcctctggtttctgtgtgtccgtttgagtgtctgcgccccgcctccccatacttcctgggatgatgtgtgaaacctgacacctagatttatttggaaatattctatgaccactttacagatgaggaaactgaggcctcaagcgtggaggggtagagtgaagagtagaacccaggtctgatgccaaagctgctttcttctctgcctcctcctcacgcaactcacacctccttttcttctagctttgttgtcctcccaggaaccaaaaaaccccagctattttctgaccaaaatgtgtttcataacaaaccatctggtgcctttccacacagaactggcaggagcctcgtgtcctgctagctgtctctcttgttgatttccgtgaaaatgcaagtgtttgaagtctgctcattccgagggtgaaacaaaatccaaccctgtcagaatcatgctgttctctttgctgacactgtgaccctgggtcgggacagaccagcagcaatctgtctttagaatctctttccttcctccccttttgcccccgtggggctcccggcatcctgaaagccagcaaagcctccagcatcttttccatcctgaggtgcctcccagtggcctggcttgtcggagcaagtttcatcagccctagggaaaacacggccctcctgggaacctccttacctggagtaaccggacaccttagacggaggtgcctgagggtggggtgggatttgcagggtcattatcagaacatgaggataacttccttgcccctgctctgtagccacctccttggcaccggcctctatttgtcataaggcggcgtgggcgaggcctgacacaggccagccttggcacgaggggggccaggggttctgagaagcgctgccctgtgagagccatgctggccttcgtctccatctctggttgacgggctgtccgtgtgcctcctgtgtgtctgcagacaagtcttgctgtgctttatttgtgaaactttaatgaggaaaaaacaaataataaatgttctcgttttgaaactcaa

SEQ ID NO: 42478 - DNA, 2558 bp, Homo sapiens
  misc_feature (476)..(476): n is a, c, g, or t
acttctgggtctggacctgtgctattttggctattattgattcagtggacttgccaggctaagaataggtcctgtcctcttttatttgccccacctcttccttttggaatttgaaagccatagaagtcatcaggtccaatgccctcctcttattgaaggaaaagctgagtttcaacgtggagcagtgacttgcccaaggtctcacgggcaggtagcatggaccagggcactgaacccacctgggtctccagacaccctgggacatggcctttctcctctcccacgtctccagctttgggtccttgggctgagatgctggcgatgcacccaggcaggaggcctgcctgaggccgtgcctccaggcgcccaccctgagcttgtgtcctgagtccctgtagcttacccagggctgggacaagccccagctgtgagcatgggctcccccaaacatagttcttatctcctgctttgttttncccaaggagctggatgatggcctggatgaagcgttttcgaggcttgcccagtctcggacaaaccctcaggtcctggacactggcctgacagcccaggacatgcattacgcccagtgcctctcgcctgtcgactgggacaagcctgacagcagcggcacagagcaggatgacctcttcagcttctgagggcccggggccagccggacacaagcggccctgacacgtgatggaccaaagccacctgctgcgggggagccagttctggggcccgcctgccacctctcccagccctcagcattgtcagcctgaagatcagagctgcagccagtcaggcaggggagagatttttcttttaagccctgctctttctctgagaaccaaaagatgccttgaatatttattcagtgacttctggcttatgctcagaagccagtctgcgtcaggcacgtctcctgctgcgtgacatgtgcagtgctgtaatcggctcccgcttgctctcctggagcaagctctgccctggctgtgggtatcaggactgtgaccaaagcatttctagtcccttctctctttctaaggacccaaatttccctgggggcatcctgcttcctgaaagctgttggatttcagtgatttttccccccaccccccagcacaggagagcacccacagccgcagaaggggaatgtgtcctcctgctctgcttcctcagggcccagcaggcgggggtttgagccctggaccccaggctcttagagactaaggggcagctcctgaccaaagacgatacagcttggcactttaaagcattaacagcaggtgtgaccctgagggctcctccatggtgctgcattgagtccagctttccttctgcccttcctccaggagaaggggcccaaggtccccgtggatggtctccacctgtgcttggaaccagtgtaactggctgctccctgctcccagggactgacacggggatcatctctgtgaccgccctccgtcgggcccctgcctgccttctcccctccacgcaaggctgtgctcttcctctggtttctgtgtgtccgtttgagtgtctgcgccccgcctccccatacttcctgggatgatgtgtgaaacctgacacctagatttatttggaaatattctatgaccactttacagatgaggaaactgaggcctcaagcgtggaggggtagagtgaagagtagaacccaggtctgatgccaaagctgctttcttctctgcctcctcctcacgcaactcacacctccttttcttctagctttgttgtcctcccaggaaccaaaaaaccccagctattttctgaccaaaatgtgtttcataacaaaccatctggtgcctttccacacagaactggcaggagcctcgtgtcctgctagctgtctctcttgttgatttccgtgaaaatgcaagtgtttgaagtctgctcattccgagggtgaaacaaaatccaaccctgtcagaatcatgctgttctctttgctgacactgtgaccctgggtcgggacagaccagcagcaatctgtctttagaatctctttccttcctccccttttgcccccgtggggctcccggcatcctgaaagccagcaaagcctccagcatcttttccatcctgaggtgcctcccagtggcctggcttgtcggagcaagtttcatcagccctagggaaaacacggccctcctgggaacctccttacctggagtaaccggacaccttagacggaggtgcctgagggtggggtgggatttgcagggtcattatcagaacatgaggataacttccttgcccctgctctgtagccacctccttggcaccggcctctatttgtcataaggcggcgtgggcgaggcctgacacaggccagccttggcacgaggggggccaggggttctgagaagcgctgccctgtgagagccatgctggccttcgtctccatctctggttgacgggctgtccgtgtgcctcctgtgtgtctgcagacaagtcttgctgtgctttatttgtgaaactttaatgaggaaaaaacaaataataaatgttctcgttttgaaactcaa

SEQ ID NO: 42479 - DNA, 2535 bp, Homo sapiens
ctggcttgtgactgtgagcaggtcccttcaccgctcagtctcggttttcccatctgaaaaatgggaacagccgtctccctccccaaaggtgcttgtgaggattaactgacatctgaaaggtttctttcctcccggctggaaacctgaaactgccccttgaggttggccaccgctaatcacccctgcccggtgattgctggggacagagtgctggggtctgaggctccaacatgttgtgccttggtcctgcagagaaagagaagagggacaaagccagccaagagggaggggacgtcctgggggcccgccaagactgcaccccccccttgaagagcttggtcgccactgggaacctgctggacttagaggagacggctaaggccccgctgtccacggtcagcgccaacaccaccaacatggacgaggtgccgcggccacaagccttgagtggcagcagtgttgtctgggtgagtggttgtgtggccagcagatcggcttgcccagtctcggacaaaccctcaggtcctggacactggcctgacagcccaggacatgcattacgcccagtgcctctcgcctgtcgactgggacaagcctgacagcagcggcacagagcaggatgacctcttcagcttctgagggcccggggccagccggacacaagcggccctgacacgtgatggaccaaagccacctgctgcgggggagccagttctggggcccgcctgccacctctcccagccctcagcattgtcagcctgaagatcagagctgcagccagtcaggcaggggagagatttttcttttaagccctgctctttctctgagaaccaaaagatgccttgaatatttattcagtgacttctggcttatgctcagaagccagtctgcgtcaggcacgtctcctgctgcgtgacatgtgcagtgctgtaatcggctcccgcttgctctcctggagcaagctctgccctggctgtgggtatcaggactgtgaccaaagcatttctagtcccttctctctttctaaggacccaaatttccctgggggcatcctgcttcctgaaagctgttggatttcagtgatttttccccccaccccccagcacaggagagcacccacagccgcagaaggggaatgtgtcctcctgctctgcttcctcagggcccagcaggcgggggtttgagccctggaccccaggctcttagagactaaggggcagctcctgaccaaagacgatacagcttggcactttaaagcattaacagcaggtgtgaccctgagggctcctccatggtgctgcattgagtccagctttccttctgcccttcctccaggagaaggggcccaaggtccccgtggatggtctccacctgtgcttggaaccagtgtaactggctgctccctgctcccagggactgacacggggatcatctctgtgaccgccctccgtcgggcccctgcctgccttctcccctccacgcaaggctgtgctcttcctctggtttctgtgtgtccgtttgagtgtctgcgccccgcctccccatacttcctgggatgatgtgtgaaacctgacacctagatttatttggaaatattctatgaccactttacagatgaggaaactgaggcctcaagcgtggaggggtagagtgaagagtagaacccaggtctgatgccaaagctgctttcttctctgcctcctcctcacgcaactcacacctccttttcttctagctttgttgtcctcccaggaaccaaaaaaccccagctattttctgaccaaaatgtgtttcataacaaaccatctggtgcctttccacacagaactggcaggagcctcgtgtcctgctagctgtctctcttgttgatttccgtgaaaatgcaagtgtttgaagtctgctcattccgagggtgaaacaaaatccaaccctgtcagaatcatgctgttctctttgctgacactgtgaccctgggtcgggacagaccagcagcaatctgtctttagaatctctttccttcctccccttttgcccccgtggggctcccggcatcctgaaagccagcaaagcctccagcatcttttccatcctgaggtgcctcccagtggcctggcttgtcggagcaagtttcatcagccctagggaaaacacggccctcctgggaacctccttacctggagtaaccggacaccttagacggaggtgcctgagggtggggtgggatttgcagggtcattatcagaacatgaggataacttccttgcccctgctctgtagccacctccttggcaccggcctctatttgtcataaggcggcgtgggcgaggcctgacacaggccagccttggcacgaggggggccaggggttctgagaagcgctgccctgtgagagccatgctggccttcgtctccatctctggttgacgggctgtccgtgtgcctcctgtgtgtctgcagacaagtcttgctgtgctttatttgtgaaactttaatgaggaaaaaacaaataataaatgttctcgttttgaaactcaa

SEQ ID NO: 42480 - DNA, 2910 bp, Homo sapiens
ggaaagtttttcctgacggagttttggctgcggcagcggcggcggcggccggagcgggccatggacgcgctcaagtcggcggggcgggcgctgatccggagccccagcttggccaagcagagctgggggggcggtggccggcaccgcaagctgcctgagaactggacagacacgcgggagacgctgctggaggggatgctgttcagcctcaagtacctgggcatgacgctagtggagcagcccaagggtgaggagctgtcggccgccgccatcaagaggatcgtggctacagctaaggccagtgggaagaagctgcagaaggtgactctgaaggtgtcgccacggggaattatcctgacagacaacctcaccaaccagctcattgagaacgtgtccatatacaggatctcctattgcacagcagacaagatgcacgacaaggtgtttgcatacatcgcccagagccagcacaaccagagcctcgagtgccacgccttcctctgcaccaagcggaagatggcacaggctgttaccctcaccgtagcccaggccttcaaagtcgcctttgagttttggcaggtgtccaaggaagagaaagagaagagggacaaagccagccaagagggaggggacgtcctgggggcccgccaagactgcaccccccccttgaagagcttggtcgccactgggaacctgctggacttagaggagacggctaaggccccgctgtccacggtcagcgccaacaccaccaacatggacgaggtgccgcggccacaagccttgagtggcagcagtgttgtctgggagctggatgatggcctggatgaagcgttttcgaggcttgcccagtctcggacaaaccctcaggtcctggacactggcctgacagcccaggacatgcattacgcccagtgcctctcgcctgtcgactgggacaagcctgacagcagcggcacagagcaggatgacctcttcagcttctgagggcccggggccagccggacacaagcggccctgacacgtgatggaccaaagccacctgctgcgggggagccagttctggggcccgcctgccacctctcccagccctcagcattgtcagcctgaagatcagagctgcagccagtcaggcaggggagagatttttcttttaagccctgctctttctctgagaaccaaaagatgccttgaatatttattcagtgacttctggcttatgctcagaagccagtctgcgtcaggcacgtctcctgctgcgtgacatgtgcagtgctgtaatcggctcccgcttgctctcctggagcaagctctgccctggctgtgggtatcaggactgtgaccaaagcatttctagtcccttctctctttctaaggacccaaatttccctgggggcatcctgcttcctgaaagctgttggatttcagtgatttttccccccaccccccagcacaggagagcacccacagccgcagaaggggaatgtgtcctcctgctctgcttcctcagggcccagcaggcgggggtttgagccctggaccccaggctcttagagactaaggggcagctcctgaccaaagacgatacagcttggcactttaaagcattaacagcaggtgtgaccctgagggctcctccatggtgctgcattgagtccagctttccttctgcccttcctccaggagaaggggcccaaggtccccgtggatggtctccacctgtgcttggaaccagtgtaactggctgctccctgctcccagggactgacacggggatcatctctgtgaccgccctccgtcgggcccctgcctgccttctcccctccacgcaaggctgtgctcttcctctggtttctgtgtgtccgtttgagtgtctgcgccccgcctccccatacttcctgggatgatgtgtgaaacctgacacctagatttatttggaaatattctatgaccactttacagatgaggaaactgaggcctcaagcgtggaggggtagagtgaagagtagaacccaggtctgatgccaaagctgctttcttctctgcctcctcctcacgcaactcacacctccttttcttctagctttgttgtcctcccaggaaccaaaaaaccccagctattttctgaccaaaatgtgtttcataacaaaccatctggtgcctttccacacagaactggcaggagcctcgtgtcctgctagctgtctctcttgttgatttccgtgaaaatgcaagtgtttgaagtctgctcattccgagggtgaaacaaaatccaaccctgtcagaatcatgctgttctctttgctgacactgtgaccctgggtcgggacagaccagcagcaatctgtctttagaatctctttccttcctccccttttgcccccgtggggctcccggcatcctgaaagccagcaaagcctccagcatcttttccatcctgaggtgcctcccagtggcctggcttgtcggagcaagtttcatcagccctagggaaaacacggccctcctgggaacctccttacctggagtaaccggacaccttagacggaggtgcctgagggtggggtgggatttgcagggtcattatcagaacatgaggataacttccttgcccctgctctgtagccacctccttggcaccggcctctatttgtcataaggcggcgtgggcgaggcctgacacaggccagccttggcacgaggggggccaggggttctgagaagcgctgccctgtgagagccatgctggccttcgtctccatctctggttgacgggctgtccgtgtgcctcctgtgtgtctgcagacaagtcttgctgtgctttatttgtgaaactttaatgaggaaaaaacaaataataaatgttctcgttttgaaactcaaaaaacagaccaacaccacgccaaccaa

SEQ ID NO: 42481 - DNA, 3257 bp, Homo sapiens
ggaaagtttttcctgacggagttttggctgcggcagcggcggcggcggccggagcgggccatggacgcgctcaagtcggcggggcgggcgctgatccggagccccagcttggccaagcagagctgggggggcggtggccggcaccgcaagctgcctgagaactggacagacacgcgggagacgctgctggaggggatgctgttcagcctcaagtacctgggcatgacgctagtggagcagcccaagggtgaggagctgtcggccgccgccatcaagaggatcgtggctacagctaaggccagtgggaagaagctgcagaaggtgactctgaaggtgtcgccacggggaattatcctgacagacaacctcaccaaccagctcattgagaacgtgtccatatacaggatctcctattgcacagcagacaagatgcacgacaaggtgtttgcatacatcgcccagagccagcacaaccagagcctcgagtgccacgccttcctctgcaccaagcggaagatggcacaggctgttaccctcaccgtagcccaggccttcaaagtcgcctttgagttttggcaggtgtccaaggaagagaaagagaagagggacaaagccagccaagagggaggggacgtcctgggggcccgccaagactgcaccccccccttgaagagcttggtcgccactgggaacctgctggacttagaggagacggctaaggccccgctgtccacggtcagcgccaacaccaccaacatggacgaggtgccgcggccacaagccttgagtggcagcagtgttgtctgggagctggatgatggcctggatgaagcgttttcgaggcttgcccagtctcggacaaaccctcaggtcctggacactggcctgacagcccaggacatgcattacgcccagtgcctctcgcctgtcgactgggacaagcctgacagcagcggcacagagcaggatgacctcttcagcttctgagggcccggggccagccggacacaagcggccctgacacgtgatggaccaaagccacctgctgcgggggagccagttctggggcccgcctgccacctctcccagccctcagcattgtcagcctgaagatcagagctgcagccagtcaggcaggggagagatttttcttttaagccctgctctttctctgagaaccaaaagatgccttgaatatttattcagtgacttctggcttatgctcagaagccagtctgcgtcaggcacgtctcctgctgcgtgacatgtgcagtgctgtaatcggctcccgcttgctctcctggagcaagctctgccctggctgtgggtatcaggactgtgaccaaagcatttctagtcccttctctctttctaaggacccaaatttccctgggggcatcctgcttcctgaaagctgttggatttcagtgatttttccccccaccccccagcacaggagagcacccacagccgcagaaggggaatgtgtcctcctgctctgcttcctcagggcccagcaggcgggggtttgagccctggaccccaggctcttagagactaaggggcagctcctgaccaaagacgatacagcttggcactttaaagcattaacagcaggtgtgaccctgagggctcctccatggtgctgcattgagtccagctttccttctgcccttcctccaggagaaggggcccaaggtccccgtggatggtctccacctgtgcttggaaccagtgtaactggctgctccctgctcccagggactgacacggggatcatctctgtgaccgccctccgtcgggcccctgcctgccttctcccctccacgcaaggctgtgctcttcctctggtttctgtgtgtccgtttgagtgtctgcgccccgcctccccatacttcctgggatgatgtgtgaaacctgacacctagatttatttggaaatattctatgaccactttacagatgaggaaactgaggcctcaagcgtggaggggtagagtgaagagtagaacccaggtctgatgccaaagctgctttcttctctgcctcctcctcacgcaactcacacctccttttcttctagctttgttgtcctcccaggaaccaaaaaaccccagctattttctgaccaaaatgtgtttcataacaaaccatctggtgcctttccacacagaactggcaggagcctcgtgtcctgctagctgtctctcttgttgatttccgtgaaaatgcaagtgtttgaagtctgctcattccgagggtgaaacaaaatccaaccctgtcagaatcatgctgttctctttgctgacactgtgaccctgggtcgggacagaccagcagcaatctgtctttagaatctctttccttcctccccttttgcccccgtggggctcccggcatcctgaaagccagcaaagcctccagcatcttttccatcctgaggtgcctcccagtggcctggcttgtcggagcaagtttcatcagccctagggaaaacacggccctcctgggaacctccttacctggagtaaccggacaccttagacggaggtgcctgagggtggggtgggatttgcagggtcattatcagaacatgaggataacttccttgcccctgctctgtagccacctccttggcaccggcctctatttgtcataaggcggcgtgggcgaggcctgacacaggccagccttggcacgaggggggccaggggttctgagaagcgctgccctgtgagagccatgctggccttcgtctccatctctggttgacgggctgtccgtgtgcctcctgtgtgtctgcagacaagtcttgctgtgctttatttgtgaaactttaatgaggaaaaaacaaataataaatgttctcgttttgaaactcaaaaaaaaaaaaaaaagaaagaaaaaaaaaaaaaaaaaagaggaaaaaagaagaaaagaaaaaagaagaaaaaaaaaaagaggggggcgggcgctgcccacagaaagagtcccccccaggggggggcaccgccaatgaggcacgcaccaccgttgtctgagaaagaagagggcgcgccccaacaagggagggggcagctcaataaatcaccacggcaacgaccgggccgcgatataacaaacggcgccgccgaggagcaaaacgcgagcccgaggcgcgctcggccgggcgggagaccccccatctcggggggggagctacaactgtggcgggacacccgaccccgagagagtcggccgcgcgccgggcatagtac

SEQ ID NO: 42482 - DNA, 4265 bp, Homo sapiens
  misc_feature (1300)..(1300): n is a, c, g, or t
ggttggctcttgcacttcctggctctctggacttggttatgtgattgagcctccatggcctccgtgtctttgtctgtcaatgggtttgattaaagcgttgacctcataggttcttaggaggattaatgagaacattttatgtaaagctgcttacatggagccttggtatgtgccggaaagctttagccctttattaaaagtgacagcagacccagcacggtggctcatgcctgtaatcccagcactttgggaggctgaggcgggcagatcacttggggtcaggagttcgagaccagctactcgggaggcagaggcaggagaatcgcttgaacctggggtgcagaggttgcagtaagctgagctcgcaccactgcactccagcctgagtgacagagtgaaactcagtctcaaaaaaaaaaaaaaaaaaagagtggcagtagtggtgggggagacccccatcccccttgctggggtttcctaggaaagaaggctggtgagagctgttgctggtggtgggccctgagccgcagggtctgagggcctaccctgtgctaccccagagctgcctgagaactggacagacacgcgggagacgctgctggaggggatgctgttcagcctcaagtacctgggcatgacgctagtggagcagcccaagggtgaggagctgtcggccgccgccatcaagaggatcgtggctacagctaaggccagtgggaagaagctgcagaaggtgactctgaaggtgtcgccacggggaattatcctgacagacaacctcaccaaccagctcattgagaacgtgtccatatacaggatctcctattgcacagcagacaagatgcacgacaaggtgtttgcatacatcgcccagagccagcacaaccagagcctcgagtgccacgccttcctctgcaccaagcggaagatggcacaggctgttaccctcaccgtagcccaggccttcaaagtcgcctttgagttttggcaggtgtccaaggaagagaaagagaagagggacaaagccagccaagagggaggggacgtcctgggggcccgccaagactgcaccccccccttgaagagcttggtcgccactgggaacctgctggacttagaggagacggctaaggccccgctgtccacggtcagcgccaacaccaccaacatggacgaggtgccgcggccacaagccttgagtggcagcagtgttgtctgggtgagtggttgtgtggccagcagatcggtgatcctcagcctgacctctgggtgagcctggggctgctccagggaccaggcnctgggacccgtgacttgtgggcctctgggaggaccagacccagcccggtagtgcccaggcgcaggataggggatgaacaatgtcccttttgaacctgaggctgcatccccaacaggcttggctcccagcacagctgtctcctcacaatgcttggcctcttggcctgagcgtccacggctctgcccaccacaagaccagccaaaggcgcccttgttcttggtgtggcagagctcgctcctaccacccctccccctcagccgcctgaatgaggacccagagacttgggcagtcaccagcttggtccctgactccctcagggactcagggcaagccccctgacctctctgtctcagctttttcatctcagtaagggtgatgacctctgccaacggaatctccccgaggaacctgaaatttaattttaatttttcatttggaaataatttcagactgtgttacaaaattagtacagagaattcctgttcacccgtcatccagattccccaattgttaacatcttgcatgaccacattacactggtcagaatcaggaaacaaacacgatactgtgctgttatataatctatagaacttacacatttctccaggtgccccttcagtgtcctgtttctggcccaggatccattgcagaatcacatgttaacttgtcgtctctttaatttttaaaaatctgggtactgggggctcccctggtgtccctcgagcctgttctctgctgtttgggaaccacccttgccacttgcccatcctcaccagaaggccatggagggacctcacctgtcgcttttctgctgaggctgtgggactcctggcatcagttatccctcatgaacttggaattttggcttggcttttggaagtaaatgaaggagctggatgatggcctggatgaagcgttttcgaggcttgcccagtctcggacaaaccctcaggtcctggacactggcctgacagcccaggacatgcattacgcccagtgcctctcgcctgtcgactgggacaagcctgacagcagcggcacagagcaggatgacctcttcagcttctgagggcccggggccagccggacacaagcggccctgacacgtgatggaccaaagccacctgctgcgggggagccagttctggggcccgcctgccacctctcccagccctcagcattgtcagcctgaagatcagagctgcagccagtcaggcaggggagagatttttcttttaagccctgctctttctctgagaaccaaaagatgccttgaatatttattcagtgacttctggcttatgctcagaagccagtctgcgtcaggcacgtctcctgctgcgtgacatgtgcagtgctgtaatcggctcccgcttgctctcctggagcaagctctgccctggctgtgggtatcaggactgtgaccaaagcatttctagtcccttctctctttctaaggacccaaatttccctgggggcatcctgcttcctgaaagctgttggatttcagtgatttttccccccaccccccagcacaggagagcacccacagccgcagaaggggaatgtgtcctcctgctctgcttcctcagggcccagcaggcgggggtttgagccctggaccccaggctcttagagactaaggggcagctcctgaccaaagacgatacagcttggcactttaaagcattaacagcaggtgtgaccctgagggctcctccatggtgctgcattgagtccagctttccttctgcccttcctccaggagaaggggcccaaggtccccgtggatggtctccacctgtgcttggaaccagtgtaactggctgctccctgctcccagggactgacacggggatcatctctgtgaccgccctccgtcgggcccctgcctgccttctcccctccacgcaaggctgtgctcttcctctggtttctgtgtgtccgtttgagtgtctgcgccccgcctccccatacttcctgggatgatgtgtgaaacctgacacctagatttatttggaaatattctatgaccactttacagatgaggaaactgaggcctcaagcgtggaggggtagagtgaagagtagaacccaggtctgatgccaaagctgctttcttctctgcctcctcctcacgcaactcacacctccttttcttctagctttgttgtcctcccaggaaccaaaaaaccccagctattttctgaccaaaatgtgtttcataacaaaccatctggtgcctttccacacagaactggcaggagcctcgtgtcctgctagctgtctctcttgttgatttccgtgaaaatgcaagtgtttgaagtctgctcattccgagggtgaaacaaaatccaaccctgtcagaatcatgctgttctctttgctgacactgtgaccctgggtcgggacagaccagcagcaatctgtctttagaatctctttccttcctccccttttgcccccgtggggctcccggcatcctgaaagccagcaaagcctccagcatcttttccatcctgaggtgcctcccagtggcctggcttgtcggagcaagtttcatcagccctagggaaaacacggccctcctgggaacctccttacctggagtaaccggacaccttagacggaggtgcctgagggtggggtgggatttgcagggtcattatcagaacatgaggataacttccttgcccctgctctgtagccacctccttggcaccggcctctatttgtcataaggcggcgtgggcgaggcctgacacaggccagccttggcacgaggggggccaggggttctgagaagcgctgccctgtgagagccatgctggccttcgtctccatctctggttgacgggctgtccgtgtgcctcctgtgtgtctgcagacaagtcttgctgtgctttatttgtgaaactttaatgaggaaaaaacaaataataaatgttctcgttttgaaactcaa

SEQ ID NO: 42483 - DNA, 3073 bp, Homo sapiens
ggaaagtttttcctgacggagttttggctgcggcagcggcggcggcggccggagcgggccatggacgcgctcaagtcggcggggcgggcgctgatccggagccccagcttggccaagcagagctgggggggcggtggccggcaccgcaagctgcctgagaactggacagacacgcgggagacgctgctggaggggatgctgttcagcctcaagtacctgggcatgacgctagtggagcagcccaagggtgaggagctgtcggccgccgccatcaagaggatcgtggctacagctaaggccagtgggaagaagctgcagaaggtgactctgaaggtgtcgccacggggaattatcctgacagacaacctcaccaaccagctcattgagaacgtgtccatatacaggatctcctattgcacagcagacaagatgcacgacaaggtgtttgcatacatcgcccagagccagcacaaccagagcctcgagtgccacgccttcctctgcaccaagcggaagatggcacaggctgttaccctcaccgtagcccaggccttcaaagtcgcctttgagttttggcaggtgtccaaggaagagaaagagaagagggacaaagccagccaagagggaggggacgtcctgggggcccgccaagactgcaccccccccttgaagagcttggtcgccactgggaacctgctggacttagaggagacggctaaggccccgctgtccacggtcagcgccaacaccaccaacatggacgaggtgccgcggccacaagccttgagtggcagcagtgttgtctgggagctggatgatggcctggatgaagcgttttcgaggcttgcccagtctcggacaaaccctcaggtcctggacactggcctgacagcccaggacatgcattacgcccagtgcctctcgcctgtcgactgggacaagcctgacagcagcggcacagagcaggatgacctcttcagcttctgagggcccggggccagccggacacaagcggccctgacacgtgatggaccaaagccacctgctgcgggggagccagttctggggcccgcctgccacctctcccagccctcagcattgtcagcctgaagatcagagctgcagccagtcaggcaggggagagatttttcttttaagccctgctctttctctgagaaccaaaagatgccttgaatatttattcagtgacttctggcttatgctcagaagccagtctgcgtcaggcacgtctcctgctgcgtgacatgtgcagtgctgtaatcggctcccgcttgctctcctggagcaagctctgccctggctgtgggtatcaggactgtgaccaaagcatttctagtcccttctctctttctaaggacccaaatttccctgggggcatcctgcttcctgaaagctgttggatttcagtgatttttccccccaccccccagcacaggagagcacccacagccgcagaaggggaatgtgtcctcctgctctgcttcctcagggcccagcaggcgggggtttgagccctggaccccaggctcttagagactaaggggcagctcctgaccaaagacgatacagcttggcactttaaagcattaacagcaggtgtgaccctgagggctcctccatggtgctgcattgagtccagctttccttctgcccttcctccaggagaaggggcccaaggtccccgtggatggtctccacctgtgcttggaaccagtgtaactggctgctccctgctcccagggactgacacggggatcatctctgtgaccgccctccgtcgggcccctgcctgccttctcccctccacgcaaggctgtgctcttcctctggtttctgtgtgtccgtttgagtgtctgcgccccgcctccccatacttcctgggatgatgtgtgaaacctgacacctagatttatttggaaatattctatgaccactttacagatgaggaaactgaggcctcaagcgtggaggggtagagtgaagagtagaacccaggtctgatgccaaagctgctttcttctctgcctcctcctcacgcaactcacacctccttttcttctagctttgttgtcctcccaggaaccaaaaaaccccagctattttctgaccaaaatgtgtttcataacaaaccatctggtgcctttccacacagaactggcaggagcctcgtgtcctgctagctgtctctcttgttgatttccgtgaaaatgcaagtgtttgaagtctgctcattccgagggtgaaacaaaatccaaccctgtcagaatcatgctgttctctttgctgacactgtgaccctgggtcgggacagaccagcagcaatctgtctttagaatctctttccttcctccccttttgcccccgtggggctcccggcatcctgaaagccagcaaagcctccagcatcttttccatcctgaggtgcctcccagtggcctggcttgtcggagcaagtttcatcagccctagggaaaacacggccctcctgggaacctccttacctggagtaaccggacaccttagacggaggtgcctgagggtggggtgggatttgcagggtcattatcagaacatgaggataacttccttgcccctgctctgtagccacctccttggcaccggcctctatttgtcataaggcggcgtgggcgaggcctgacacaggccagccttggcacgaggggggccaggggttctgagaagcgctgccctgtgagagccatgctggccttcgtctccatctctggttgacgggctgtccgtgtgcctcctgtgtgtctgcagacaagtcttgctgtgctttatttgtgaaactttaatgaggaaaaaacaaataataaatgttctcgttttgaaactcaagaaaaaaaaaaaaaaaaaaaaaaaatttgggggcgcttgggacgaaaaagttttaaacacattgtggggggggggcccgggtttagggaatggcctagggtctagggactctggtgctgggtgggtctaccaaaaaagccgggggggcgcgttggaaccagggggtgggctgggttaaggggaggcatag

SEQ ID NO: 42484 - DNA, 588 bp, Homo sapiens
atatatactgaacatcatatgaaaaaaaaagcagaaaaagatggtgatcaccattccacaagacaaacaatttaagagaaaatagtcaacaaactgcattagaatgatctcatcatcatctcagcaagatgaaaatgagtcagtcaaattaaaagctatatatcctaacactccttatacagtttctacatctacaatttagccacaaaatgggaccacagccataaagctgcctcaaagtgggaaatcccagacaatttcctattccatacaaagcataagccagaaaaatacctgcctcacatttctaccctatcccaagctccaactacaggaaacccatcactattacagagacccaaaatcacagagatcatgtcaacatattttgatatataatctccaaaatactatcttaactgtgcaacttcattatcatattcctttagggacagaacacatatttaactcattttcaattcttttaaattgcaaacaataaatcctattaattctttcttaaattcctccaacttttcataactaagcagctgtttaaatctaatcaatgtcttgcccaatggatgc

SEQ ID NO: 42485 - DNA, 410 bp, Homo sapiens
aggcaactctcctctgtagagtgaaagactataatggtggccatgtagaaactaatattccagaaggagagagctccaagaaggggattccagtgaaccatatgtacactgtgtttgagagacattagttccccacggagaagggatggatagtctgtgcttcgggggtctaaggaaggcttcctgcaggtgctggtacctccttaggtctggggtggttccttctaagtttccttaccctgcctgcatcacctctgcctcttatgacctctgtgcaaagactgggaagggtcacccccaatggctgtgaacgaacctgtttgtgattctaaacagggcacgggaccatcctacaataaaaattacccagcctaaaatgccagtagtgccagtagtccctgtttagaaaa

SEQ ID NO: 42486 - DNA, 437 bp, Homo sapiens
atcgattgagcaggcagggggctgcatgcactggtaattagaatggaacagaacaggacagggattttcacagtgcttttccatacaatgtctgtaatctatagataacataaccgattaggtcaggggttgatctttaactaccaggcccagggtgtggcaccaggctgtctgcctgtgaatttcatttctgccttttaattttcatttcttctttctttggaggcagaaattgggcataagacaatatgaggggtggtctcctcccttactaaaaatataaaaattagccaggtgcagtggactgcacctgaagccccagctagtcccgaggctgaggcaggagaatcacttgcacctgtgaggaggttgcagtgagccgagatcatgccactgcactccagcctgggcaacagagcaagactccatctaaagca

SEQ ID NO: 42487 - DNA, 440 bp, Homo sapiens
gaatcgacaaagctaccaattcaagcagcctatttcagcacattctaaattattgcttaccctgcctatgccaggtcatacaccaggtggtttacacactttatctatcttaatcctcacttcaagatcatgagggaggtagaataaataagtcacttacccaggggtctggaagtaagcattctaattgttcaaaaagattttaaaagattatatgtagtccgggagtggtggctcatgtctgtaatcccagcactttgggaggccgaggcaggtggatcatgaggtcaggagatcaagaccatcctggctaacacagtgaaaccccaactctactaaaaatacaaaaaaattagccaggagtggtggtgggcacctgtagtcccagctactcaggaggctgaggcaggagaatggcatgaacccaggaggtggaggtt

SEQ ID NO: 42488 - DNA, 441 bp, Homo sapiens
aacccttcccagtccagcttcatccctaccatgctgctaaaaccaccctctcaaaggtcacttaagctttggccttgccagatccgccgctgctctgtcctcctgtgctgcatcctcagcacggctccctgccctctgttttgaagcattcttctcccttgtagggatccaatttcagtctttccccaaatagataaccaccgttccctgtaccatttattgagaaatacatcatctcgtctctccccagcagcactagcgccctcaagtagtcctgaggtatgtgttggtctgtttctggactcaccattctgtccctgggtctatccctctgccgataacacattgaatccattactacagatgtgtaagtcctgctgttggacagggcaaattccttcttcaagagtctcttagctgttttttttgttgttggttttt

SEQ ID NO: 42489 - DNA, 551 bp, Homo sapiens
gtctctgatccaacttgacttctgaatgaagaatatagtgactctttaaagggacaaaggtagaatgatagggcaaggtcagccatttgataaatcccagtagaggaggaagtgaactcaagagtgacgtcacaaatatggtctacacaagcctgacacaggttatccatgtggttttctggggaccctaggaggcaaagagcagaagcagctcactggatggcagagaaaggttctggcctccgtctctcataagaatattagctctcagcccaggcacggcagttcacacctgtaatcccaggactttgggagactgaagcaggcagatcacttgaggtcaggagtttgataccagcctggccaacatgacaaaactccgtctctgctaaaaatacaaaaattagccaggtgtgttagcacacgcctgtagtcccagctactcaggaggctgaggcacaagaatagcttgaacccaggaggtggaggttgcaatgacctgagatggcaccattgcactccagcctgggcaacagagcaagactgtcaaa

SEQ ID NO: 42490 - DNA, 340 bp, Homo sapiens
ctctacccaggcctttccccaggcctgaaggctggattgtcttattgaagggaagggagtagccctagctaaaaagtagatcctcaagtccaaaacgacggaggggctcatctccagaccttagctcctctccgtcgatgattttatccagtcttccggctcctggtgtagaataacgcgcacaccctcatcactctcaaatttctatttccatctcggactactccccaggactggacatccctgtgtgggtatctcacaggcatctcaaacctagcgtgtccaaacccaaactcctgactgaccctctctaatccacctcccacctgcacctgtcctc

SEQ ID NO: 42491 - DNA, 413 bp, Homo sapiens
acagcatagcatagtggtgctgtgcatgcacgttaggtcctaggaccttagttccaattctgtctgtgacaattactagctgtgcacatctagtaagttacttaacctctctatgcctcagtttcctcctctgtgaaatggggataataattgcatctacttaatttgtggtaaggtttgcatagggatttcatcatattgggactggaggagttgagtaagaagaaagggcaaaaccttggtctagcttccgccaatttctgggcaaaagctgaagttagcacaaagtcagcccaagcatgctccactgcactcaaagtacagttctgctgccagaacccagccagggggaggggatgggaactgtataagagtaggacggatgccaagactagtgaggcattttaacaaca

SEQ ID NO: 42492 - DNA, 378 bp, Homo sapiens
aaagacatagatctgcattaatctgtaaggtagcctagccacatgtggctatacaaatataaatataatttaaattacataaaattaaaagttcagcttttcagtctcactatccacatttcaagcaagatgtgactagtggctcccaaatataattgtccattatgaaagaaaccctctgttggacagtaaatgacgaaactggtgcatctagtgttctctttcattcaaataactggcatgggctggccgaggtggctcatgcctgtaatcccagcactttgggaggccgaggcaggcggatcatttgaagtcaggagttcaagaccagcctggcctacatggtgaaacctcatctctactaaaaatacaaaaaaa

SEQ ID NO: 42493 - DNA, 711 bp, Homo sapiens
cctggtgaaaactgagttagccagttgttcctaagatactcctgatgctgagagtgtgagcaggaggcgctgccccatccgcaagtcagtgtcccccaccccctgcggggtccacagcccaggcatctccggtccagtgtttcccaaacattcgcgtgccgaattgtaaaaagtgcacgttaatgcgagcctgtcggtgtgacatgaatctcagccatgctggttgccatcagtcagcacggagagagaaaccttttgtgcctaattagcacgcagaacagaacacagggttcgatttatggacttttcaaaacgagaatttcagtgggagactgtggcaaatgacacagtgttgacactggaattttgactacatgttggtctagaccccagttgaaattaaacagctcttttaataaaagctctttggctttcctcactgttccaaatcccacagcccccttctccttcttcctttttgagcaggatgggattacaggtcggaatgtacggattgtttcattttggggtaatgatggatcagccacagccaagccttacccgtgctgacgaatctccatgtgatcgtgtcctttctccatgtgctgcccacagaaagcagcgagactgctgtctcagctggaaagctgagcctgagagatttctggttaaaaaaaaataaaaaataaaaatctcctgcctaaggaaata

SEQ ID NO: 42494 - DNA, 632 bp, Homo sapiens
cctcattctcccctatggaagaccttgtgtagcccttcatcaggcgtgtgttgtggctttgtcacactgttttgtaatgatcgctttgcatgtcttttccagctgactccgccaccatctcctgcctggatgactgcagcagcatccttgctggcctctctgcttcctgcattgcctcctctgaatcttcaggatgccaagtttgtggaggaacggagaaagcagctccagaattacctgcgcagcgtcatgaacaaagtcatccagatggtccccgagttcgctgccagccccaagaaggagaccctcatccagctgatgcccttcttcgtcgacatcaccccgcccggagagcctgtgaacagccggcccaaagcagcttcccgcttccccaaactgtcccggggtcagccccgggagacccgcaacgtggagccccagagcggtgacctctgacctcgacaaaaccgcagccacgggccctgtgcgtggcaccagctgcgtccaccccagccactgccgctggcccctcacctcagcgtgacaaccacgtccacctggtgatcctgagagcacacgattcccaacagttacacaacaccccgattaaactaatcagtcttcgagccgca

SEQ ID NO: 42495 - DNA, 441 bp, Homo sapiens
aagctgcagctgctcacacttgcctggctaccgaacaggatgggctcaagaatgctctgcagggacagccttactgagccccagattccaaactggagtttagcaaaatgagccacttccttcagcagcagttctagggctgtataggagctgctcttaggggttcagggatacctcaattcccagtctgccctcaaggtgctcagtcttttgggagacaccccgggagacccgcaacgtggagccccagagcggtgacctctgacctcgacaaaaccgcagccacgggccctgtgcgtggcaccagctgcgtccaccccagccactgccgctggcccctcacctcagcgtgacaaccacgtccacctggtgatcctgagagcacacgattcccaacagttacacaacaccccgattaaactaatcagtcttcgagccgca

SEQ ID NO: 42496 - DNA, 820 bp, Homo sapiens
cctcattctcccctatggaagaccttgtgtagcccttcatcaggcgtgtgttgtggctttgtcacactgttttgtaatgatcgctttgcatgtcttttccagctgactccgccaccatctcctgcctggatgactgcagcagcatccttgctggcctctctgcttcctgcattgcctcctctgaatcttcaggatgccaagtttgtggaggaacggagaaagcagctccagaattacctgcgcagcgtcatgaacaaagtcatccagatggtccccgagttcgctgccagccccaagaaggagaccctcatccagctgatgcccttcttcgtgtaagtactgctcccacggacatgggccgccagccctgccagcatttttttctcggtcgttttggaaggtcagggagcacagcggctctccgtgatgccctgatcgccatgggacccaggcgaactccaggggctgttccaggtgccaaagtggaggttgggtctcagcgctttggagcttctaaagggatgggaagagagcaggcctgcaaatgagcattgttgacttgaggctcacaaagaaacttggggctctgtgattttgtactttcacacatttcgatcaagggaagattaattttctgtacagcccacgggtgctccaaaactgaaacaaattgtgtcagtgtttctcaagcttgggtaatgaacccaaggaaagttctcccagactcctaccagtattgacttaaattatttttatatgagttttacttaaaaatgaacattaatattatttaaatgccttcttctctcttgaaaaaagt

SEQ ID NO: 42497 - DNA, 537 bp, Homo sapiens
gtatacagagttcaggagtttgcaccacaagttacaaaacaagtaccctcaagtgagggcctacaacttcccacccaaaaaggccattggaaacaaggatgccaagtttgtggaggaacggagaaagcagctccagaattacctgcgcagcgtcatgaacaaagtcatccagatggtccccgagttcgctgccagccccaagaaggagaccctcatccagctgatgcccttcttcgtcgacatcaccccgcccggagagcctgtgaacagccggcccaaagcagcttcccgcttccccaaactgtcccggggtcagccccgggagacccgcaacgtggagccccagagcggtgacctctgacctcgacaaaaccgcagccacgggccctgtgcgtggcaccagctgcgtccaccccagccactgccgctggcccctcacctcagcgtgacaaccacgtccacctggtgatcctgagagcacacgattcccaacagttacacaacaccccgattaaactaatcagtcttcgagccgca

SEQ ID NO: 42498 - DNA, 557 bp, Homo sapiens
cctcattctcccctatggaagaccttgtgtagcccttcatcaggcgtgtgttgtggctttgtcacactgttttgtaatgatcgctttgcatgtcttttccagctgactccgccaccatctcctgcctggatgactgcagcagcatccttgctggcctctctgcttcctgcattgcctcctctgaatcttcaggatgccaagtttgtggaggaacggagaaagcagctccagaattacctgcgcagcgtcatgaacaaagtcatccagatggtccccgagttcgctgccagccccaagaaggagaccctcatccagctgatgcccttcttcgtgatgggattacaggtcggaatgtacggattgtttcattttggggtaatgatggatcagccacagccaagccttacccgtgctgacgaatctccatgtgatcgtgtcctttctccatgtgctgcccacagaaagcagcgagactgctgtctcagctggaaagctgagcctgagagatttctggttaaaaaaaaataaaaaataaaaatctcctgcctaaggaaata

SEQ ID NO: 42499 - DNA, 1423 bp, Homo sapiens
caaaatgtcagtggtgccaatgttgagaagccctggactcacctagtctctgccctgtcaaagaggctaataaagaaaaaggcactcctttgagctctttagttcatcttctataacaagtgtcttaaaatttgcctttgtggcattgaagagttaaaagttgttttcagagatactgactaaatagtggatattgactcagaggtcagcaaagaatttatgtaacttaagttacagacttgtagaatttgagctgctataattgctgtttctccatttcttttgaaagagagctcagcggaagttttactccagagatagtgccctgcttctactggaagaactacacactttttctccaagggtctttttctttttctttttaataaaccttcatagtcatgtgtaccaaatgacttttcatgtcatctaacaaacatttataataccggtaataataggcaccatttattgagcacttacacattgcttgccacattgtggtaggtattcatgcattatttcatttaatccccacaacaagcctgtgaggtaggtgttacagatgaaaaaaaaaaaagaggctcagagaggataagtaaattgcccaaatcttacagacaggatttaaactcaggtcctcctgaatatagtacccgttacattctgctgattctgccagcctacaaggcactaagtgtgcaaaattgaatatttcagtttcctttccctgcctttagagggctcccagtttctaggtgaaaaaaaaaatttttttgccaccaaaaaagcaaaggcagtcttttagacaaactctaggtaaacagtaccaacaccggctgggtgcggtggctcacatctgtaatcccaacagggaggctgaggcaggcggatcaccagaggtcaggagttcgagaccagcctagccaacatggtgaaacctcgtctctactaaaaatacaaaagttagccgggcatggtggcaggcacctataatctcagctactcgggaggctgaggcaggagaattgcttgaacctgggagccggaggttgcagtgagccgagatcacaccattgcactccagcctgggtgacaagagcgagaccccatctcaaaaaaaaaaaaaaaaaaaaaaaatagtaccaacaccataggcatggctgtccagtcctaaaaaggatataattatattgtaggtcaggggagggtgcttgtctacaccaaactgaatgttattgagagctgggctaaggagaagaaactaatataggtatctggagtaaaaggaacaagggttagcagattttaacaaggggagatgaggaaagaatagtaggtatgttgtgatattgtaaacatcatagagggggaaaaaaatctttgttaaaaaatgttctgtgagttaccaggagagttaaaa

SEQ ID NO: 42500 - DNA, 441 bp, Homo sapiens
  misc_feature (26)..(26): n is a, c, g, or t
ccagttttccagcctcctccacccantgccatctcccagccagcatcacctttccaagggaatgcattcctcacctctcagcctgtgccagtgggtgtggtccagcctgggtgacaagagcgagaccccatctcaaaaaaaaaaaaaaaaaaaaaaaatagtaccaacaccataggcatggctgtccagtcctaaaaaggatataattatattgtaggtcaggggagggtgcttgtctacaccaaactgaatgttattgagagctgggctaaggagaagaaactaatataggtatctggagtaaaaggaacaagggttagcagattttaacaaggggagatgaggaaagaatagtaggtatgttgtgatattgtaaacatcatagagggggaaaaaaatctttgttaaaaaatgttctgtgagttaccaggagagttaaaa

SEQ ID NO: 42501 - DNA, 1094 bp, Homo sapiens
aatcctaaacataatacagatttcactcctggtctcatcaccagtatatgaattgttcttactgcattttaaaaaaaacatgttttaatataagcaaacaggtcattctttgatattgcatagctaacccaaggcatggttattattcctttgttgtgttttttttttccaacaacctttgtaaattgcgcaaaatacggaacaatgcacaaatttgcgtgtaatctttgcataggggccatgctaatctatatcatccaatttttagtatatgtgctgctgaagggggcaccgttattcctttgggacatgggctggcacaaactcacaaaccactggaataggtactaatgggtggcagctctaggctgtattgcaacagtgctaggtaaaatattctcaccggggtcttcagacaacagtgagaggtaagcaagtactatctctattctcaggtgaggaagctaaggaactaaaaggactataaaaagaggaatgctacaaatggatttggcactatttttaaatatactatttattctcaaaaagcatcctctggaaagtgaaataacagcaactttcgagccaaaatccaagtatttagcacttgggtttctaaaatgaacactttagtggacactccagttcagcagcagggtatctcaaagagggggctttggagttattttggaagtcaaatcccacctctgctatccattttctttggacactaactcccttgggttgtttgatctaactggacttttagataagttactgatatggtttggctctgtgtccccatccaaatctcaccttgaatataatccccataattcccacgggtcaagggcgggaccaggtggaggtaattggatcatgggggcagttcccccatgctgttcttgtgataatgcgtgagtctcacgagatctgatggtttcataagcatctggcatttctcttgcttgcactcattctctctcctgccaccctgagaagaggtgccttccaacatgattgtaagtttcctgtggcctccccagccatgcagaactgtgagtcaattaaacctcttttctttataaattacc

SEQ ID NO: 42502 - DNA, 744 bp, Homo sapiens
tgtgttactttttatgcaaacttgttcattgtgttcccagagtggccagtcataagtctgtaagcaacaccttcccttttagtgtcttccatgtcatcaccatctgtaataaataagtaaatgtgtatttattttgtaaaacataatacttggaagtatatatacattgtcaaatgcttaattctaggtagttacctcacatagttaacatttttgtggcaagagcatgtgacattgtcagcatttttcaaaactacaaatacattattttgatctatagtcactatgctgtacaaaacaatctcttgaacttattctattaactataattatgtattttttgatcaacatcttttcaaaccctcctttctcctaaataacttgtgtctggtggccaccactttacttcaatgagattaagttttttagaatccctttgtaagtgaaatcatgaaataataatctttgtgcctggctcatttcgacaaatacaatgttttcctccaggttaattcgtgtgattgaaaataataaaatttccttctttaaatatgaatagtattccattgtgtgtatataccacattgtctttatttactcattaaatgttgaaaccactgattttatattttggtaattgtgaagagtgttgtaaaaaacaggcacatgtttcttcattctgatttcgtttgttttggatgtataaccaataataaaattgctgtatttggtggtttaatttta

SEQ ID NO: 42503 - DNA, 285 bp, Homo sapiens
ggacccagcattgctgatctgttgtagatttctgatctcccaaactgtaagatggtacatgtgtgctgtttaaaccactcaaaatgtgagaattttttaaaggagcaataggaaaccaatacataatataaaatgataagataacatagcacactcaaaattaaaacaagttatgtcatttttaaaagcatgcaaagaaacatacaaagagctcttagaagtcatacacatacataagcacctgcacacatatatacaggtccacacatacacatgtatactagc

SEQ ID NO: 42504 - DNA, 710 bp, Homo sapiens
gcccattccagttggagaacgtagtgagtctttcagtggagccagggtctggtttgtcgtgaggagctccgcgatgtcctctcaacagagcgccgtttccgccaaaggcttttccaaggggtcgtcccagggccccgctccgtgtcccgccccggcgcccaccccggcgcccgcctcctcctcctcctgctgtggctccggcaggggctgctgcggcgactcaggctgctgcggctccagctccaccagttgctgctgcttcccaaggagacgccgtcgacagcggagtagtggttgctgctgctgcgggggcggcagccagaggtcccagcgctccaacaaccggagctcaggatgctgctccggctgctgagaggcccgcaacccccagcgctgcgctagagaaacccgcccagcccagagcgggcccgccccgctgcggctcccacgcggggctgggcctcggagtttgccccgtaaagcgaattgcactttgatgttcagaaacccactttgttctcagccacgcaaaactccctgaccccgatgtgatttttctccccggggattcgagagccatgcgtgggacactggaccctactgtctacacgggcttgcacacagcaggtgctcagcaaatgtctattgatttgattgtcttttgaagatgtcataataaagcttctacctcctgagaacaaaaaatattt

SEQ ID NO: 42505 - DNA, 673 bp, Homo sapiens
gtggcccattccagttggagaacgtagtgagtctttcagtggagccagggtctggtaagtctcctagcagggtctgggggagagggtgggatgagttgagggcacaggggaggagcaaacagaacacaggcagcagatagatgtggaaggggtgtcccgcaaggcacctacgcttctagtgagccaacctcttaaggtactaatgaggacataaaggcaacataggaggtggtttttgcaagggtacacagcaagtccgcagaagagctgtgactagaacccaggtctttcagctccctggatggggttatttatattggcacaactctcctttcccacatggttgtggggcatgagaggcgtaggcaagaaagaatgatcaggacatgcttctggcctgtggattatttagacccagcaggtgggaccgcctgttggacttgggtgttttctaactgatgggggtgtagtaactaggaagatacagtcgaaggtcggtaggaaagtaaaatgagggacaagaaaaaagccaagtggagattttggactggatcatacagataagttgccgcagtgtgctgtttattttccactgtggagaacttgagcagtcttcttctagtcagagaaaatggaaatgcattgattcattgcatggattgtgtcctgctct

SEQ ID NO: 42506 - DNA, 3667 bp, Homo sapiens
tgtttgtccagcccgccagtttctgcagtggaggtcgcgactgagggacgggacagagaagtcgcgaaagtgggccagaggttctgcgacaccacctcgggtgagctgcgccaggcccgggatagggactgttgtgttcgaatgcccgccccggtcggccgccgctccccgcctagtccacggagctcaatggcggcagtcgcgctgagggactcggctcagggtatgacctttgaggatgtggccatttatttctcccaagaagagtgggagctccttgatgagtctcagaggttcctgtactgcgatgtgatgctggagaactttgcacatgtaacatccctgggttattgccatggaatggagaatgaggcgatagcttctgagcagagtgtatctatacaggtcaggacttctaagggcaatacacccacccagaaaactcacctcagtgagattaagatgtgtgtcccagtcttgaaagacattttgcctgcggctgagcaccaaaccacatcccctgtgcaaaagtcatacttgggtagcacaagcatgagaggcttctgcttcagtgctgaccttcaccagcatcaaaagcattacaatgaagaagagccctggaaaaggaaggtggatgaggctacatttgtgaccggctgcagattccatgtgttgaattatttcacctgtggggaggccttcccagcccccacggacctactccaacacgaagccactcccagtggtgaggagccacacagtagcagcagcaagcatatacaggcatttttcaatgcaaaaagttattacaagtggggtgaatacagaaaagcttcaagccacaaacacacacttgttcagcatcagagtgtctgttctgaaggagggctttatgagtgtagcaaatgtgagaaagccttcacttgcaagaacacacttgttcagcaccagcaaattcacactggacaaaagatgtttgagtgtagtgaatgtgaggaatcctttagcaaaaagtgccacctaatcttacacaagataattcacactggagaaaggccttatgaatgcagtgatcgtgagaaagcctttatccataaatctgaattcattcaccaccagagacgtcacactggaggagtgcgtcatgagtgtggtgaatgtaggaaaacctttagctacaaatctaacctcattgaacaccagagagttcacactggagaaaggccttatgaatgtggcgagtgcgggaaatcctttagacaaagctctagcctttttcgacaccagagagttcactctggagaaaggccttatcagtgctgtgagtgtgggaaatcctttagacaaatcttcaatctcattcgacatagaagagttcacactggagaaatgccttatcagtgcagtgattgtgggaaatcttttagctgcaaatcggaactcattcaacaccagagaattcacagtggagaaagaccttatgaatgcagagaatgtgggaaatcctttagacaattctctaacctcattcgacaccgcagcattcacactggtgataggccttatgagtgcagtgaatgtgagaaatcctttagccgcaaatttatcctgattcaacaccaaagagttcacactggagaaagaccttatgaatgcagtgaatgtggaaaatcctttacccgcaaatctgacctcattcaacaccggagaattcatactggcacaagaccttatgagtgcagtgaatgtggcaaatcttttagacagcgctctggcctcattcagcaccggagacttcatactggagaaaggccttatgaatgtagtgaatgtggaaagtcttttagccaaagtgctagcctcattcaacaccagagagttcacactggagaaaggccttatgaatgtagtgaatgtgggaaatcctttagccagagctctagcctcattcaacaccagagaggtcacactggagaaagaccttatgagtgcagtcaatgtgggaaaccctttacccacaaatcagaccttattcagcaccaaagagttcacactggagaaaggccttatgaatgcagtgaatgtgggaaatcctttagccgcaaatctaacctcattcgacatcggagagttcacactgaagaaaggccttaaatgtgaagggaatgtgctatttctttattcagtataatagcactggaggagactgtggtagccatcttcgtaaatttaaactttgagcacccacagtggggtattcttcataagtttcaggtatgtgggaagctctgaggaggttcattgtaatttctaatctgccgaggcctatagcctgatttatgtcactgccaatttctgaggctgaagccatttcacatttcacccctaccacctggcaggtgcacaccatgtgcatgagtcacttccccacagtgctcagagaagcaaacctctgtactctcccatttgcttggggaaattattaatagcccaagcatgtagggtcttcatgtcttttctctgactttagagtatacacctgacccagttgtggtccagagaatctgagttgtgctgtcagctttctaaggattacttttttaaggaacattgtcggtctcacatgatgcttgtaatgaatttttccacattctgattcaccagcctggaaactgcttggtgcacattgctttaatttataatgtttttataaaggttttaaaaaaatttacgcacctttaatcttgggtgttctattcattgcatagaatgacttgtaagcagaatagtgatgtcagcatgaaggggtgaatagattttgtggagatctcaaactttctgtactcagaagggacaatgtgatggcagaagacagctctttgttctgtattgctctaattggcctgctgcccaaggcctcaaagtaaagactgccaggctttgtgttcctgtattgtggcctggtgccatttttgtcaggtcagaggtcaccatgaaaaggaggcagttgtgacaatccccagtgcttctgtgaacgtgaattttgttcagttgtccacaggagatccacataattcctagcactggtgaggggaatctgttgcccaggtcctgcaaaggagccatgtgccatggcatataagtcagtgtagactggtgccatttgttgtcagactataggtgtggaggtgaaattacaggttcaacagtaattgggacagaaactccaggtaaatggggagtggagaagactgcagtaaattagatggaatgactcttctaaaagttcatctacaaattttccagtgaatatggttgtgtaggatcagtgcatacagaaattctcaggatcttctgtttactatcgctgagatcattatcagaaaatagtctggccgggcatggtgtaatcctaacactttgggaggccaaggcgggcggattgcctgagctcaggagttcaagaccagcctgggcaacatggtgaaatcccatgtctactaaaatacaaaaaattagccaggcgtggcagcatgcgcctatagtcccagccacttgggaggctgaggcaggagaatcgcttgaacccagaaggcggaagttgcagtgagctgagattgcaccactgcactccagcccaggcaacagagtgagactccgtctccaa

SEQ ID NO: 42507 - DNA, 580 bp, Homo sapiens
tgtttgtccagcccgccagtttctgcagtggaggtcgcgactgagggacgggacagagaagtcgcgaaagtgggccagaggttctgcgacaccacctcgggtgagctgcgccaggcccgggatagggactgttgtgttcgaatgcccgccccggtcggccgccgctccccgcctagtccacggagctcaatggcggcagtcgcgctgagggactcggctcagggtatgacctttgaggatgtggccatttatttctcccaagaagagtgggagctccttgatgagtctcagaggttcctgtactgcgatgtgatgctggagaactttgcacatgtaacatccctggatcaagccaccaatatctgagagagaaatgctggcttcaggagagctcaagtcagaggatcccagcagggattttatacccttctggggtaacacagttgagccagagtgcctacctaatcacgtatgccaaccagaaaccatcagcagtcaaacttgccctccatattgtcatgggatcttccagatgttaaacaataataataaagctcactgcatttaaatgtcaaaatga

SEQ ID NO: 42508 - DNA, 512 bp, Homo sapiens
accatatttcattctgcccaataactccttagccattattatttaaaatggactcagagatcatagcaaatatcccattttcatcaccaaatgaaaaaatttcaaaaatgtaattgaaaatactcacaaaactccacagagaatactcgtgtgaggttttgttaaggcaaaggatatggtgcagcaagagaaagaatgcgtgcccatatgctatgtcagacacaaatccaggcagttttccagactcccattcatacactgatatgattcacttccagatcaagccaccaatatctgagagagaaatgctggcttcaggagagctcaagtcagaggatcccagcagggattttatacccttctggggtaacacagttgagccagagtgcctacctaatcacgtatgccaaccagaaaccatcagcagtcaaacttgccctccatattgtcatgggatcttccagatgttaaacaataataataaagctcactgcatttaaatgtcaaaatga

SEQ ID NO: 42509 - DNA, 443 bp, Homo sapiens
tgtttgtccagcccgccagtttctgcagtggaggtcgcgactgagggacgggacagagaagtcgcgaaagtgggccagaggttctgcgacaccacctcgggtgagctgcgccaggcccgggatagggactgttgtgttcgaatgcccgccccggtcggccgccgctccccgcctagtccacggagctcaatggcggcagtcgcgctgagggactcggctcagtgagagaccgcggagtgttgggtcgtgtagaagtgactgaacccagaaggtggagacgagacgttgtcccgactgcacagaggctgctctgcagctccttaaaggcgctaggcgtgacccgcaccaaggccgggatcgggaccaccgtgcccgggtacctgcactgctcgccccctcctttcgaccccgctttccccacccagtcggatggcggcggccgc

SEQ ID NO: 42510 - DNA, 3326 bp, Homo sapiens
gcgaggaactaggctggttagaagtactgggtgttataagattgtacgacgtgtatctatacaggtcaggacttctaagggcaatacacccacccagaaaactcacctcagtgagattaagatgtgtgtcccagtcttgaaagacattttgcctgcggctgagcaccaaaccacatcccctgtgcaaaagtcatacttgggtagcacaagcatgagaggcttctgcttcagtgctgaccttcaccagcatcaaaagcattacaatgaagaagagccctggaaaaggaaggtggatgaggctacatttgtgaccggctgcagattccatgtgttgaattatttcacctgtggggaggccttcccagcccccacggacctactccaacacgaagccactcccagtggtgaggagccacacagtagcagcagcaagcatatacaggcatttttcaatgcaaaaagttattacaagtggggtgaatacagaaaagcttcaagccacaaacacacacttgttcagcatcagagtgtctgttctgaaggagggctttatgagtgtagcaaatgtgagaaagccttcacttgcaagaacacacttgttcagcaccagcaaattcacactggacaaaagatgtttgagtgtagtgaatgtgaggaatcctttagcaaaaagtgccacctaatcttacacaagataattcacactggagaaaggccttatgaatgcagtgatcgtgagaaagcctttatccataaatctgaattcattcaccaccagagacgtcacactggaggagtgcgtcatgagtgtggtgaatgtaggaaaacctttagctacaaatctaacctcattgaacaccagagagttcacactggagaaaggccttatgaatgtggcgagtgcgggaaatcctttagacaaagctctagcctttttcgacaccagagagttcactctggagaaaggccttatcagtgctgtgagtgtgggaaatcctttagacaaatcttcaatctcattcgacatagaagagttcacactggagaaatgccttatcagtgcagtgattgtgggaaatcttttagctgcaaatcggaactcattcaacaccagagaattcacagtggagaaagaccttatgaatgcagagaatgtgggaaatcctttagacaattctctaacctcattcgacaccgcagcattcacactggtgataggccttatgagtgcagtgaatgtgagaaatcctttagccgcaaatttatcctgattcaacaccaaagagttcacactggagaaagaccttatgaatgcagtgaatgtggaaaatcctttacccgcaaatctgacctcattcaacaccggagaattcatactggcacaagaccttatgagtgcagtgaatgtggcaaatcttttagacagcgctctggcctcattcagcaccggagacttcatactggagaaaggccttatgaatgtagtgaatgtggaaagtcttttagccaaagtgctagcctcattcaacaccagagagttcacactggagaaaggccttatgaatgtagtgaatgtgggaaatcctttagccagagctctagcctcattcaacaccagagaggtcacactggagaaagaccttatgagtgcagtcaatgtgggaaaccctttacccacaaatcagaccttattcagcaccaaagagttcacactggagaaaggccttatgaatgcagtgaatgtgggaaatcctttagccgcaaatctaacctcattcgacatcggagagttcacactgaagaaaggccttaaatgtgaagggaatgtgctatttctttattcagtataatagcactggaggagactgtggtagccatcttcgtaaatttaaactttgagcacccacagtggggtattcttcataagtttcaggtatgtgggaagctctgaggaggttcattgtaatttctaatctgccgaggcctatagcctgatttatgtcactgccaatttctgaggctgaagccatttcacatttcacccctaccacctggcaggtgcacaccatgtgcatgagtcacttccccacagtgctcagagaagcaaacctctgtactctcccatttgcttggggaaattattaatagcccaagcatgtagggtcttcatgtcttttctctgactttagagtatacacctgacccagttgtggtccagagaatctgagttgtgctgtcagctttctaaggattacttttttaaggaacattgtcggtctcacatgatgcttgtaatgaatttttccacattctgattcaccagcctggaaactgcttggtgcacattgctttaatttataatgtttttataaaggttttaaaaaaatttacgcacctttaatcttgggtgttctattcattgcatagaatgacttgtaagcagaatagtgatgtcagcatgaaggggtgaatagattttgtggagatctcaaactttctgtactcagaagggacaatgtgatggcagaagacagctctttgttctgtattgctctaattggcctgctgcccaaggcctcaaagtaaagactgccaggctttgtgttcctgtattgtggcctggtgccatttttgtcaggtcagaggtcaccatgaaaaggaggcagttgtgacaatccccagtgcttctgtgaacgtgaattttgttcagttgtccacaggagatccacataattcctagcactggtgaggggaatctgttgcccaggtcctgcaaaggagccatgtgccatggcatataagtcagtgtagactggtgccatttgttgtcagactataggtgtggaggtgaaattacaggttcaacagtaattgggacagaaactccaggtaaatggggagtggagaagactgcagtaaattagatggaatgactcttctaaaagttcatctacaaattttccagtgaatatggttgtgtaggatcagtgcatacagaaattctcaggatcttctgtttactatcgctgagatcattatcagaaaatagtctggccgggcatggtgtaatcctaacactttgggaggccaaggcgggcggattgcctgagctcaggagttcaagaccagcctgggcaacatggtgaaatcccatgtctactaaaatacaaaaaattagccaggcgtggcagcatgcgcctatagtcccagccacttgggaggctgaggcaggagaatcgcttgaacccagaaggcggaagttgcagtgagctgagattgcaccactgcactccagcccaggcaacagagtgagactccgtctccaa

SEQ ID NO: 42511 - DNA, 3543 bp, Homo sapiens
tgtttgtccagcccgccagtttctgcagtggaggtcgcgactgagggacgggacagagaagtcgcgaaagtgggccagaggttctgcgacaccacctcgggtgagctgcgccaggcccgggatagggactgttgtgttcgaatgcccgccccggtcggccgccgctccccgcctagtccacggagctcaatggcggcagtcgcgctgagggactcggctcaggttattgccatggaatggagaatgaggcgatagcttctgagcagagtgtatctatacaggtcaggacttctaagggcaatacacccacccagaaaactcacctcagtgagattaagatgtgtgtcccagtcttgaaagacattttgcctgcggctgagcaccaaaccacatcccctgtgcaaaagtcatacttgggtagcacaagcatgagaggcttctgcttcagtgctgaccttcaccagcatcaaaagcattacaatgaagaagagccctggaaaaggaaggtggatgaggctacatttgtgaccggctgcagattccatgtgttgaattatttcacctgtggggaggccttcccagcccccacggacctactccaacacgaagccactcccagtggtgaggagccacacagtagcagcagcaagcatatacaggcatttttcaatgcaaaaagttattacaagtggggtgaatacagaaaagcttcaagccacaaacacacacttgttcagcatcagagtgtctgttctgaaggagggctttatgagtgtagcaaatgtgagaaagccttcacttgcaagaacacacttgttcagcaccagcaaattcacactggacaaaagatgtttgagtgtagtgaatgtgaggaatcctttagcaaaaagtgccacctaatcttacacaagataattcacactggagaaaggccttatgaatgcagtgatcgtgagaaagcctttatccataaatctgaattcattcaccaccagagacgtcacactggaggagtgcgtcatgagtgtggtgaatgtaggaaaacctttagctacaaatctaacctcattgaacaccagagagttcacactggagaaaggccttatgaatgtggcgagtgcgggaaatcctttagacaaagctctagcctttttcgacaccagagagttcactctggagaaaggccttatcagtgctgtgagtgtgggaaatcctttagacaaatcttcaatctcattcgacatagaagagttcacactggagaaatgccttatcagtgcagtgattgtgggaaatcttttagctgcaaatcggaactcattcaacaccagagaattcacagtggagaaagaccttatgaatgcagagaatgtgggaaatcctttagacaattctctaacctcattcgacaccgcagcattcacactggtgataggccttatgagtgcagtgaatgtgagaaatcctttagccgcaaatttatcctgattcaacaccaaagagttcacactggagaaagaccttatgaatgcagtgaatgtggaaaatcctttacccgcaaatctgacctcattcaacaccggagaattcatactggcacaagaccttatgagtgcagtgaatgtggcaaatcttttagacagcgctctggcctcattcagcaccggagacttcatactggagaaaggccttatgaatgtagtgaatgtggaaagtcttttagccaaagtgctagcctcattcaacaccagagagttcacactggagaaaggccttatgaatgtagtgaatgtgggaaatcctttagccagagctctagcctcattcaacaccagagaggtcacactggagaaagaccttatgagtgcagtcaatgtgggaaaccctttacccacaaatcagaccttattcagcaccaaagagttcacactggagaaaggccttatgaatgcagtgaatgtgggaaatcctttagccgcaaatctaacctcattcgacatcggagagttcacactgaagaaaggccttaaatgtgaagggaatgtgctatttctttattcagtataatagcactggaggagactgtggtagccatcttcgtaaatttaaactttgagcacccacagtggggtattcttcataagtttcaggtatgtgggaagctctgaggaggttcattgtaatttctaatctgccgaggcctatagcctgatttatgtcactgccaatttctgaggctgaagccatttcacatttcacccctaccacctggcaggtgcacaccatgtgcatgagtcacttccccacagtgctcagagaagcaaacctctgtactctcccatttgcttggggaaattattaatagcccaagcatgtagggtcttcatgtcttttctctgactttagagtatacacctgacccagttgtggtccagagaatctgagttgtgctgtcagctttctaaggattacttttttaaggaacattgtcggtctcacatgatgcttgtaatgaatttttccacattctgattcaccagcctggaaactgcttggtgcacattgctttaatttataatgtttttataaaggttttaaaaaaatttacgcacctttaatcttgggtgttctattcattgcatagaatgacttgtaagcagaatagtgatgtcagcatgaaggggtgaatagattttgtggagatctcaaactttctgtactcagaagggacaatgtgatggcagaagacagctctttgttctgtattgctctaattggcctgctgcccaaggcctcaaagtaaagactgccaggctttgtgttcctgtattgtggcctggtgccatttttgtcaggtcagaggtcaccatgaaaaggaggcagttgtgacaatccccagtgcttctgtgaacgtgaattttgttcagttgtccacaggagatccacataattcctagcactggtgaggggaatctgttgcccaggtcctgcaaaggagccatgtgccatggcatataagtcagtgtagactggtgccatttgttgtcagactataggtgtggaggtgaaattacaggttcaacagtaattgggacagaaactccaggtaaatggggagtggagaagactgcagtaaattagatggaatgactcttctaaaagttcatctacaaattttccagtgaatatggttgtgtaggatcagtgcatacagaaattctcaggatcttctgtttactatcgctgagatcattatcagaaaatagtctggccgggcatggtgtaatcctaacactttgggaggccaaggcgggcggattgcctgagctcaggagttcaagaccagcctgggcaacatggtgaaatcccatgtctactaaaatacaaaaaattagccaggcgtggcagcatgcgcctatagtcccagccacttgggaggctgaggcaggagaatcgcttgaacccagaaggcggaagttgcagtgagctgagattgcaccactgcactccagcccaggcaacagagtgagactccgtctccaa

SEQ ID NO: 42512 - DNA, 567 bp, Homo sapiens
tcacatatacaatctctttattcagtgtttctcctcttagaaattatatttttcttccagcgaaggttggtgggaatctttgtgctgataatacccacagctcttctcccatagcaggatttgagggaaacttggcaagaaacactgcctctgaatccagcctccctgccgcagccccaggtcgagcaggtggaccggaaccacggtcactgaccagggtatctgatcctctcagtctgaaggaaagtgagaactcagcacaaacgccatggacggtacagtgtgggagggagcagcctagagagagaagcacgaagcactcgctcatgtcggaggaggaggaagagcgatccatgggcaggcaagccttttccatggcacaaaaaagaattttagaagcatccagttgcataaagacaggaaaagggcatctgtttcagccagtgtaccacaacaaaccacccactcgcagatgaaatgcactttcacagctgcctctgaaaatgggtttgaaaaaccaaatccaaaataaaaatagggactctcatttattgagagcttactatg

SEQ ID NO: 42513 - DNA, 353 bp, Homo sapiens
ttctatctggatctgccagacttcatctggacaacagatgcatcagctacactaaggcccgatccgagacttctgatgcataaagcatgcaacttcgcgcacggatgtactttccatttgaagtactgctagagatttgtgccctcaaacacgggaattttgcaaatgccagcccagacggaccaattgtcccagagaaggtaggggacatcttagccttctaattcaaatggaaaatttcctgctcccctgttgtcaattcctgcccggcactacgtgcagcggagatgagaaaagccacttcctttgcattcatctggactgctgtgcttggagaacagaggagcatgcat

SEQ ID NO: 42514 - DNA, 532 bp, Homo sapiens
ttctatctggatctgccagacttcatctggacaacagatgcatcagctacactaaggcccgatccgagacttctgatgcataaagcatgcaacttcgcgcacggatgtactttccatttgaagtactgctagagatttgtgccctcaaacacgggaattttggatttgagggaaacttggcaagaaacactgcctctgaatccagcctccctgccgcagccccaggtcgagcaggtggaccggaaccacggtcactgaccagggtatctgatcctctcagtctgaaggaaagtgagaactcagcacaaacgccatggacggtacagtgtgggagggagcagcctagagagagaagcacgaagcactcgctcatgtcggaggaggaggaagagcgatccatgggcaggggaatttgagagagagacctccttcagacccggttagcgcactgttttcaaaaaacctgaatggaacaacctgttgagagagcaaagagcgcttgtgtttgtggcacacgggagcctggcggccg

SEQ ID NO: 42515 - DNA, 355 bp, Homo sapiens
tcccaagtcaaacagcaagcaaacgtattctttctgcaccttttttgctctatgtagaccctcaaggtattgcatgatgtccactcacattaatgagggtggatcttccctagtcagtctactgataacaaatatcaatcttgcagacacaactagcaacaatgttatgccagcctgggtaactcttagcccagtcaagttaacacaacattaaccatcacaggacctctggcagagaccgataactgtctcccaatattttttgcctccttattctatagcaatagaattatatagttagttttgtgttgcaacccaacaataggaactttggatcttgtttttctttgtgtaa

SEQ ID NO: 42516 - DNA, 383 bp, Homo sapiens
tcctaagacgttcccagaagatgacaatgaggcagccatggtcctgctgagtcttcagaaacggcctttctaggataagtgctccttacacacttctccctggggcatcactgtcacagggatggtggtcaccacctgattctgaaacacgaagatcttgattctttcaaacacccagaggaagataagcaggatgctgacatactgcacccaggcgaactttaccatcgcccagaatcctggctgataaggacagacagttaaagagttggggaccacatggtataagtcaaagtaaactaaggtttaggccagacaggatatggcaagaatatttcaaatactcttaagatgaaaggaataataaaagattattaaaaaat

SEQ ID NO: 42517 - DNA, 1384 bp, Homo sapiens
tttcgtgataatttttaaaagatgggccttaaaccaatacagtcatatcatttaactcaattccatgaatttacaatgcaatccacagtgcccacaaccccatgtttctggaaaatcaggagtattgggtacaatggaataaaatgcaagaaggcaaataagagatcaggcttttaggacctaggaaacaaataaagaggaatttgttgctgaaagtaatgtgtagctgacactctcattacctgacacaatgggagacattatgtctgggaataagacatctatttccatagcactgtagtcctgcaaaggagttggaagttacgaatttttaaagattttagaacattatatctttagtctctcataagccaattatttatatctccacatagcccattattaccattgaaaaggcatgcaattcttctatttgaagcttgttccctttttacaaaagtactagtaaaaatctgagtcatacaaaagagcaggtcaggtgtcactaataacagtttacctcagcttcatctccatgaaggttttacttctaatcccagagtctcatgtttatgtattacaagagtgtatgaaagctgggcatggtggcacacaccagtagtcccagctactcggtcgggggttgaggtgagaggatcgcttgaactcaggagtttgaatccagcctggtcaatgtagcgagatcctatctcttaaaaaaaaaaagggggggaaacagtgtatgatcctattatttgggtttgtgtgtgatcgaatacatggtatatagttcatggaaaatttaagctcagcaaggaaagaaaatggccagcttcctgtcttaggaagacaatttactttttggcatctgtttggttgaaagtttgcctttgatccagattctttcggatgtcagggatattcacattgacatgtctttttagtgttccaggagattttagtttgaatagtacaattttttcttcttacaacaaaacttagaacggcttctaacttatttcttcatggccaagaaactaccctaacttatctcgataaatatttagttctgtcttatttctaatgtgtaaaacaggttttaaaaataatatatagattttgcatttataaaaaaagatttaatttatagaaccaaacttgaacatatgtttaatttagcctaatcagaaggttacagaaaaagttgctgtaaagatagaataaaagtattgtactggtctgtttttactgaagttccagaatgtgaggttattagagtcttggcttattgtgtcatgttttcctgaatgcttcctttgaagatgagcacacaccaaagcatcctttgatattatgtatggattaaattaacactgctttccaa

SEQ ID NO: 42518 - DNA, 972 bp, Homo sapiens
aaaaagggacagaaggagaaggaccttagaaatctgtagaaatctcagtggcctcctggagtctaacgaactgaagttcaaggaagactagaagtgtatgcgccctgatctcatggctccctgccttgatgaagccatttgtattcacagaggggctcctccctgcactgctgtatttaattctggatatggtataaataggacttggctgactgtcaaagcacaccacccgccacaatgttccagttttttggggacatcagacgaatctgagcctttgattccctctagtggcttaaattggcaactttcatagctggctcttggcatttgttattgaatgtttaagtatctattgtatgcactaaattggtgctgggttctctagctctgcctggaatgtagggcactggtttcatttgagcatttttgtgtccggtggaaagtgatcagggttaagccagagctccttcttacaaagctccttcttaacaaagcttagcttagtacagtgcaaaccagtgaatttcccagctattctaaagctgctttatagtaattctgggaggatgggttattatatgggttatttctgccgctaaatgagttgtaggaccttgggctgtctcttttacccctgggtcttagtttgctcattggtaaaaatgagcgtgtgggttacactcagataaattcaacaaatattaattgaacacctgcagtgtgagaccctgggctgagtactatgagaaggcagcaatgaatggtacttgatgtcaaagagcttacaggataatgggagaaccagacatcctggaagccacataaaattgggcaggaggaggctgggcgtggtagctcacacctgtaattccagcactttgggaggctgaggcgggtggatcacttgaggccaagagttcgagaccagcctgaccaacatggtgaaatcctgtctctactaaaaataca

SEQ ID NO: 42519 - DNA, 1471 bp, Homo sapiens
gggcgcctccgggcctctgcggagccctgggcagctctgagctcgcggaggcgtggccggtgcgcggggcccgcggcgcgcggggatgggggtctcggtggatgtgcaccaggtgtacaagtaccccttcgagcaggtggtcgccagctttctccgaaaggtttccacgctttgagaaggactgaatgagatcatgcgcatggcagcttctctaggatagcaccctgcgtgaacacagtagctgctcagttaagtctttgatgggtgtgatcctgattcagcttgatcaattctgcagtcatactggattgtgtttgaaaaggtgtccagaaaaacctggccatctgcctcctgtcttcccagtaccccaaccccatggataaaaatgtcatctcagtaaaaatcatggaggaaaaaagagatgaatcaacaggggtcatctacagaaagaggattgcaatctgtcagaacgtggttccagaaattttaaggaaggtgagcattttgaaagtacctaatatccaattagaagaggagtcatggctcaatcctcgggaaagaaacatggccatacggagtcactgccttacgtggacacagtatgcatccatgaaggaagagtctgtcttccgggaaagtatggaaaacccaaattggacagagttcattcaaagaggcaggatttcaatcacaggggttggatttctcaactgtgttttagaaacttttgccagcacattcttacgacagggagcccagaagggaattagaatcatggagatgctgctaaaggaacagtgtggtgcccccttagctgaataaagaatcatcagagagctgtatccatgtctacttttttatttatttattttttttttgagaatcacttcttggccacagcacatcacagacacagtttctggaatacaggtttgaggatacagtgttggcagcttcaagaagagaagaccttcttgccaggacataaaatgataccctcctctgggagcctgcttcgaatagtgggactcagggagataagaccttcttgctggatttttatgacacaatctctttataattttacaaataaaggaaaaaagacccatgtaagatatgtgtgcccttcctcagggtgttctgctggttgtctgatgatggtgtcagggcagctaaggacaggataaaggcctggagagggtgcttgtgcccttatgttatcagcaccgttgttcctaggattcgtgaggggattctggaaccaataagggagttgaactggtacctgattcacgggtggactggaacaaacaggaatgtaccagacctatgttgaagctaagccgtatttataacaatgtttaagattctcagaaatcaggagatttttatcctatccataagtaatatgtaactgccataagtatagcttttagaatgtaatatgtaaactgtgatttggtcctctgga

SEQ ID NO: 42520 - DNA, 1063 bp, Homo sapiens
attgtggcttctcttcaacatatctgaattgtcagcatcactacttttgcactttggtgcccttatgaagtaaaataagagttacttgaacacaggcacagtgatactgcaacggttgatctgagagctcagagggctacagagtgactaataggccagcagtgtctacagtgtggatatcctggacaaagagatgattcatgtgccaggacagaagatttcatcacacgtctcagaatgtcatgcactaaaaacttatgaattttttatttctggaattttccacttaatatttttggaccacagttgactgtgggtaactgaaactgtggaaaacaaaactacagataagagggaattagaatcatggagatgctgctaaaggaacagtgtggtgcccccttagctgaataaagaatcatcagagagctgtatccatgtctacttttttatttatttattttttttttgagaatcacttcttggccacagcacatcacagacacagtttctggaatacaggtttgaggatacagtgttggcagcttcaagaagagaagaccttcttgccaggacataaaatgataccctcctctgggagcctgcttcgaatagtgggactcagggagataagaccttcttgctggatttttatgacacaatctctttataattttacaaataaaggaaaaaagacccatgtaagatatgtgtgcccttcctcagggtgttctgctggttgtctgatgatggtgtcagggcagctaaggacaggataaaggcctggagagggtgcttgtgcccttatgttatcagcaccgttgttcctaggattcgtgaggggattctggaaccaataagggagttgaactggtacctgattcacgggtggactggaacaaacaggaatgtaccagacctatgttgaagctaagccgtatttataacaatgtttaagattctcagaaatcaggagatttttatcctatccataagtaatatgtaactgccataagtatagcttttagaatgtaatatgtaaactgtgatttggtcctctgga

SEQ ID NO: 42521 - DNA, 459 bp, Homo sapiens
gggcgcctccgggcctctgcggagccctgggcagctctgagctcgcggaggcgtggccggtgcgcggggcccgcggcgcgcggggatgggggtctcggtggatgtgcaccaggtgtacaagtaccccttcgagcaggtggtcgccagctttctccgaaaggaagagcctccgggaatcccagctcgtgagctccgtggagttgcagatgaccgacgtgtggagctttccggttcatcactgaccccttaaaagcgaggggaggccattgggcagtcatcctggtttactcagcatgatggttctgctgccccatccgctgctccttattaaacagctgtgggacatcgtgcaggttgcttactctctttgtgccttagtttgctaatctgtaaaatggggaaaataatagtaccgactcatagagttgttgtgaggatccaaatgaggtaacttgtgta

SEQ ID NO: 42522 - DNA, 1281 bp, Homo sapiens
gggcgcctccgggcctctgcggagccctgggcagctctgagctcgcggaggcgtggccggtgcgcggggcccgcggcgcgcggggatgggggtctcggtggatgtgcaccaggtgtacaagtaccccttcgagcaggtggtcgccagctttctccgaaaggtttccacgctttgagaaggactgaatgagatcatgcgcatggcagcttctctaggatagcaccctgcgtgaacacagtagctgctcagttaagtctttgatgggtgtgatcctgattcagcttgatcaattctgcagtcatactggattgtgtttgaaaaggtgtccagaaaaacctggccatctgcctcctgtcttcccagtaccccaaccccatggataaaaatgtcatctcagtaaaaatcatggaggaaaaaagagatgaatcaacaggggtcatctacagaaagaggattgcaatctgtcagaacgtggttccagaaattttaaggaagtccttaagcactctggtgattctttgttggaaaaagaaacttttgccagcacattcttacgacagggagcccagaagggaattagaatcatggagatgctgctaaaggaacagtgtggtgcccccttagctgaataaagaatcatcagagagctgtatccatgtctacttttttatttatttattttttttttgagaatcacttcttggccacagcacatcacagacacagtttctggaatacaggtttgaggatacagtgttggcagcttcaagaagagaagaccttcttgccaggacataaaatgataccctcctctgggagcctgcttcgaatagtgggactcagggagataagaccttcttgctggatttttatgacacaatctctttataattttacaaataaaggaaaaaagacccatgtaagatatgtgtgcccttcctcagggtgttctgctggttgtctgatgatggtgtcagggcagctaaggacaggataaaggcctggagagggtgcttgtgcccttatgttatcagcaccgttgttcctaggattcgtgaggggattctggaaccaataagggagttgaactggtacctgattcacgggtggactggaacaaacaggaatgtaccagacctatgttgaagctaagccgtatttataacaatgtttaagattctcagaaatcaggagatttttatcctatccataagtaatatgtaactgccataagtatagcttttagaatgtaatatgtaaactgtgatttggtcctctgga

SEQ ID NO: 42523 - DNA, 1771 bp, Homo sapiens
gggcgcctccgggcctctgcggagccctgggcagctctgagctcgcggaggcgtggccggtgcgcggggcccgcggcgcgcggggatgggggtctcggtggatgtgcaccaggtgtacaagtaccccttcgagcaggtggtcgccagctttctccgaaaggtttccacgctttgagaaggactgaatgagatcatgcgcatggcagcttctctaggatagcaccctgcgtgaacacagtagctgctcagttaagtctttgatgggtgtgatcctgattcagcttgatcaattctgcagtcatactggattgtgtttgaaaaggtgtccagaaaaacctggccatctgcctcctgtcttcccagtaccccaaccccatggataaaaatgtcatctcagtaaaaatcatggaggaaaaaagagatgaatcaacaggggtcatctacagaaagaggattgcaatctgtcagaacgtggttccagaaattttaaggaaggtgagcattttgaaagtacctaatatccaattagaagaggagtcatggctcaatcctcgggaaagaaacatggccatacggagtcactgccttacgtggacacagtatgcatccatgaaggaagagtctgtcttccgggaaagtatggaaaacccaaattggacagagttcattcaaagaggcaggatttcaatcacaggggttggatttctcaactgtgttttagaaacttttgccagcacattcttacgacagggagcccagaagggaattagaatcatggagatgctgctaaaggaacagtgtggtgcccccttagctgaataaagaatcatcacttataaatggggaaataaagactggaaaatgtatgtgatttgctcaacatcaaacagtcatcaagagcctgtgttaacatctggcgtggatccaaaacccatgttctttaccgtgtcgtcaaaaatgttctggaggccattgcaagcttctccctccacacccctcctcaccctctggcatagtcacagggcaaacactggatctaagccaatcagatgggctctttcttctggaactgaatcctcagcagaatgacaaagaaagactaaacaatgatgactcaaatgaactgatcctttgattccacatcagctccttcatgagactgggaagcagttcctttaccttctttgttgtcccattgtggagctggctcctccagctctcccagcaattctatgggaatcattctccagtgatttctctttttggatggcctaagttggattatgttgattgcaatcacagaattgtattacatatgtcagtttttaacgtatttccttaaccttaaaatgccacaaatttaatatgcatcattaagtttttcagggaaaaaggaagaagcagtcacactatattcaatatatacaccgataggcaagaggcatactggtttgagaaatgtgaaacctcgtgccgaattcggcacgagtcgccttacaagttccagataccgcccagatgaattttttttttatcacagctgtcattctcatttctacaggcatgaaaagtgcgactcaagttcagtgtcttgcctcgggtagcttggggattcccagtcagctcctcgcgccttcgtcgccgctccccttccaccccgcgccttcgccggccgtcccctgctccatccaggccacgggggtgacggtggggtctggggcattcaggcctggctgggcatgagggcttcaggcccaattccacctcgtgc

SEQ ID NO: 42524 - DNA, 1215 bp, Homo sapiens
tagtttttccttttgtgagtcatgcttttggtgttgagtctgagaactcattgcctagccctaggtcctgaaaattttctcctgtgtcttgttctaagagtttatagttgtatgttttaaatgtaggtctgtgatgcatattacttgtgagggaacccattgtcatgattctgtgattttctttacaagaaggttattgggtttattcatattttgacagttgttatggcttggtcgtaggagtctaagttgggaaagtgacagggtgaagctggaggggctggtaggccatgaggcatgctgttcagaggctctggtgcatgtaggagaggaggcaggacaggaggctctggtcatgcatgggagaggcagcactgagattagagatggaaagatttcaggggatgagtttcgaggtgtggccacaaatacggtcaactgatgtgaatgtgggcgatggacatgggagatgaggaagcaaggcactgtgaagctcatccacagtgacttgattaatcacttagatgctgaacttcacagtggtaaagtgtgcatttttaaagaaggtaccgaagtaaaccaggtgctgagggatttctttgaggagtacatggccccatggatatgcatggaaagatgttgatagagtgtaagtggtgtctaaaagcagagagcagaacagtggggcaggaggtatatcaaggtcagaagaaaatgccaacatttctaccttcctcttcccaaattcttcagttggtccaaaactatacctgtttgtgatgtatagttatagttacatgggccagccatacaagctctttgagccttgttgccatcaccagtagaatggggctggtaagtcagcatgtttctttctacctctcagcaatgttgagagaaaatgtaattatgtatgaagaagttctttgaattcttaaaattaatggtttaattaatttaaacagaaaaccaaatatcgcatgttctcacttgtaagagagagctaaataaggagaacacatggacaccgacacatagatgagagcaatagacacggggcctgatggagggtaggaggagggagaggattgggaaaaataacgaatgggtaccaggcttaatacctgggcaacaaaataatctgtacaacaaactcccatcacacgactttacccatataacaaacctgcacatgtacccctgaacttaaaagtc

SEQ ID NO: 42525 - DNA, 546 bp, Homo sapiens
ggcaggtcatcattgccaccagcatttcaaagacacatggtccttccaaatggactgcaccaatttctcaatgttaatagatcatctaaaaaaaaaagctgtattatatactttccagaccctttgtttaaatgagaccttacaacagaggcccagtatgtaaaacagataggaacacttgtgatgtagagcaggttatatactgattaatagcacagattctggagaaacaaaagctggattcaggtcctggcttctgtgacttatcatagcgctgtgggaccttgaacaaaatgcctaacctctctgtgccttccttatcagggaaatgggggaaatggggataataagaggccttatctgtgataaggttagtagaaggattaaatgattcaaagtgtgtaaaatgttaagcacagttcctggcatataataaatgctcaataagtgttttattactataccaataaccataataattatcattagtaatattatcccccaggtggaaaaaaaataaaaactagggaccccaatttattaagc

SEQ ID NO: 42526 - DNA, 638 bp, Homo sapiens
ttgatctgtcaaattccaggtgacaagatctatgcaccccatgcgtccttgaggggcctcttccccgcaggctctggctggccgcaggctggttctggtgtgaaaggttatactgccttttctttgtttgtttgtttttttctctaaaaacaaacagcaaaagacagctgaaaacaagaacttcaccggtgggcaggcaagaattctcttctggaaaatgacgtttgtggctctttcccaagttggccttcaaagagcctgcctgctgttgagccagaagatgtctcgtgtgaaggctggggtggcggctgtcttggaacctctgtgagcaggaggccctaagccgcagcagtggatagaggtgcagctctctgcctctctgccctttggtctgtgttcacaggtgacccgtgtcagcctgcatcgcaagcacacaccctgcgggccttcaagtctcactgttccgtatgaggaaacagacagcggactgaggaagcgatggccccagagaaagggcccctgtagcctggctctcacacagtattttatctttgattctgaataaatattttttgtggggttttttttttttttttggtggcagttgtttgttttaaactgaccacttggaagaaaca

SEQ ID NO: 42527 - DNA, 550 bp, Homo sapiens
tagggggttgcatccatctttaccacattttgtactagaatcccaccctttcatccaacttacaccttccttgtacagtaagcctgggtcaccagtcttttctcaagctgttattttgtgccttaatctggtccactcttatccattccaaaagactttggaccattggacaccaggacctaggggctggagtctttcccagaagacactagctcctatgtaagtaggcccacctcctcatataattagctttgcattcaggagattcagggcaagtctcagaaggttctggagcactttaaatccataaaatataatgagtgcttactctgtttctgcataactaagagggatgctcaagtgggtttttcaagggaagaaattagcttatctcaatttaaaaataaaataaaataaaactgaagtcagctatatttacattccttctgtatgtttggtccattctgtctgcttggggcctgtggtctccctttagagatcttttatttactctgtatgttccattaaagagtttattgcctaagccaaa

SEQ ID NO: 42528 - DNA, 444 bp, Homo sapiens
gcatttttagtagagatggggaatttcaccatgttggccaggatggtctctatctcttgacctcatgatctgcctgccttaggctcccaaagtgctgggattacaggcgtgagccactgcaccgggccctagcatagaaatttctaaagtggatataaattaatcatatcaattctaaattacagtttagttaacattttttaacctgttcttcagttattacactgtatttttagtccaaaaaaagatgaaaggatttatcaggatgttttgaggggatagatttttaaataggtcattttgaagatacttttgagtagacatagtcattacatagtcattaaaaaaccagagctttacatatttttataaaataatttttaaattctaaaagtaataaatgaccttagggaagatttggaaaatacaaacaagtatgaagaa

SEQ ID NO: 42529 - DNA, 400 bp, Homo sapiens
aaaagctcgaatattgtgtcttttgtagcttttcttatatcatgggtagtattacatctctctctctctctcttttttttctttttgagagatttttgctctgtcccccaggctgggcaacagagcaagattccatccaaaaacaaaagaatcagagagcttctttaggacacccctgaaataaagttatttcttatgttctcagggctgaaattgttataattaatgaggctcatatgccagagcttccctggcataatgtgaaggagggaatcctagagagacaggagtgttgcactggatttactatgtgtcatctgtatagcccactcccccgccctttgttgacagagcagaagacactctcttcacaaaggttattaagagagtagtggcggga

SEQ ID NO: 42530 - DNA, 388 bp, Homo sapiens
tgcctcagcctcccgagtagctgggactacaggtgcccgccaccacgcccagctaatttttgtatttttagtagagacggggtttcaccgtgttagccagaatggtttcgatctcctgacctcgtgatccgccccgcctcagcctcccaaaggcatgagccaccgtactcggcctgcccaggctggtcttaaactcctggcctcaggtgatcctactgcctcagcctcctgagtagctgggattacagacacagcccccgttcccagctctagcatttcttaaggacaaaattggtgtgtaagtaacaggaaattcacattatgctgtactcattctctaatatcacagccatgttagaacaaatttgggttttcaaaacaagcgtaa

SEQ ID NO: 42531 - DNA, 279 bp, Homo sapiens
agtaacaaaagattttttcagtattaattatcatgaggtcttaaactctgtaatctatataaaactcagagagaacctgtcttgagtagtttaaatctctaattaaatcagtatttctacctagcaacagagtagcaaaagtattaattcagtggttctcaataggggtaggggagcagattttgaccgccagcccagggcacatttggcaatgtcaagatgtttttcgctgtcataacttacggaggggataggtgctactggcatctagtgggtaga

SEQ ID NO: 42532 - DNA, 472 bp, Homo sapiens
cagagtcttgctctgtcgcccaggttggagttgagtgatgcaatctcagctcactgcaacctccacctccctgactcaagccattctcctgcctcaacctcccaagtagctgggactgcaggcatctgccgccacgctccgctaattttcgaatttttagtagagacgggatttcaccatgttggccaggtcttgaactcctgacctcaagtgatccgcctgcctcagcctcccaaagtgctgggattacaggcatgagccactgcacctggccgggagatttcttaaagaaggatttgcgtgcatggaagtgccaggtcatagggagtgaacatttttgaagttactgatgcctcttgctaaacagctttctggagtggcagcaccaatttcacccccaccagacccttgcaatcagtgtttcttgaagtcctctgcacctgtccctgctggaaaggcaggagaaacagtt

SEQ ID NO: 42533 - DNA, 397 bp, Homo sapiens
cagcttcctcctctggggagcaggagagcccgtggcagtgccgtctctgaggatgcctcagggtgtgtgtggctcctgcctgccagcggcttgatgccagcttccacatctgtaaaaaccccttgtccctgcattctcccacaacctggcctgtcagtgcacgaacgcaggagggagggcggggctgtggcaggaggcagtgccgagtccccactggccaccatgtggggcacgcaggagcagacaccagccactcacagagcaccggtatcgcagcacaggccatgtgcatggctgcaacacagctccacagtgagcctgccgagccactgcatgcgcaggccaaggccaggtgtctgctttcccctcgggacatcctggggagggaacgcggggc

SEQ ID NO: 42534 - DNA, 418 bp, Homo sapiens
gaccaactcgtgcaaaagcaaggccagacctaaattcccaaggctaaatcaactagggtttcatctcaagaaagaatcacagatatgtcagggagagtctaattgtcaaacagaaattgccagactcaggtatcagaaagggaggaatgttagtaccacagaaagaccagaggcttaggagccagacagatctggtccactcaccagctgggcaggttacttgactcctgaggctcagtttcagaaggcatcagcatccacttcctgaggtggttgtgagaatctaagatattatatgtaaacacctggcacatggctcatgataaatagtagctattactactccatataggagaaatacaatgtaacatcatgggcccactgcagtggctcacgcctgtaatctcaacactttggg

SEQ ID NO: 42535 - DNA, 718 bp, Homo sapiens
tcggtagagatggggccttctcaagtgatcctcccccctcagcctcccaaagtgctaggcatgagccaccatatccagcctaggtattcttcatatacctggatgtaagtcttttctcacacgttatcaatattttctggcagtctgtgacctatcttttaattttcttaacagagtctcggagcagaattttaaaattttagtgtagtctgagttatcaacttctgttttatgaattgggttttggcaatgtatctaaacaatctgtacatgactctgagacaaagattttctcctgtttgcttctagaactactagttttatgtctagttctatcatccattttgagttaatttttgcataatctgcaaaatatatatcaaagtccaacgttctgcatagaatacctaaccattcaggacgatttactgaaaacgctgtcctttctccgctgaactgcccccatgcctctgttaaaaaccgcctgatcatgggggatgggtctacttctggactctgctctgtcccagtgatctgtatgtctattctttcaccacactgtcctgattgctgtcgctttgtattaagtctcaaaatcagagtgtgagtccttttctcttgcaaaattgttttggctactgtactttgattcttgtgcaagttttagaattcacttgatttctaaaaaatcctgcttagattttgttcggaattgcat

SEQ ID NO: 42536 - DNA, 394 bp, Homo sapiens
tataatcctttgggtatatacccagtaataaaattgctgggtcaaatgatatttctggttctagatccttgaggaatcgccacagtgtcttccacaatggttgaactaatttacactcccaccaacaatgtaaaagtacaacttctgttcttaatacaactgcttccaaagggattcaccagagcatggactctgaggctagagttcctgggcttatatcttgccctagctcatcctggctgtgtgcctcagacaagttgctctctatgagcttatcctgtcataaatggagataatagcaccaactttgattttaaatggctgttttggagattatatgagttcatggtcagagcttaactcagtgcgttggcatatagtcagctgttagtaa

SEQ ID NO: 42537 - DNA, 2359 bp, Homo sapiens
attttatcagttcgcaaatctgaagtctcatactgttttctgtctctttaaaacacattcttctggtggcttgggttcattgtgcattcattggccactcttcttgcagcaaattttaaatcaatttaaaattaggtaaactttttatgatactataatatatatgacgttgaaatgacattggttctgagtctattaatttaaattttgggatcattacattcagaatgaaatgaaattgaccttgatactaactttgagagccaaaaaaatgaatgggtaaacaaagcctaagggtcatgttaattaatttaacaaaacacactattttcagtcctttgggcttgtacattttatagacaaaattagtatttattgatttggaagtgttcaattgagagtaaatgactctgtgttttgaaactaatacctttgcatttaaaatactgaagtattattttgttagttgaagtagatcttttcctgtgtagcatgatttaatgcagagcagttattcacttatacttctgaaaagccataatattgaaatttaaaatgaatagtcttactttaaggtcacttttactttacattttactttaaaggtcgtttttagactttatgcactagtggtattgaaactaacctttaatatttgactaaattgcttgtgaatttttggaaactatgtttaatttttaaagacattgttatgtgaattatcttactaaattatcacttaagaactctctcatagcagtaatttcattaacacatatatatactaaccaatttgctaaatgaattgtcggttgtcctgcttaagtactagggccaagctttgaaatgacttaaagtgatctgaattttgattgagaaaaataatctgtcttctatcgaatgtttgaacttttagtgatgagcctcagcaaagtttcaccctgcatgaagcagaacaggtgggggaaaattacaagaggggtctgtaccaaaaatggccccaggatattccattgaacaagtattgaccattatcttcctaggtgctacaactccatactagtcattacagttagtctttggtttcacaaaaatgttactgcttcaaaggcttggcattaacagtgatgtcagcattcatactgccaacaatctgctggtcatacatggaagactgttaaagtgtggtctgtgcatcattgagcaattgttatgtagacacaaggcctgcttcactcaggatagcttgctcctctcgctgagaagagatacctgaagtctactaagtctactaaatgagatatatatgtgtatgtatatgcctatatatattattatatttactagtgtttgtgataatgttataaaaattaataagattgttttgttttgtatgaatgtacgacaaatcgagttgttcaatgtattgaatgaatgtcttactgtaagcatcagagctgtccaaccatgtgtaaatgtacctggtcttttgatcactgacactactttgctgttcaatctggaatcaactgacctggctctgccattgagaaataactaatttagaacaaaattgttaaattttaaaattgcatttctactagaaatagctttggagagttaattttaggtgcgaataacaggataaatgctatctgatcaagcattcatccgaaaaatgtttttgagaattcactttgtgcaaggcacagcttgttggggctggtatatgtgtggacatgtttgatttgaaaaccttcgtggtgtctctgtgtgttattgatcatctgtgtcttttgcttaaaatggcattatttgtaacacaaacctaatatcatatatacaaatatactgtatgtagccaagaacactaaattggtaagacgctttagaaaatatgcatttgaatttgaatatctaatgcctcaagcaaatttattagagtttcagatgaatatatatttttgtaactggcaagtaaatgagtagaacagagctttttgcctaaaaatatttttataagtactcatttacatagtattcattattttaaatgacaaaatatcaaattggttctataaatagtaattgttttgaatatatccatacttaacatcatatgaaatccaaaatttaatgataaatttcatctggatgtgttattataaaagtcatctttttttcctttgtaaaatatccatgtaacatagcttccattactccatattttatgtatggttaaaattatcaaagtgcattatgtattttatattgtttatttttgtctgcatgaaagattggaatagtaaccgtgtatgataaatgttaataataataaagtgaaatgtagtatgaccaa

SEQ ID NO: 42538 - DNA, 2382 bp, Homo sapiens
attttatcagttcgcaaatctgaagtctcatactgttttctgtctctttaaaacacattcttctggtggcttgggttcattgtgcattcattggccactcttcttgcagcaaattttaaatcaatttaaaattaggtaaactttttatgatactataatatatatgacgttgaaatgacattggttctgagtctattaatttaaattttgggatcattacattcagaatgaaatgaaattgaccttgatactaactttgagagccaaaaaaatgaatgggtaaacaaagcctaagggtcatgttaattaatttaacaaaacacactattttcagtcctttgggcttgtacattttatagacaaaattagtatttattgatttggaagtgttcaattgagagtaaatgactctgtgttttgaaactaatacctttgcatttaaaatactgaagtattattttgttagttgaagtagatcttttcctgtgtagcatgatttaatgcagagcagttattcacttatacttctgaaaagccataatattgaaatttaaaatgaatagtcttactttaaggtcacttttactttacattttactttaaaggtcgtttttagactttatgcactagtggtattgaaactaacctttaatatttgactaaattgcttgtgaatttttggaaactatgtttaatttttaaagacattgttatgtgaattatcttactaaattatcacttaagaactctctcatagcagtaatttcattaacacatatatatactaaccaatttgctaaatgaattgtcggttgtcctgcttaagtactagggccaagctttgaaatgacttaaagtgatctgaattttgattgagaaaaataatctgtcttctatcgaatgtttgaacttttagtgatgagcctcagcaaagtttcaccctgcatgaagcagaacaggtgggggaaaattacaagaggggtctgtaccaaaaatggccccaggatattccattgaacaagtattgaccattatcttcctaggtgctacaactccatactagtcattacagttagtctttggtttcacaaaaatgttactgcttcaaaggcttggcattaacagtgatgtcagcattcatactgccaacaatctgctggtcatacatggaagactgttaaagtgtggtctgtgcatcattgagcaattgttatgtagacacaaggcctgcttcactcaggatagcttgctcctctcgctgagaagagatacctgaagtctactaagtctactaaatgagatatatatgtgtatgtatatgcctatatatattattatatttactagtgtttgtgataatgttataaaaattaataagattgttttgttttgtatgaatgtacgacaaatcgagttgttcaatgtattgaatgaatgtcttactgtaagcatcagagctgtccaaccatgtgtaaatgtacctggtcttttgatcactgacactactttgctgttcaatctggaatcaactgacctggctctgccattgagaaataactaatttagaacaaaattgttaaattttaaaattgcatttctactagaaatagctttggagagttaattttaggtgcgaataacaggataaatgctatctgatcaagcattcatccgaaaaatgtttttgagaattcactttgtgcaaggcacagcttgttggggctggtatatgtgtggacatgtttgatttgaaaaccttcgtggtgtctctgtgtgttattgatcatctgtgtcttttgcttaaaatggcattatttgtaacacaaacctaatatcatatatacaaatatactgtatgtagccaagaacactaaattggtaagacgctttagaaaatatgcatttgaatttgaatatctaatgcctcaagcaaatttattagagtttcagatgaatatatatttttgtaactggcaagtaaatgagtagaacagagctttttgcctaaaaatatttttataagtactcatttacatagtattcattattttaaatgacaaaatatcaaattggttctataaatagtaattgttttgaatatatccatacttaacatcatatgaaatccaaaatttaatgataaatttcatctggatgtgttattataaaagtcatctttttttcctttgtaaaatatccatgtaacatagcttccattactccatattttatgtatggttaaaattatcaaagtgcattatgtattttatattgtttatttttgtctgcatgaaagattggaatagtaaccgtgtatgataaatgttaataataataaagtgaaatgtagtatgaccaaaaaaaaaaaactcactaaaagaa

SEQ ID NO: 42539 - DNA, 363 bp, Homo sapiens
ggagtttttaaatgttgaacacctccaacaaaatatgcttcctggacttccaactcaatgcatggaaagtgacatcttcatgatctccttaccccttgcccaaccacccttgccttcttgaattgcctttttatgttagtaaaactagtgggttctgtctcaaacttgcttatacatggagttacttttgagtcctctcctccatcctagcttgcataaatccaactcatgctttgaattcgtattgacactgtcctagctcagacctagttagctttcacgaggattattgcattagcttgttagccgtcctccttcccctgccacctttccacctccaatactttctactttctgttgtag

SEQ ID NO: 42540 - DNA, 532 bp, Homo sapiens
tcccaaactaatatagaccagaaactagctaatcaaatcaatgatctccaacaaactataatgtggctaggagattgagtagttagtctagaatatagaatgcagttacaatgtgattgagatacttctgatttttgcattactcctcatctgtataaagaaacagagcatgagtgggaaagagttaagagacatttaaagggtcatactggaaatttatctttggatattgcaaaactgaaggaacaagcatttcaagcctctcaggcatatctgacgctaatgccaggaactgaagtgcttgaaggagctgcagacggattagcagctattaacccgttaaaatggatcaagacacttggagggtctgtgatttcaatggtgattgtgcctttaatctgtgttgtttgtctttgtgcagtctgcagatggggatccccaatcctgtgagaaggagcccaccatgacaaagctgcctttgcctttattgctttgcaaaaaaacaataaataaataaataaagagggacatg

SEQ ID NO: 42541 - DNA, 255 bp, Homo sapiens
tagggaggaaaaagagcccttaactgatgaggccctaattttgacatgtgtagtgactggactggctttttactaacagtggtttttaggtcagggctctggctctggcgatgtggttgtttggggagaacatgaaccatgtttaatcttctgtggggtgtttgttcagttggtaaatgaggctgtcagctctggtccgcatgccagcaaatgcatctgatttttcacgtacagcattagtaacatatatattat

SEQ ID NO: 42542 - DNA, 455 bp, Homo sapiens
aatgattggaaccccagtcattcttaaatgagagttcttgtttgtgtgggtaatagtcatcaatattgaccatattagaaattaaaatagtattaaaatatttctatagttaattagcaataaaaacccattacatttttgcaaatatcttaatgtctggcttgataaaagataggctctcgaatctcgcgttcattcctgtgatatcacaggccttgcagcccacggaggcctctgctgtgcactctgtgagaatgagagtgagcaaggctggtggcggcttaggacgctcgggaaggtagttctgtgggactcctgaaaggcctcaggacccaggatcccagatgcacacgggagagtatgtatctggacagcgttatcttaatgcctctgcagaatcgtcctctggtattttggcatcagcatgctttttgattgcctgtctcaaaaaaaaa

SEQ ID NO: 42543 - DNA, 630 bp, Homo sapiens
acaaccgcaagcagaactcggctacagggcttgcctaaacttggttggaaaaagatgtctacttttaaaggctacaggtttcattgattttgaaaagaaggcaccgcggctaaacaaaaaggtagtgagttagacacctgcccctggggtcccccaccctcccaggaggcgcagctgcctagcaaccgaatgctctgcctgccctgcaggtccggaagagtccctggagttgatctctgtctggtgtctgtcctacttcttccatttgctcgtttccatccctttcgctttaccttccgattctagaaatacaaacaagtaaacagcttccacagtaccatccacccatcaagacctaaagtcctaaatcctgaaattgtccgctgtttctcgaggtccttcccaccgaatctcaacatctgaactgcaagtggtttgcttttactcattttacagatgagaaactgagatagactcagagaagagaaattattaaaattgcattgagttagggagctggaactgcaatctggttgactacaagttgctaatacatttgttaattcgactcacatggtgattccggattgtaaattggtgacagttttaccaaactagataatgtgtgca

SEQ ID NO: 42544 - DNA, 377 bp, Homo sapiens
aaatactcccttttgcttgaggaataatcagacatcatcaaaataaggacattacgttgaaaataatatcttggggaaaactatttatttctaatacggccagtgaggagttgtcttagggaatgaatgggctgaccaagaggattagaaaagagattcagcacttccacctggtttggctctagccctggtttgcagtgactaagagttgtcacctagacatctgtttgtagggcagagtgagacaagtctgtgacctcagctcagttcctgtggacagatgcccaccccttgaagttaacactcttgttaacagttttagtcacagagccaaggactgatagcaaagaagcaatgatgtgttgtttgtgttcact

SEQ ID NO: 42545 - DNA, 387 bp, Homo sapiens
gttgcttatgagcatagcatagtgtagtgattaggaattggaagacctgattttaatgtagttccatcagtaactagctctgatctttagtacattctctctgttgctcctttacctataaacttggaataagttttttccaattatctcatttggttttgaggtaaaatgagactatatatgaaagtgctttgaaaagtacagaagcatcaatttgaagacattgggtggggggtgtttaatgaaattgataaaataccatgacatttgggtgggtgaagttcattgccaaggtctccctttatctctttttcattcaggatttaatacttagttattatcttagagaaagcaaagtaacataacccattaactcatatttgtctt

SEQ ID NO: 42546 - DNA, 430 bp, Homo sapiens
gccagtaaaggctgcatatgaagcaaatcactattgtgggcagctagagcttattcctcttgggagccctaggtggtagtaaagaatatgcctcctaggggatagggagctggggtatttatccaccaactgccatcagatatgagctaaggggctgcttctgaggggtaaggagatattaatttctgaggcttcttacctccctcttctaactgctctctctctctatatatatatgtgtgcgtgtgagagagagagaaagagagaaagtgctactctgcatttgactgtgtcaaccactatatatatagatatttgcttatttatttcttccaaccccatcttacaaacaagaaaacaaacttctgagaggtcagcagcttgttgaagtcatatagctgttaagtgacaaaatttggattggatccca

SEQ ID NO: 42547 - DNA, 2087 bp, Homo sapiens
ggaaaacgtcacccagcagatgggtagtcctctgcaaagttacactgtcagccagtggcactggttcttttatttatgttgggtttttgttttttttttagaggagagtgaagaattgacatcagacaacatggagtgcaaaaataataacccatcaatatttgccttctaaatgtaaaatgtaaaagtttaactgatctgtgtacacattagagaccactttcacacgccacaatatgttcagttgcaggttaacactgagaggttgagacttccctcatctgatgaccagcttggttaatttgacttctgaaggcactaaattaccaagtatttgcagtaatggggaccggattaattttcctcacaattctctatagctgtctgatataagggctgtgtttttattgaatcacagatcctcaaattacagtgaaagcatgtcttgctagtaagactcatttgaaaacctctttattcttggaataattgggccagtacaagtggccagatgtatcctggccacattggaaaactatttgggcccgttcagaaccacttaactgcaacaacagtagtaactatagttaatatctatctattgagttattgtgtgacagttacttggataagtactttaatgcattctcattttaatcctcacagctaccctatgaggctgttactgttcttatccccattgtattgataaggaaactgcccagggtactcagctaagaagaggattgctttgggcataggaagcagaatgacgagttcagtcttcctcagtagttggagcacagttctcaaagcccatcaacactttggaatggatttgttgttttatttatgccatcaagggagagttgatatttgtgtattgctaaaaactactaaagtatgtcgatgcttaggtaggaacatacaaaccatatatcctctgggatctgcccaggtttctgtataaggcttgacctacgtaagatcctatgatgaagaccagaaaactttttttaaaagtaggtaaattaaaattaaaatcacgagtttgttcacatttgtcccataggttcctagtgcaaaaatgcagggagataaaagcaaacatttgaactcagtgaagtgagagtctttgggaactcctagatgttagaaatagcaccggggcatcaggtagccaacgttcaattcacttttcacgtttgtgtctttgtagctttagagctgatgagtctgattggtttggaagagagagttttaatttatgatgtcactgtgagaactgttgtgaaaattttgtaagaaaatacagtaatctgttgattttttcctgtagttttggctttcacatccctttggctgtgtttaagttcaagagcatgccaaggccatgagggtcctggcttgcacttcttgggaacagggcatgctagaggtgggtcatgaagctttcaaggtcactgttccagcccgaccctgcgcaatttaggcattgcctttatgtctctcctctctggaacttcatgtagcagcctaacaccggggccgagttgcctttactctattttctatgatgaatacttgtggagaaactgtgacaaatccattgatcctgatatttttattgttggagtcttgttgattctctatgaataatttctatttgattgtactgtgtagagttaatacccactagggatatgttaataaagctacaaatgcatagtgtaatatagaatagcaagatttttttgtgaacaatttatatagaagagtaagttgttttttaagtgttaggctcatttcttttagaaacttaaaatgttataaaagttttttaaacattcaatatttttaattataagagacatttgttactagagccaattatttcaggtgttctaattggagtgttgattttattacctcatatacctctagaatgccacgtgttctgttggggataaaattgcacaataaatgtcaagtctctgttaagtgttttaacttggtttttgcatctttctaattcattgtaaatacttttctgtttctttgaatacataacttttctctccctgaag

SEQ ID NO: 42548 - DNA, 272 bp, Homo sapiens
gctgctgcgggtgagacgggaggagggtagtcacgggcttagggctggaggctggcgggctagggctgagtgcagcgcctgcttagagaccttcgggagaacttctgccggaacctcgacggctcagaggcgccctggtgcttcacactgcggcccggcatgcgcgtgggcttttgctaccagatccggcgttgtacagacgacgtgcggccccagggtgaggcccaagcttgggggctacagagccggggctggaagcctggaaccggagg

SEQ ID NO: 42549 - DNA, 319 bp, Homo sapiens
agactccatctcaaaaaaaaaaaaaaaaaaaaaaggaatcagggaagtggaggatgaaagatgggccaaaacttttgatgctgcaaatggagagtcatggaacccttggcccttcatgtgaagtcacctggagaagaagcaactgggatggaacacaggtgattaaggtggaaacaggctaattaagtggaattgttttaatatttttgttgcatacgttactgatactaaatgcatgtctcattcccatgccgcccctcacccatcctgcactccttgagacatgcatttagtatcagtaacgtatgcaacaaaaaaa

SEQ ID NO: 42550 - DNA, 8971 bp, Homo sapiens
gcagcctccaggggacacgccatgactctggagggtctgtatttggcaaggggccccctggcccggctcctgctggcctggtcggccctgttgtgcatggcaggtggccaaggccgctgggacggggccttggaggctgcaggtcctggacgtgtgcggaggcggggcagcccaggcatcttgcaggggccgaatgtgtgcggctcccggttccatgcctactgctgtccaggctggaggacattccctggcaggagccagtgtgtcgtacccatctgtaggcgcgcctgcggtgaaggcttctgctcccagcccaacctgtgcacctgtgcggatgggacgctggctcccagctgcggggtgagccgagggtcagggtgcagtgtgagctgtatgaatgggggcacctgccggggggcgtcctgtctgtgtcagaagggctacacaggcaccgtgtgtgggcagcccatctgtgaccgcggctgccacaatgggggtcgctgcattgggcccaaccgctgcgcctgtgtgtatggcttcatgggacctcaatgtgagagagattaccggacgggaccctgctttggccaagtaggccccgaggggtgccagcatcagctgacgggcctcgtgtgcaccaaggcactttgctgtgccactgtgggccgtgcctggggccttccatgtgaactttgccctgcacagccacacccctgccgccgcggcttcatccccaatatccacacgggggcctgccaagatgtggatgagtgccaggctgtgccaggcctgtgccagggaggcagctgcgtcaacatggtgggctccttccattgccgctgtccagttggacaccggctcagtgacagcagcgccgcatgtgaagactaccgggccggcgcctgcttctcagtgcttttcgggggccgctgtgctggagacctcgccggccactacactcgcaggcagtgctgctgtgacaggggcaggtgctgggcagctggcccggtccctgagctgtgtcctcctcggggctccaatgaattccagcaactgtgcgcccagcggctgccgctgctacccggccaccctggcctcttccctggcctcctgggcttcggatccaatggcatgggtccccctcttgggccagcgcgactcaacccccatggctctgatgcgcgtgggatccccagcctgggccctggcaactctaatattggcactgctaccctgaaccagaccattgacatctgccgacacttcaccaacctgtgtctgaatggccgctgcctgcccacgccttccagctaccgctgcgagtgtaacgtgggctacacccaggacgtgcgcggcgagtgcattgatgtagacgaatgcaccagcagcccctgccaccacggtgactgcgtcaacatccccggcacctaccactgccggtgctacccgggcttccaggccacgcccaccaggcaggcatgcgtggatgtggacgagtgcattgtcagtggtggcctttgtcacctgggccgctgtgtcaacacagagggcagcttccagtgtgtctgcaatgcaggcttcgagctcagccctgacggcaagaactgtgtggaccacaacgagtgtgccaccagcaccatgtgcgtcaacggcgtgtgtctcaacgaggatggcagcttctcctgcctctgcaaacccggcttcctgctggcgcctggcggccactactgcatggacattgacgagtgccagacgcccggcatctgcgtgaacggccactgtaccaacaccgagggctccttccgctgccagtgcctgggggggctggcggtaggcacggatggccgcgtgtgcgtggacacccacgtgcgcagcacctgctatggggccatcgagaagggctcctgtgcccgccccttccctggcactgtcaccaagtccgagtgctgctgtgccaatccggaccacggttttggggagccctgccagctttgtcctgccaaaaactccgctgagttccaggcactgtgcagcagtgggcttggcattaccacggatggtcgagacatcaacgagtgtgctctggatcctgaggtttgtgccaatggcgtgtgcgagaaccttcggggcagctaccgctgtgtctgcaacctgggttatgaggcaggtgcctcaggcaaggactgcacagacgtggatgagtgtgccctcaacagcctcctgtgtgacaacgggtggtgccagaatagtcctggcagctacagctgctcctgcccccccggcttccacttctggcaggacacggagatctgcaaagatgtcgacgaatgcctgtccagcccgtgtgtgagtggcgtctgtcggaacctggccggctcctacacctgcaaatgtggccctggcagccggctggacccctctggtaccttctgtctagacagcaccaagggcacctgctggctgaagatccaggagagccgctgtgaggtgaaccttcagggagccagcctgcggtctgagtgctgcgccaccctcggggcagcctgggggagcccctgcgaacgctgcgagatcgaccctgcctgtgcccggggctttgcccggatgacgggtgtcacctgcgatgatgtgaacgagtgtgagtccttcccgggagtctgtcccaacgggcgttgcgtcaacactgctgggtctttccgctgtgagtgtccagagggcctgatgctggacgcctcaggccggctgtgcgtggatgtgagattggaaccatgtttcctgcgatgggatgaggatgagtgtggggtcaccctgcctggcaagtaccggatggacgtctgctgctgctccatcggggccgtgtggggagtcgagtgcgaggcctgcccggatcccgagtctctggagttcgccagcctgtgcccgcgggggctgggcttcgccagccgggacttcctgtctggccgaccattctataaagatgtgaatgaatgcaaggtgttccctggcctctgcacgcacggtacctgcagaaacacggtgggcagcttccactgcgcctgtgcggggggcttcgccctggatgcccaggaacggaactgcacagatatcgacgagtgtcgcatctctcctgacctctgcggccagggcacctgtgtcaacacgccgggcagctttgagtgcgagtgttttcccggctacgagagtggcttcatgctgatgaagaactgcatggacgtggacgagtgtgcaagggacccgctgctctgccggggaggcacttgcaccaacacggatgggagctacaagtgccagtgtccccctgggcatgagctgacggccaagggcactgcctgtgaggacatcgatgagtgctccctgagtgatggcctgtgtccccatggccagtgtgtcaatgtcatcggtgccttccagtgctcctgccatgccggcttccagagcacacctgaccgccagggctgcgtggacatcaacgaatgccgggtccagaatggtgggtgtgacgtgcactgtattaacactgagggcagctaccggtgcagctgtgggcagggctactcgctgatgcccgacggaagggcatgtgcagacgtggacgagtgtgaagagaacccccgcgtttgtgaccaaggccactgcaccaacatgccagggggtcaccgctgcctgtgctatgatggcttcatggccacgccagacatgaggacatgtgttgatgtggatgagtgtgacctgaaccctcacatctgcctccatggggactgcgagaacacgaagggttcctttgtctgccactgtcagctgggctacatggtcaggaagggggccacaggctgctctgatgtggatgaatgcgaggttggaggacacaactgtgacagtcacgcctcctgtctcaacatcccagggagtttcagctgtaggtgcctgccaggctgggtgggggatggcttcgaatgtcacgacctggatgaatgcatctcccaggagcaccggtgcagcccaagaggtgactgtctcaatgtccctggctcctaccgctgcacctgtcgccagggctttgccggggatggcttcttctgcgaagacagggatgaatgtgccgagaacgtggacctctgtgacaacgggcagtgcctcaatgcgcccggcgggtaccgctgtgaatgtgagatgggctttgaccccaccgaggaccaccgggcctgccaggatgtggacgagtgtgcgcaagggaacctctgtgcatttgggagctgtgagaacctgcctggaatgttccgctgcatctgcaatggtggctacgaactggaccgagggggtggcaactgcacagacatcaacgagtgtgcagacccagtaaactgcatcaacggcgtgtgcattaacacccccggcagctacctctgcagctgcccccaggattttgagctgaaccccagcggagtgggctgcgtggacactcgggccgggaactgtttcctggagacgcatgaccgaggggacagtggcatttcctgcagtgccgagatcggagttggtgtcacccgagcttcctgctgttgctccctgggccgggcttggggcaatccctgtgagctgtgccctatggccaacaccactgagtacagaaccctgtgcccgggtggtgagggcttccagcctaaccgcatcactgtcattctggaagacatcgacgagtgccaagagctgccagggctgtgtcaggggggtgactgcgtcaacacgtttggcagtttccagtgtgagtgcccacctggctaccacctcagtgagcacacccgcatctgtgaggatattgacgaatgctccacacactccggcatctgtggccctggcacctgctacaacaccctggggaactacacctgtgtctgccctgcagagtacctccaagtcaatggtggcaacaactgcatggatatgaggaagagtgtctgcttccggcactataacggcacatgtcaaaatgagctggccttcaacgtgacccggaaaatgtgttgctgctcctacaacattggccaggcctggaatagaccctgtgaggcctgccccactcccatcagtcctgactaccagatcctgtgtggaaatcaggccccgggattcctcactgacatccacacggggaagccccttgacattgatgagtgtggggagatccccgccatctgtgccaatggcatctgcataaaccagatcgggagtttccgctgcgagtgccccgcaggcttcaactacaacagcatcctgctggcttgtgaagatgtcgatgagtgtggcagcagggagagtccctgccagcagaatgctgactgcatcaacatccccggtagctaccgctgcaagtgcacccgagggtacaaactgtcgccaggcggggcttgtgtgggacagaatgagtgtcgggagatcccgaatgtctgtagccatggtgactgcatggacacagaaggcagctacatgtgtctgtgtcaccgtggattccaggcctctgcagaccagaccctgtgcatggacattgacgagtgtgaccggcagccttgtggaaatgggacctgcaagaacatcattggctcctacaactgcctctgcttccctggctttgtggtgacacacaatggggattgtgtggattttgatgagtgtactaccctggtggggcaggtgtgccgatttggccattgcctcaacacagctggttccttccactgcctctgccaggatggctttgagctcacagctgatgggaagaactgtgtggacaccaatgagtgcctcagccttgcaggaacctgcctaccaggcacttgccagaacctcgagggctccttccgctgcatctgtccccctggcttccaggtgcagagtgaccactgcattgatatcgacgagtgctcagaggagcccaacctctgcctctttggcacctgtaccaacagccctgggagcttccagtgcctctgcccacctggctttgtcctctctgacaatgggcaccgttgctttgacacacggcagagtttctgcttcacccgttttgaggctgggaagtgctcggtgcccaaagctttcaacaccaccaagacccgctgctgctgcagtaagaggcctggggagggctggggagacccctgcgaactgtgtccccaggagggcagcgctgcctttcaggagctctgcccctttggccacggggcagtcccaggcccggatgactcccgagaagacgtgaatgagtgtgcagagaaccctggcgtctgcactaacggcgtctgtgtcaacaccgatggatccttccgctgtgagtgtccctttggctacagcctggacttcactggcatcaactgtgtggacacagacgagtgctctgtcggccacccctgtgggcaagggacatgcaccaatgtcatcggaggcttcgaatgtgcctgtgctgacggctttgagcctggcctcatgatgacctgcgaggacatcgacgaatgctccctgaacccgctgctctgtgccttccgctgccacaataccgagggctcctacctgtgcacctgtccagccggctacaccctgcgggaggacggggccatgtgtcgagatgtggacgagtgtgcagatggtcagcaggactgccacgcccggggcatggagtgcaagaacctcatcggtaccttcgcgtgcgtctgtcccccaggcatgcggcccctgcctggctctggggagggctgcacagatgacaatgaatgccacgctcagcctgacctctgtgtcaacggccgctgtgtcaacaccgcgggcagcttccggtgcgactgtgatgagggattccagcccagccccacccttaccgagtgccacgacatccggcaggggccctgctttgccgaggtgctgcagaccatgtgccggtctctgtccagcagcagtgaggctgtcaccagggccgagtgctgctgtgggggtggccggggctgggggccccgctgcgagctctgtcccctgcccggcacctctgcctacaggaagctgtgcccccatggctcaggctacactgctgagggccgagatgtagatgaatgccgtatgcttgctcacctgtgtgctcatggggagtgcatcaacagccttggctccttccgctgccactgtcaggccgggtacacaccggatgctactgctactacctgcctggatatggatgagtgcagccaggtccccaagccatgtaccttcctctgcaaaaacacgaagggcagtttcctgtgcagctgtccccgaggctacctgctggaggaggatggcaggacctgcaaagacctggacgaatgcacctcccggcagcacaactgtcagttcctctgtgtcaacactgtgggcgccttcacctgccgctgtccacccggcttcacccagcaccaccaggcctgcttcgacaatgatgagtgctcagcccagcctggcccatgtggtgcccacgggcactgccacaacaccccgggcagcttccgctgtgaatgccaccaaggcttcaccctggtcagctcaggccatggctgtgaagatgtgaatgaatgtgatgggccccaccgctgccagcatggctgtcagaaccagctagggggctaccgctgcagctgcccccagggtttcacccagcactcccagtgggcccagtgtgtggatgagaatgagtgtgccctgtcgccccccacctgcgggagcgcctcctgtcgcaacactcttggtggcttccgctgcgtctgcccctctggctttgactttgatcaggccctcgggggctgccaggatgtggatgagtgcgccggacggcgtggcccctgtagctacagctgtgccaacacgcctggtggcttcctgtgcggctgtcctcaaggctacttccgggctgggcaagggcactgtgtctccggcctgggcttcagccccggaccccaggacaccccggacaaagaggagctgctctcgtctgaagcctgctacgaatgcaagatcaatggcctctcccctcgggaccggccacgacgcagtgcccacagggaccaccaggtgaacctggccacccttgactccgaggccctgctgaccttgggcctgaacctctcacacctgggccgggccgagcgcatcctggagctccggccggccctggagggtctagagggccggatccgctacgtcatcgtccgcggaaacgagcaaggtttctttcgcatgcatcacctccgtggcgtcagctccctgcagctggggcggaggcggccggggcctggaacctaccggctggaggtggtgagccacatggcaggaccctggggtgtccagccagaggggcagccagggccatggggccaggccttgaggctgaaggtgcagctgcagttgctttagttgggaggagcctcagtgggccccagctgtccagagaagggggattctggaactgggaaggactgatccccagaagcgatggctgaccagattgaaccccgaaactcaggaagagtgaaatgctacacgacaacctcaggcaagcccggcctctgcctgggcctctgtgccagccccgggggccccccagttactcagtctttcctggagacagcaagaagctgcaatgtgcaatccccctgcccccacagccaaggtcaggaagaggccctgtggtcaccgtgtctggccaatctcaggctttcacttctgtactgcactgtggcttgccctggcggggggcagggggttggcaggacatggcaatgggcaactggggtgggcacagggcttattcctcggagtagaagggtgtacagggggcccagactccacagtgacttgccacatttgccccccatttggagaatgcttttatatcaaaagtggagacgataataaagttattttgggttaagtc

SEQ ID NO: 42551 - DNA, 451 bp, Homo sapiens
cgggacgaggagctggggccactgaggtcctcccaactaaagcaactgcagtgcaccttcagcctcaaggcctgccccggcctctgcctgggcctctgtgccagccccgggggccccccagttactcagtctttcctggagacagcaagaagctgcaatgtgcaatccccctgcccccacagccaaggtcaggaagaggccctgtggtcaccgtgtctggccaatctcaggctttcacttctgtactgcactgtggcttgccctggcggggggcagggggttggcaggacatggcaatgggcaactggggtgggcacagggcttattcctcggagtagaagggtgtacagggggcccagactccacagtgacttgccacatttgccccccatttggagaatgcttttatatcaaaagtggagacgataataaagttattttgggttaagtc

SEQ ID NO: 42552 - DNA, 535 bp, Homo sapiens
gtgtgtatttttaattgagaaaaacacacacagtctctctgctcttgtctttcctcccactcctcacctctttctggtgtgagcggatgtattttggtcacagcaagattttcttgagtgtgtgctggtttgtggccacaacagcctcaaccagattgcagggctagtgggtcccttcgctcagcatcgctggaagtcccagggggctgggctgcccctgatggcagatgccttctgcagacattgatgagtgtggggagatccccgccatctgtgccaatggcatctgcataaaccagatcgggagtttccgctgcgagtgccccgcaggcttcaactacaacagcatcctgctggcttgtgaaggtgccacctctccctgttcccagccctggggcctgggtgggatgcatgtccgccactgtgcaatctgggcgagtaactaaaactctgtaagcctccatttccctgtatgtataatgggctaacacctttccaagggcctccatctcatataaccacccttactccagct

SEQ ID NO: 42553 - DNA, 2541 bp, Homo sapiens
gcaacagggaaagatcctatctcaaaataaataaataaataaaataattataaaatcagcacatcaaacctatgtttctatgtatggggtttgttgtgtagggtgaggctgtcttgaaaatgtaactttccagaagcaaagaatagtagaagcgctaaatagataccatggaaggaatctgctggtggtgccagattaggaatcttgctacctctttccactggacaccatctgccccacctataaccccacgagagtcagataatccttccccagctgtccctgtcgtcctgagtctcagcccttgccctggagccagaattgccactgggagggcttgtcctggggccctcagtgatcacacagtgattgcaggtgttggtcccagtcccaagtgagccccctgcatcctggctggcacaaggacctttcttcctccttttcacagacaccaatgagtgcctcagccttgcaggaacctgcctaccaggcacttgccagaacctcgagggctccttccgctgcatctgtccccctggcttccaggtgcagagtgaccactgcattgatatcgacgagtgctcagaggagcccaacctctgcctctttggcacctgtaccaacagccctgggagcttccagtgcctctgcccacctggctttgtcctctctgacaatgggcaccgttgctttgacacacggcagagtttctgcttcacccgttttgaggctgggaagtgctcggtgcccaaagctttcaacaccaccaagacccgctgctgctgcagtaagaggcctggggagggctggggagacccctgcgaactgtgtccccaggagggcagcgctgcctttcaggagctctgcccctttggccacggggcagtcccaggcccggatgactcccgagaagacgtgaatgagtgtgcagagaaccctggcgtctgcactaacggcgtctgtgtcaacaccgatggatccttccgctgtgagtgtccctttggctacagcctggacttcactggcatcaactgtgtggacacagacgagtgctctgtcggccacccctgtgggcaagggacatgcaccaatgtcatcggaggcttcgaatgtgcctgtgctgacggctttgagcctggcctcatgatgacctgcgaggacatcgacgaatgctccctgaacccgctgctctgtgccttccgctgccacaataccgagggctcctacctgtgcacctgtccagccggctacaccctgcgggaggacggggccatgtgtcgagatgtggacgagtgtgcagatggtcagcaggactgccacgcccggggcatggagtgcaagaacctcatcggtaccttcgcgtgcgtctgtcccccaggcatgcggcccctgcctggctctggggagggctgcacagatgacaatgaatgccacgctcagcctgacctctgtgtcaacggccgctgtgtcaacaccgcgggcagcttccggtgcgactgtgatgagggattccagcccagccccacccttaccgagtgccacgacatccggcaggggccctgctttgccgaggtgctgcagaccatgtgccggtctctgtccagcagcagtgaggctgtcaccagggccgagtgctgctgtgggggtggccggggctgggggccccgctgcgagctctgtcccctgcccggcacctctgcctacaggaagctgtgcccccatggctcaggctacactgctgagggccgagatgtagatgaatgccgtatgcttgctcacctgtgtgctcatggggagtgcatcaacagccttggctccttccgctgccactgtcaggccgggtacacaccggatgctactgctactacctgcctggatatggatgagtgcagccaggtccccaagccatgtaccttcctctgcaaaaacacgaagggcagtttcctgtgcagctgtccccgaggctacctgctggaggaggatggcaggacctgcaaagacctggacgaatgcacctcccggcagcacaactgtcagttcctctgtgtcaacactgtgggcgccttcacctgccgctgtccacccggcttcacccagcaccaccaggcctgcttcgatgtgaatgaatgtgatgggccccaccgctgccagcatggctgtcagaaccagctagggggctaccgctgcagctgcccccagggtttcacccagcactcccagtgggcccagtgtgtgggtgagtgaaaagggctgggaagaagctgggccctccaccagaatctgctcagagcaggcgactaacagacgccaccctgcaagatgatgtgacaagcacaattatctaaagattgaacaggccagcccagaaggtagtgagttccccactgctggggagtcaaggtgcagcagaataagcatcaaaaagtgtctgagttcattccttagggcatggtggcctggaggactcagttgagaaagattctgagacctgaagtctgcaattttgtgatcacagggaaagagtgctgtgattgattagtg

SEQ ID NO: 42554 - DNA, 262 bp, Homo sapiens
tccaaatgaattttagaatcagtttaccaagtcttttgaaaaaccattttgagattttaatttggaattacatgaaacctatagaccaatttggggagacttgacatttttataattttaagtcttatccaaggatatggtgtatctcttcatttattttggcctttaatgtctttcaatagaatgttgtattttttatcataaagaatttatacatctcttgagatttaatgctaggtacactataattttgtttctatta

SEQ ID NO: 42555 - DNA, 448 bp, Homo sapiens
aaaactgttttcttgaaaacaggcttggacacaattgaaagctggcttcctgcaaacacaccaagagtctgtaatctagcctatccattatatgtcctttattattcatgatatcctattcttctaccttgttgcctggtaactttttctgaggactgagtttctgcagcgatgtggtgcactcttcctgtgatgaggaaacatctgggcccccttctgcaggctttggaagatgatgtgtcttgtcaaggggtaaagggcaaatggatttaatttctgcttaaaactatcatagacgttccaaatagaatatgtaaaatttctctgtattagaaaaagaaacgtgataccaattgtatattttcttttctttatttattctctgtaagtctgtcagatgataaattgtaaataacaatgattaaagagtcatgctactgaaaaatct

SEQ ID NO: 42556 - DNA, 507 bp, Homo sapiens
ctcagccatctcagaggacggcacttgttgcccccagtgccactggccaaagaccttttcaattacaccagacgcattggctctaggcagcctcagcttcctgtcaccacggactctgtttaatgtctcagctggacttggctgcatcagagattgcagggaatatggctggtccacttgggtggatttgcacatggccatcctgtacatgtgcccttctgccagcctggcagcctctcccttcgtctgccttttccttggaagtgcatcagcagggggagctggatctatcctcaacctaatggaaagcagacgtccccgcacgcagaggagcaggctgccttgcagggtttttctggaatagctcagatggttgttattttattcattggaatggagatgaattgctaaatgtaccagttaaatgtgatttaaattgtatatctttgtcaagtttttcacataaattcactcattaaaaaaaaattctttgcacagaaaaaaaac

SEQ ID NO: 42557 - DNA, 658 bp, Homo sapiens
tgtagagacagggtttcaccatgttggccaggatggtctcgattgtttgacctcgtgatccgcccgcctcggcctcccaaagtgctggaattacaggcatgagccactgcacccagccggttctaaaattcttttatttatttgtatatgccaaattctgtagtgaaatacgtaattctgttgtaaattgtagttcagtacaatttgattttcactattcaaatctataccaaaagctgtttttattgttgggctgattcttctacactgttacttggaaataataatataccaggattctttctcttagacttaggagtctttctctttgcttgctttttcagaggctaacagtactgggtattctttaactgtcttgatatgctgatgaaagcacagtgttctgtttttgaatcttctcaaatgtccttgtctttgattcacaactttttgtcttaagaggccttcagcatcccatacaaggaaacaagtctttttttagctgctacctttggagttgattttgtttatgtctaggagcactaaattatttatacttatactattgaaatattcctctgttataaattcaaaaattgactttggaagataaaattttagttgaatttaatacatagcactctggaaagagtattgg

SEQ ID NO: 42558 - DNA, 410 bp, Homo sapiens
ctatatggattcttctttaagataaagggactcaaacatgatactacctcttatagtttttacatgcagagaataaagcacacagacctggaatctccctctgcggtctacgagcacaaccacgtcagcctgcgagcggcacgcctggtgaagtatgagatcagagcagaggccctggttgacggcaagtggcaggagttcaggacaaaccagatcaagcagaagtttgggttgaccacgtcatcctgcaaaagccataccttgaaaatccaaactgtgggcatcccaatctatgtaagttttgcattcatcttcccagcatcttgacagtttccagaagaatctatgggattttccccccactggtctgcataaaagaaaataaaatgacataaaagggagcactcaag

SEQ ID NO: 42559 - DNA, 463 bp, Homo sapiens
tacaaaatcaatgtacatagatcactagcactgttatataccaacaatgaccaagctgagaatcaaatcaaaaactcaatcacttctacaatagctacaaaaaaaaataataaaatacctaggaatatacttaaccaaggaggttaaagatctctacaaggagaactacaaaacactgatgaaagaaatcatagatgacacaaacaaatggaaaagcatccatttggaagaatggatagcagaatcatggattggaagaatcaatatcctgaaaatgaccatagtgcccaaagcaatctacagattcaatgcaattcctatcaaaacatcaacctcggccagacacggtggctcacacctgtaatcctagcactttgggaggccgaggtgggtggatcacctgaggtcaggagttcgagaccagcctgaccaacatggagacaccccatctctactaaaaata

SEQ ID NO: 42560 - DNA, 439 bp, Homo sapiens
gtttgcattgagttacaacatactcctttagctgatcatagttttttattgcccatcttctgaagcctctttctgtcaagtcatccctctgatcctccacacagttctgtgcccttgatggagagatgttgcaatcgtttggaggggaagaggcactctggccttttgggctttcagcattttttcattgattctttctcatctttgtgagtttgtctagatttggtctttgaggctgctgacccttaagtggggtttttgtgggggccttttgttgttttgttgatgctgttgtgtcactttctgcttgtttgtttttctttcaatagtcaggtccctcttctatagggctaccacagtttgctgagggttcacttcaggcccgattcatgattcactcccttgcctggatatgtcactcaaggaggctggagagcag

SEQ ID NO: 42561 - DNA, 506 bp, Homo sapiens
gcgtcgacgttacagtcatctcaggggcccttccctcagcaggtcaagagacattctctgctgggcaggacccctcagaaatcttaaaggtgctctactttcaaacagaagcaaacattttaaatctcatgttttctctatcagcttaagatgctggcccaaaaggatctcccttagaccctatcccaagtaatctttatttccatttggaagttgggaaatattctttatttccatgtgagaggtaatgtaggggttatagatgccagcccctgttctcagggtccttatcctatgtgcctacagacaagccatgaatacttggaaagtgaagtactagcattcacaaaagtgaggtgtatgttttgatattgtagcatgtgtgcacatgtaccaatctacagtctatagttagagtctgtatgtatagatgtatatttacaatatacatacatgcgcctgtagacaggcacgtcatgtctctttggtacaacacgtggtcgagc

SEQ ID NO: 42562 - DNA, 321 bp, Homo sapiens
aaatacatccagcactttccttgccccttgcctcggcttaattgtttcttccacctggaatgggacttttcaagggtccccatcaaataccactgtcctcctccatcaagtcattccctattctccaagctggcaattagcctcctctgagttcctatagcatttgtttctgtctgtcttctggaaccaatcatagtacatattatggaattatcctttgtataactcttttttttttgagacggagtctggctctgtctcccaggctggagtgcagtggcacgatcttggctcactggaagctccgcctcccgggtccac

SEQ ID NO: 42563 - DNA, 410 bp, Homo sapiens
ggttcacgccattctcctgcctcagcctcccgagtagctgggactacaggtgcctgccaccacgcccagctaattttttgtatttttagtagagacagggtttcactgtgttagccaggatggtctcgatctcctgatcttgtgatccgccttggcctcccaaagtgctgggatcacaggtgggagccactgcgcccggccgccacaagccttatttatttaaatcacctttgtcttaggacactaaactcccaaaaggtgaggcctgggaccagcatcaggctggacaagtgctgcagaggccacgccaaccctgtgcggccactgctgccccgcccagtcactaagcacctgcaggtcaccgagcacagggcagggggcagcctccaccaagcacagggcaggggcca

SEQ ID NO: 42564 - DNA, 442 bp, Homo sapiens
ctcaaatatacatcaataggtgaatggattttaaaatgcagtatatctatacaatggaatattattcagccccaaaaagcaatgaaggacggatacactgatacatgctataacactgatgaacctctaaaatttcctgctaagtgaaaaagtcatgaaagaccacatgctatgatcccatccatataaaagtccagaatagggaaatctatagaaacaggaagtaggttagtggttgcttaaagaaagagtggtaagtaggttgcttaaagggtcataagtggggacaatagttaaaaagttgggggtttggaggtgatttttaggttttcagatgatgaaaatgtaaaattgaggtggtgatggttgcatgtatctttgagtatactaaaagctactgaattgtactactgaaataaatgagttatatggtatatgaatt

SEQ ID NO: 42565 - DNA, 241 bp, Homo sapiens
  misc_feature (227)..(227): n is a, c, g, or t
ttgccccttggtagcagtgatgggactggttctgggacccctatggatacccaaatatgcagatgtttaagtctcttatataaatgccctagtatttgcatataacctatgtacatcctctcctatactttaaatcatctctagattacttataatgcataatacaatgtaaatgctttgcaaataattgttatattgtttgaaaccctgtctctactaaaaatacnaaaataagcgtctc

SEQ ID NO: 42566 - DNA, 666 bp, Homo sapiens
aaataaatagattttataaaatttttttaaaaagtgagacaatagtcatgagtaacaagggggtaagtttcctagagccacaaatttcatggcttaaaacaacatcaatttattctcttacagttctggaggccagaaatttgaaatgagtcttatggagctgaaatcaagcacaaaccaaagctgggcttcatctggatgctctatgaaagattcctttgctcgcctcttccaattcctgggtggttgctggcattccttgcattgtagactcgtcatcccaacgtcttcctccttggcccccattgccttctcctctcctgtgtggggcatcatcaactctccctttccctccctcttaaaaggatatgaatgtgactgctttaggacctaccctggataattcagaataatctccccatctcaagacccttaacataatcacatatgcaaagaacttctcttttctttaatcatatgagttaacatgtacaaatttcagagatgagaacatggatatctttagggtgccattttttcagtccattggaaatggtagatgtggaagaagaggagctaaaattcaatcagactaggggtctgcaatctgtagcctgcaagtcagtgcctgtttttgtaaataaagttttattggagcacagccat

SEQ ID NO: 42567 - DNA, 744 bp, Homo sapiens
atttataacgaggattcccagtatctaataatggcactgtccacggatgaacgggacagtcttgctattactatctattggggtaaaattgaagggacaaggcaaaatataactgaaaactataaagttttgtctttctcataaccatatctttgacacatgctgaggaataacatttctctgaaaacaaaaacactttcaggtctcgaagtcatagtggttttatatttaagctttgccttgatcaaggaaatatctgatgtgtgggataaagacagcaaaaaggttgtagtcagcagacccagggttcgagtcccaattttaaatattaaattagctttgccttgtggtgttgaattgtgctgttttgatccctcttgaggcacaatttattatctataaaatatggtaattgtgaagatcagctgacatttaggaagcttaagttagggacaatgatggaaaaatttattactgtgtaaaagttaaaataggatttagggatgtggcttatgcatttgtcttagcttagtaaaacaaatatgattaatggaaacggtattgtttcgacaaatcactggaattttcaattcagaaatgtataaagtgggaagagaagggttggctcacacctgtaattccaacactttgggagaccaagcagggaggattgcttgagctcaggagttcaagaccagcctgggcaacatggcaagacctcatctctactaaaaattagaaaca

SEQ ID NO: 42568 - DNA, 469 bp, Homo sapiens
tttctcattgcatcactagaaaggccatctggctatacagcgttccttcctccagggccagccgcctgatccttcaggctgcagctgcagtactccaagcacacccttttttcaaggtcctcctttgatagcctctggctcatactctacttctctgctcctttcccaatccaatccaatccaatccaatccaatccaatccaatccaatcagagcagtctctgatcactccatatcaaatagctcttcctaccctggcacttctgatccacttcaccctgtttcttttttacttcagagcacactattagttttatatatttaacctgttatctccctaaaatataagctccatgaggtcaggaatttgttttgtgcctggtgtgtagtgggtgctcaataaacatttgttgaaggcagggatccatctactctgtagttcctggaaagtagtctgaaaagagtctgt

SEQ ID NO: 42569 - DNA, 412 bp, Homo sapiens
gctagttcagtcggttcccatgttggtctcagttccaactcagcaagagaaggcaagacacaatgtacaagaacctttcttccagtgaagtatttgctgtagttccattggtcaaatcaagtcatattacctagctctcagcttcaaggggaaggagaaatggccttcacagccatttttataagctctcattttattctaccagacagaattgagaacaggttaatggtctttttcacctatgtaaaaaaaagttgaaaattcctttctagaacatgacaagttgtaaatcttgaaacatctctgataagagccaacgtacatgagttgtgtttgcctgtgaaattaaaaaataatggagaaaaccaacatgttcttatcttgtatttcttcaagaacactcaatcattgt

SEQ ID NO: 42570 - DNA, 761 bp, Homo sapiens
caaagctgcagccctctcctaaggaggctaggccttggggcgctgactgggagtctccagaaagagggttttggggaggcaggagtgagcttttactctgggcaaagacctggagtgagccaccctgtctatgagagcagagatgactccatggagcttgtgggcaggaggctggggatgagcccccatctaggctgaacagagcagggctgtttctcaatatgtatctgaagagtgaaggaggggtgggaaggtgcagagagggcaggagggacagagggctgtacctaaacctcacgcacggtggactcctgtgtgcagaaagggatgcgcaccagcagacagggccaagaatctccatgctgtctccactcaaaacctcagggctgtgactcccgctttctcagaagggatgcgcaggctcaccccttccccctaggaatcaccagggcacccccacccccagctcatctcctttagccatttgacagggaggggccagcagtgagctgcaggcttagaggggtgaccagggcccttcctaactcgaccgcatgtggtttggtggctgccttgggagggaggctgtccgatgctgacattccccttagcatggccctgaccgtggctgtcaggggccaccttgcctcaccaggccagccccactgggaatggggtcagtcacagcagaaccgtcgaaaggtggacctgatgtgggccctgccgggggcgcttggcctcagcgggccatgggagaccca

SEQ ID NO: 42571 - DNA, 375 bp, Homo sapiens
ggctgctgccctgttacacccacaggctcagaggctgcagagtgacttgtcaggccctgaaatgctgcgactgcactgctgtcccatgcgcagatgcctttaactcccttagagtcctaggacttctctcctttatatctggtctgcccttattgctgtgtcttaacctctagagaacagggccttctaatctatcactaagaattttctggccttcacctcataacaccatacaggaatattggttgtattcagttaaaaaaaatgttttatattttgaattatgagtaacatatacctacttttctatcagcttttgatgctcagcataggaaagggatctgttcttgtaatgatttttttaaaggtgatatt

SEQ ID NO: 42572 - DNA, 575 bp, Homo sapiens
ctcaggttagaaatgcaattgtttgacataagccagtcttgaattactatcagctgttgtatttatatttttccacttcaacttctagaatcatttaaaactatctgatagtttggaacatcaatttgagattgaatcctcattttagcttggtggaaagaactgaatgagaaaactggatttttttccctacttgtcaggaggcttactctgaagtagtttgaatttcataaatccattaatgattagtaagcttcacccagaactaatctgtggccagctacaggcttttggaaagaggcatactttctacagcttaaacattacattcaacttaatcatcaatcctagaaacctaaaatttagagaaatttgcctctgcctgtctgaaaatttgtctctgagttagaagtcctgaacagaggaagacttcagattgatttcttttctttgtgtgtgtgtgtgtgagacagtgttttgttcttgttgcccggctggaggttgcagtgagccgagatcacgccactgcactctagcctcagtgacagagtgagactccgtctcaaaaaaaaaaa

SEQ ID NO: 42573 - DNA, 268 bp, Homo sapiens
aataggtctggccaggctcctgttggttcagggctagattggtttgaatctagtagtcctcacaaccgagtgagcaggatagatggggcctaacaggaaagtcttcagacaaagcaaagtttgaatggctgacatctgtctaaaatgccattgttttaaaaagtgaattgtgcacgagttgtgcaaagcttggaaacctattgtcatacatttagaccctcatttagaaataggaaagttacaacaattttaggtattgttgatcagc

SEQ ID NO: 42574 - DNA, 523 bp, Homo sapiens
gaggacactgggtttcaggaatatgagtttcaggaggacactgggtttcaggaatatgagtttcctgtccacactgtatccccagcaccctacacagggcctagtgcaaacagcatccctggtagatagcatgggatgaataaatgttatacaaatggtctgacccatatgaagaaagaattgcaatgaggatttattatagccccaatgtcaacttgcttttctaacttgagttaagttcccattgccagagtcctcattgcaggctgatcgggggttatttatcctggggaacttggctgtgatgactttgagaggcccaggaactggttctttcttgagcaagattcaaagaaggcctctgcctccacctgggaacggagacttttgggctaatcccagaggctgatgttcccgtttgaggaagggcttttgttcataaccccccaaaatgaaaatccagtagagcaaccagtttctttttttaaattttttaaaattattattttaatttcttctttaa

SEQ ID NO: 42575 - DNA, 974 bp, Homo sapiens
ctttccaggggagacactgcagaggagctgggtgtccaggttaaatttggaaaaaagaggcggaaaccccacacagttttattttagctggaacgcaaggctgagcgaacgacatccttctagactgttcttccaccttcctgtacattctgagggccaggtatggaaaggtcctacttgatgccaacagggaggcatggaaatttctctggtttcaatgggtacgattattgtaagcaggatccattcaataatcggacccatttaaaccggagattttaaaagacaggaatagaatcccagccttatttcagtgcagggtagggtgtcaaatatgaaatgtaattctacagggcaattctattttggtaaaagaagtggggagaaaagcatcaccagccagctttttaaatttttaccacaacctattttgtgatccctacgtgtcatttcttcagtatattttttaaatgttttaaaatatacgaacatggtgagattttttaaatgtgtctttttaaagtgtacagtgaaaagtctccctcatgccctcaatttcccagccactgttccttctggactcttctacaaatagtccctgtttctacaaatgtattggaggtagggaggctattttgatttctacccttaaaagcttcaaaaaaaagagaaaaagaggctaccaactgaaaaatattttgccattaggaaaaggctgcattcttgttttaagttatgaacattacattatttaaacggcagacttaaaatatgcatcaaagcaaaatgaacctgctatatattttctatggtaacccatgtttctgtgtatttatgaaaatccaagatctgtgcattgttcaaaacagactttgacatctccaatttttaacattttaaagagaatgaattcatgtgttactgggaaattaaaacgaataataaaagtgtcattttccaggaaaggcaggata

SEQ ID NO: 42576 - DNA, 388 bp, Homo sapiens
atacacacctttaaagagaccagcgccaagtgttagggacaatttcccgtaggaaatgacactagcaggggtcttcagggtcacacctcaaggccacatttctcaaattcatcaagtactgtgtcacacactcacatgcacacacgtcttacaacccactgaaggggccagcccccaagaaataggacacaatacaaactgcactggtattacaatgaggggttcaggatacatcccactctgactaccctcccagatataaagcaaactgccttgtaccaaagtcacctgacagagggtctgttgtagtagcaagtctaacctgtactgctagggtctagatgtttgcgtcccaccttccatgaaattaacatgttgaatcctcacc

SEQ ID NO: 42577 - DNA, 371 bp, Homo sapiens
attgggttaaaaattagttttcgttccccacacatgacaacatagaaatctacaagtaattcaaatagagacatggtttagaatcacagattaaattgtctcagggagagacataattttctaaagaatgaagataaaattaaagttgttttattttgttttgttttgtttttgtttttgtttttttagtagagacaggatgtctctctgtcacccaggctggagcacagtggcatgatcatagcccactgcagcctcaaacttctgagctcaagtgagtctcccacctcagcctcctgagtagctgggaatacaggtgcacaccaccatacccagctaattttttacattgtaaaaattttcgtagagat

SEQ ID NO: 42578 - DNA, 295 bp, Homo sapiens
tactggaaacaatctatatgcccatataaaggcaagtggttgaatcaactatggtacatccaaataatggatacagcatatcttttgtgtaaggaaaaaagggaaatatgaaaacagacatgtatctgctcatttgttcaaggaaaaaaatcaggatggataaacgagagagtaatggttttagctatttactggggatgggtaggaaagaaatgaaaacgacagaaggaatggggaggcactactgagtatactttttttgtgcaattctgacttttggtacagtgttaaatgt

SEQ ID NO: 42579 - DNA, 203 bp, Homo sapiens
gttatgtttagttcatcttattcctctctatgtcagtgggaaatttgttggatctgatggttttgtacctgaatttttcataggcaatagcttggatttctttaggagtaattaagaatgaataatggtatattgaaattcaagatccagagtaatgtgggttcaatgttaatattgaatatggttaaaagtcttattatttt

SEQ ID NO: 42580 - DNA, 616 bp, Homo sapiens
  misc_feature (613)..(616): n is a, c, g, or t
tgaaagcaaaaagaaaatactgtatcatctcacattatcataactgagtgcattcatgtgcttttggtcttaaaattttactttaacgcacttaggatttgtcgtcagtaatttgttatgcactatctagactaagaataggtattaatttactagaattgtcaaatgaaatatttcaagcaaagtttgcataatgaatgcaagtttaaaccaattaaatgtgttcactttttagcaagctaagctgctccttatttctcctgtagtagacacaatcacagttaatctttgcacaatgcatcgcattctccatgcaacctaacagagcggtctgggatagagcctgaactttgggtcccttggggcccaacaggcaaggttcagatctgggctctaccacaaaccatctgtgtaacctgaacctccctagtcttcagtttcctcatctgctttaaaaaattgctagaacatagttctatgtaaatgttcggtgttaaaatttatttggtatctactgtatgtaagatatggcctctgctctcaaaaatatgtagtcccagaagtgatataatatgttcacggagatgtactattaaaaagtgccacaaaaaannnn

SEQ ID NO: 42581 - DNA, 2718 bp, Homo sapiens
  misc_feature (233)..(233): n is a, c, g, or t
gcctagcgtgcactgactctcttaactaccaccgctacacggcagacacgccgctactttgtagcgggtttcgggcgggccacgcgtgcggcgacaggaacccaaccccggccgaccttgggctccaggaattcgttgtctacgtctgcggaggtgcggcagcctcagttttaagcgcaggaaggcaatagaggctgtgctctgaacctttccctcacgatgatcttctgtcngtcgaccatcctggtgtctttcccatgtggccctgtatggttggcatggttcctgtctttaggacttgtgatcaagtatatctgaaagtttttagaagaaaagatgtgttgtaacctccctggaaaaagaagagaccttatgaagtactgctaaccacctacatagtcatcaaaataaaattcctgaatttgtacaagccacaggaagctagattgagatcattatatgacaactggaaggccaaggctatgggttacctcaaattgaggaattttggcacctactcacaggctccatgagcagatgaagtagacagctttactcagtatctcagaccaagaacttcatctccatctccaactagctgaaacatcttccctcctcaacctggaaaattctctgacttagaaatttaaacaaaaccctcccctttcattgaatctccattgtctggagtttgcttgttttaatctagcctgttcctccactatgggctccctttcaaactatgccctgcttcaactaacccttactgcttttttgacaattctagtacaacctcagcacctgcttgctccagttttccggacactatctatcttgactaatcagtctaattgctggttatgtgaacatctagataatgcagaacaacccgaactagtttttgttcctgccagtgcaagcacctggtggacctattctggacaatggatgtatgaaagggtgtggtatccacaagcagaagtacagaatcactctacttcctcctatcgtaaagtgacttggcactgggaagcctccatggaagctcaaggtctatcctttgctcaagtaaggttattggagggaaatttttctctttgcgtagaaaataaaaatggcagtggacccttcctaggtaatatacctaaacaatactgtaatcaaatactatggtttgattctacagatggcaccttcatgccctctatagatgttacaaatgaatccaggaacgatgatgatgatacaagtgtttgcctaggcactagacaatgttcctggtttgcaggttgcacaaaccggacctggaacagctcagctgttcccttgattggtctgcccaatacccaagactacaaatgggtagatcgaaattctggattgacctggtcaggtaatgacacctgtctctatagctgccaaaaccaaaccaaaggccttctgtaccagctatttcgcaacctattttgctcttatggcctgacagaggcacatgggaaatggagatgtgcagatgccagcataactaatgacaaaggtcatgatggacaccggacccccacctggtggctcacaggttccaatctgaccttgtctgtgaacaactctggcctcttttttttgtgcggcaatggggtgtacaaagggtttccacctaaatggtctgggcgatgtggacttgggtatcttgtaccttccctcaccagatacctcaccttaaatgctagccaaattacaaacctgagatccttcattcataaagtaacaccgcatagatgcacccaaggagacacagacaatccacctctgtattgcaaccccaaggacaattcaacaataagggccctttttccaagtttgggaacttatgatttagaaaaggcaattctaaacatttccaaagcaatggaacaggaattcagtgccactaagcagaccttggaagcacaccaatcaaaagttagcagtttagcctctgcatcccgaaaggatcatgtcttggatataccgaccacccaacgacaaacggcttgtggaactgttggcaaacagtgttgcctctatataaattattcggaagaaataaagtctaatatacagcgtctccacgaagcatccgagaacctgaagaatgtaccgttacttgattggcaaggcatatttgcaaaagtgggagactggttcagatcatggggctatgtgcttttaattgttcttttctgcttattcatctttgttttaatctatgttcgtgtctttcgcaaatctcgcagatcccttaactcccaacctctgaacctagccttatctccacagcaatcagcacagctccttgtcagtgaaacttcatgtcaagtttcaaatagggcaatgaagggactaacaacccatcaatatgatacaagtctactttgagaatatctgaacaaacagcagctgcagacaaaaagccttagctaaactttgatgagtaaagcaggtcttaccgagaattcagctgccaaaaccctcctctgagtgttcctcttataagggcacttagcactaggacctcccaaggtattgtaaataagccttatcagaactttttgtagtttcattctgaagccttaagacacacaccataaagctgatctgtaaacccttaccccttgctgttcagagagctactctttgtagtgttcttgcatgcatatataataaatgttttttctattg

SEQ ID NO: 42582 - DNA, 433 bp, Homo sapiens
ctgcaattattattaattataaggtacctgacaaggtgctcagcagtatactaaacatgtgctttccctgatgggtttacaatctataaaaatatgctcatctcactttcccaacactgacttcatcaacccctcccctctttaccttcactcttgtccctttatcttcacatatatatttctattccaaaaataactctatccagcctcctacacaggggtcacatctgtcttggtccccactctctcaaacagctttgcttgctcctcttcccttgacatttcccctcctttttctcctccattttccgtcttctaccccctttctcctcgtgtctcccctctctgcagacaaagttcctatgttccatatctatctttgcttaattatctaatatttttatacaaacacttgaagaaattcccagaaccc

SEQ ID NO: 42583 - DNA, 1791 bp, Homo sapiens
cggttcaggcgcgggcggagagctctggctcagagtttgcgatccgagagcgggatccgcgctccctcggtccttcctccctcccctcttgcggcctcccgctgtcatctggagccgctcctgccgccccctggcggcgaccgcgggaagggccggcccccatccgcacccctgaccccggaggtcaacaacgggatggtccctgggtcccaggggaagagacatcacccagtaggagggagtacggtctagacagaggccacgagggcgggagggggcgagagtggagagtggcccagctggccaggtcgtctaagtgagaggaaaagggagagggcggttgagaccaggccctgaattccgcgttcatcttatcctgaggtattcagtgccgagtgtggccttggtgctaggattcaaagaggaaaggaagaaaactttccattctaaaagaaactccacgtgaggcgaagaagatgaaatatagtcagaaaaccataccagtaggtggtaggtaaatgcagaagtatttaagagctcatacaggagtacctgcctcaggacagggaatctgagatgctctgcagagctggatcttaaagaacggagaactctggaatgctgacctacagtctgagttcctgtgcccttgcctggggctgactctctacttgacctgtaacccacaactgggcaagagaaaattctgcagccacagctctgaggacatgagcaaaatggtttccagacggaatgtcaaggattcccatgaagtgtcagggagtcttcaggccacacttcaggttatctccttctctttcccttttctgcttcacacttgctctcatcctctttctcaccccacatctggtcagaggagataggaaggttcttgttacctggtacaagacaacttttggaatcccagatattcagattatttccccttttcctctttgcaaatgataatactcacagccaagaggcatcacccggatccgaggctgcttctccttaggacatgcagacagaaggagaaggcggggctggcagcctccagtccacagcctccctttcttcttccggcgatgattaactaggcctagacaatggagatctacggcatacgcccagggcctcctcttctcaagcatggctgatcagtcactttcccgtctatccttcatttattgaagccaactatgaacgactaaaggaaggatgagaaaagtcacccaaagtcaaaggggacagcgtgggagactgttctagacagaaggaaacacctttgcaaagaccctgaggaaggcaggggactctccaggagcagaagggctgtgtggcttcagaatccacaaaagagagcagatacaggacactggctagagcaggccctggagcccgctgctgtcctggaggccttggggaggcccagtgttcccagggtggaagaagtaggggacagcttgacgtagtggctgttgatcagctgatatggaagtatgtcattttattaacaattgagaaaggagtgctgtgcaattccattcaatgccagtgatgcttatggccgtttttatgagttctgtcattttcaaatgagcaagaggaagcctctaagggggtttaagcagggactgacgtaatcagatctgtgtttttccaaagggagagggagaaaaagaacatttcttatttttcaaaaaaggtaatgcaaaagcatcattccacaattctcttgtaatgaaaaaaataaatgcaaacttaagcaaatccatcattctgaaagaa

SEQ ID NO: 42584 - DNA, 1902 bp, Homo sapiens
cggttcaggcgcgggcggagagctctggctcagagtttgcgatccgagagcgggatccgcgctccctcggtccttcctccctcccctcttgcggcctcccgctgtcatctggagccgctcctgccgccccctggcggcgaccgcgggaagggccggcccccatccgcacccctgaccccggaggtcaacaacgggatggtccctgggtcccaggggaagagacatcacccagtaggagggagtacggtctagacagaggccacgagggcgggagggggcgagagtggagagtggcccagctggccaggtcgtctaagtgagaggaaaagggagagggcggttgagaccaggccctgaattccgcgttcatcttatcctgaggtctgtggggacctgttgaaggactggggcaggggacggacgcgggcatccttccatttggaacagccattccggcagcatcaggatggggcggaggcaaagcggggagtgggcgaggcaagtggtgctgtaaacctgtgcgagaagggggcggtgactctaagggcaggaaggagccctggtcacacacacactcccacgcaaggtattcagtgccgagtgtggccttggtgctaggattcaaagaggaaaggaagaaaactttccattctaaaagaaactccacgtgaggcgaagaagatgaaatatagtcagaaaaccataccagtaggtggtaggaactctggaatgctgacctacagtctgagttcctgtgcccttgcctggggctgactctctacttgacctgtaacccacaactgggcaagagaaaattctgcagccacagctctgaggacatgagcaaaatggtttccagacggaatgtcaaggattcccatgaagtgtcagggagtcttcaggccacacttcaggttatctccttctctttcccttttctgcttcacacttgctctcatcctctttctcaccccacatctggtcagaggagataggaaggttcttgttacctggtacaagacaacttttggaatcccagatattcagattatttccccttttcctctttgcaaatgataatactcacagccaagaggcatcacccggatccgaggctgcttctccttaggacatgcagacagaaggagaaggcggggctggcagcctccagtccacagcctccctttcttcttccggcgatgattaactaggcctagacaatggagatctacggcatacgcccagggcctcctcttctcaagcatggctgatcagtcactttcccgtctatccttcatttattgaagccaactatgaacgactaaaggaaggatgagaaaagtcacccaaagtcaaaggggacagcgtgggagactgttctagacagaaggaaacacctttgcaaagaccctgaggaaggcaggggactctccaggagcagaagggctgtgtggcttcagaatccacaaaagagagcagatacaggacactggctagagcaggccctggagcccgctgctgtcctggaggccttggggaggcccagtgttcccagggtggaagaagtaggggacagcttgacgtagtggctgttgatcagctgatatggaagtatgtcattttattaacaattgagaaaggagtgctgtgcaattccattcaatgccagtgatgcttatggccgtttttatgagttctgtcattttcaaatgagcaagaggaagcctctaagggggtttaagcagggactgacgtaatcagatctgtgtttttccaaagggagagggagaaaaagaacatttcttatttttcaaaaaaggtaatgcaaaagcatcattccacaattctcttgtaatgaaaaaaataaatgcaaacttaagcaaatccatcattctgaaagaa

SEQ ID NO: 42585 - DNA, 1727 bp, Homo sapiens
cggttcaggcgcgggcggagagctctggctcagagtttgcgatccgagagcgggatccgcgctccctcggtccttcctccctcccctcttgcggcctcccgctgtcatctggagccgctcctgccgccccctggcggcgaccgcgggaagggccggcccccatccgcacccctgaccccggaggtcaacaacgggatggtccctgggtcccaggggaagagacatcacccagtaggagggagtacggtctagacagaggccacgagggcgggagggggcgagagtggagagtggcccagctggccaggtcgtctaagtgagaggaaaagggagagggcggttgagaccaggccctgaattccgcgttcatcttatcctgaggtctgtggggacctgttgaaggactggggcaggggacggacgcgggcatccttccatttggaacagccattccggcagcatcaggatggggcggaggcaaagcggggagtgggcgaggcaagtggtgctgtaaacctgtgcgagaagggggcggtgactctaagggcaggaaggagccctggtcacacacacactcccacgcaaggtattcagtgccgagtgtggccttggtgctaggattcaaagaggaaaggaagaaaactttccattctaaaagaaactccacgtgaggcgaagaagatgaaatatagtcagaaaaccataccagtaggtggtaggaactctggaatgctgacctacagtctgagttcctgtgcccttgcctggggctgactctctacttgacctgtaacccacaactgggcaagagaaaattctgcagccacagctctgaggacatgagcaaaatggtttccagacggaatgtcaaggattcccatgaagtgtcagggagtcttcaggccacacttcagccaagaggcatcacccggatccgaggctgcttctccttaggacatgcagacagaaggagaaggcggggctggcagcctccagtccacagcctccctttcttcttccggcgatgattaactaggcctagacaatggagatctacggcatacgcccagggcctcctcttctcaagcatggctgatcagtcactttcccgtctatccttcatttattgaagccaactatgaacgactaaaggaaggatgagaaaagtcacccaaagtcaaaggggacagcgtgggagactgttctagacagaaggaaacacctttgcaaagaccctgaggaaggcaggggactctccaggagcagaagggctgtgtggcttcagaatccacaaaagagagcagatacaggacactggctagagcaggccctggagcccgctgctgtcctggaggccttggggaggcccagtgttcccagggtggaagaagtaggggacagcttgacgtagtggctgttgatcagctgatatggaagtatgtcattttattaacaattgagaaaggagtgctgtgcaattccattcaatgccagtgatgcttatggccgtttttatgagttctgtcattttcaaatgagcaagaggaagcctctaagggggtttaagcagggactgacgtaatcagatctgtgtttttccaaagggagagggagaaaaagaacatttcttatttttcaaaaaaggtaatgcaaaagcatcattccacaattctcttgtaatgaaaaaaataaatgcaaacttaagcaaatccatcattctgaaagaa

SEQ ID NO: 42586 - DNA, 2864 bp, Homo sapiens
cggttcaggcgcgggcggagagctctggctcagagtttgcgatccgagagcgggatccgcgctccctcggtccttcctccctcccctcttgcggcctcccgctgtcatctggagccgctcctgccgccccctggcggcgaccgcgggaagggccggcccccatccgcacccctgaccccggaggtcaacaacgggatggtccctgggtcccaggggaagagacatcacccagtaggagggagtacggtctagacagaggccacgagggcgggagggggcgagagtggagagtggcccagctggccaggtcgtctaagtgagaggaaaagggagagggcggttgagaccaggccctgaattccgcgttcatcttatcctgaggtctgtggggacctgttgaaggactggggcaggggacggacgcgggcatccttccatttggaacagccattccggcagcatcaggatggggcggaggcaaagcggggagtgggcgaggcaagtggtgctgtaaacctgtgcgagaagggggcggtgactctaagggcaggaaggagccctggtcacacacacactcccacgcaaggtattcagtgccgagtgtggccttggtgctaggattcaaagaggaaaggaagaaaactttccattctaaaagaaactccacgtgaggcgaagaagatgaaatatagtcagaaaaccataccagtaggtggtaggtaaatgcagaagtatttaagagctcatacaggagtacctgcctcaggacagggaatctgagatgctctgcagagctggatcttaaagaacggattaagttgataaatgatgcatacgacatcctatagaagactgtcaccaccccacctcactgatcagccctctgcctacagccacacccacagaacattcagccatttctcctgtggttcccagcctgcagcacagcgtctgcacgtggtgagggctcccaaatctctgaggaatgaatggctcactgctgagagcaaccttctgggagttcagggcatgtggaactggaataagagcaacgtgtgaacagattacaggaaggcaatgcaggacagctggaccctttggggggaaacttatggggaacacagttttcttacttataagcactgagattgcctgagaggggagagatgatgcagagtgtcccaaatgtatttgacgtggaatccttttaccagcgaaacatctcttgggcctagagttctgaaaattgcactttgaaaaacactgctctcagctcttacaaacctcgtgttttcatcctaactgtgcttcagagaattgtgtcccagcaggaaaggaaacccccgtataattccctacgttgctagcatttggaagtgggatgaaaatggacctacattcaaacccctaatttcaagctctgaaggaggtaccaggatccatcacgatgcttgtaaaattgttcctttcattttcctggttgtaaacttatgcagactgtaaagtcaaggcaagcctgtgcccagcaaataataagaaaataagggaggcatggtaaacaaaacaaaacactttgagagttggtcaacttgctgttattttgagctgtttctaaaaatctcagggtagattccctcccctgcttgcctccttaacccagtcctttttcttcctcctccaggaactctggaatgctgacctacagtctgagttcctgtgcccttgcctggggctgactctctacttgacctgtaacccacaactgggcaagagaaaattctgcagccacagctctgaggacatgagcaaaatggtttccagacggaatgtcaaggattcccatgaagtgtcagggagtcttcaggccacacttcaggttatctccttctctttcccttttctgcttcacacttgctctcatcctctttctcaccccacatctggtcagaggagataggaaggttcttgttacctggtacaagacaacttttggaatcccagatattcagattatttccccttttcctctttgcaaatgataatactcacagccaagaggcatcacccggatccgaggctgcttctccttaggacatgcagacagaaggagaaggcggggctggcagcctccagtccacagcctccctttcttcttccggcgatgattaactaggcctagacaatggagatctacggcatacgcccagggcctcctcttctcaagcatggctgatcagtcactttcccgtctatccttcatttattgaagccaactatgaacgactaaaggaaggatgagaaaagtcacccaaagtcaaaggggacagcgtgggagactgttctagacagaaggaaacacctttgcaaagaccctgaggaaggcaggggactctccaggagcagaagggctgtgtggcttcagaatccacaaaagagagcagatacaggacactggctagagcaggccctggagcccgctgctgtcctggaggccttggggaggcccagtgttcccagggtggaagaagtaggggacagcttgacgtagtggctgttgatcagctgatatggaagtatgtcattttattaacaattgagaaaggagtgctgtgcaattccattcaatgccagtgatgcttatggccgtttttatgagttctgtcattttcaaatgagcaagaggaagcctctaagggggtttaagcagggactgacgtaatcagatctgtgtttttccaaagggagagggagaaaaagaacatttcttatttttcaaaaaaggtaatgcaaaagcatcattccacaattctcttgtaatgaaaaaaataaatgcaaacttaagcaaatccatcattctgaaagaa

SEQ ID NO: 42587 - DNA, 1844 bp, Homo sapiens
cggttcaggcgcgggcggagagctctggctcagagtttgcgatccgagagcgggatccgcgctccctcggtccttcctccctcccctcttgcggcctcccgctgtcatctggagccgctcctgccgccccctggcggcgaccgcgggaagggccggcccccatccgcacccctgaccccggaggtcaacaacgggatggtccctgggtcccaggggaagagacatcacccagtaggagggagtacggtctagacagaggccacgagggcgggagggggcgagagtggagagtggcccagctggccaggtcgtctaagtgagaggaaaagggagagggcggttgagaccaggccctgaattccgcgttcatcttatcctgaggtattcagtgccgagtgtggccttggtgctaggattcaaagaggaaaggaagaaaactttccattctaaaagaaactccacgtgaggcgaagaagatgaaatatagtcagaaaaccataccagtaggtggtagttaagttgataaatgatgcatacgacatcctatagaagactgtcaccaccccacctcactgatcagccctctgcctacagccacacccacagaacattcagccatttctcctgtggttcccagcctgcagcacagcgtctgcacgtggaactctggaatgctgacctacagtctgagttcctgtgcccttgcctggggctgactctctacttgacctgtaacccacaactgggcaagagaaaattctgcagccacagctctgaggacatgagcaaaatggtttccagacggaatgtcaaggattcccatgaagtgtcagggagtcttcaggccacacttcaggttatctccttctctttcccttttctgcttcacacttgctctcatcctctttctcaccccacatctggtcagaggagataggaaggttcttgttacctggtacaagacaacttttggaatcccagatattcagattatttccccttttcctctttgcaaatgataatactcacagccaagaggcatcacccggatccgaggctgcttctccttaggacatgcagacagaaggagaaggcggggctggcagcctccagtccacagcctccctttcttcttccggcgatgattaactaggcctagacaatggagatctacggcatacgcccagggcctcctcttctcaagcatggctgatcagtcactttcccgtctatccttcatttattgaagccaactatgaacgactaaaggaaggatgagaaaagtcacccaaagtcaaaggggacagcgtgggagactgttctagacagaaggaaacacctttgcaaagaccctgaggaaggcaggggactctccaggagcagaagggctgtgtggcttcagaatccacaaaagagagcagatacaggacactggctagagcaggccctggagcccgctgctgtcctggaggccttggggaggcccagtgttcccagggtggaagaagtaggggacagcttgacgtagtggctgttgatcagctgatatggaagtatgtcattttattaacaattgagaaaggagtgctgtgcaattccattcaatgccagtgatgcttatggccgtttttatgagttctgtcattttcaaatgagcaagaggaagcctctaagggggtttaagcagggactgacgtaatcagatctgtgtttttccaaagggagagggagaaaaagaacatttcttatttttcaaaaaaggtaatgcaaaagcatcattccacaattctcttgtaatgaaaaaaataaatgcaaacttaagcaaatccatcattctgaaagaa

SEQ ID NO: 42588 - DNA, 374 bp, Homo sapiens
tataaaggaaagaagtttaactgactcagttgagcctggctggggaggcctcaggaaattacagtcatggcagaaggggaagcaaacatgtccttcttcacatggtggcaggaaggagaatgagtgagagcaaagtgggggaaagccctttacaaaaccatcagatctcgtgagaactcactatgatgagaacctcccccatgattcaattacctcccactgggtctctcccatggcacatggggattatgggaactacgattcaagatgagatttgggtggggacacaagccatatcactacttttctttcaaaaaaagtcttagggttattcttatacatttttcttcccattgaactttagaattatccaa

SEQ ID NO: 42589 - DNA, 870 bp, Homo sapiens
agctcaatgatgtatacctgtttaggtattaaatagttgtgtttatatgcccaaaaatttgactttaggtatatgtgatatgctttggttccgatcaagcaggaggtcataagtttactcagaagtatccaaaatatgacattcaagatttaacttgcatatgtgtgtatatgcatatatttatacatgtatatgtagattgaatgtgacattatgtatttctaacataatatttggcctgccagcttataaatatgtatttaagcttttcattgattgacattactgtaaaaaatgaattatgattgagaagttctggatatttgctgtttttttcattttatatttttactaaattattgaatttgttaaattaaaatgtgctatcactgtattgccaaattatggcaatacactatgcagtattatttcaatactttaagaggcatctattacttcattgaacacataagcagctagcctcctttcctctgtaaataaggactttttggcatcctgatgttcctcgctgttcatttggtatcatcctggagttccatcaagactgaggattttctccatggccaataaactattgtcagcatcagctcacgtttggctgtatgacagggatatgtgagaagcccagaaataaatcacaaaaataataaggcatcttctgagtctctctgaagaagccagtgatccaaaaactaacttcatatctgagtgagtcttggtattcttgatttgcttgaagaggctgtgacatattacaaggtgtgtaatttcccaggcatatcacactgcttctgtttcatgaattgatcaaattgtccagaagtaaacatttacaagattgagatttga

SEQ ID NO: 42590 - DNA, 384 bp, Homo sapiens
tgtgctctacagtctccttgtgttttctggcaaaaggtagttgtctaatcccttgtcatatgagtcctggccaatccaccccattggtcctctttgtgcctctaaactattgtcagcatcagctcacgtttggctgtatgacagggatatgtgagaagcccagaaataaatcacaaaaataataaggcatcttctgagtctctctgaagaagccagtgatccaaaaactaacttcatatctgagtgagtcttggtattcttgatttgcttgaagaggctgtgacatattacaaggtgtgtaatttcccaggcatatcacactgcttctgtttcatgaattgatcaaattgtccagaagtaaacatttacaagattgagatttga

SEQ ID NO: 42591 - DNA, 394 bp, Homo sapiens
gccaacatggcgaatccccgtctctactaaaactacgtaaactagctgggcgtggtggcacgtgcctgtaatcccagccactcaggaggctgagacaggagaatctcttgaacccaggaggtggaggttgcagtcagccgagatcacgacactgcattccagcttgtgggacagagcgagactctgtctccaaaaaaaaaaaacaacaaacaaaaaaacaaaacaaacaaaagcaaaacaaacaaaaaacttccctattgagcacaggtttccccatactctttcttgtatcctgcaccatgcctggtttacacatgtatgtcacttgttcagcccccaatgggcatttatcattacacccttggaaatacgagtggtcatttctttaaggctg

SEQ ID NO: 42592 - DNA, 285 bp, Homo sapiens
ttaaaatatatgaatgaaagcccctgtagaaaaggagaaaaaaaaaaacaatgaagtgaattaaaatgccaaataatttttccacataagagaaacttaatgaggctatcaactctaacacacccaatatatacaatgattgcaactgtcccactatatatccccaaacataagataaggttttcttccctaaagttatctttcagaaagaaggaattgctttacaattaaatccttacttttgaggcagacaccaattattttatactaaatactaacaagggc

SEQ ID NO: 42593 - DNA, 352 bp, Homo sapiens
cgcagaacgcaccctgtcattacaaatgactcctggaggcagtccccgggggcctggcaggagcacctgtgtttctgtggggtctgaaaatgacagaccaatcgcttgaacccgggaggcggaagttgcagtgagccgagatcgagacattgccctccagcctgggcaacaagagcaaaactccatctcaaaaaaaaaaaaaaaatcttcacaaatataatttgtaatggctgcagaaaatttcagctctgaatgtactgcatcctaatcagtttcctattgttgagcattagtatagtttccaggtgttttgtttttgttttgctattaataagtaaaactgagatgaata

SEQ ID NO: 42594 - DNA, 451 bp, Homo sapiens
gctatgtttctgctacagcttgaatatggtttgtccccaccgagacaccaaaactcatgttgatgcttggtctccaatggagtggtgttgggaggtggtgcctttaagaggcaaaaagaggagtcaagagggactttatcacaggagtgagttctcactcttgtggggctggattagttactacaagagaacaggttgttacaaagcgaggctgcctcttgtgtttggtctttttgcacgtggctgcttccattcctgtttctccaccatgttatgacccaagcgcaaggccctcaccagaagctgaacagctgcagccaccctatcttggccctcccagcctccagaatcatgagctaaataatccaccttttttttttttcaaattgtctagtcttgggtattttgttatagcaacagaaactcaactaggataagtatatttagtcaa

SEQ ID NO: 42595 - DNA, 348 bp, Homo sapiens
actatctggatagaattctcactctctggatagatctcttactgtctatctggatagaattctcactctggggacagaactctcactatctatctggatggaattctctccctctgcataggactgtcactctctggatagaattctcaccatctggatagaactcccactatctggaaagaattctcagtctttagatagaactctcgctatctttgtggatacagttctcaccctccagagagaactctcactatctatctagatagaattatcactctctggatagaaatctcactatctgtctggatagaattctcaccatcaggatagaactctcactgtctg

SEQ ID NO: 42596 - DNA, 409 bp, Homo sapiens
tgacaccaaaaaatatgacagtgctatgcttccagggtcctttagactgtgttgatttaaaaacagcttgctcactaaatataaagaaagttttaaaattttaaataatcatcctataaagaagttgtcagactcacttgctgcaccactcaaaggagagagaacgttgggtagattcatatgaatgtgaaaataacttcagctaaagcaaacaatgtgtcagattgaaagaacagtgacttgacaagcctaattttactttccaggtagtgtttaccttccgtaagtgaacttagggaatgagtccaagaatactgcctggaattccaggagactgaatgtatgtgctccggaaaaatcaatttgcaaatatattgagagtttttatagtcatgctggctgcctcttt

SEQ ID NO: 42597 - DNA, 459 bp, Homo sapiens
gaaaaagaagacgacagacacttcctaaacagaacatttaaactcaatgaatattacttttctgttttgcaaaggggtattttcaatcgattcccaaatgtatttctgaaactccttgtaccgactaagaaacactaacatgagcaatcatagtattttagagctcgtaatggcctccaggagcctctgtcctagtagttctcaatgttagctgaataatcaactggggagctttttaaatgccaattcctgagtcctaccctttaagagattctttctgtaattggtccagggtatgacttgggcatctgaatttttgaaaaatgtcccaaagtggttctaatatggaaccaagttctgaaaaatgctggtctagcccggtggctctcaaactatgcacttcagaccagcagcctccgtgtcactggtacttgatagaaatgcagattcatgtccttc

SEQ ID NO: 42598 - DNA, 564 bp, Homo sapiens
gagaaaccattcatcttccattcattcatcttccgttcccagatcttggaagaatagtcactgtaatgtgggggctagaagcattggcttatgaagtggacaggcaaaggtaggttttcagctccaccacatcctagctaggtaaacttggacaagttgcttaaactctccactactccaagaggttacagatcactgaaagtacagacattggcaagtattttttggaaacacattatgggtcctaaggactataatatagtctataaatctggaattttatgctggaaaatacaacttgttttcaaatggaaaatgattgtgttttgtataaaacaacagagtcacattttaagaccaggctggataacataacaagaccccttctctacaaaaaataataaaaataagccagttataaagagagctgaataataacaaaagaaaaaagaaaaaaattagctaggtgtggtggtgtgtttgggaggctgaggcaggaggatcactagggatcaggaaatcatgaccagcctgggcaacatagcaagactcccatctctacca

SEQ ID NO: 42599 - DNA, 507 bp, Homo sapiens
tcttcctatactttagacatggaagtgggatggtgtctcttgtgcaactgctaagaagaagtgacctttggatcgaaggaagtagaaagattaaatcagaaagaatcaaggttcagagtctgcaaagccacaagccctctgtctgggccagcaagttcagtcttttgttttttgttttgagacagggtctcactgtgtcaccaaggctggagtacagtggtacagtcacagctcgttgtagcctcaacgtcctaggctcaagtgatcctcccagcttagcctcccagctgagcctcgcacgtagctgaaaccacaggtgtgctccaccatgcctggctaattgttttatttttatttttatttattgattgattgatttttttgagacagagtctcgctcttgttgcccaggctggcgtgcaatggtgcaatctcggcttactaaaacaatgccactcacggttacaaacacaactcctgtatcagaaaacacaacggcgccacgta

SEQ ID NO: 42600 - DNA, 362 bp, Homo sapiens
gagtcagagaacttgtatctgcaccagccctgctgcttattagccaagtaatcttgtgcaaatcagttaaactctgtgagtaccactcacttattaattcagtattcaatatttactgacgacgtactgtgtttcaaaccctgtgttgggctctgaaagatatgtagctcttgccctcaaagtgctcataatctaggagacacggtgcttatttcacagtgaccaatctgagaggtgctgcgtgagtatctggaagattcctgggctccatctcctggtgggacaattgcagttggtggtggtgagcactatgatgctatgatgcatgatgaggcagctaaaccatcacgtttgagaggcat

SEQ ID NO: 42601 - DNA, 779 bp, Homo sapiens
attgaatatagaggttctcccttggccactgtcagcttttcttgactggccaaaactgcccattcttcctggaatggtatgaaagcttcagcaaaataaataaaagtcagaatctttgctggtccctttaatgctgatttgatagtaaatcaatttcagctgagacataagggctgtcagtctatcatataaacatctttaactatagcctagagaaaagagggttgaagagcaaagcagattttttttttccttttctatatcttgttctgaacaacacactgtgataaaggggactagagtggaagattccctatttaaacacatgaagctctgggtcctagccttttttggttataagccctttgagaatctgataaaagctgtggatcatctcctaggaaaatagaacaaaacatacatattcacattacacagttccagagtatgtggaccccccaaagtccagagattgcccctaggggatctttagattcttgtttagaactgttgattttgaacacaacatacactgtcaaactttacatcagggatccaacataactcagacatagcccaggtagcctgtttctaacacaactgtcataatcctgaaatccaaaattgcactgtgtttgacatgagatagtttaagttccacaaaatccaaatttaccatattattgtttttaaaaaagcagtttagagcaaactgtcactaaacttggataaatgggtcagaaagtacagatttaataaagtcgtacctctaatgttca

SEQ ID NO: 42602 - DNA, 1174 bp, Homo sapiens
attgaatatagaggttctcccttggccactgtcagcttttcttgactggccaaaactgcccattcttcctggaatggtatgaaagcttcagcaaaataaataaaagtcagaatctttgctggtccctttaatgctgatttgatagtaaatcaatttcagctgagacataagggctgtcagtctatcatataaacatctttaactatagcctagagaaaagagggttgaagagcaaagcagattttttttttccttttctatatcttgttctgaacaacacactgtgataaaggggactagagtggaagattccctatttaaacacatgaagctctgggtcctagccttttttggttataagccctttgagaatctgataaaagctgtggatcatctcctaggaaaatagaacaaaacatacatattcacattacacagttccagagtatgtggaccccccaaagtccagagattgcccctaggggatctttagattcttgtttagaactgttgattttgaacacaacatacactgtcaaactttacatcagggatccaacataactcagacatagcccaggtagcctgtttctaacacaactgtcataatcctgaaatccaaaattgcactgtgtttgacatgagatagtttaagttccacaaaatccaaatttaccatattattgtttttaaaaaagcagtttagagcaaactgtcactaaacttggataaatgggtcagaaagtacagatttaataaagtcgtacctctaatgttcagaatttggttgtctatttgttcaaaagctatagctcactcctatttttgctattaaatttatttacctatttctagaaaaggaaaagaattaaaccatagatattcctgaaatgctatacctatatcaactatgaatctgatcagttaagtctcaggaaaaacagaatcaaaagcataaaggtttaacacttttctgtttctttagagaaagttttcaaagccagaggcattgttgcagttgattttatctctagccgagatgctttagagaattctgagttttatcatgccacgcctttctttttatccaaaggacgaaagaagccggactaagaatatttttatgctatattcgaaggtaaacattagttaagatgttatctcatatattgtt

SEQ ID NO: 42603 - DNA, 665 bp, Homo sapiens
gctcgggaagatcaagtcactaaacccaagaccacacagataccaagtggcagatcatacagccaagccttcagaccctgacatctgactccaagaccattctgagcccatcacttcctcactttgatggtgcaatggactgtgtgtttgtgtccctctaaaatatacatgttgaaacactaatcctgatgtgatggtatatggagatggaactttggggaggtaattaggtcatgagagtggaccctttatcaatgggattagtgcccttacaaaaaggggccagagacctagctagttctcttctgccatgtgaggatacaatgagaagtagacagttggtgatatggtttggctgtgtcccaatccaagtctcatcttgaattgtagttcccacaatccccacgtgtggtgggaaggacccagcgggaggtaactgaatcaagggggcagtttccctcatgctattcttgtgatagtaagttctcacgagatctgatggttttagaaggggcttcccccttcagtcggctctcattctccttcctgctgccctgtgaagaagaacatatttgcttccccttctgccatgaatgtaagtttcttgaggcgtccccagccatgccaaactgtgagccaattaaacctctttcctgtacaaatta

SEQ ID NO: 42604 - DNA, 466 bp, Homo sapiens
cctcccctttcccatagagcccccttccgggagcccacccgctcctaaacgctggcgtccgtttctgctgagagcatggggctttctctgcaagtggggggtgggagatgagggtttggatgagggtgtgggaggaccctaaactgattcccatgctagttggagaaagaaaggtgtggatgaggataaagttttcatggtgaccagggtgaccctccgctcagagggacgagcggagcccggcaaaaccagtcactgccttgtagttccaagctttggggatgatcagctcccaagaaattgctgtggggtgcgggggctgtgggtgacccaaattgggcagagggcctacaggtctgaggctgcctgcacagagccgccaggaaggagctagcgaagaaatacatctttgtcctggctttttcccaggaggggctgggtgggtgcacagacagaggtaaagagc

SEQ ID NO: 42605 - DNA, 439 bp, Homo sapiens
agtcgtgtctgcccaaggtcacccgggcggatagcggccggtggccgcctggctgggctgggcctctgccgccctctgtgcgggttgtcctgaggagcagcccgcagcccgtgggtggggccggcggggcgggtgagaccgcccgggtgggtgcgaggagtggccgggctcggcccggtgggcgtccggtgggaagcgtggcgcgcccgagcttaggcttgcagttcgcctttccagaaagcgcaaatctgtccatgtccacttcgagaccttgtaagttaagggcttctactttgggtcgtgtttggtggtccttatgccaccaaaaatgtgccagtgtttaaaagcagctgtgccagtttttaaaactcaggcggagagctcagcgcactgaccgggcgaggacgccgggacctgtgcttgcctgtgcgctgagtgc

SEQ ID NO: 42606 - DNA, 311 bp, Homo sapiens
tctccatgttggtctggctggtctcgaactcccaacctcaggtggtccacctgcctcagccttccaaagcgttgggattacaggcatgagccatcgcacccgcctctttaggtgttcttttaggagctggtagcggaggaaggtggttacccatctgtgacagagccttggatgtcacgaggccacaggctggcctttcctcctgtttacaggaggtgagttttcctgagttcccagcctcagtgttctctgcacagtctgtcactgactcccgctcccagtgctcactgcctcttgttctcactgcctcc

SEQ ID NO: 42607 - DNA, 492 bp, Homo sapiens
tcagtggctgggcctgagtttctcatacctggggtggaatttcacaggccctagcagagcagttgagagtgccacagtgtgcagagttaagcatcccacggagattgtagggatcacacagtatttggaaacagactttcagctcatctagagtagagagagcttgtccacaccacaggatagagtatcagcaaagccatatcgtgggtatggaccacactgtggaacaaagacaatacttgattctcctaaccaaagcgtaaactcaaacttccacaggattggggagatccactagtgaagtaacagcctggcagaaataaactcaaaagggagacatcatgacccagatttctcataatggactgtcagaaataggggttggcactctaaagcctcaggccacatctggtgtgccctgtctgtgtgcacagcccacaaactgggatgagtttacgtttgtaatgcactggtaaacaaaaaagaacagaa

SEQ ID NO: 42608 - DNA, 904 bp, Homo sapiens
gaatatttaatcttctttatcatatcagctttaaatatcagatttatgatacaggatgttattgttcttgtggtttttgcaatgtaaaaatatatcttggtctctgcatgatgatatattaacatctataccatggaacttttaaaaggaaaattgtgtggtataattaaaagaatattgcatgttatagagaaacttcacctgttgatttagcaggtgccattgtgtagatgctaagcaaatcttaatatgtttccttggatttttgaaatttgaatttgttgtgtaactttgctagttaaaagatttagagggatttggctgggcgcatggctcacgcttgtaatcccagcactttgggaggccgaggtaggcagatcacgaggtcaggagttcgagaccagcctggccaatacagtgaaaccctgtctcttctaaaaatacaaaaattagctgggcctcgtggcgggcgcctgtaatcccagctacttgggaggctggcaggagaatcacttgaaccagggaggtggaggttgcaatgagccgagatggcgccactgcaccccagcctgggtggcagagctagactctgtctcaaaaaaaaaaaaaagagtgggatttatcatagtttttttttcttaactgttattgactatttttaatttttattttttaattcagtggcctctcaggattattacctgcatttttttttcaggaaaatcccaattctgcaactaactctgtggccttagacaagtctcttgccttatccagggctgtttccttgtctgtaaaataaagagttggactagatgatctctaaggtcccttttacatctatagtttccttggtactatattagtgtttgagacaaaacaatttaatatatctaagccagtt

SEQ ID NO: 42609 - DNA, 1508 bp, Homo sapiens
ggtagaatggaagttagtctgtttctggccataagacattcaggtcctctcatcactggaagctttcctgtagagggcagggagttgtgacgtctggacaccccaaaaccccagacttcagtaaatgttcaggtaaaagagctctggatgtcaggaattgagtattccagtccctggatgcagctggaatagactccaaagaccaaagaaaatgtgtgggaaatccagaagtcctaaatgaacatgtcactcactgtgccccctcaaaaaagcgaaattatttttccaggaaaatataaaagcactacgctacttttggattcattccactcccattgctaccccaggtgaatgaccgtggttgcaggttaaatgcaaactttgctataccaaagagtcctaggacattttcacatgagctataaaggcatattccctaagaaaggtcctcccttctttgtacataaaggatgaaaactatgcatttagcaaacaaagagaaagcacttctttttctatctagttgtttagggtgcattcaaacaccagaggctgttttgagacatgtttggccttctgggttattactgtggtgtggttagctttacagtacatttggtaactatttcctaaatagtaaggacaaagaagcagaaggtaagaaatagcgacttccacgtgtaaaaaaaaaaaagaaaaagaaaaaaagaaaaaaaagtgtaaagatctactatttatagtgtgaaccaaagacgctacctcactcaatttccattggtgattttaatcacattgatgataccaaagaataccaaagatattttcatgcacggtctcagtctgcagagggaactccgccccttcccttcccccacccctcccccttcctaactcttcactcagtgtgtaaacttgtcttcattcttaataatgatacaataatgacaacaacaacattaggaaatactactcttattactgctagttctacttgtaaatctctaggcaaacatgttgcaaactttgtaaactcctaggacgagtgccttgcttgaaccaaagtgttaaaccgctgttgacctctttcaccttatactctttgaatacctcagcctcttagaaaggccactaatgaaaaaaaaaggaataattattcaccgtggtgctttttccgtgcaaccatgcaatgaaactttctttgataccaaaggatgacttttttttttcccaatttcttgctgataaaccaaagctcctcctccttgttccctctcaagttccccccacctgacttcacctgtccctccaccaggcaggccgtgcataacttttaccaattcctccaaatacctcatagtaataaagttttagggttatgttgtatagagagtctatgtgataaggcagaacttactagtttgataattgttaaggttactttaaaaccctctttgatttggggtttattttcttggcagaactgctctattgctcaaggaagacttagt

SEQ ID NO: 42610 - DNA, 1454 bp, Homo sapiens
ggtagaatggaagttagtctgtttctggccataagacattcaggtcctctcatcactggaagctttcctgtagagggcagggagttgtgacgtctggacaccccaaaaccccagacttcagtaaatgttcaggtaaaagagctctggatgtcaggaattgagtattccagtccctggatgcagctggaatagactccaaagaccaaagaaaatgtgtgggaaatccagaagtcctaaatgaacatgtcactcactgtgccccctcaaaaaagcgaaattatttttccaggaaaatataaaagcactacgctacttttggattcattccactcccattgctaccccaggtgaatgaccgtggttgcaggttaaatgcaaactttgctataccaaagagtcctaggacattttcacatgagctataaaggcatattccctaagaaaggtcctcccttctttgtacataaaggatgaaaaggtgcattcaaacaccagaggctgttttgagacatgtttggccttctgggttattactgtggtgtggttagctttacagtacatttggtaactatttcctaaatagtaaggacaaagaagcagaaggtaagaaatagcgacttccacgtgtaaaaaaaaaaaagaaaaagaaaaaaagaaaaaaaagtgtaaagatctactatttatagtgtgaaccaaagacgctacctcactcaatttccattggtgattttaatcacattgatgataccaaagaataccaaagatattttcatgcacggtctcagtctgcagagggaactccgccccttcccttcccccacccctcccccttcctaactcttcactcagtgtgtaaacttgtcttcattcttaataatgatacaataatgacaacaacaacattaggaaatactactcttattactgctagttctacttgtaaatctctaggcaaacatgttgcaaactttgtaaactcctaggacgagtgccttgcttgaaccaaagtgttaaaccgctgttgacctctttcaccttatactctttgaatacctcagcctcttagaaaggccactaatgaaaaaaaaaggaataattattcaccgtggtgctttttccgtgcaaccatgcaatgaaactttctttgataccaaaggatgacttttttttttcccaatttcttgctgataaaccaaagctcctcctccttgttccctctcaagttccccccacctgacttcacctgtccctccaccaggcaggccgtgcataacttttaccaattcctccaaatacctcatagtaataaagttttagggttatgttgtatagagagtctatgtgataaggcagaacttactagtttgataattgttaaggttactttaaaaccctctttgatttggggtttattttcttggcagaactgctctattgctcaaggaagacttagt

SEQ ID NO: 42611 - DNA, 272 bp, Homo sapiens
aaaactttataattcttatttattttgtagtttgtatgtttgggatgtcccccccccctctttgatttggggtttattttcttggcagaactgctctattgctcaaggaagacttagtttctggaaatattccccgggtgagttaagggttgtgtaaaaatgcaagaatggaatacgaaatgattttcattttgatggttacttatgaagtttttgtgttccgtagaaaatttgtttccacagggtaaaaaaatatatatatataaaatctc

SEQ ID NO: 42612 - DNA, 660 bp, Homo sapiens
tgctacataataggtaaatgcataatggcatgaaaaaaacatagcataaactaaaaaattatttgtctttgtcagtgcagtaacaattattccattggattaatagattatattgaaaaagaaagagaaccactactttttctaaaccttcggtgggaattggattccttgttcaggcaatcttttgagtttcctttgttggaagttttagagcatgagaaggtctattttctgccttaaataaataaatattttatggttagcctacaggtattgccaaaaggttaaagaatattaccaaatataccaataaaataattttgaaatactcgtttatgtctatataaagaaaataaaaacagggtttagcctcaagaatgattcctcatatgtctaaacactaccccaacataagcattaaagtatattaaagagtatcggtttctgcagtcagaagttggtttaaatcctagctccttcctttactaactttataaatctgcctaagttataggaccttcttgtgtctctatttctgcataagaaatgggtactaggcttaatacctgggtgatgaaataatctgtacaataaaccccgatgacataagtttacctgtgtaacaaaccagcacatgtacccctgaactgaaaataagtt

SEQ ID NO: 42613 - DNA, 2244 bp, Homo sapiens
ctctctctctttttagcagcaacatacaagccggccatattagagagatggaaataaagcttccttaatgttgtatatgtctttgaagtacatccgtgcatttttttttagcatccaaccattcctcccttgtagttctcgccccctcaaatcaccctctcccgtagcccacccgactaacatctcagtctctgaaaatgcacagagatgcctggctacctcgccctgccttcagcctcacggggctcagtctctttttctctttggtgccaccaggacggagcatggaggtcacagtacctgccaccctcaacgtcctcaatggctctgacgcccgcctgccctgcaccttcaactcctgctacacagtgaaccacaaacagttctccctgaactggacttaccaggagtgcaacaactgctctgaggagatgttcctccagttccgcatgaagatcattaacctgaagctggagcggtttcaagaccgcgtggagttctcagggaaccccagcaagtacgatgtgtcggtgatgctgagaaacgtgcagccggaggatgaggggatttacaactgctacatcatgaacccccctgaccgccaccgtggccatggcaagatccatctgcaggtcctcatggaagagccccctgagcgggactccacggtggccgtgattgtgggtgcctccgtcgggggcttcctggctgtggtcatcttggtgctgatggtggtcaagtgtgtgaggagaaaaaaagagcagaagctgagcacagatgacctgaagaccgaggaggagggcaagacggacggtgaaggcaacccggatgatggcgccaagtagtgggtggccggccctgcagcctcccgtgtcccgtctcctcccctctccgccctgtacagtgaccctgcctgctcgctcttggtgtgcttcccgtgacctaggaccccagggcccacctggggcctcctgaacccccgacttcgtatctcccaccctgcaccaagagtgacccactctcttccatccgagaaacctgccatgctctgggacgtgtgggccctggggagaggagagaaagggctcccacctgccagtccctggggggaggcaggaggcacatgtgagggtccagagagaagggagtgggtgggcaggggtagaggagggggccgctgtccacctgcccagtgcttggcctggcagtggcttcagagaggacctggtggggagggagggctttcctgtgctgacagcgctccctcaggagggccttggcctggcacggctgtgctcctcccctgctcccagcccagagcagccatcaggctggaggtgacgatgagttcctgaaacttggaggggcatgttaaagggatgactgtgcattccagggcactgacggaaagccagggctgcaggcaaagctggacatgtgccctggcccaggaggccatgttgggccctcgtttccattgctagtggcctccttggggctcctgttggctcctaatcccttaggactgtggatgaggccagactggaagagcagctccaggtagggggccatgtttcccagcggggacccaccaacagaggccagtttcaaagtcagctgaggggctgaggggtggggctccatggtgaatgcaggttgctgcagctctgccttctccatggggtaaccaccctcgcctgggcaggggcagccaaggctgggaaatgaggaggccatgcacagggtggggcagctttctttggggcttcagtgagaactctcccagttgcccttggtggggtttccacctggcttttggctacagagagggaagggaaagcctgaggccggcataaggggaggccttggaacctgagctgccaatgccagccctgtcccatctgcggccacgctactcgctcctctcccaacaactcccttcgtggggacaaaagtgacaattgtaggccaggcacagtggctcacgcctgtaatcccagcactttgggaggccaaggcgggtggattacctccatctgtttagtagaaatgggcaaaaccccatctctactaaaaatacaagaattagctgggcgtggtggcgtgtgcctgtaatcccagctatttgggaggctgaggcaggagaatcgcttgagcccgggaagcagaggttgcagtgaactgagatagtgatagtgccactgcaattcagcctgggtgacatagagagactccatctcaaaa

SEQ ID NO: 42614 - DNA, 444 bp, Homo sapiens
tctcatgtccaacttgttctgaacctgcatggggaagaggtgctcttagtattaagcactctcaaaggccctcagttcctggagtgaggaactttgagaaataagaggtgatggggtgaggagggcagaacacacagtgagagggcttcactgggcgcgacgtgtggctttgggcctttcggcttagattccaaacagcacgtttgaccttgaggtctgcaatggttctcctgggtgaggcctggacccctgtggcccgggcatgagaccttgagctcaggccatgccatgcctgaccttgaaccttgctgatcaaggcttcgcccacaggcgaggggtattccagggaagcaggaagtgtgcagcaggcactgaccaaagatgtgccgccctctgcagagggacgaggggccaggctgggccttaaggaagccctgacgtatg

SEQ ID NO: 42615 - DNA, 280 bp, Homo sapiens
ttgaaaaccgtttataggactgaacgacaaccccaaatgcaagtgaccatgagcaactacaaataggtatacatatgcatttgagctgaacagactttctgacatataatttagtcaaaattgctgtatttcttccccttaaatttatacataatcagcttcttgtatggacccaaattggagaaatgtaattcagtagttggtgagaaataaaggattgtgacctctgtgtaattatcaggaaggatgctgtatgatgcctgctgttttattactgctc

SEQ ID NO: 42616 - DNA, 447 bp, Homo sapiens
  misc_feature (441)..(442): n is a, c, g, or t
  misc_feature (446)..(447): n is a, c, g, or t
ctgagatcgcaccactgcactccagcttgggcaacagagtgagactctgtctcaaaaaaaaaaagaaaggaaaagaaaggaccacttgttatagaaagcctgtcttttaaggtagctctggaccttttcagaggcagccaaattgcccctcatggttcgtcccccacatccccgcctgcctggcctaagtcctccttccccctccccaacagttaaataagtctttgtctccattacaaaacaaatctcagagctaccttcaaagaagagccagccctcagttggtgaatgaagatactttgacattttcctatgagcatggtgaaacaggtttaatttgtattaaatagcttgaagcaatccttattgggaattacaaggtggaattttagtcacaggaaaataaagcatttcacaagctacttactttcatgaacaaannaaann

SEQ ID NO: 42617 - DNA, 1223 bp, Homo sapiens
ccatctctactaaaaaatacaaaaattagccgggcatggtggtgggtgcctgtaattccagctactttggaggctgaggcaggagaatcgcttgaacctgcgggggaggaggttgcagcgagctgagatcacgttacttcactccagcccgtttataagagcgaaactccgtcttgggaggcggggggggggggcatgtgggaagaagccacccgaggagcctggtagggtgatgaaagtgagagcagaggtgtagctcagggccgtgcagcacctcggctttggctctttgcaggctgtagaagcagaatcgtaagacttctcctggcttgtttctttccatttctcgatttgactcctcagcctgctcttctggctccctgctgtctaatggaattccagagcttgaccttgagaatgcagattctcccgattgacaacttctagagaagggaatctcagaaagacaaaggagatgttccttcttccgctgcaagagtggaaaagcagacactctcctgagagcctcataaagctggtgaaagcctgttctgataaagcacccaggagatcattccttccgccccctgctcccaggacaggcacttaggtgagaatgtgtgactcatccagttctgatacctgctgcaaatggtatatgaaacaaaggaatcttttaagccacctgggcttcaaagaaatgtaactgtgtactttttttttttaatctgcttttaaattggtaaccttgcttaattgcatgttgccctggtaataaccttgcaattgacatctctttttaaaaaatgaaggtctacaatgtctgtattggccagaagagctttgcaagtttctttgttcatctttctcctatgactatgattttcttcgaacaaagagtttgagaggccttgcttcgttttaaattaacaatacatactttgcatatttgacttgagaattgtgtgtatgttatacactactacaaaacaaaccaatttcaataaaaataaaagcacaatccttaaaatcaaagcaaagtgaaacaattgaacctcattatatatcaagttggtggtttactcacacggagaggacttattttaagtgactttaattaggtgactttattttaagtgactttccatggtagttggaaaaaaagaaaccacagtagttgaatgtatatctttagtgggatatattctaagaacaaaaaaaaa

SEQ ID NO: 42618 - DNA, 161 bp, Homo sapiens
caggtctgaatatgcttgtgtctcctagaaggggtgaagaatactcctcttagcccattttgcatgtatgagtgggggccacccacttggcaaagcagcctttgagaaacaccagtaacatgtaaccagggtagggatgtggcaatgggcaggagggtccc

SEQ ID NO: 42619 - DNA, 4223 bp, Homo sapiens
gggggcagacggccgaagagccaggtgtgccagggacctatggcagcagggctgaacgtgcccgctccagcctctccagtgctgggagagacctctagatggtgcaggtgagtttgcaatgagggaaagcccctcggcaaggactgagtttccaaacttgcagacagggcagggagcggtcaaggaagagttcccgggaagccctttaaacggaaaggaagcggggctagtgtcagagaggtgtgccaggtcccaggcagccctgctgacccctaaggacatagagtacctgcttctgagagggctgccacggtggccacctgtgaagcctgtcacccagaactggatggtacctgactttcttcatagacccatcttctgctgggactgaagctgacctccaacagaagccaggtgagcccttgggagaggatggcccatgtgggggactgcacgcagacgccctggctccccgtcctggtggtgtctctgatgtgctcagcccgagcggaatactcaaactgcggtgagaacgagtactacaaccagactacggggctgtgccaggagtgccccccgtgtgggccgggagaggagccctacctgtcctgtggctacggcaccaaagacgaggactacggctgcgtcccctgcccggcggagaagttttccaaaggaggctaccagatatgcaggcgtcacaaagactgtgagggcttcttccgggccaccgtgctgacaccaggggacatggagaatgacgctgagtgtggcccttgcctccctggctactacatgctggagaacagaccgaggaacatctatggcatggtctgctactcctgcctcctggcaccccccaacaccaaggaatgtgtgggagccacttcaggagcttctgccaacttccctggcacctcgggcagcagcaccctgtctcccttccagcacgcccacaaagaactctcaggccaaggacacctggccactgccctgatcattgcaatgtccaccatcttcatcatggccatcgccatcgtcctcatcatcatgttctacatcctgaagacaaagccctctgccccagcctgttgcaccagccacccggggaagagcgtggaggcccaagtgagcaaggacgaggagaagaaagaggccccagacaacgtggtgatgttctccgagaaggatgaatttgagaagctgacagcaactccagcaaagcccaccaagagcgagaacgatgcctcatccgagaatgagcagctgctgagccggagcgtcgacagtgatgaggagcccgcccctgacaagcagggctccccggagctgtgcctgctgtcgctggttcacctggccagggagaagtctgccaccagcaacaagtcagccgggattcaaagccggaggaaaaagatcctcgatgtgtatgccaacgtgtgtggagtcgtggaaggtcttagccccacggagctgccatttgattgcctcgagaagactagccgaatgctcagctccacgtacaactctgagaaggctgttgtgaaaacgtggcgccacctcgccgagagcttcggcctgaagagggatgagattgggggcatgacagacggcatgcaactctttgaccgcatcagcacggcaggctacagcatccctgagctactcacaaaactggtgcagattgagcggctggatgctgtggagtccttgtgtgcagacatactggagtgggcgggggttgtgccacctgcctcccagccacatgctgcatcctgaaaagcatgcctgtgggctgtcctcccaggacaagccaaggatccaacgagggctctggagctgtgagtggtgccaaaagactgccaagaatcaaggcttttgtgatatgtcaccgtatgccttaggatgttcaaggagccagacgaaataaggcctgtcttccaatttaaccaaagataaaggactagagccgggatactttcagatgctcgcctgtacctcaccaggcagagtaaatatctactcactcatacagccagcccaccagcccaccattaactcactgaacaatgagacaatgttgaggactcaaatgaatcaaaccccgtgggaatgacagaagtgaagaatctggtccctgtctttaaggagtttgcactccagtagaagacagaaggaacgtatgtttacaaaccacttcactggaagacgtcaaacaagctgaatgaaggggcgcttagaaaacgttaatagaagttctaagcgggagatgactccctactgggatgatgaaggatggcatcctagtgaagaagcagctcaaacattttgataaaatggcaacaaaatgcagacaccctgctccaggtattatttcaggtttagtacaagtctgttaataccctatgtggtttcattaggataactttttacctatccttgaggtcatccatattcttacaggccttccagtcaataatggaagagctcactctatacaaaaccaatatgcaaggcatgtgtttgtccaagcaattggatgtgtgcagtagccaatttcatttactgcattactctttggcctgggaaccctgtggtctgcactacatgtgaatggccttccacttcagtcttaggcagatttgaccttttaggggcagcaatgctgaaggacacagcaatttaaattataatgtgtcaggctgtgttttcacttcaaacatgtatgagtagtcagctgtaattagagaaatgatgacttcctaagagttcagccacgcataattctagatttcaagagcatctaagacttgtggattagcctcatggcatgagagtttcagactcagccttctgagccagtcagggaaagtggagttctgcagcgcaaatgagagcctgggcttggtgtcgagggagctggcttctagttgtgccaccttgggccttgtcttttcctctctctgcctcagtttctcgtctgccaatgagatgttagttagtgattctataattggggcaggtagggttcaggtgagcaaaaagaaagtggagctataggaaatgccaggcctttgaggtgctctatggaagtcaacacagtgtggtttgtccatttaaatgggaataaaaacagaaaaactcagacttggcattttcacaataactgcaatggtttgacataacatttataggcagaaagttaataaactggcattgttcttggcatattattgtactatccctgtaactgccaagagctcaggagccaggctagtgatcacaccaggggttagagttcactgctgaactccctgatggcaggtctgtgtttattactacattaaaacaaagtctctgacttataaagcgaggtcgtaaaaattacaagttgcatgactgaaaaaatgctttagggggaaaatcagtcatatctttaacaccaacaagcaatttcccaccaacgaatgtagtacatactgtgagaggatcataatgaggtcctgaatatttaatatcatcatttactgtgtctgtttgctgctgtttttcgaacctatttggtttaccctgcaagctaaatactccacggcagagcttaattatccttttaattcctctttgaaatcctgtggtgcccccttccccctgccttgtgatgatgatgagtgagtctccccttaattagactgcaaatgtcacttgtgatgagtgtgccattccaggataacagcttgcaccctcctcagaatgttttcagcgaaagagtggggtggctgttctctgctcctggtgctttggcctcatttcacactattagaattctggggctgtaaggccagccagtgtcagctcatgttccattggctctccacctgccatttttagggagctattccttatatagttacaaattcccttgtcatttacttatttggaaacatgggatttactctgacaagctttagcctatgttatgggattcagaacaatgagatcataataattctcactgaccaaagctgggactccatcctgccatttttgtgtggagatattcataattctgcaatactttaaaacatttagaaaacaccccagggtaggtctgtggcccttagacagtgaagtcttaattgtcaatattatttttgtctaattctgtatatatataacttattatattttataatctcaataaacatattaataagatttataga

SEQ ID NO: 42620 - DNA, 1071 bp, Homo sapiens
  misc_feature (162)..(162): n is a, c, g, or t
ggaatactagtatatcgctcacacctcatatcctccaagctatgcctaaaaggaataacactatcgctgttcattatagctcctctaataaccctcaacaccccctcccttttagccaatattgtgcctattgcactccgacctgggcaacagagcgaaacnctgtctcaaaaaaaaaaaaaaaaagtaacagaaaaaagagtgaaatatattagctatcttttattctgagccaaaacttgacagatgtgggaaatcttcatatagtgtatgaaaatttcattgtacagggaaattattttcctctgtgtcttttcttttactataaagtgattcagaattttactgttactataaaattatgcaaagtattgtgacaaaactgcatcaatttgttgactattaaagtgctccttgaacattaaaaaaaaacaaaaaaaaaagaaaaacaaaaaaacaaaaaaaaaaaaaaaaaaaaaagaaaaaaagaagaaaaaaaaaaagaaagaagaaaaaaagaaagaaaacagagaagaaaagaacagaagaagaagaagaaagaaaatacaaaagagagaggaggagaggaagcgagagaaggagagaagaacggagcaaacacgaggaagacaggagacacggaaagaagcagcaccagagaagacagaacaaagtgacgtaagaggatacaggacagggaaagagcagagagacagagaaaagagaagaagaagaagaagagaaaagaagcagagagaaatcagaagaccacgacaagaagcaggagcgaagaccagcagacaagagagccaagacgaagacaagaaacgacataaagaaacttagaataggggacaaataacagaacacagagcaaacaagagaggcgaaacgagcagagaggagaagacagaaacgagcgcacgaaaggaaggtacagaagtgagagacgacagtagcaaatgcacatacgaagaggacgctctgaggtcgagcacgacgaggaagcgaagaacaaataaactatagacggcggagaggagaacacagatggagcacgacgaggcgggg

SEQ ID NO: 42621 - DNA, 424 bp, Homo sapiens
  misc_feature (162)..(162): n is a, c, g, or t
ggaatactagtatatcgctcacacctcatatcctccaagctatgcctaaaaggaataacactatcgctgttcattatagctcctctaataaccctcaacaccccctcccttttagccaatattgtgcctattgcactccgacctgggcaacagagcgaaacnctgtctcaaaaaaaaaaaaaaaaagtaacagaaaaaagagtgaaatatattagctatcttttattctgagccaaaacttgacagatgtgggaaatcttcatatagtgtatgaaaatttcattgtacagggaaattattttcctctgtgtcttttcttttactataaagtgattcagaattttactgttactataaaattatgcaaagtattgtgacaaaactgcatcaatttgttgactattaaagtgctccttgaacatta

SEQ ID NO: 42622 - DNA, 211 bp, Homo sapiens
cgcctgcaatcccagtattttgggagactgacgcaggccgatcgcttgagtcaggagttcaagaccagcctgagcaacagggcgaaaccctgtctctacaaaaaatacaaaacttggcaaggcattgtggcccatgcctgtaatcctagctacttgggaggctgaactgggaggaacacttcagcttgggaagttgaggctgcagtgagcc

SEQ ID NO: 42623 - DNA, 369 bp, Homo sapiens
  misc_feature (341)..(341): n is a, c, g, or t
  misc_feature (358)..(358): n is a, c, g, or t
aagctcagaggggcagtccgtgttctgagagtcacagtggcacttgtatctcaattttaaccagaggtttacctggtagcctgagccatgtccagggcaggcctacccttgggcaggacagggggctggccttgccagtgtggacatcgctgcttcccaggtggcctgggattcctgaggatacatccatgaacacactgcagattgctcaagtgatggacccttgtacattaaaagatggcctaatagggccgggcacggtggctggggatgacaggcatgaatcactgtggttcagccaccatctgggagtttttaaaaggctcccatgttgagttccntgttgattgggccaggncaggggggacc

SEQ ID NO: 42624 - DNA, 4324 bp, Homo sapiens
ccggcgacccgttcgcctacccgggcgccggcggcctctacaagcgcggctcggtgcgctcgctcagcacctactcggccgccgcgctgcagtccgatctggaggactccctgtacaaggcggcgggcggcggcggcccgctgtacggcgacggctacggcttccgcctgccgccttcgtcaccgcagaagctggccgacgtggcagcaccccccggaggtcccccgccaccgcacagcccctactcggggccgcccagccgcggctcgccagtgcgccagtccttccgcaaggactcgggctcctcgtccgtctttgccgagagtcctggagggaagacccgcagcgcggggagcgcctcgacggccggagctcccccttcggagctcttccctgggcctggggaacgctcgctggttgggttcgggccgccagtgccagccaaggacacggagaccagggagcgcatggaggccatggagaagcagattgccagcctcacaggcctggtgcagagcgccttactgcgaggctctgagcctgagacccccagcgagaagattgaaggctccaatggagcagccaccccctcagcaccctgtgggtcaggcggccggagcagcggggccaccccggtgtccggcccgcccccgccctcggccagcagcacccccgcaggtcagcctaccgccgttagccggctgcagatgcagcttcacctgcgaggcctgcagaacagcgccagtgacttgcgcggccagctccagcagttgcgcaagctccagctacagaaccaggagtcggtgcgcgcgctgctgaagcgcacggaggcagagctgagcatgcgcgtgtcggaggcggcgcggcggcaggaggacccgctgcagcggcagcgcaccctggtggaagaggaacggctgcgctatctcaacgacgaggagcttattacccagcagctcaatgacctggagaaatcggtggagaagatccagagagacgtgtcccacaaccaccggctggtgcccggccctgagctggaggagaaggcactggtgctgaagcagctcggggagacgctgacagagctcaaggctcacttcccgggcctgcagagcaagatgcgggtggtgctgcgcgtggaggtggaggcggtgaagttcctgaaggaggagccccagcgcctggatgggctcctcaagcgctgccgcggggtcacggacacgctggcccagatccgaaggcaagtggatgagggtgtgtggccaccccccaacaatctcctgagtcagtcccccaagaaggtgacggcagagactgacttcaacaagagcgtggacttcgaaatgccaccccccagccccccgctgaacctgcatgagctgagcgggccagctgaaggagcctctcttacccccaaggggggcaaccccaccaaaggcctggacactcctggcaagagaagcgtggacaaagctgtgtctgttgaggctgcagagcgagactgggaggagaagcgggcagccctgacccagtacagtgccaaggacatcaaccggctgctggaagagacacaggcagagctgctcaaggccatccctgacctggactgtgccagcaaggcccatccaggcccggcccccactccagatcacaagccccccaaggccccccacggccagaaggcagccccccgaacggagcccagtgggaggaggggctcagatgagttgaccgtgccccgataccgcacagagaagccctccaagtcgcccccaccgccccctccccgccggagcttcccctcctcccatggcctgaccaccacacgtaccggagaggtggtggtcaccagcaagaaggactcggccttcatcaagaaggctgagtccgaggagctggaggtgcagaagccccaggtgaagctgcgccgggctgtgtctgaggtggcccgcccagcctccacaccacccatcatggcctcggccatcaaggacgaggatgacgaggatcgcatcatcgcagagctagagagtggcggaggcagtgtaccacccatgaaggtggtgactccgggggcctctcggctgaaggcggcccagggccaggcgggcagccccgacaaaagcaaacatggcaagcagagggccgagtacatgcggatccaggcccagcagcaggccactaaaccatctaaagagatgagcgggtcgaatgagacctcgagcccagtctcagaaaagccctcggcttccagaacctctatccctgtattgacttcctttggggcaaggaattcttccatctccttctagaagcccctcaccccgctgccccgcctgtccccctccctcactcctgccatttctcccctctcttccttcatctccaccccaccccaccctactctccagacgccctgaggggtgtgccctgaagaggagggtgcggccctcctcagcgacccctacccatcatctgttggtgtttttggttttgttttttttttttttttaacaattaacttttaattatctttttttaaacagtaaaactaaaaaccaaacacaccaccttccttgatcccagctggcctctcgctggccgcacctgtcacgtctctccctcttctctttcaccactctttcccccagtccatcctgaagctcctgcacccccttcccgccttcccctcacttcccaagaatactccaaacaaactctgaaccacggagacttggagcagtgggagacccctctcccgtttctcgataccttcctggaggaacgcggggacatcggaccaacccatacatcaagccagagggcggggcttagggagactggccttggagatgccccactccctgtctaagctccgacaagactgtgacttcctctgtggctgctctgcctcctcccactcacacccaagtgggcctggagtagagacggacaggctggagacgaggccggagtttgagaggcctcagggtgggtgtgaggccatggagtctgtatccctggggaggcgctggcctcctgggccttgccgtccagtggggagtggagggcagaggccctttggtctgctggctgtggagggtgggttgcacggacagccggatatcggggacactgccttgggagagggcggcccggacgggtatttggtacttttagtttcctgatttagcactttaaatggcattaacttattgaatggggatggggtgggcaagagtgaggggcctagaaaaccaggttttgtggcttgcagttgggggaagggtctggtttgagggaaatgggagggtcgagaggggcttgacggggagcactgaagacacctgggacccgcaggtggggtgacttgaacttcagtcatcctcttggcaatttgagggttttcccaggaaaggatgagacgtagtttttcaatggggctctggtgaccctggtgagatgtctgaaggtccctgaggcctgaccatccagccagcgcccctggcctgtggacgccctgcctgccctgcagaggcggttggcagtgccgcctggcttttggccgggtcctggggaggcagagagaggccaattttggttctcactcctggccccccagagggcacagtgaggagccggtagggagaggataggagaagaggaggaggaggagcggggtccccggccgcaggattcccacttggagcacaaagtgaagtaagcacaggggagggggactagaatcagtcccccatagcaagcacagaaaggaggagctgcgcagaaggcagagccccccagaccctggggcctggctggggaaggtccgcacctggggagagctgggagctgttgaaggtttggggggaggggaaacgggttgtgtttcttcatttctttttttgtttttgcctttgttggttcatccttgttttctagctttggatcatttttgtaccaaggcgagcaagcctttttgaaaaataacaaaagaggaaaaaaaaaatccctcctggaaaaaaaaaaaaaccctggaaaatagaaaaaaaaaaaaggacctcataaatgatgcaattacttttaattgcaggcaactctttacatttaagtgaagtgtcttaacattttatattgttttaaaaatatatttacatattatatatataatatacgtaatataaatatatataaatatttaaaaaagaaaaaaaaaagaaaaccacggcactctccctggccactgttttggcgggggaggggggctggggggcgggcacgtcggcctggcttctgtggtcccagtgaaatggtctggtttgat

SEQ ID NO: 42625 - DNA, 206 bp, Homo sapiens
tatgagctggctccgcaccaggcgcacttctcctccagctcaatgacctggagaaatcggtggagaagatccagagagacgtgtcccacaaccaccggctggtgcccggccctgagctggaggagaaggcactggtgctgaagcagctcggggagacgctgacagagctcaagggtgggtctggggcctgcgaatgcagcacgttg

SEQ ID NO: 42626 - DNA, 3377 bp, Homo sapiens
taagaatcgagctcggctacctgtaacattcgtgtcccattcgtgtcattcgtgtcccacaaccaccggctggtgcccggccctgagctggaggagaaggcactggtgctgaagcagctcggggagacgctgacagagctcaaggctcacttcccgggcctgcagagcaagatgcgggtggtgctgcgcgtggaggtggaggcggtgaagttcctgaaggaggagccccagcgcctggatgggctcctcaagcgctgccgcggggtcacggacacgctggcccagatccgaaggcaagtggatgagggtgtgtggccaccccccaacaatctcctgagtcagtcccccaagaaggtgacggcagagactgacttcaacaagagcgtggacttcgaaatgccaccccccagccccccgctgaacctgcatgagctgagcgggccagctgaaggagcctctcttacccccaaggggggcaaccccaccaaaggcctggacactcctggcaagagaagcgtggacaaagctgtgtctgttgaggctgcagagcgagactgggaggagaagcgggcagccctgacccagtacagtgccaaggacatcaaccggctgctggaagagacacaggcagagctgctcaaggccatccctgacctggactgtgccagcaaggcccatccaggcccggcccccactccagatcacaagccccccaaggccccccacggccagaaggcagccccccgaacggagcccagtgggaggaggggctcagatgagttgaccgtgccccgataccgcacagagaagccctccaagtcgcccccaccgccccctccccgccggagcttcccctcctcccatggcctgaccaccacacgtaccggagaggtggtggtcaccagcaagaaggactcggccttcatcaagaaggctgagtccgaggagctggaggtgcagaagccccaggtgaagctgcgccgggctgtgtctgaggtggcccgcccagcctccacaccacccatcatggcctcggccatcaaggacgaggatgacgaggatcgcatcatcgcagagctagagagtggcggaggcagtgtaccacccatgaaggtggtgactccgggggcctctcggctgaaggcggcccagggccaggcgggcagccccgacaaaagcaaacatggcaagcagagggccgagtacatgcggatccaggcccagcagcaggccactaaaccatctaaagagatgagcgggtcgaatgagacctcgagcccagtctcagaaaagccctcggcttccagaacctctatccctgtattgacttcctttggggcaaggaattcttccatctccttctagaagcccctcaccccgctgccccgcctgtccccctccctcactcctgccatttctcccctctcttccttcatctccaccccaccccaccctactctccagacgccctgaggggtgtgccctgaagaggagggtgcggccctcctcagcgacccctacccatcatctgttggtgtttttggttttgttttttttttttttttaacaattaacttttaattatctttttttaaacagtaaaactaaaaaccaaacacaccaccttccttgatcccagctggcctctcgctggccgcacctgtcacgtctctccctcttctctttcaccactctttcccccagtccatcctgaagctcctgcacccccttcccgccttcccctcacttcccaagaatactccaaacaaactctgaaccacggagacttggagcagtgggagacccctctcccgtttctcgataccttcctggaggaacgcggggacatcggaccaacccatacatcaagccagagggcggggcttagggagactggccttggagatgccccactccctgtctaagctccgacaagactgtgacttcctctgtggctgctctgcctcctcccactcacacccaagtgggcctggagtagagacggacaggctggagacgaggccggagtttgagaggcctcagggtgggtgtgaggccatggagtctgtatccctggggaggcgctggcctcctgggccttgccgtccagtggggagtggagggcagaggccctttggtctgctggctgtggagggtgggttgcacggacagccggatatcggggacactgccttgggagagggcggcccggacgggtatttggtacttttagtttcctgatttagcactttaaatggcattaacttattgaatggggatggggtgggcaagagtgaggggcctagaaaaccaggttttgtggcttgcagttgggggaagggtctggtttgagggaaatgggagggtcgagaggggcttgacggggagcactgaagacacctgggacccgcaggtggggtgacttgaacttcagtcatcctcttggcaatttgagggttttcccaggaaaggatgagacgtagtttttcaatggggctctggtgaccctggtgagatgtctgaaggtccctgaggcctgaccatccagccagcgcccctggcctgtggacgccctgcctgccctgcagaggcggttggcagtgccgcctggcttttggccgggtcctggggaggcagagagaggccaattttggttctcactcctggccccccagagggcacagtgaggagccggtagggagaggataggagaagaggaggaggaggagcggggtccccggccgcaggattcccacttggagcacaaagtgaagtaagcacaggggagggggactagaatcagtcccccatagcaagcacagaaaggaggagctgcgcagaaggcagagccccccagaccctggggcctggctggggaaggtccgcacctggggagagctgggagctgttgaaggtttggggggaggggaaacgggttgtgtttcttcatttctttttttgtttttgcctttgttggttcatccttgttttctagctttggatcatttttgtaccaaggcgagcaagcctttttgaaaaataacaaaagaggaaaaaaaaaatccctcctggaaaaaaaaaaaaaccctggaaaatagaaaaaaaaaaaaggacctcataaatgatgcaattacttttaattgcaggcaactctttacatttaagtgaagtgtcttaacattttatattgttttaaaaatatatttacatattatatatataatatacgtaatataaatatatataaatatttaaaaaagaaaaaaaaaagaaaaccacggcactctccctggccactgttttggcgggggaggggggctggggggcgggcacgtcggcctggcttctgtggtcccagtgaaatggtctggtttgat

SEQ ID NO: 42627 - DNA, 537 bp, Homo sapiens
ccggcgacccgttcgcctacccgggcgccggcggcctctacaagcgcggctcggtgcgctcgctcagcacctactcggccgccgcgctgcagtccgatctggaggactccctgtacaaggcggcgggcggcggcggcccgctgtacggcgacggctacggcttccgcctgccgccttcgtcaccgcagaagctggccgacgtggcagcaccccccggaggtcccccgccaccgcacagcccctactcggggccgcccagccgcggctcgccagtgcgccagtccttccgcaaggactcgggctcctcgtccgtctttgccgagagtcctggagggaagacccgcagcgcggggagcgcctcgacggccggagctcccccttcggagctcttccctgggcctggggaacgctcgctggttgggttcgggccgccagtgccagccaaggacacggagaccaggagcgcatggagcctgagaacagatgccactacagcctgtccgagtccctgcattggatcatctagatcacgagaac

SEQ ID NO: 42628 - DNA, 3153 bp, Homo sapiens
ccggcgacccgttcgcctacccgggcgccggcggcctctacaagcgcggctcggtgcgctcgctcagcacctactcggccgccgcgctgcagtccgatctggaggactccctgtacaaggcggcgggcggcggcggcccgctgtacggcgacggctacggcttccgcctgccgccttcgtcaccgcagaagctggccgacgtggcagcaccccccggaggtcccccgccaccgcacagcccctactcggggccgcccagccgcggctcgccagtgcgccagtccttccgcaaggactcgggctcctcgtccgtctttgccgagagtcctggagggaagacccgcagcgcggggagcgcctcgacggccggagctcccccttcggagctcttccctgggcctggggaacgctcgctggttgggttcgggccgccagtgccagccaaggacacggagaccagggagcgcatggaggccatggagaagcagattgccagcctcacaggcctggtgcagagcgccttactgcgaggctctgagcctgagacccccagcgagaagattgaaggctccaatggagcagccaccccctcagcaccctgtgggtcaggcggccggagcagcggggccaccccggtgtccggcccgcccccgccctcggccagcagcacccccgcaggtcagcctaccgccgttagccggctgcagatgcagcttcacctgcgaggcctgcagaacagcgccagtgacttgcgcggccagctccagcagttgcgcaagctccagctacagaaccaggagtcggtgcgcgcgctgctgaagcgcacggaggcagagctgagcatgcgcgtgtcggaggcggcgcggcggcaggaggacccgctgcagcggcagcgcaccctggtggaagaggaacggctgcgctatctcaacgacgaggagcttattacccagcagctcaatgacctggagaaatcggtggagaagatccagagagacgtgtcccacaaccaccggctggtgcccggccctgagctggaggagaaggcactggtgctgaagcagctcggggagacgctgacagagctcaaggctcacttcccgggcctgcagagcaagatgcgggtggtgctgcgcgtggaggtggaggcggtgaagttcctgaaggaggagccccagcgcctggatgggctcctcaagcgctgccgcggggtcacggacacgctggcccagatccgaaggcaagtggatgagggtgtgtggccaccccccaacaatctcctgagtcagtcccccaagaaggtgacggcagagactgacttcaacaagagcgtggacttcgaaatgccaccccccagccccccgctgaacctgcatgagctgagcgggccagctgaaggagcctctcttacccccaaggggggcaaccccaccaaaggcctggacactcctggcaagagaagcgtggacaaagctgtgtctgttgaggctgcagagcgagactgggaggagaagcgggcagccctgacccagtacagtgccaaggacatcaaccggctgctggaagagacacaggcagagctgctcaaggccatccctgacctggactgtgccagcaaggcccatccaggcccggcccccactccagatcacaagccccccaaggccccccacggccagaaggcagccccccgaacggagcccagtgggaggaggggctcagatgagttgaccgtgccccgataccgcacagagaagccctccaagtcgcccccaccgccccctccccgccggagcttcccctcctcccatggcctgaccaccacacgtaccggagaggtggtggtcaccagcaagaaggactcggccttcatcaagaaggctgagtccgaggagctggaggtgcagaagccccaggtgaagctgcgccgggctgtgtctgaggtggcccgcccagcctccacaccacccatcatggcctcggccatcaaggacgaggatgacgaggatcgcatcatcgcagagctagagagtggcggaggcagtgtaccacccatgaaggtggtgactccgggggcctctcggctgaaggcggcccagggccaggcgggcagccccgacaaaagcaaacatggcaagcagagggccgagtacatgcggatccaggcccagcagcaggccactaaaccatctaaagagatgagcgggtcgaatgagacctcgagcccagtctcagaaaagccctcggcttccagaacctctatccctgtattgacttcctttggggcaaggaattcttccatctccttctagaagcccctcaccccgctgccccgcctgtccccctccctcactcctgccatttctcccctctcttccttcatctccaccccaccccaccctactctccagacgccctgaggggtgtgccctgaagaggagggtgcggccctcctcagcgacccctacccatcatctgttggtgtttttggttttgttttttttttttttttaacaattaacttttaattatctttttttaaacagtaaaactaaaaaccaaacacaccaccttccttgatcccagctggcctctcgctggccgcacctgtcacgtctctccctcttctctttcaccactctttcccccagtccatcctgaagctcctgcacccccttcccgccttcccctcacttcccaagaatactccaaacaaactctgaaccacggagacttggagcagtgggagacccctctcccgtttctcgataccttcctggaggaacgcggggacatcggaccaacccatacatcaagccagagggcggggcttagggagactggccttggagatgccccactccctgtctaagctccgacaagactgtgacttcctctgtggctgctctgcctcctcccactcacacccaagtgggcctggagtagagacggacaggctggagacgaggccggagtttgagaggcctcagggtgggtgtgaggccatggagtctgtatccctggggaggcgctggcctcctgggccttgccgtccagtggggagtggagggcagaggccctttggtccgttatctgactttgtttgtattcttttctgttttgattcctgatccatctctttttcattttttt

SEQ ID NO: 42629 - DNA, 340 bp, Homo sapiens
aagcagaattctaaaatattttccaatcctccaaggttttcccctcccccacctttcctagtatgcatgcctttcataatttccaggctgaatatgattcattatttaatatggcagagttaactttaagatagagaaattattctgggtggtagagaaattatcctggggaactggaggtaacacacaagccctttaaagacagaatttctctggctggttgtaggggaggacattagatgtcaaagcataagagggtttaaatgtaccattgctggattacagagggagaggccaacatgggaagaaactgagagcaaccttgactgatagccagcaa

SEQ ID NO: 42630 - DNA, 655 bp, Homo sapiens
gttatggaagcctgagttagtgaaacctggcctgccacaacgtgttgaagaaagcaaaagaaaataactgggaaagaggtataaaacctagccccataaaacgtttttttgttcgtttgtttgttttttccaaacagaatctttcagaatcctgttgttctggcaggtattttttaatatttccttcttacaaatttcctttttacagatgatatgcattatattgacattaacaatcaatcttaggacacaagtggattgtttttataaatagggatctcctcaatattagtgatccctatattaaggaaaggataggtacatgtggaaccaatgggtaaccaaaaagaatttgaaaagcaataatttagtgggagctcacttggaatataactctatgtcatcatgtatttatttaagtcatattctatgaaatatcctatttgaaagcaaggacaccctttggttgcaaccccaagttactcatgcagtacttcgtaaaaaagaggtgttggctgggcgtggcgcctgtaatcccaacactttgggaggccaaggcaggcagatcacttgagatcaggagtttgagatcagactggccaacatggtgaaaccctgtctctactaaaaatacgaaaattagccagagcaagat

SEQ ID NO: 42631 - DNA, 484 bp, Homo sapiens
gttattgaaattaacatttcccccaagttttataatgtctaggcatgcatatttcagtgtttgcctcaaaagctcatcctaataaccagatggtgcatttaatttcctttttttgttctctaagcaacatgcagcgtcctgcacagccctccttgcaggcaagtgcgctgaggtggcagtcctcctgactgccagcacagatccccagggcctctgagagccctgtattctgggggcagcctttcccccttctattcagccccagctggaaggggacaggttacccacagcccagcacagggctcctgccttagcttagcttagctcctgcctaagcacagggctcctgcctcagctgctctagggagtctggctccctctgaccctctagacctcaccagctgaggatcagagccccagggcaggagccagggccagggggcattggggggtggtttgagagtgcagctctggaagggggaat

SEQ ID NO: 42632 - DNA, 1063 bp, Homo sapiens
aaaatttagagaatatctcttcaaaagaagctatctaggccgggcgtggtggcccacgcctgtaatcccagcactttgggaggctaaggcaggcagatcacctgaggtcaggagttcaagaccaacctggtcaacatggtgaaaccctgcccctactaaaaaacaaaacaatacaaaaaaaaactggccaggcatagtggcagacgcctgtagtcccagctactcaggaggctgaggcaggagaatcacttgaacccgggaggcagaggttgcagtgagccaagattgtgccactgcactccagcctgggtgacagccaatctcaaaacaaaaaaaaaagtgctacgtattggtagttatgcatattcttacatatattaacagtattttacatgcttaaaaccttaaaaataattgaaaatgtcaaaattatatgccatatacatttctgtgggcttgaaaatgatacaatataggttgtttctttaaagcagtcactaaaatgtgtaaacttctagatagagtaatcactaaaaaggaaagttcataccaaaagtagtaatactaggaataaaagagggctcaacactgcctttgggagtcctcctcccatgaaacatggctggatttttctccttgtcctgtgtaacctcccttactttatcatagtttactgccttagttactctctcattcctccaaggagagcctcaagaaatttaggtaacaccagagtgtggccccagccagttgccctcagttaccaaggagcaattaggtaggaaatggccactgaaagactgaaaacaagaaaaaaactcaggtccctcacccaaactgggcagtggtggtcaggcttccacacggaaacctttcactgtcaccagagtgtccccagccagagacctgcagttgcctctgtgcttagatgctgtccaccaagggtcccgagttggaaaagggaaaggggggggagttcccctatgtagagcagagggatccccacatggagatagctccagctcatgcctgcaaatgaaggctctctagagagggaaaaggg

SEQ ID NO: 42633 - DNA, 398 bp, Homo sapiens
actttattttttactcaagagagaaacagatacctcatatttgggccttatttactgaaattaaccatagccaacactttgcactatcatttatgaaatcaaattgggggaaaataaaaacgaagaaataccaggacacataaatacacctgtgggctaagagaaaaagaaattccatgggaaacaatgctgactcagccaagagtccacagagccagcactccattgtttgcttagtggctgacacacctcacgcacactcctccagactgaccacagagatcacacacccccaaatccatattttatgtagattaagtttacttcctcatgtagggttaaatcattgaacctgctctgagcacctatgtgtaactacaccccatcccccaccttta

SEQ ID NO: 42634 - DNA, 850 bp, Homo sapiens
ttctaagttttttggggggttggccacagatatcaggcatataggaaaaatgccaagaagcccaaattagggccaagagaaggaataatctcttggtgccaaacaagtgggataagaagaccatagacagttcaggttatttcagaagaggagattggggggaaaggaagtatgaaagcaaaagaggccatgaatggaagaagcaagagtcaagaattccaggtgttctaaatcttgctaagaacccggtgggaataaaggttgcatgtacagagtaaggaggcttcaaaagaaatagcctgctccaatgaacaacatgcattacttcagagatgaagctccacttctagtctgtctctgcacacccaactttgtttcaatttagaaaatgcagcactttggtggttaccagagtaaccaaacagtgcaagccattcccacccctcttaatagtaaattagtagtcctacctctataccacatttaaatccttttctgggaagttagatacatacaattatcagcactacaaaggttcacctgacaagagtcttaagcaaccaaagcagtttttaaaatgtaaatcagggccaggcctggtgggtcatgcctgtaatcccaacacttggggaggccacttgagtgtgggagttgaagatcaccctaggcaacatagcaaaacactgtctctacaaaaaattagccgggcatagtggtgtgcccctgtagtcccagctactctggaggctaaggtgggaggatcagctgaggctggcaggtcaatgctgcagtgagccgtgacagtgccactgcactccagcctaggtgacagtgagactctgtctcaaaa

SEQ ID NO: 42635 - DNA, 417 bp, Homo sapiens
aaggcctaggacattaccacacactactgttgactttataaacactggacacttaggccacactaacttaataaaaaaaagtttctttcttcaataatgtaaaccgtagcttacttttattttacaaacttttaagtttattgaaactcttgactcttaaaacacttagcttaaaacaaacatattgtatagctgttccaaaatattttctttatatctttatttcataagttttttcctatttttgaagtttttatttttttactttttaaacttttttgttaaaaaccaagacaggctggacccagtagctcacacctgtaatatcagtgctttgggaggccagggcaagaggattgcttcaagccaggagtttgaaactagccagggcaacatagtgggacccctgtttctaca

SEQ ID NO: 42636 - DNA, 299 bp, Homo sapiens
cacagaaatctgataaatgtatcctatatacgccacttagctgactctgaatgaaatgcaactgtccattcccttttgtgccctcagcatactgagtacctgcagctagcctgttgacacacatgagcagtgtggtgtgtgtgtgtttgcagtatggcatgtgcatgtgtaagtgcatgcatgtgcatgtgtatgcacacaacactgtcttgatagcaaatagatatggaatagttgagactttctataataactctctggttctacagtagtgctcttaccaaaagcatgaacacaaa

SEQ ID NO: 42637 - DNA, 828 bp, Homo sapiens
gtcacttggaaattaaatatattcttttgagcctagacagaaataaaaattatgctaatagactttttttccacaaaagtaagattactgctttatcaaaacttaaggactggcagctaaatctgtaccttaagtaaattcattgccttaacctattctgttacttttttcaaaagagggaaaagataaggtggaaattcaattcagaggtttaaaagaatagcacaaaggaagatgtaggaagaaaataaataagacagtatcccaaactgggttttataagaagaataaacaaatacaagttgagcatccctaatccaaaactccaaagtccaaaatgctccaaattctgagtgccagcatgacacttcaaaggaaatgttcactggaggattttggcttttcagatttggaatggatgctcacccagtaagtataatgcagatattccaaaatctaaaaaaatttgaaatcccgaacacttttggtcccaagcatttcagatacaggatactcaaaacgtagtgaaatacagaaagagctaatcatggtggctcatgcctttgatcccagcactttagaaggctgaggtgggtggattgtttgagctctgtagttcaagactagcctgggcaacatggcagaaccccatttctacaaaaaatacaaaaattagctgggcatagtggtgcgtgcctgtggtcccagctgctcagaaggctgagatagtgcttgagcccaggaggtcaaggctgcagtgagccgtgatcacaccactgcactccaccctgagcaatagtaagaccctgtccccatcccctcccccgc

SEQ ID NO: 42638 - DNA, 1161 bp, Homo sapiens
ccttatttgaattgtcattataattttatatgcaaccttaatttgtcaagtaaatactttcatttaatttgaaagaattcatattcatttgctctttcatttgacaataataaaatttaaggtttattacctggaaagagtgcaagaaaatactaaacaactttatcaaactgattcacactgaggggaggttattttgtaacaaataatggaccacaagttcattttgtattcttctgtagtagaggctactgatatgaatttaagaaaaaaccttagaatcttaacttttcacatctgcagatgcagtgtgccattctgaatttttcaatctaagggatgtggatacatagaatgtttaaaaagataacaattagaatgaaaaattaaaattatgtatgcttttatatgggttactttttattgatcacatttctctggaaatttttctttatattttttcacagttgtctttctagctactgaaaaaattatacaaatatctttggccatttaaatgtttatcattgtgcagtgaactgttttagtaactttctgtttgacctttttagaaggttgcatccttaaaatgtgaaccagatacatggctttgcattgaagaggaaagcagtagaatgtcaggttactttaggcagtgtgacagtatataaatgaaatgtggaggatggtggtaacaatttgattttccacacagcaaaaccacagtcccgccacctaacaaagccctgtttatgccacacaccagcatctgagggaagaggaggcactgtgacaaagcagcgctgatgctgctcagcctgcgatgattacagctcatctgcacagccatctgaaagtttaatacatactcatcagagggaacatgccgggacaattttgggttccaatacaaaagttaagcatcaaacaggtttttctttccatttgattaaatgtgctgattttattttactgttgcattagaaacaaacaagttatctttcgctatttaattttccctctatgcaaattgtgttattacagctgaccgctatcagtaaatcttaattctgtcagtcccattgcttccttttttataaaaatactgtgtccccctttactgtcatgaagtgaaattcataaatatatttcctacacata

SEQ ID NO: 42639 - DNA, 1314 bp, Homo sapiens
ccttatttgaattgtcattataattttatatgcaaccttaatttgtcaagtaaatactttcatttaatttgaaagaattcatattcatttgctctttcatttgacaataataaaatttaaggtttattacctggaaagagtgcaagaaaatactaaacaactttatcaaactgattcacactgaggggaggttattttgtaacaaataatggaccacaagttcattttgtattcttctgtagtagaggctactgatatgaatttaagaaaaaaccttagaatcttaacttttcacatctgcagatgcagtgtgccattctgaatttttcaatctaagggatgtggatacatagaatgtttaaaaagataacaattagaatgaaaaattaaaattatgtatgcttttatatgggttactttttattgatcacatttctctggaaatttttctttatattttttcacagttgtctttctagctactgaaaaaattatacaaatatctttggccatttaaatgtttatcattgtgcagtgaactgttttagtaactttctgtttgacctttttagaaggttgcatccttaaaatgtgaaccagatacatggctttgcattgaagaggaaagcagtagaatgtcaggttactttaggcagtgtgacagtatataaatgaaatgtggaggatggtggtaacaatttgattttccacacagcaaaaccacagtcccgccacctaacaaagccctgtttatgccacacaccagcatctgagggaagaggaggcactgtgacaaagcagcgctgatgctgctcagcctgcgatgattacagctcatctgcacagccatctgaaagtttaatacatactcatcagagggaacatgccgggacaattttgggttccaatacaaaagttaagcatcaaacaggtttttctttccatttgattaaatgtgctgattttattttactgttgcattagaaacaaacaagttatctttcgctatttaattttcccaaagtgctagaattacaggcgtgagccatcacactgggccagcccttgttttttaaaaaagcatttaaagaataaaatattactgatttggctataaggaaaattagaattaaagtacaaatatattttaaattttaatctattttgtattgaacatttgaatagtacaacaaaatactgaaaaatgtttgcatggaagttcctgttttccatctttaagtcattccatttctgccatcattaggttttgttcagcaaaatatatcttacagggaaagtattttctttgcattt

SEQ ID NO: 42640 - DNA, 384 bp, Homo sapiens
taaggtcactggttctatataaaaaatagcatcagtaaaaagtaatttaatatttttagagtgcatagcatctttgaatttttggcttttgcctttttgagaatggatgttaagatagtcctcttcagttttgtttttgtttttgtttttgtttttgtttttgttttttttaactctttttggagacagagtcctgctctctcgcccaggctggagtgcagtagtacgatcttggctcactgcaacctccacctcctgggttcaagcgattcttctgcttcagcctctggagtaactgggtctacaggcatgtgccaccatgcccggctaagttttgtatttttagtagagacagggtttcaccacattggccaggctggtctc

SEQ ID NO: 42641 - DNA, 2017 bp, Homo sapiens
cctctctctggtgccatggcaacattatgccccaaacttcttccctggttggagtgagaggggctgtccacagccccatcctgtggggatctcaagccggagtccctggcctggcctccttgacgtaggtgttctcagcaagcagtttgcatcccaccgtctttctcacacttgcccccaagacttttgacagagcagacgtaaaacaggactcagaaaaccatttttctctgttcccatatgtagtaagttttgattcagttgtgcataaaccatagttttctgccctgctgtttgctttcaatggaagacagtaaagggaagatggtgctcacatctctccatgtgacatctcattaggaattaagatgcgatggattagaaatgtaaaacttcagaataaaattaaatttcagggctctataagtcccgttttcccaggtcctgttccgtttctacgtagataacccaatttgttttgtctatgaaataagcctctttagtgggttgttttagtctctccaacaaaagagcagattcctaaagccaggtgcagcactgtgaaaagtttctttcaatatggcaccaagactctaccatttatgtctctctcagcttacaaacatcagcgttttgtccttgtcatagtggaagaaagacacttactttaagctttggggacaaaggtgacaaaccccaggcttttatcttaaaagtgtctttggcacttcttttggcactgaaatggtatttgggaagcattatttgaatgtacagttgtttggttttgtatgtgcttatctttatctgagctttcacttgtagacatggccttttgttgtgaagttgctcatcatttaggagtgtttaattctaaaaagccttcagcctaagaaagcttcatctgtggggaccagagacttgttgctcagggagttagtgatgggacttgggcatctgatctgcaggtgacaagtttagttcaactgaagttgtagggaatttagacagttgcacatcattgccgttctaggggccttgtagaaagatgaaacagttgtttttcatttaccagcacctctcagttatagaggtaatggaacattcgcttacttttcatcatcattctttaaaaagggaacatacaaaaatctaaactatggcaataatttatttttataatagtttacggtaggctttaattaaatggcaaactcctctgggacccctaagttatggcgtgattagccaaatttgatttccaacagtcatttatggccataactattgcatagagtgcaggatgccagcaaagatgagggtgggggcagatactggctcagtgatttaactcacattatagatgaccccttcctcaacagaaatgctactgagagaaccagagaggcctgggccaggcaggtcttatttgagaggagattatttgataattgctttggttagaaggactttacatttcctgatttcaagtccagcaccaatttagaaagttcagagatgaaaccacctgtctttacctgacagagtcataacggtttgtgtaaaaatgtggtcagggaccttttttgttctttctgattagttaatactgtacattgtaaccaggaggggcagttttgccaaccagcctctgctcatggtcaccatatgtgtatgacaaggcctgagtgagttcctgcataaactgggtagtgggctcttttgacacatttgcaagcatgtaaatgaatgaatgacactaccagcaaccatctgtacaggtccatttacttacattcataaggtttatgctatgaaacttcttctcattgtgatgtcagtaacagagttagtgtctctgatggaatagtgtacctgtcacccaagttattttgttcctttttgggtcctccagtataatccccccctcatcccaattaactgtaaaatgttttacacatcacattttttatactgtaaacttggaaaataaactgaaatatcaaattgtgtcttg

SEQ ID NO: 42642 - DNA, 1024 bp, Homo sapiens
tggtattcagtgcagtagcgaaatgagatagtttagacactgttgaaataactgcattgagctttaaccaagtgtatgctcagaaaattcagttttggatcacattttgacaaaacatgttttggtcaaagaaaggaaaggctactaacacatttatcaggtaatgtatgtcacagtccgtgttccacccagccttgttatccccacattctttcaagataggagtcatcttggtttttcgggtgaaaaacggaaggtcagagaggaaggggcttgtccaaggtctcatgtctggttaacagaatttcaaactagatgtttgattctaacccctcagtccactgtaccttgaagtatggtctaaatgattcggcacttctggatgttgaggaaggacctagagacacatccttgaactagaacctggggtgagagttcattgggagattatttgataattgctttggttagaaggactttacatttcctgatttcaagtccagcaccaatttagaaagttcagagatgaaaccacctgtctttacctgacagagtcataacggtttgtgtaaaaatgtggtcagggaccttttttgttctttctgattagttaatactgtacattgtaaccaggaggggcagttttgccaaccagcctctgctcatggtcaccatatgtgtatgacaaggcctgagtgagttcctgcataaactgggtagtgggctcttttgacacatttgcaagcatgtaaatgaatgaatgacactaccagcaaccatctgtacaggtccatttacttacattcataaggtttatgctatgaaacttcttctcattgtgatgtcagtaacagagttagtgtctctgatggaatagtgtacctgtcacccaagttattttgttcctttttgggtcctccagtataatccccccctcatcccaattaactgtaaaatgttttacacatcacattttttatactgtaaacttggaaaataaactgaaatatcaaattgtgtcttg

SEQ ID NO: 42643 - DNA, 1412 bp, Homo sapiens
agttattgtcagagttcaccaggtttttaaatagaacaatgtgatttataaattaaataaaagggcatgggaaaattaggcttttgagtatataaatgtaataacaagaatcaattttaaaaatcaaagtaactgcaaatagtgcagttaccccctcaagtatagtctcacattgacaagaaaaggtttttaagctacaaagtgagaaaccaatgcacagaacatgaaccgagacatgtaaaccagaagaaagcaaaacagcatgtttctatttgtgcatgataatggatgtaagtgatagaaataggtctgagaaagtaaactccaagcacctaactgtgggttccttctaggcaaaggaatagaaactggaaaaagatgaagggaggctgtcattattagtgtatctaattatgtgttattttattttttaaaaaagtaaagaaaaatgtaaccttatgttaattagttaattatttgaaagcaaaagtaattttaaattttgagtgaatcgagtctgggacattaactgcatcacaggtgcaattgtagaaaatgtccggtaggtggagcactaatacaaacctgtgggtcagatttctttagcaaaaaagagaggaccagcattcaaatggagtcaggaacttttaaggacagggccactagtccagagccatgggatatatttccaagccaacattagatggtttcataattttaaaattcatcttttagttggtttaaaagaattcagtaatttctgtttttacaaacccagtggccagatactgtttactatgaatagggtccatattttgggcaggccctctgttgatgtcttcatgtcaggacaggtttttcttcaccacttaaactctgatcatgtaatagccatcagtaggaaacctggctaacactgtgttccatccgtacaataagaattcatccacaaggaagaatgagttaactccctgtgtaccaatatggaagcatgttcaaaatatgatgttaggtgaagaacgcacgttgcagattccatttgtgcttagataaaaggatatctaaagacatctaaggataatttgcagggcagcagcaggtcctgttgtctagagaagctttttgctcaggaaagaatgtcttgagatggtatttcaatgacgtgtgtgctcaggattgcagaaataggaattagttatattgagcaggttcagcatgcatgtgttcattgcattcctggaaagagaactcaaactatcaaagttggttttctatggaaagtgcaaatggggagactaagagacttttactttccactttataacttcctatatactatgtacatttctccacagtgtgcacaatttgctttttttttttttatactggtagcagtagaatttattcaaatg

SEQ ID NO: 42644 - DNA, 2511 bp, Homo sapiens
  misc_feature (2369)..(2369): n is a, c, g, or t
aggcaggcggatcacttgaggccaggagttcgagaccagcctggccaacatggtgatacccgtctctactaaaaacacaaaaattagccaggcatggtggcacacgcctgtaatcccaggtacttggaaggctgaggcaggagaatcatctgaacccaggagacaggttgcagtgagccgagatcatgccactgcactccagcctgggcatgagactctgtctcaaataaatagataaataaatgattttaaaaaaataaaagctgaggagtgacttggttagatccgtagtttaaagaagtcattttggggccaggcacggtggctcacgcctataatcccagcactttgggaggctgaggcaggtggatcgcctgaggtcaggagtttgagaccagcctggccaacatggtgaagctccgtctctactaaaaatacaaaaaattacccagccgtggtggcttacacctgtaatcccagctactcaggagggtgaggcaggagatttgcttgaacctgggaggtggaggttgcagcgagccaagatcatgccactgcactgcagcccgggcgacagagagactcaaaaaaaaaaaaaagtcgttttgggaaccagtcaccgcttctttttgatagcccctggttttgttaggggaagcaaggggttcagcaaaatgaatatacttcctggcttcctttgcagctaggggtggccgtgtcacagtctggccaaggaaatgaaattgggagttgctgtgtggaaactcaactctctggaacttcttccttcctcctgcctctgcacaaatgtgacggcagcagctgaagccaacatcttgcgaccatgagagaaaaacctggagaacggacgagtcctcaaccctgacttcagaccaacctacacccacctctggacgtggggctaagtgagagatggatacactgtttcatttaggccctgctcacttaggtttctgttattcacaccccaacgaaaccctccatggtccagggcaccgggcaaagtacagaagggcacgagtttacttcccgcttccctggagaccaccaaccctctcacccttccagcccagcctctgccacttcccagctgtcggtcctcctccaaacagacgtgcatgccaacacccggtgggtgtgaggcttgtaggcccaagtctagagaggctgagtctggcaaagcctgaaagcccctgtcctagcaagccaggccacaggtctagagtatccgagaccagtgaataaggggacggggggtgctactgaggctgtgagaagccccaggaccagcccagggtagttagaactgagtgaggttagccgggactaacctcactcagatccctcctccccagttcccctccatccactttggtttggaagcctccccagagctctcccaggctgtcatcagctctaaactctctgcctccacaaaaatgccctgggcaacctgtaactcacagccctgctgtcttcagagtataaactggagacagatgtacccagaattgaggacgggtgggaaatgaggagaaatgaaggctgaggaggggtcattctcacagtccctccctttcggtcacaggagggtgttgcccatgcttttgggtgggtcccaggcccatagctgcaaatattcatattggctactcttcagtgagcaaggggtatatgccaggcactggcattgtgcttgacatacatcatcatactgagtcctcacggaagatgtattattcccatttcacagaagatgaaactgaggcttgaggttaagtgatttgtccgtgaccacaaagagttttcgggactcaaacccagatctgtcactgggcaaggtggctcacacctataatcccagccctttgggagactgaggccagcagatctcctgtggccaggagttcaagcctggccaacaatggcaaaaccccgtctctaccaaaaatacaaaaattagctgggcgtggtggcacacacccgtaatcccagctactcaggtggctgaggcaggagaatcacttgaacccaggaggtggtggttgcagtgagcctagatcgtgccactgcattccagcctgagcgacagagtaagactctgtctccaaaaaaaacccagatctgtccgactctgacacccaacctttaatcactcactttctgtcaatgtcacctccgttttgaccagccaagctagacctccctggagcctgtggagaagccaaggtagaaaagggttggaaaagaatgataaaataggccaggtgcggtggctcaagcctgtactcccagcacttttggaggccgagacaggcagattgcttgagcccaggagttcaagaccngcctgggcaacataatgagaccctgtttcaacttaaaaaaaagaaatggtaatgaacaattgtcaattctgagcagctgggtatggtatgaccctgtgtactttttctgtattttaaaatgttctcaaaataaaacttgttt

SEQ ID NO: 42645 - DNA, 797 bp, Homo sapiens
tgatgtcgctatcatgaggcatcataaaaatatgtattttacaaggtgaaggcatttcaagtagatatagttcttgatgaagcaggaagaacatggatctgggatttggaagacctggcttctagctgctactaaccaactctgtgactctgggaaagggggactcagttcttacttctgtaacatgaggacaccggactatttgaattcagaacttagaaaattggaagggaccttaaagccctctaagaaagagttcgggaatgttctccattgctgtcagttttcctccaaaaataacctggcttggaagttattggtccagtgggaatttgattccccatagaaactggagaaaaggtaatgcaagtagagaggaacagctgtatttctgcttgagtaataaacccactaacagattctggtacgaattgtggagacataaagagaatgagtgtatgtactctaagtgtaccagtttcttcactctctcctggcagaagatgcaacacttttagtgattctgggattctgggatgtgttcctattaattctaatacagatgaagaagatgtggtagaggaaaagatggtagcagaaggagtgaataaagaggcaaaacagcccgctaaaaagaaaagaaagaagggtttgcgaattaaggggaaaaggcgtcgaaaaaaattgattcttgccaaaaagtttagtaaggatttgggatctgggaggcctgttgcagatgcccctgctttgttagcttccaatgaccctgagcaggatgaagaaagtctttttga

SEQ ID NO: 42646 - DNA, 368 bp, Homo sapiens
gattctcctgcctcagcctctcaagtagctgggattacaggcacccgccaccatgcccagctaatttttgtattttagtagagacagggttttgtcatgttagccaggctggtttcgaactcctgacctcaggtgatttcctcacctcagcctcccaaagtcctgggattacaggcgtgagccactgtgaccagcctccattttcccaaaaattatttttatgttttctctttttccctgtgtgttcacctgttagttctttagggatgcaattataacctttaccttctctctaccaggcactccctgcatggcatgtttatctaattatatgtttgcttagaaattctgaggaccaaatgttgaac

SEQ ID NO: 42647 - DNA, 760 bp, Homo sapiens
taaacgctatctctagaccaggaataattatttgctatataatacagcaaaaaatatgtatgtataaatggactcattcaaaatatataaagaactcctattacaaagaaattgacaaacagcccagtatatcaatgaatataaaaatttgagaagatattttccataagaagatatctaaatgaacattaggcatgagaaaaccaaattttaggatatcactacacacctggtgtagtttaaaagactgaaaatattaagtgtgtgggaatgtagagcaactgaaaatggcctacatctttcatagaaatgtaaaacaatacaaatactttgccaaaactctgtccaacattttctacccattcaccaagcaactccatccctagctatagataccccaggaaaataagtatgtatcttcacagaaataattgtatgagaatattcatagttacttatgcacagtagttaccaagtaaacctgtctcccatcagaaaaatggatatcaaattgtgtgataatcatacaatcaataggatattacttggccaaaacaaaatgaaacaagggaaaaacacaatcaaacaaattagtggcatatatacccacctgagtaaagagaagtcggccgggtgcggtggctcatgcctgtaatcccagcactttgggagccgaggcggcagatcacgaggtcaggagatcgagaccatcctggctaacacagtgaaaccccgtctctactaaaaatacaaaaaaaaa

SEQ ID NO: 42648 - DNA, 355 bp, Homo sapiens
cacactcagtctcatctatgggatatttagttggaaagtacaggctattcagacagtaagtacaaatctaattgtattttgtactccaaatagtcaggtaattgaagacatggcatgttacttaatccctacccagagcacaagacaatttctgcaaggagagagaaattccgaatgtgaaaatggattcaataactctatttccagaattttatcataaagaaagaagagcacatttggcaaaagtgcctgtctttcaagcacgcagtgagcactgcgctcctcaatgtatggccttcccaggttctttcacagatgggactcttcagctatgtgtactagttccaaggctata

SEQ ID NO: 42649 - DNA, 281 bp, Homo sapiens
ggaattgacacactttttctaaaaggccaggtagtaaatatttttggctttgtgggccataggatttctgttaactacctaactctgccattgccgtgtgaaagcagatgataagtaaacaaatgagtatggctgaattccagtaaaactttatttacaaaaacaggaagttgtggccaggcatggtggttcacacctataatcccagcattttgggaggctgaggtgggaggatcacttgtccccaggagttcgagaccagcctgggcaacatggtgaga

SEQ ID NO: 42650 - DNA, 523 bp, Homo sapiens
gatccatcttcttcaaaaaatttagagctgtgtgtttttactgcttggctaaaaccagtggatgtagaggaacctgatacagttttataacctagttgttcagaaatatccagattggcaaccactaaaggtaccctgtgaaaaagtcctctttgaggtttcaaggcatgtttcagtcgatgagtagcgcagctttctgttattatacttggtgttaatagcagaaaaataagttcttggtttgaaaaatgctcctgcaagtttttgtgaagcagcctctctctaaacgtcatgatctgatctgaatgacgacagaatttgtaccaacctatcacattctttttgacattggagaatattttcttcagtgcttgctcatttacttcacttgaggaattataaaagctaaaaaaagcatggaatatatttctgaatgtcaattgtataaacaacttcaacatcatccatttgggaatcagtaatgctattcttgccttcatcttttacttccttaagaagaaca

SEQ ID NO: 42651 - DNA, 825 bp, Homo sapiens
tatcggcgtggagtggtcgagctgtgccttcttgaataaaaataaggattagaataaatgaatagttcccaaaggtgacatctgagaactggctctggcacctggctctatctgtttagggaagttttagaacatgtgcaggattttcccctagatggtctggttccccttctccacaaatggctcccaaagggttaagccaaaaacctgagtcctgcctgcctcatcttctctcaaagtctttttggcaaattctatcagctttacctcaacatgtatcctgggtccatcaacttctcccccatctccattctcctgccctgatctaagccaccatctctccatctctcccctggggtgatggacctcctgtatactctcttgcttcccttcaacttttttcccatctgcagccagtgcaatagtttttctactgagaattcgatgaaatcactccattgcttaaaatcctccctatggcttccctattccaaacaataaaatccaagccctccaggagctggaccttgtcaaactttttgacattttcaagagccctatttcccccacaatcattgatttttaggtagtgacctccctttattttcttgaaaatattaagctagcttctacctcaggatttttgcatatgctattcctgtgcctgtagcgctgtgtgtccagatttatcaaggctgttttctttcttgttatttggatttcagctgaaatgtcagctcttcacattggtcttctctgaacccctctaactgctcccttcctcctcacttgtttcttcccacttctagaacagggcttgacaca

SEQ ID NO: 42652 - DNA, 227 bp, Homo sapiens
cgaggatgctgacggtgcctcacagccgcacaggaccgaggatgctgacggtgcctcacagccacacaggacgcgaggatgctgacggtgcctcacagccacacaggacgcgaggatgctgacggtgcctcacagccgcacaggacgcgaggatgctgacggtgcctcacagccacacaggacgcgaggatgctgacagtgcctcacagccgcacaggacgcgagga

SEQ ID NO: 42653 - DNA, 794 bp, Homo sapiens
taggaataaagctgtggaaaacatgtggtaatggattattatttgggaatttatcaaaaagaattaatgtgaaatttcaaaagttgacaataagctctcctgaaaaactccaaatctctaggatttctccatatatcataagagagcatcatatatgtttggagattagaatgagaatatcctgagtcagcagtctttaggaaaagcgtgtgcttctggagggtgcacaagacaaccaactggggtgtgggaagaaaatactataactgctactcaagaattactttttatgccatccttcacttcaatttttgtgtatttttttataacacacatattactttggtatagcggtatataatttaacatatacccatatgaatttttaatagggaaagtttttatgttcaataactcttactgatcaatttgtgtgttcaaaaaggctggacactccttttctgaaccactgcttcagaggtattgaggaagtgggtactgagtgggctctaaatgtgcttacattcaccaaaaacataaaaggacacctttaagaacttaagaatcatagtagaaagtcagatcaggatggaaacaatgttgtcagactggacgtcacacaatggcaggggtgaatggaactgaagtgatactatcaacagcctggagttacagctccagaattccaaacctctgatttacttaagtcagtcttgacttttaaaatctgtaatatagtatgtaaatcttcaaggaattttccagttaaaaaaaatccagtagcctaatagagg

SEQ ID NO: 42654 - DNA, 398 bp, Homo sapiens
aagatcccagtgccatgcttttttacaacctcgagaacaaagagctaaataaacctctattcattataaattccccagccttgggtgttttgatataacaatacaaaatggactaacaaaattggtactaattcttctttaaatatttgtagaattcagccctgaaggtacctgatcctggccttttctttgatgagagactttgtattactgattcaatttccttcctcattattggtagattttctattttttaaaaattttaaatctagggggtacatgtgcttgtttgttacatgggcactagatgaataatggtgggggtttggcttctagtgtgctcatcacccaaatattgaatattgtacctagtagttaatttttcgaccctcaccccc

SEQ ID NO: 42655 - DNA, 423 bp, Homo sapiens
agaatggtaaatgttgctttgattttaaaaagttggaaatgatgtttctcagaggaaatactaggtctcagttgagctgtgagagggggcaggttgctatgtttttttctctacaatagtgcacagtgtcttttgaatgggagaagttctgaataccctactgaagtagcccctgctgcagtgttctctaccatgacatgctctttttgctttcccagcacttttattaacttttaattaatttttattgttcatgttgctattgctattagtctactgtctgtctcattggactgtaagctctatgagagtggcaaatatatagtatcacttaatattgtatgtctagtagctaccagagtgcctgccgttataacgagcatggataaatttaatatttttgaattaaatgaatgaattaaa

SEQ ID NO: 42656 - DNA, 331 bp, Homo sapiens
gaagagtttggcctccaaaattacagctgaattgtcacttggattgattacccataaaagtcatataaggtttggcatgccagaaacctgtgaagacaaaatgtgatgatcttgtgacaaaaatgacaagtcaatgagtcaaaaatatgattaacttaataagagcgggaactcttaatggacatgtaaatgacaaactgattagagaatctcagtgaaaaagggtgccataaacaaaacaggaaggcttccagttggaccaatgcccacttgggagggtatataagagccctaacaaaagaggagacatttgtacctcagaatcctcatc

SEQ ID NO: 42657 - DNA, 337 bp, Homo sapiens
ggagaaaaagtaaattttaagaaaaaaatggtaataaatttgactacacttgaagcctgggttttaggaacaacacatgctggttatatgtggtacacatttctgtctgtgcatactttcagccattaaaacacaacagattcatgctattaacttgggctaaaaatccttccttttttggtatgcaaaacaacttttcaaggataaaagtattttttaaaaataggctgatttatatgccagatgtaagcaacatcttttctgactgctggttactttttgttgtttctttgttactataaccttctctcatggtaattcagtgtttacagcaact

SEQ ID NO: 42658 - DNA, 265 bp, Homo sapiens
tttgaggacattagtataaagcttcagtaattaagacacggtagtattgacatcatatggatagacaaagaaatcattggaagagaacagagtccagatatagttccacacatacatggtcagttgatttttttgttgtgattaaaaaacaacttcccttttctctctgccttctgataatcactattctacattctgtttctatgggtttaactactttcgatacctaatgtaagtagaatcatacaacatacctttctgtgcc

SEQ ID NO: 42659 - DNA, 3119 bp, Homo sapiens
  misc_feature (4)..(5): n is a, c, g, or t
  misc_feature (7)..(8): n is a, c, g, or t
  misc_feature (10)..(10): n is a, c, g, or t
  misc_feature (12)..(14): n is a, c, g, or t
gaanncnntngnnntcggcggagacctgctccccagaagacgcctcctgcttcccactgcgccctggaggacgcgggctggctgctgggcgagctcggcggaggcacgcccctcgcctccccgcggagtgcggactcgccccggtgcccaaactccgcccaccctctagggagctccgctctcccgcctaaccccggcactccggacagagctgggcctggggaaggggttcctgaactacgcggacgccgaacgggacgcgctgcagaagcgcacgagtctgcggccacgcgcgctccgatggctgccaggagctgagctcagggtgggcggaggaagcggttagacgccccgaaactgagctgcacgtttctaaggtagggaggaggaagatgcccccaattaagttgatctttgagccaaggaggctggggagcagcctccccaagctagagccctgcagagcgagtttcccttgacctcgctgcgcctctggcggctctgcagcgcggacccgcggcccctcgggaaagcgcagtcggaaagttatccgcggcggttccctgcgcgccctgttgtgtaagctcggcgttgccagcggacggagaagttgctggcttgcccgatagcccagttcggtggcggcccggggcggatttcatggcccgcggcgaacgcggggccagagctggcgtgggcgagcccctgcgcgccccctcccgcggggatccagttcgcctgctcccttccgctcgctggcttttccgatgcttgctgcgcccctggccgccgctgccctctcgccgcctcctacccctcggagccgccgcctaagtcgaggaggagagaatgaccgaggtgctgtggccggctgtccccaacgggacggacgctgccttcctggccggtccgggttcgtcctgggggaacagcacggtcgcctccactgccgccgtctcctcgtcgttcaaatgcgccttgaccaagacgggcttccagttttactacctgccggctgtctacatcttggtattcatcatcggcttcctgggcaacagcgtggccatctggatgttcgtcttccacatgaagccctggagcggcatctccgtgtacatgttcaatttggctctggccgacttcttgtacgtgctgactctgccagccctgatcttctactacttcaataaaacagactggatcttcggggatgccatgtgtaaactgcagaggttcatctttcatgtgaacctctatggcagcatcttgtttctgacatgcatcagtgcccaccggtacagcggtgtggtgtaccccctcaagtccctgggccggctcaaaaagaagaatgcgatctgtatcagcgtgctggtgtggctcattgtggtggtggcgatctcccccatcctcttctactcaggtaccggggtccgcaaaaacaaaaccatcacctgttacgacaccacctcagacgagtacctgcgaagttatttcatctacagcatgtgcacgaccgtggccatgttctgtgtccccttggtgctgattctgggctgttacggattaattgtgagagctttgatttacaaagatctggacaactctcctctgaggagaaaatcgatttacctggtaatcattgtactgactgtttttgctgtgtcttacatccctttccatgtgatgaaaacgatgaacttgagggcccggcttgattttcagaccccagcaatgtgtgctttcaatgacagggtttatgccacgtatcaggtgacaagaggtctagcaagtctcaacagttgtgtggaccccattctctatttcttggcgggagatactttcagaaggagactctcccgagccacaaggaaagcttctagaagaagtgaggcaaatttgcaatccaagagtgaagacatgaccctcaatattttacctgagttcaagcagaatggagatacaagcctgtgaaggcacaagaatctccaaacacctctctgttgtaatatggtaggatgcttaacagaatcaagtacttttcccctctttaactttctagtttagaaaaaaatcaaaccaagaaaatagtgagttaaaaaaataatagaagtagaaatgcccacatccacacttagcttgtttgggtttgctttcacagtctctcttccttctgactagaagtatgtataataaaacaatactacctagttaaacatttactttctcttttgcctttaaaatgtgcaggcttttctgtttaaagtgtgtgtgcacatgagtactggggctgtttttgatattagtaatttctctaagaaaactagccccctgcaacttgagtttgtggtttatctagcctttattgtttttttaaaatccacagtaggaataaaaaatctatattctcagaaatatctagcatggtatataacaaaacactaaactcatcagttcatccggcatcagatcaatggatctctgagcggggtgtttttttcagtgtcttataagcatagatgatagttgactgagtttctttagggcattgaatagacaagtaaagctaatgaatttaaaagcctgaaaagtgattgttttccagttatttctggaaaaggtctcattatatattgggtgctaaatgtttgatggggaaagcctgcatatattatcgtactggtaaaatgcattcaaaataattaaagtgcatgtattttccttgtaaacaccatgagctctcttagacatcttgtgataaagagcatttacttgccccactgctgtgcaatgccttaggactttgtttgtgttccaggacaagtgttcactcacatctgtaaaaacaattttaagaattgcaaataaattacagaccaaagattgagtaaagtcaaataactgttagtaagttgaaggatattggacaggaggacagtatttcagaaaaggagaggttgacagtcatccacaaggcatagcctccaagtatactctcaaatgtatgaagcaactggggtgggcagaagacattttagaatgagggcctttagtttaaattaaagtcatggtggagaagactcttgcttccaccaagtgtttgaaaacacaaaatacgatat

SEQ ID NO: 42660 - DNA, 2409 bp, Homo sapiens
  misc_feature (4)..(5): n is a, c, g, or t
  misc_feature (7)..(8): n is a, c, g, or t
  misc_feature (10)..(10): n is a, c, g, or t
  misc_feature (12)..(14): n is a, c, g, or t
gaanncnntngnnntcggcggagacctgctccccagaagacgcctcctgcttcccactgcgccctggaggacgcgggctggctgctgggcgagctcggcggaggcacgcccctcgcctccccgcggagtgcggactcgccccggtgcccaaactccgcccaccctctagggagctccgctctcccgcctaaccccggcactccggacagagctgggcctggggaaggggttcctgaactacgcggacgccgaacgggacgcgctgcagaagcgcacgagtctgcggccacgcgcgctccgatggctgccaggagctgagctcagggtgggcggaggaagcggttagacgccccgaaactgagctgcacgtttctaaggtagggaggaggaagatgcccccaattaagttgatctttgagccaaggaggctggggagcagcctccccaagctagagccctgcagagcgagtttcccttgacctcgctgcgcctctggcggctctgcagcgcggacccgcggcccctcgggaaagcgcagtcggaaagttatccgcggcggttccctgcgcgccctgttgtgtaagctcggcgttgccagcggacggagaagttgctggcttgcccgatagcccagttcggtggcggcccggggcggatttcatggcccgcggcgaacgcggggccagagctggcgtgggcgagcccctgcgcgccccctcccgcggggatccagttcgcctgctcccttccgctcgctggcttttccgatgcttgctgcgcccctggccgccgctgccctctcgccgcctcctacccctcggagccgccgcctaagtcgaggaggagagaatgaccgaggtgctgtggccggctgtccccaacgggacggacgctgccttcctggccggtccgggttcgtcctgggggaacagcacggtcgcctccactgccgccgtctcctcgtcgttcaaatgcgccttgaccaagacgggcttccagttttactacctgccggctgtctacatcttggtattcatcatcggcttcctgggcaacagcgtggccatctggatgttcgtcttccacatgaagccctggagcggcatctccgtgtacatgttcaatttggctctggccgacttcttgtacgtgctgactctgccagccctgatcttctactacttcaataaaacagactggatcttcggggatgccatgtgtaaactgcagaggttcatctttcatgtgaacctctatggcagcatcttgtttctgacatgcatcagtgcccaccggtacagcggtgtggtgtaccccctcaagtccctgggccggctcaaaaagaagaatgcgatctgtatcagcgtgctggtgtggctcattgtggtggtggcgatctcccccatcctcttctactcaggtaccggggtccgcaaaaacaaaaccatcacctgttacgacaccacctcagacgagtacctgcgaagttatttcatctacagcatgtgcacgaccgtggccatgttctgtgtccccttggtgctgattctgggctgttacggattaattgtgagagctttgatttacaaagatctggacaactctcctctgaggagaaaatcgatttacctggtaatcattgtactgactgtttttgctgtgtcttacatccctttccatgtgatgaaaacgatgaacttgagggcccggcttgattttcagaccccagcaatgtgtgctttcaatgacagggtttatgccacgtatcaggtgacaagaggtctagcaagtctcaacagttgtgtggaccccattctctatttcttggcgggagatactttcagaaggagactctcccgagccacaaggaaagcttctagaagaagtgaggcaaatttgcaatccaagagtgaagacatgaccctcaatattttacctgagttcaagcagaatggagatacaagcctgtgaaggcacaagaatctccaaacacctctctgttgtaatatggtaggatgcttaacagaatcaagtacttttcccctctttaactttctagtttagaaaaaaatcaaaccaagaaaatagtgagttaaaaaaataatagaagtagaaatgcccacatccacacttagcttgtttgggtttgctttcacagtctctcttccttctgactagaagtatgtataataaaacaatactacctagttaaacatttactttctcttttgcctttaaaatgtgcaggcttttctgtttaaagtgtgtgtgcacatgagtactggggctgtttttgatattagtaatttctctaagaaaactagccccctgcaacttgagtttgtggtttatctagcctttattgtttttttaaaatccacagtaggaataaaaaatctatattctcag

SEQ ID NO: 42661 - DNA, 2210 bp, Homo sapiens
  misc_feature (4)..(5): n is a, c, g, or t
  misc_feature (7)..(8): n is a, c, g, or t
  misc_feature (10)..(10): n is a, c, g, or t
  misc_feature (12)..(14): n is a, c, g, or t
gaanncnntngnnntcggcggagacctgctccccagaagacgcctcctgcttcccactgcgccctggaggacgcgggctggctgctgggcgagctcggcggaggcacgcccctcgcctccccgcggagtgcggactcgccccggtgcccaaactccgcccaccctctagggagctccgctctcccgcctaaccccggcactccggacagagctgggcctggggaaggggttcctgaactacgcggacgccgaacgggacgcgctgcagaagcgcacgagtctgcggccacgcgcgctccgatggctgccaggagctgagctcagggtgggcggaggaagcggttagacgccccgaaactgagctgcacgtttctaaggtagggaggaggaagatgcccccaattaagttgatctttgagccaaggaggctggggagcagcctccccaagctagagccctgcagagcgagtttcccttgacctcgctgcgcctctggcggctctgcagcgcggacccgcggcccctcgggaaagcgcagtcggaaagttatccgcggcggttccctgcgcgccctgttgtgtaagctcggcgttgccagcggacggagaagttgctggcttgcccgatagcccagttcggtggcggcccggggcggatttcatggcccgcggcgaacgcggggccagagctggcgtgggcgagcccctgcgcgccccctcccgcggggatccagttcgcctgctcccttccgctcgctggcttttccgatgcttgctgcgcccctggccgccgctgccctctcgccgcctcctacccctcggagccgccgcctaagtcgaggaggagagaatgaccgaggtgctgtggccggctgtccccaacgggacggacgctgccttcctggccggtccgggttcgtcctgggggaacagcacggtcgcctccactgccgccgtctcctcgtcgttcaaatgcgccttgaccaagacgggcttccagttttactacctgccggctgtctacatcttggtattcatcatcggcttcctgggcaacagcgtggccatctggatgttcgtcttccacatgaagccctggagcggcatctccgtgtacatgttcaatttggctctggccgacttcttgtacgtgctgactctgccagccctgatcttctactacttcaataaaacagactggatcttcggggatgccatgtgtaaactgcagaggttcatctttcatgtgaacctctatggcagcatcttgtttctgacatgcatcagtgcccaccggtacagcggtgtggtgtaccccctcaagtccctgggccggctcaaaaagaagaatgcgatctgtatcagcgtgctggtgtggctcattgtggtggtggcgatctcccccatcctcttctactcaggtaccggggtccgcaaaaacaaaaccatcacctgttacgacaccacctcagacgagtacctgcgaagttatttcatctacagcatgtgcacgaccgtggccatgttctgtgtccccttggtgctgattctgggctgttacggattaattgtgagagctttgatttacaaagatctggacaactctcctctgaggagaaaatcgatttacctggtaatcattgtactgactgtttttgctgtgtcttacatccctttccatgtgatgaaaacgatgaacttgagggcccggcttgattttcagaccccagcaatgtgtgctttcaatgacagggtttatgccacgtatcaggtgacaagaggtctagcaagtctcaacagttgtgtggaccccattctctatttcttggcgggagatactttcagaaggagactctcccgagccacaaggaaagcttctagaagaagtgaggcaaatttgcaatccaagagtgaagacatgaccctcaatattttacctgagttcaagcagaatggagatacaagcctgtgaaggcacaagaatctccaaacacctctctgttgtaatatggtaggatgcttaacagaatcaagtacttttcccctctttaactttctagtttagaaaaaaatcaaaccaagaaaatagtgagttaaaaaaataatagaagtagaaatgcccacatccacacttagcttgtttgggtttgctttcacagtctctcttccttctgactagaagtatgtataataaaacaatactacctagtt

SEQ ID NO: 42662 - DNA, 411 bp, Homo sapiens
tgcataaatgtctttttttgaaaattgaccagacacttttataaagactatcttgtgtcatcgttatgataatcctatgtggaagttatcttcagcttcattttaccaatgagataaatgaaactgtggtagtataaataaataacttgtctaaagatactgagtagcagaggaagcattccatcccagacccattgaattctcagatctaagatcctgccaggctgtttctggaatacagagcagaaaattccctcctgttcaagcgctaactagataagtccttcttcacaaatgccaagtaagcacagaaaaagagcaacagggaaaaagtttatgctccaaggaagaagtcaaccccagactgcagggatcgtggtgagattgtatcaggattggaccttggggaaa

SEQ ID NO: 42663 - DNA, 826 bp, Homo sapiens
cctcgaaccttcggagggtgttcctttgagatgtttcatcagtgacatcacagtgattgccagcttccacggactactttaggcgctgcccagagtccaggagtccagacagcctgggaggggagaaggagttggagctcaagttggagacagcgaggagaaacctgccatagccagggtgtgtctttgatcctcttcaggaggtgaggagaagccagaggtccttggtgtgccctcagaaatctgcctgcagttctcaccaagccgctgtgaaaatggggataaacacccgggagctgtttctcaacttcactattgtcttgattacggttattcttatgtggctccttgtgaggtcctatcagtactgagaggccatgccatggtcctgggattgactgagatgctccggagctgcctgctctatgccctgagaccccactgctgtcattgtcacaggatgccattctccatccgagggcacctgtgacctgcactcacaatatctgctatgctgtagtgctaggattgattatgtgttctccaaagatgctgctcccaagggctgccaagtgtttgccagggaacggtagatttattccccaactcttaactgaaaatgtgttagacaagccacaaagttaaaattaaactggattcatgatgatgtaggattgttacaagcccctgatctgtctcaccacacatcccttcaacccacacggtctgcaaccaaactctaattcaacctgccagaaggaatgttagaggaagtctttgtcagcccttatagctatcatgtgaataaagttaagtcaacttcaaa

SEQ ID NO: 42664 - DNA, 719 bp, Homo sapiens
aagaggcatgatcgagctcggactgttggagtgttgttggagacagcgaggagaaacctgccatagccagggtgtgtctttgatcctcttcaggaggtgaggagaagccagaggtccttggtgtgccctcagaaatctgcctgcagttctcaccaagccgctgtgaaaatggggataaacacccgggagctgtttctcaacttcactattgtcttgattacggttattcttatgtggctccttgtgaggtcctatcagtactgagaggccatgccatggtcctgggattgactgagatgctccggagctgcctgctctatgccctgagaccccactgctgtcattgtcacaggatgccattctccatccgagggcacctgtgacctgcactcacaatatctgctatgctgtagtgctaggattgattatgtgttctccaaagatgctgctcccaagggctgccaagtgtttgccagggaacggtagatttattccccaactcttaactgaaaatgtgttagacaagccacaaagttaaaattaaactggattcatgatgatgtaggattgttacaagcccctgatctgtctcaccacacatcccttcaacccacacggtctgcaaccaaactctaattcaacctgccagaaggaatgttagaggaagtctttgtcagcccttatagctatcatgtgaataaagttaagtcaacttcaaa

SEQ ID NO: 42665 - DNA, 683 bp, Homo sapiens
cggcggtataacgtcccttatgtctgcccgcccgtcgtccccctctccggtagagtagaggtgaggagaagccagaggtccttggtgtgccctcagaaatctgcctgcagttctcaccaagccgctgtgaaaatggggataaacacccgggagctgtttctcaacttcactattgtcttgattacggttattcttatgtggctccttgtgaggtcctatcagtactgagaggccatgccatggtcctgggattgactgagatgctccggagctgcctgctctatgccctgagaccccactgctgtcattgtcacaggatgccattctccatccgagggcacctgtgacctgcactcacaatatctgctatgctgtagtgctaggattgattatgtgttctccaaagatgctgctcccaagggctgccaagtgtttgccagggaacggtagatttattccccaactcttaactgaaaatgtgttagacaagccacaaagttaaaattaaactggattcatgatgatgtaggattgttacaagcccctgatctgtctcaccacacatcccttcaacccacacggtctgcaaccaaactctaattcaacctgccagaaggaatgttagaggaagtctttgtcagcccttatagctatcatgtgaataaagttaagtcaacttcaaa

SEQ ID NO: 42666 - DNA, 651 bp, Homo sapiens
  misc_feature (1)..(1): n is a, c, g, or t
nttgccctagctggccattgtgccagaggtgaggagaagccagaggtccttggtgtgccctcagaaatctgcctgcagttctcaccaagccgctgtgaaaatggggataaacacccgggagctgtttctcaacttcactattgtcttgattacggttattcttatgtggctccttgtgaggtcctatcagtactgagaggccatgccatggtcctgggattgactgagatgctccggagctgcctgctctatgccctgagaccccactgctgtcattgtcacaggatgccattctccatccgagggcacctgtgacctgcactcacaatatctgctatgctgtagtgctaggattgattatgtgttctccaaagatgctgctcccaagggctgccaagtgtttgccagggaacggtagatttattccccaactcttaactgaaaatgtgttagacaagccacaaagttaaaattaaactggattcatgatgatgtaggattgttacaagcccctgatctgtctcaccacacatcccttcaacccacacggtctgcaaccaaactctaattcaacctgccagaaggaatgttagaggaagtctttgtcagcccttatagctatcatgtgaataaagttaagtcaacttcaaa

SEQ ID NO: 42667 - DNA, 786 bp, Homo sapiens
  misc_feature (1)..(1): n is a, c, g, or t
nttgccctagctggccattgtgccagaggtgaggagaagccagaggtccttggtgtgccctcagaaatctgcctgcagttctcaccaagccgctgtgaaaatggggataaacacccgggagctgtttctcaacttcactattgtcttgattacggttattcttatgtggctccttgtgaggtcctatcagtactgagaggccatgccatggtcctgggattgactgagatgctccggagctgcctgctctatgccctgagaccccactgctgtcattgtcacaggatgccattctccatccgagggcacctgtgacctgcactcacaatatctgctatgctgtagtgctaggattgattatgtgttctccaaagatgctgctcccaagggctgccaagtgtttgccagggaacggtagatttattccccaactcttaactgaaaatgtgttagacaagccacaaagttaaaattaaactggattcatgatgatgtaggattgttacaagcccctgatctgtctcaccacacatcccttcaacccacacggtctgcaaccaaactctaattcaacctgccagaaggaatgttagaggaagtctttgtcagcccttatagctatcatgtgaataaagttaagtcaacttcaaaaaaaaaaaaatggcctcgtttgcctcagcgggggagctctggggccggtttcctttagaggggggtaattcatgatcctggtcactggctcctgggctgggccgtcgggtgcggcaacggttctaaccactcaag

SEQ ID NO: 42668 - DNA, 719 bp, Homo sapiens
tcgcgatatagtctcataagcccacccttccttccccctctccccttcggtggtgcagaacaggaggtgaggagaagccagaggtccttggtgtgccctcagaaatctgcctgcagttctcaccaagccgctgtgaaaatggggataaacacccgggagctgtttctcaacttcactattgtcttgattacggttattcttatgtggctccttgtgaggtcctatcagtactgagaggccatgccatggtcctgggattgactgagatgctccggagctgcctgctctatgccctgagaccccactgctgtcattgtcacaggatgccattctccatccgagggcacctgtgacctgcactcacaatatctgctatgctgtagtgctaggattgattatgtgttctccaaagatgctgctcccaagggctgccaagtgtttgccagggaacggtagatttattccccaactcttaactgaaaatgtgttagacaagccacaaagttaaaattaaactggattcatgatgatgtaggattgttacaagcccctgatctgtctcaccacacatcccttcaacccacacggtctgcaaccaaactctaattcaacctgccagaaggaatgttagaggaagtctttgtcagcccttatagctatcatgtgaataaagttaagtcaacttcaaaaacaacttctagaacttattttagcttcca

SEQ ID NO: 42669 - DNA, 675 bp, Homo sapiens
  misc_feature (35)..(35): n is a, c, g, or t
ttaaagtttgttatagcgtgctagtagcattatcntcttagtggtaccagaggtgaggagaagccagaggtccttggtgtgccctcagaaatctgcctgcagttctcaccaagccgctgtgaaaatggggataaacacccgggagctgtttctcaacttcactattgtcttgattacggttattcttatgtggctccttgtgaggtcctatcagtactgagaggccatgccatggtcctgggattgactgagatgctccggagctgcctgctctatgccctgagaccccactgctgtcattgtcacaggatgccattctccatccgagggcacctgtgacctgcactcacaatatctgctatgctgtagtgctaggattgattatgtgttctccaaagatgctgctcccaagggctgccaagtgtttgccagggaacggtagatttattccccaactcttaactgaaaatgtgttagacaagccacaaagttaaaattaaactggattcatgatgatgtaggattgttacaagcccctgatctgtctcaccacacatcccttcaacccacacggtctgcaaccaaactctaattcaacctgccagaaggaatgttagaggaagtctttgtcagcccttatagctatcatgtgaataaagttaagtcaacttcaaa

SEQ ID NO: 42670 - DNA, 668 bp, Homo sapiens
ctgtctgctgctgaggcctgcagagattaatataaacggcaggaggtgaggagaagccagaggtccttggtgtgccctcagaaatctgcctgcagttctcaccaagccgctgtgaaaatggggataaacacccgggagctgtttctcaacttcactattgtcttgattacggttattcttatgtggctccttgtgaggtcctatcagtactgagaggccatgccatggtcctgggattgactgagatgctccggagctgcctgctctatgccctgagaccccactgctgtcattgtcacaggatgccattctccatccgagggcacctgtgacctgcactcacaatatctgctatgctgtagtgctaggattgattatgtgttctccaaagatgctgctcccaagggctgccaagtgtttgccagggaacggtagatttattccccaactcttaactgaaaatgtgttagacaagccacaaagttaaaattaaactggattcatgatgatgtaggattgttacaagcccctgatctgtctcaccacacatcccttcaacccacacggtctgcaaccaaactctaattcaacctgccagaaggaatgttagaggaagtctttgtcagcccttatagctatcatgtgaataaagttaagtcaacttcaaa

SEQ ID NO: 42671 - DNA, 699 bp, Homo sapiens
ctctactcaaatctaacactctccctctttttctttataaaacattcaatctacgtagtcgaggacagccatagaggtgaggagaagccagaggtccttggtgtgccctcagaaatctgcctgcagttctcaccaagccgctgtgaaaatggggataaacacccgggagctgtttctcaacttcactattgtcttgattacggttattcttatgtggctccttgtgaggtcctatcagtactgagaggccatgccatggtcctgggattgactgagatgctccggagctgcctgctctatgccctgagaccccactgctgtcattgtcacaggatgccattctccatccgagggcacctgtgacctgcactcacaatatctgctatgctgtagtgctaggattgattatgtgttctccaaagatgctgctcccaagggctgccaagtgtttgccagggaacggtagatttattccccaactcttaactgaaaatgtgttagacaagccacaaagttaaaattaaactggattcatgatgatgtaggattgttacaagcccctgatctgtctcaccacacatcccttcaacccacacggtctgcaaccaaactctaattcaacctgccagaaggaatgttagaggaagtctttgtcagcccttatagctatcatgtgaataaagttaagtcaacttcaaa

SEQ ID NO: 42672 - DNA, 961 bp, Homo sapiens
cctcgaaccttcggagggtgttcctttgagatgtttcatcagtgacatcacagtgattgccagcttccacggactactttaggcgctgcccagagtccaggagtccagacagcctgggaggggagaaggagttggagctcaagttggagacagcgaggagaaacctgccatagccagggtgtgtctttgatcctcttcaggaggtgaggagaagccagaggtccttggtgtgccctcagaaatctgcctgcagttctcaccaagccgctgtgaaaatggggataaacacccgggagctgtttctcaacttcactattgtcttgattacggttattcttatgtggctccttgtgaggtcctatcagtactgagaggccatgccatggtcctgggattgactgagatgctccggagctgcctgctctatgccctgagaccccactgctgtcattgtcacaggatgccattctccatccgagggcacctgtgacctgcactcacaatatctgctatgctgtagtgctaggattgattatgtgttctccaaagatgctgctcccaagggctgccaagtgtttgccagggaacggtagatttattccccaactcttaactgaaaatgtgttagacaagccacaaagttaaaattaaactggattcatgatgatgtaggattgttacaagcccctgatctgtctcaccacacatcccttcaacccacacggtctgcaaccaaactctaattcaacctgccagaaggaatgttagaggaagtctttgtcagcccttatagctatcatgtgaataaagttaagtcaacttcaaaaaaaaaaaaatggcctcgtttgcctcagcgggggagctctggggccggtttcctttagaggggggtaattcatgatcctggtcactggctcctgggctgggccgtcgggtgcggcaacggttctaaccactcaag

SEQ ID NO: 42673 - DNA, 878 bp, Homo sapiens
cctcgaaccttcggagggtgttcctttgagatgtttcatcagtgacatcacagtgattgccagcttccacggactactttaggcgctgcccagagtccaggagtccagacagcctgggaggggagaaggagttggagctcaagttggagacagcgaggagaaacctgccatagccagggtgtgtctttgatcctcttcaggaggtgaggagaagccagaggtccttggtgtgccctcagaaatctgcctgcagttctcaccaagccgctgtgaaaatggggataaacacccgggagctgtttctcaacttcactattgtcttgattacggttattcttatgtggctccttgtgaggtcctatcagtactgagaggccatgccatggtcctgggattgactgagatgctccggagctgcctgctctatgccctgagaccccactgctgtcattgtcacaggatgccattctccatccgagggcacctgtgacctgcactcacaatatctgctatgctgtagtgctaggattgattatgtgttctccaaagatgctgctcccaagggctgccaagtgtttgccagggaacggtagatttattccccaactcttaactgaaaatgtgttagacaagccacaaagttaaaattaaactggattcatgatgatgtaggattgttacaagcccctgatctgtctcaccacacatcccttcaacccacacggtctgcaaccaaactctaattcaacctgccagaaggaatgttagaggaagtctttgtcagcccttatagctatcatgtgaataaagttaagtcaacttcaaaacacaaacctggatacagagaaaaaaataactaatgataactacctgagaca

SEQ ID NO: 42674 - DNA, 917 bp, Homo sapiens
  misc_feature (846)..(846): n is a, c, g, or t
  misc_feature (884)..(884): n is a, c, g, or t
cctcgaaccttcggagggtgttcctttgagatgtttcatcagtgacatcacagtgattgccagcttccacggactactttaggcgctgcccagagtccaggagtccagacagcctgggaggggagaaggagttggagctcaagttggagacagcgaggagaaacctgccatagccagggtgtgtctttgatcctcttcaggaggtgaggagaagccagaggtccttggtgtgccctcagaaatctgcctgcagttctcaccaagccgctgtgaaaatggggataaacacccgggagctgtttctcaacttcactattgtcttgattacggttattcttatgtggctccttgtgaggtcctatcagtactgagaggccatgccatggtcctgggattgactgagatgctccggagctgcctgctctatgccctgagaccccactgctgtcattgtcacaggatgccattctccatccgagggcacctgtgacctgcactcacaatatctgctatgctgtagtgctaggattgattatgtgttctccaaagatgctgctcccaagggctgccaagtgtttgccagggaacggtagatttattccccaactcttaactgaaaatgtgttagacaagccacaaagttaaaattaaactggattcatgatgatgtaggattgttacaagcccctgatctgtctcaccacacatcccttcaacccacacggtctgcaaccaaactctaattcaacctgccagaaggaatgttagaggaagtctttgtcagcccttatagctatcatgtgaataaagttaagtcaacttcaaaccaaaaaaggaccaaagatnccggtgccggcagagctggtaagcggaaaaataaaaanaaaagggccccttggccccagggggggagcctc

SEQ ID NO: 42675 - DNA, 529 bp, Homo sapiens
tccaagtcaaaaagtgtactctggggtaacgattccatccttgcatgcccatgatgaggagcaaggcctgaaggtaggagggcagagcctcgtaacaaaacaaagcctggatcaaggaagcagccacaccaggcacacacacacgtcaggacatgtgttcacttccctgtgtggttccccatgtgtgtgcacttgtagcagatgtcaaggccagcatgacagtgacagcggacccaaggaggaagggagttctggcagggctggggagattctgccctgctcagttttacttaggaaataggaaacagcgttggcatcctctgcctacatttctgctctcatttcaccatttccaatcttatgaaaacattacaggatactctcagcaggtatgtccgatcctcatcaagcctcccaatgacagagaaagagtctctcttcttattagatcacagaatttaaagaaaaattttaaaatctacttattgttattttacataaatataaacttcaacaaatgctaactctt

SEQ ID NO: 42676 - DNA, 912 bp, Homo sapiens
tttagtagagacgggatttcatcatgttgcccaggctggtcttgaactcctgggctcaagccatctgcctgcctccacctcccaaaatgctgagattacaggtgtgagccaccatgcctggcctaaactaatttttagatagttcctggtcactcaaatttaagaatgtcagcaatgtcaattttaaatgctcataggtctttccatatctgtaacatgaaaatgattattctgcattttattcagtagtccaaattaaagaaaatgtttttctcaatttaaaataatttctttttcttttgtttatgcaagtgcatacatgcttcactgaaagcaaaaccattataattacattaaagtttataaaatatgatattttaacctcatatctaataagtatgtacaaaggtaaccatcactccttaaatccacatgaaaactactgtaactgatcatgtattttggaattagacttgataataaaagattatcatgtatcacatatctcacaccaggggaacaattagctacataattgtcataccttaatatcttttaaaggtaacagtaattttcaacacattttattttaaaatattattttaacaaaagttacattcctctccacaatgaggctaaatgtcacccacgaaagaactttattcccttatattcctgaaaagaaatcagaattaacatttttatgttgaataaattttaaaatttaggaaatgttctatttaaagttaatttctttcataaagccattactctttacattgtcatttccaaaaagccacaatttcccatgctggatgtgatgaaagttaggcacacctttactgcattagcagcctttgacaatgacttcctcaaactgacaccatcttaattagatgcagggacagggat

SEQ ID NO: 42677 - DNA, 1444 bp, Homo sapiens
gtttgaaaatattctctgtgatgatttccttaattcactttgaaatcagtttcttactatgaagtcattaatgtaagaacttggccaacaaagcttttcttctcataggctggctctactaggggaactagtgtttggtaaactgctgggactaccacaatgggaggggtacaggtataaaattaagttatcttaaaatgtttcagcaatgatgcacgtaggagaccataataggtggtggtaaatgttttgcccacgtataggaatgattttaactaagatgtatgctattccctatgcaacaaattatcaaacaggatatgtcttgtgacctgttttttttttaaggacacatttttaatagctgaaaatctctgataatgaattagagtgtgtagtaaacatgagaattagttatattatcttatttttaaaattcaagactaagaacttcagagaatgaagagtctattaaaatgaggttcatcttaatgataggcaaaccaaactcatactgcttgacatgttttgaaaactggtaatattgagggtgtacagcacatgtacttaaaaatgacactggactatcttttgctctgagccatgccacttaccgaaattgtaaatacatttttcacaaatgcattgccaattattaccatccctcaaagcaataaattgtggacagttgctttaaatgtttgtcagcaactgttttcatttgttcagatattttgaatagcctacacctaataactgttattatttggtgaacataaaaaaataaatagatctgtatattgatggtagactctccatattgaaatgattattttccaaacattttcattttggtcaataattcaaactaccacttaggcaaagtattcgaacactgtgtcctttgtttaaggaaatataaaaaaaaatcacctttctttttgtgcaaaaaaaatattatttcaatcacatttcagaaccgccagggcaagaaagtataaagcaggatcatgttaagaaaaaagaaaaaaagatcatgagtcacttaaatatgtatttttatttgtaacaaacaagtattaaactgtaaagtatttttgtacaaatttaatactttaatagcatggtatttatcgtctatgtatggttttggggaattcaaaattgttcaaatatttgtatggaaaaaaataaaaccctctaccaaatggaataaacagtgattttaaaaagccaaataaagaggatatgcattattggtgttgttttgaatatatttcaatgttctagcctgagtcctacacaatttttttttgttttgttttgttttgagatgatgatggagtttcactctgttgcccagggccagattaatttaaagaagagttaataccaattcttcacaaactcttccaaaatagaagacaaggggacacttcacaac

SEQ ID NO: 42678 - DNA, 375 bp, Homo sapiens
tacaaattgggtccagtgtatactgcttgggtggtagtgctccaaaatctcacaaatcaccactaaagaacttaaccaattaccacctgtgccccaaaagcctatgaaaataaatttaaaaaaaattgggataaacagtaaagagcatatttaacagccatctactgggctgaaaaactacagactgcaggtgccatagaagttccacacccgtgataccactgccctttctggggatcccccatgcttgagccactttgttactggaaagcagtcccaagccagacgccaagagaaggttcttgaaactttcacaagaaagaattcagtgtgagtccataaagcaaagtgaaagatagttaattaagaaaataa

SEQ ID NO: 42679 - DNA, 465 bp, Homo sapiens
attcctttgcataccctgcaagtaggagtgggttggctggcagcaaagcatcaaagggctcctactcagttcattctggaatacttattaaaataataattcatgaagtgaagcatataacaaaattcatgtcaagctgtttttattttcctctagacaagtaaaatacatatttaggttgagtgcctaaagtccaggacaaggaacaatgaaaaatccaggcctaactcaagcaattccaaatttgtttcacctgttctggttgctcatgtccaagagaaaagaacagagcctgaagttctatagaactggttttagttcataacctgcccaacaacagtctataattagaaagcaagcaagtttccaagctggaaaaaaactaacgaagttactctgagcagaaattattttcttctgtatctgataaaatgtataccactccaatgccctggcacttacctg

SEQ ID NO: 42680 - DNA, 441 bp, Homo sapiens
tactactaaatcgcggcgtcgacttttttttttgagacggactcgctctgatgccaagggtggagtgcagtggcatcatctcggctcactgcaagctccgcctcccaggttcatgccattctcctgcctcagcctcccgagtagctgggactacaggcacccaccaccacgcccagctaattttttgtatttttagtagagatggggtttcaccgtgctagccaggatggtcttgatctccggaacctagtgatccacccccctcggcctcccaaagtgatgggatgacaggcatgagccaccacgcccggcccagaaattattttttaactctccatttggggattacaagtcaaaatgtaccactaatgctataaaatagcaattcctttgtaatttgaaagaaattatacaattaatttgcttcagattatcaaagta

SEQ ID NO: 42681 - DNA, 377 bp, Homo sapiens
tatccccattttacagatgaggagacaggttaagagaggtgaatcacctacccaagtacacacagccagtaagtgagtggaaagggatttgagcccacagagtctgatgacagagtccacaccaacaactgctttaatcaagagagtttgtgacttgcctaggtctcaagaaaggaaaaccaactgatttggctgggcagggccctggtggagagggagagaaaacactctgactccttctcccattttccttctttttctggaaggtaattgcttggggcagtgacaacctcctggcgaattacacagctggtttcccagtgagatttgtaacaacaaccctgccagcctggcagcccccagcaagttccggttta

SEQ ID NO: 42682 - DNA, 440 bp, Homo sapiens
gaaagataacagctctctgcagcagagagggattaaaagcgttgccattcagcagtgaaattcaagggtttttataagctagctagtggggaggtgaggtgttatcttacctacatagggtgtgaaaaaccccaggtgtgccatctgcgtagagcatgaatctctggcatcccccaccccacccttttattatacaggcaggtcttttgcctgagctactccacgttgctttcctactgtgtatgtgcttcaaagggggaggtggagcctccatggtggacacacctggcctcaggtacccctttctgtctgtgcagctgcaagcatcccccgatgcaaactccagcttccttatctgtttgcagccgggtcttccaggctgctttctgttagaagaggagtgatttcctgggctgctttttggtagaagggaagttctg

SEQ ID NO: 42683 - DNA, 494 bp, Homo sapiens
gcgtcgaccttcctgccagagcccagcaaggaggaaatcttggccatagttggtatgggaggcttggggacacagaagggctttgtttgaagccagcagcaggagggatgtggcaccatcatctgatgtgctgcatcattcattgtccccatcgggaaggtggttggcctggggaagcttccagcattcctggtagatcccagtgaaggatgaatctgatccctaggcaggcaggaggggaccctggccagatgcacaaacttgtttgctttttgctgtgtgtcttttagcatccttgagtcccagggcctgaagggttcttggacatgggccgattttcctgtcacctatgtcccctcaacctcatcaccactgggcagctcattatctctctggaaaaggggaaggaaaccagcatttgtctttccatttttttttttttaaactgtggaaacatacacacatcataaaatttgccatttaataggccgggc

SEQ ID NO: 42684 - DNA, 514 bp, Homo sapiens
tcctgctaaataactcctcctgtgtaagtcagggtcaggatgagccgcctttaacagatgacccaaaatggcagtggcttaaacactcaggattcattcttgcccatggaagaatctagaggtaggccatttggggcttattaagcagttccaggaagtcttccatcttcctgcctcaccatcctctgcacttggttccagtcaagaggacgccatgttccaagagggctgccagagctccagccttcccactcataacccaggcagcaggaagaaaggagttgccatgaggatgaaccccctcgagttggcttcctttaaacagtcattggaaatcctccatgcttctgcttatatctcattatctcattgactagaatgtaatcatatgatcacactctgcttcaggggaggctggcacattaaatgttttttaaaatttcataatttggaccatttttgccttaagaaaatgaggattcttctgttgggcaaaaggttgttgtaaaaataa

SEQ ID NO: 42685 - DNA, 426 bp, Homo sapiens
gtgccggaagcaaccttataaatcgctatctataaaagaggacggggatgagaatgggttactgtgatgatgtagttttactgtgtagactctgatatttggaatcacattagctatcttttgaggaaaatctgaaaatttccagaaaactctggtgtattaagttcttgtgtgattcagtggttgtgcttaggtgtttggagttttaaggtggttagctgatttattatttaacagttatcctcgaagtgagagtattttagtctttctgctaaactgtatgtgggtttgggaaccttagttatttgaaggttaagcattaggccctaattcagtaacaggaagagttgtaatggctaatttgtcagaaatatttgtctagtcatacatttattttaacattccactaacaaaaggaaaaagaaa

SEQ ID NO: 42686 - DNA, 320 bp, Homo sapiens
tgtcaccctggctggagtgcggtagtgcaatctcgacccactgcaacctcagcccccggaaatcacttgaacccaggaggcggaggttgcatgagccaagattgcatcactacattccagcctgggcgacagagcaagactccatctcaaaaataaataaataaaagaaattaaccacacacagtgacacacacctgtagtcccagctactcgggagactgaagtgggaggatcacttgagcctagggaggttgaggctgcagggagctatgattgtgccacttcactccagcttaggcgacagtgaggccctgtgtcca

SEQ ID NO: 42687 - DNA, 572 bp, Homo sapiens
aaccctctctccacactctgttatcaggtggtgccacatttcactggccataatctatctttgttctgccagcatcaaagctgtgtactctaggccatcctggctgccacaatgtaatcctgatctacacagaggaaagagagagttacctcccttcaaaaagcttctttatttatattagaaagaattggccccctgaccaaccagagatttttttaaatagtaaaaacatatacaaggcaagcccaaaatggccaggcacagtggttcatgcctgtaatcccagcactttgggaggctgaggtgggaggatcacttgagcccaggagtttgaaaccagtttgaaaatctaattcagattttcagcctgggcaacaaagtgagatctcatctctgtgaaaaatttgaaaacttagccaggcatggtaatgcacacctgtggtcccagctacttgggaggctgaggtaggaggattgcgattccttggggccgtgatgtagagggctgcagtgagctgtgatcatgccactgcactccagcctgggagatagagtgataccctatcaaaaaa

SEQ ID NO: 42688 - DNA, 974 bp, Homo sapiens
cttcaggtgactggccaacagggagccctaatgtaactatggacttcgggtgactggccaagagtaagccctaatgtaactatggactttgggtgactatgacccaaatgtcaatgtagcttcattaacagttaataaacatttcactgtggtgtgggatggtgactgtagtgggggtggcggtgtgtgtgcatgggtatgggctggggtatatgggaactcactgtactttctgtaattttgctgtgaacttaaaactgccctaaaaattgtctatttttaaaaaacaataattataaactggaaaaattctcttaggaaatcctaaaatatggaagataaaatatgaaatgttttctcagtattaaatgtttataacaaccactttctaaccctcagagagcaacacagcaaatacttattaacagtgccataaagaaataaaagctagtcaaccaaaacttcccattaaataggaactgtaaactttatatacagataaaacaaccacattttcacaaactgaaacttgaaaaattaagtaaattggtcattcactaaattggctgcttggcaaactaattttcaaagaattagcatgttcttggttggaaaagaaaaagaataagcaaagtcagaaagtaacaaaaaagatctctaaagctgggtgttgcccaaaagcagccgatggagccaaccagaggctggaacattacagacccgctttccccaccacccaagctggtgtatgccatgctcccacagcagaagctaaaaaagtacacttactatttctattaacgaatagactatctccttctaaactgtataacattatatgaaattggaagctaaaatgtttgtagtaattgtttctactatgttcttcttctgccttcattgttaagttttatgtttcattaatacctttttagagtcaaaaaattttcaaaatttcaattaaaaaaatttct

SEQ ID NO: 42689 - DNA, 681 bp, Homo sapiens
tgtatgcccggcgttctcccttcatttcctaattcatgttggccatcctgtggagttgacagtcacacgtgtaagtgtaacccacaataatacccatcagcctccttcaaagccacaacaaatcaacctgtactccaagtcagaccactttgcttgccttgttgacagcccaagacctgattcctaacctccttttcaatggataaccgctcctaagacccatcccccaacccctgacgccccagacattccgtaaaggtggagatggatattatctctagtttaccagtgagagaaatggaggcacagagattagcgagttttcctgaggttactgataaacataaattttatttgcaaattaaaactaaactgtttctttcttgcctactaatatgtacttaataaaagtttaaattgttcaggtaagtgtaaaaatattgcctatccaatcgcaagcacaatcaagtgtacattttgtgaaaaagttgtgtttttttctcaatattaaattctattattaaacaatgttagttcttttttttcttatatgtaaaaaaagaacatctgtgcaatatcaaataccaataaaaaaactttcttatatctgtaaatcccactctggacttagttgtcctgtcttttaaattaagagactaatacatattttttctacatttc

SEQ ID NO: 42690 - DNA, 338 bp, Homo sapiens
tattggatgagaaggatccaagatgagaaaatgaaggatgacatcaatgtagcagtagctagaatgaacccactcctatgcatgtcctactgctgaacctggtgaaagacttctccctatagcagatccacaaaatactaagcatgagtttgttatcttgaattcgtctatttatgcaattctaagtgaaaaatgaaacgaaagtagaaaagaggtcagtcatctgtagtatgcccctaaagtttagcagcttgttcaatcatattctcaggctcctagtggaaaagaaccaaaagggttacctacaccagctgagccattttctacaatgacatatt

SEQ ID NO: 42691 - DNA, 430 bp, Homo sapiens
aaggatagcaatggctgttggatgggcgatggttgcaaggagccctgccgtggatgtgtaggccacagagctctcatcagcactgttttcgtggccaggaacagaaattctactcaggataattaaaattaaggaacagagctttattataagactgggatcggtagttaatttcctacaggggaaattcagggcatgtaaatcagtgaaatggaaaaggtgtaaggacaagagaaacaccagccctgtctgcaggggggggctgcaactcccttccagctgatgttgttccaccatgggtccagtgtgaccagatcttacaatgttcaaaagaggagtctaggtttttctgtgaaatctccaaatattagtatattggatcaaaaatgttcaaatgatgtgtgagctcaataaaatgcatctgcagtgc

SEQ ID NO: 42692 - DNA, 433 bp, Homo sapiens
tcagacgctgaactatgtgcagtggcagagtggagattacaggcatgagccactgtacctgggttgttacgaaggatatttgaaaggatacaaataaacagcccagtgaggagatacttggggcctggtatggaaaggtcccaagtacaggagctcctgtaccttggagttggggtgtgccaccctcctggcacatggatgagttgttgcaccttcctgtcagcttccacatgttcagttatccagaagtcctcagaatccatccttctgggtgtttttttaagactgggttttggtcttaaccaggctagagtgcagtggcacaatctcattgctcactatagcctcaacctcctggactcaagcagtcttcctacctttgcctcccaaagtgagccactgtgcccagccccttttgggtttttcttttttt

SEQ ID NO: 42693 - DNA, 463 bp, Homo sapiens
ctctcaaataaaagattccggaaaaaggtcattagagatcactttaccctcaaagtcgagaggctagagatgacacaggtcaaatcaagactggcaatgggacctgagaacctagtgatttggcattttaaagtaaggatcctggtcttttatgagccgtgatttatctatctatgaaataacacccttttctcaggatgagtcactggaaataaggtgatacatttatagaataaagatgaggaacttgcttaacatcactaacaatcagggaaatgcaaatcaaaaccataatgaggtatcaccttacatctgttaggataaccattatcaaaaaaatcaaaacataataagtgttggcaaggttgtgaagaaaagtgaaccctggtacactgttggtgaaaatgtagattggtataaccattatggaaaacagtatggaagttcctttaaaaagctaaaa

SEQ ID NO: 42694 - DNA, 431 bp, Homo sapiens
ggggccaccctgggcacgcacactataggtgcctggacctgaggtgacaaggccattcagccggcacttactgtagggcacttcaaacacacataccagccttcctgtgatgttagataatcatcctctctgtgccagctgggaaactgaggcccagagaggtgaagggatagcccaagatccaaagcccacatgggaactttcttcctgtccattcagacacagtcacatcctccagcagaggcgtgggtgagtggtgagtggtgaggagggtgtctcctcaatccaggagaattacgtcaagaattccccaccaggcacagtagctcacccccataatcccagcactttgggaaaccgaggcaggaggatcccttgagcccaggagttcaagagcagcctggacaacatagcaagaccccatctctaca

SEQ ID NO: 42695 - DNA, 442 bp, Homo sapiens
tgttggaacagtcacagatgataaaaccacaaagaaataagggcctgtagtagagttatggaatgatccatagccaggaacacaaaggaaggaaataccatattaacctacctcctaggaggtccttggaaagccttccataaaggagatggtctttagtcctgattcctgggcggttggagcagcagtttgccatcgggtgaaaagaaagcaagggcattccctggcagagggaacagcctgagcaaagccatgcagagaatgaagacctacagaagaaaatgctaatttgaaaaaagatgcataaagcagtctatgttttagtctagtctttttaaacttacagaaatttattactatgtgtgtccatctaacttggcttattttctttatttggggatcaagggaatgccagaattatgatattagttttattactaat

SEQ ID NO: 42696 - DNA, 1035 bp, Homo sapiens
  misc_feature (504)..(504): n is a, c, g, or t
tggccttcccattccaagttgacagctcagatgcaaggagatgagacttacattgggaacctgtgggatgcatctggattagaaacttccacaggagctaatatgtcttatagcaactccatggacatagcttctagaatttctgtaagagacatgccaattacaagagtcactatactcagggaggcccaaagttatagtatccattagcatagtcaatatttatagttcatttataattcttttggtaatcaggaaacatttttaccataaacaatattgttgggtaacataattgacctattaataagttttcaataaaacagaatgagaaaattaaccaaaggttaattctcatgtacaaaggtaaagtgttttgttaaccttttacccaaaagtgatgatatgaatgtagatttttttgggtgtttgaccaaggaagccaaaccattctttcagattatgttagatttgtagctttgtggagtgttgccagagatgttnctttctgtgtgtgagtttgatgagctaacctggagtttgtttgttggactggccaaaacaaatctgagccaactatggtccataccagctgacactgaagaagttcctctcaatgaagtaaatggaattgaagggtttccagagagattaccagtgataatacaggcatgggaagtgatataaaattctcaagaatgaaactgataggccaccaccaatattctacctgaattctatttctcatttcacttgggggaaactaggtcaaactaacatgtgtactaatatatgtctaacttaggcatacgctctagagcagtgattctcaatctttttgagatagtaaatttatttgagaaaaggatgaaaactgcagacttcttcctcagataaatgaacataaagacctacatgtggacttttgcttatcatgtattgtattggaaattaattttctttgatacttagactgtgtaaacaattttcacaaggaagggatttcaatttaaaaatcaatttccagttctgggg

SEQ ID NO: 42697 - DNA, 597 bp, Homo sapiens
cgtggagcagggcgtgggacttgcaacccgccatgcctgagtccccccctccccctgccctgctccctcatggccagagcctcccggacgggcgccgccccctgctctgcaaccagtcccattgaccgcccaagggctgaggagtgcgggggcatggtgtgggactagcaggcagctccacccacggccccagcatgggatccagtaggcaaagctagctggactcctgagtcgggtggggacttggagaacttttatgtctactcaaggtttgtaaatgcaccaatcagtgctctatgtctagctaatctagtggggacttggagaacttttgtgtctagctaaaggattgtaaatgcaccaatcagcactctgtgtctagctgaaggtttgtaaacacatcaatcagtgctgtgtctagctaaatctagggacttggagaacttttgtgtctagctaaaggattgtaaatgcaccagtcagcactctgtgtctagctcaaggtttataaacgcaccaatcagcaccctgtcaaaacagaccaatcagctgtctgtaaaatgggccaatcagctctctgtaaaatggaccaatcag

SEQ ID NO: 42698 - DNA, 346 bp, Homo sapiens
ctgtgaaaatagcttcttataaaacccaatatatatttattataattaaaatacaaaaattaagttttaaagaagtgaaaataatcaataaaaatggtaaatgaatggaaacaaatgaacctgtctatcaaattggtgcaagagtcataaagaggaaaatattccaagtgaatttaggatatggtaatttgactgtacatctcagataatatattctaatgatgagaataactactaaaaaatctcaaatggcattcagtatctaattgttagtagtaatattgtcattgttgcttggaaactgttatatgaatgttcaaactgttactttgagactgttatatga

SEQ ID NO: 42699 - DNA, 341 bp, Homo sapiens
tcatgagaaaatgtgtcctctggaagatggactagggaggatgacagtgaagactggatattggacagaagctctagggaataccagggaagccatggaaattgctagttctctggagcttgttcaagttttgaaactatcacaagcagtattatttctgatgtttcaccttttattttttttttcttaaaatatatggtcaaaatgagaggactaaataataggtataatgaatcctatagctcttatactgccagatagctctccagagtggttgaactaattcattattttatatataattatgttaagtaaatttgtttaactaattcaatcaatat

SEQ ID NO: 42700 - DNA, 133 bp, Homo sapiens
cagggatttagtgctgggtaaggcaagaaggcttgtcaaagcagctcttctggggaggccagaatcctgtaccaatgtcctcagcacgttcttcagctgctgggggagtgccagacaggatgaaagcgtagga

SEQ ID NO: 42701 - DNA, 478 bp, Homo sapiens
tactctaaatacggatggggaaaacggtaatctggcctttaagattaccatatggacacttaggacccagaatccaagatggcccagtggtttgcatgttccttggcagttggcttcattggttacataaccttaaacatggctttctatttatttattattgcaggagaaagataacaacacttatgaaaacagaagagtactttccaactatgaaaggccatagaaacgttttaattttcaatgaagtcactgaaaatccaactccaggagctatggcagtgttaatgaacatatatcatcaggtcttaaaaaaaaataaaggtaaactgaaaagacaactggctacaaagaaggatgccagaatgtaaggaaactataactaatagtcattaccaaaatactaaaacccaacaaaatgcaactgaaaaataccttccaaatttgccaagaaaaaaaattctattttaaacttgaa

SEQ ID NO: 42702 - DNA, 992 bp, Homo sapiens
ccttctgaaaaaagaaagccaactttcctttcaaatacacaccccaacccgccccggcatacacagaaatggggactgcgagcagaagcaacatcgctcgccatctgcaaaccaatctcattctattttgtgtcggtgctgtgggcgcctgtactctctctgtcacacaaccgtggtacctagaagtggactacactcatgaggccgtcaccataaagtgtaccttctccgcaaccggatgcccttctgagcaaccaacatgcctgtggtttcgctacggtgctcaccagcctgagaacctgtgcttggacgggtgcaaaagtgaggcagacaagttcacagtgagggaggccctcaaagaaatctgtggaatagcattccccagtgtgccggaagcgagagctaaacagacaggaggagggaccacactggtggtaagagaaattaagctgctcagcaaggaactgcggagcttcctgacagctcttgtatcactgctctctgtctatgtgaccggtgtgtgcgtggccttcatactcctctccaaatcaaaatccaaccctctaagaaacaaagaaataaaagaagactcacaaaagaagaagagtgctcggcgtatttttcaggaaattgctcaagaactataccataagagacatgtggaaacaaatcagcaatctgagaaagataacaacacttatgaaaacagaagagtactttccaactatgaaaggccatagaaacgttttaattttcaatgaagtcactgaaaatccaactccaggagctatggcagtgttaatgaacatatatcatcaggtcttaaaaaaaaataaaggtaaactgaaaagacaactggctacaaagaaggatgccagaatgtaaggaaactataactaatagtcattaccaaaatactaaaacccaacaaaatgcaactgaaaaataccttccaaatttgccaagaaaaaaaattctattttaaacttgaa

SEQ ID NO: 42703 - DNA, 307 bp, Homo sapiens
taacacatttaaagaactgatgaactggctttaactattacatacttgagtaccttttgaggtctagtttttatacgaataggcaagcagagtaagttcacgtttcacctctaaaacgcagtgtgaaggatactttacacatgtatttgaaagaataggctttaatagtcaatgtgcttctttctgtttttgtcattaagaaattaagctgctcagcaaggaactgcggagcttcctgacagctcttgtatcactgctctctgtctatgtgaccggtgtgtgcgtggccttcatactcctctccaaa

SEQ ID NO: 42704 - DNA, 716 bp, Homo sapiens
gtacagaccaacacttgaaaaatattttttaaattgtggctggttgtaacgatttcaaaactgaaatattttttagcttttaaatatttaaatgttaagtttaaacagaatatcaaggtaactttcaactgcagacactatttcctattgttgagaaactcaatgacaaaataatctcaaggggtaaactgtgacttaaattggacagttctcaaccataaattatatttaaagttctcaaatacaaaagagttaactgtaggcacatatgtgttgggggagggggtagtttttgggaccggtggcaatagagcaagaaaagttctgatgatgcgtcgttatcatcgcttatattcccaaaagagaatttttttttctcatttgtctttatagaagaagagtgctcggcgtatttttcaggaaattgctcaagaactataccataagagacatgtggaaacaaatcagcaatctgtaagtgtaaaatgtcaaaaaaaaatgtaaatacagatataaagcacgtttgaaaaaactaagctgccaaggagctgtcaagaaccatgttttccttcagaagagtctgaaagagaactttcacaagaatgtatttttatatagaacctgttttaataaatacataacaaaagacatctgatacaatattaaatagccccaggctggcatcttagtgacatggaaactttcagaaacacatt

SEQ ID NO: 42705 - DNA, 1046 bp, Homo sapiens
ccttctgaaaaaagaaagccaactttcctttcaaatacacaccccaacccgccccggcatacacagaaatggggactgcgagcagaagcaacatcgctcgccatctgcaaaccaatctcattctattttgtgtcggtgctgtgggcgcctgtactctctctgtcacacaaccgtggtacctagaagtggactacactcatgaggccgtcaccataaagtgtaccttctccgcaaccggatgcccttctgagcaaccaacatgcctgtggtttcgctacggtgctcaccagcctgagaacctgtgcttggacgggtgcaaaagtgaggcagacaagttcacagtgagggaggccctcaaagaaaaccaagtttccctcactgtaaacagagtgacttcaaatgacagtgcaatttacatctgtggaatagcattccccagtgtgccggaagcgagagctaaacagacaggaggagggaccacactggtggtaagagaaattaagctgctcagcaaggaactgcggagcttcctgacagctcttgtatcactgctctctgtctatgtgaccggtgtgtgcgtggccttcatactcctctccaaatcaaaatccaaccctctaagaaacaaagaaataaaagaagactcacaaaagaagaagagtgctcggcgtatttttcaggaaattgctcaagaactataccataagagacatgtggaaacaaatcagcaatctgagaaagataacaacacttatgaaaacagaagagtactttccaactatgaaaggccatagaaacgttttaattttcaatgaagtcactgaaaatccaactccaggagctatggcagtgttaatgaacatatatcatcaggtcttaaaaaaaaataaaggtaaactgaaaagacaactggctacaaagaaggatgccagaatgtaaggaaactataactaatagtcattaccaaaatactaaaacccaacaaaatgcaactgaaaaataccttccaaatttgccaagaaaaaaaattctattttaaacttgaa

SEQ ID NO: 42706 - DNA, 679 bp, Homo sapiens
ccttctgaaaaaagaaagccaactttcctttcaaatacacaccccaacccgccccggcatacacagaaatggggactgcgagcagaagcaacatcgctcgccatctgcaaaccaatctcattctattttgtgtcggtgctgtgggcgcctgtactctctctgtcacacaaccgtggtacctagaagtggactacactcatgaggccgtcaccataaagtgtaccttctccgcaaccggatgcccttctgagcaaccaacatgcctgtggtttcgctacggtgctcaccagcctgagaacctgtgcttggacgggtgcaaaagtgaggcagacaagttcacagtgagggaggccctcaaagaaaaccaagtttccctcactgtaaacagagtgacttcaaatgacagtgcaatttacatctgtggaatagcattccccagtgtgccggaagcgagagctaaacagacaggaggagggaccacactggtggtaagagaaattaagctgctcagcaaggaactgcggagcttcctgacagctcttgtatcactgctctctgtctatgtgaccggtgtgtgcgtggccttcatactcctctccaaatcgagggctcggcggattttttaggaaattggctgaactattccataggagacatgttgaacccaattgacttttgg

SEQ ID NO: 42707 - DNA, 667 bp, Homo sapiens
tcatttgttcattcatttatttactttaaattgacagataaaattttatgcctttactttgtacaacatattgttttgaagtatatatgcattgtggaatgactaaatatagcaaattaacacatgcattacctcacatcgttttcatttgtatggtgagaacactttacatccattctcctagcatttttcaaaaatacaatatattgctaactacagtcaccagattgtaaaatagatctcttgaacttatccctcctattcaaccaaattttatgtcctttgaccaacatttccccaaccccctgtcaaccaccccagcccctggtaaccatgattcttttcaagtattttatgcatttttaaattggaatttttgtcattttattattgaaagcattctttaagaattctggatacaagtctcttgtgagacatatgtgtcgtggatattttctcccagttttatagctgtttatggtgagaaggaaagttcatttccagttactctgtcatggcgggaatcagagatcctcctcacattatctatgtagtgactctctccagaacttccaccctttaaagacgggcaaaatgaagaaagggccctgcatggcttgtatagcgatattagcaccatcaccccacgtgccacctgcaaaaagag

SEQ ID NO: 42708 - DNA, 837 bp, Homo sapiens
cttcctggtgtggcatgttagagaagagaccagaaaaacagacatttcacttgctgtcaggtagtgaaggagctgtggctgcttgggcacagtcattactgtttattccactgtgctgcacatcttgaagctgtaaagatataagaagtctcgcacagccggggttcagcttacaatccttcgcacctaattgtacgcctttgtgtgagggtttggaggagtctccaggaacacctggtgtttcctttctcacaggtatttccagtcctcacgggcaagtcagagagtcccagaggcaattgaacaagccctcagagatcacgtagtccgttcactctccatgggaacccgcacttccctagagacctgtagccaaatcatttggagagcttctgaagcttctctgccttcctctgtctcaaagaatcccatgtgcctctagttgagaaacattcctctggagattctaggttattctcatgagaatgttacgatactcaggtgggctggggcagaaaatggatgagaactagtatagtccaatggctttgctttggtaactgaacccacagaggaggaaaataacaacagctcagcttttctcagtgttatacaccaaccattacgctagttacatgatatacatactatttaattctcatcctttgaggtctggtatcactattgccactttacagataagaaaacaagggttggccgggtatggtggctcactcctgtaatcccaacactttgagaggccaacgcaggtagatcacctgagctgaggagttcaagaccagcctaggcatcatagtaagacctcctctcttaaaa

SEQ ID NO: 42709 - DNA, 393 bp, Homo sapiens
taaaaccctctcattccccaatcttacatctactaatatttcctactgattgcttgttacaagaataaccaaccataccaggcagatccctactcatggcgaagagatatacatatgtaatgagatgtgcatttgctcagggcatgttgcatgttccagcctgcatggcatcaccactgtggacaacacccactcatgacggacccctccttcctatctctggtcattgtcttccccagggtagtagcttttatcaacacaaactgtgtccaccaaattccaaaagtctaaagtaaaaacaacctagatatgagcccagctctgctactgactgacaatgtgatcttaacttatttaaattctttgaacctcaggttccatatctataaagat

SEQ ID NO: 42710 - DNA, 2191 bp, Homo sapiens
actctttcttcggctcgcgagctgagaggagcaggtagaggggcagaggcgggactgtcgtctgggggagccgcccaggaggctcctcaggccgaccccagaccctggctggccaggatgaagtatctccggcaccggcggcccaatgccaccctcattctggccatcggcgctttcaccctcctcctcttcagtctgctagtgtcaccacccacctgcaaggtccaggagcagccaccggcgatccccgaggccctggcctggcccactccacccacccgcccagccccggccccgtgccatgccaacacctctatggtcacccacccggacttcgccacgcagccgcagcacgttcagaacttcctcctgtacagacactgccgccactttcccctgctgcaggacgtgcccccctctaagtgcgcgcagccggtcttcctgctgctggtgatcaagtcctcccctagcaactatgtgcgccgcgagctgctgcggcgcacgtggggccgcgagcgcaaggtacggggtttgcagctgcgcctcctcttcctggtgggcacagcctccaacccgcacgaggcccgcaaggtcaaccggctgctggagctggaggcacagactcacggagacatcctgcagtgggacttccacgactccttcttcaacctcacgctcaagcaggtcctgttcttacagtggcaggagacaaggtgcgccaacgccagcttcgtgctcaacggggatgatgacgtctttgcacacacagacaacatggtcttctacctgcaggaccatgaccctggccgccacctcttcgtggggcaactgatccaaaacgtgggccccatccgggctttttggagcaagtactatgtgccagaggtggtgactcagaatgagcggtacccaccctattgtgggggtggtggcttcttgctgtcccgcttcacggccgctgccctgcgccgtgctgcccatgtcttggacatcttccccattgatgatgtcttcctgggtatgtgtctggagcttgagggactgaagcctgcctcccacagcggcatccgcacgtctggcgtgcgggctccatcgcaacacctgtcctcctttgacccctgcttctaccgagacctgctgctggtgcaccgcttcctaccttatgagatgctgctcatgtgggatgcgctgaaccagcccaacctcacctgcggcaatcagacacagatctactgagtcagcatcagggtccccagcctctgggctcctgtttccataggaaggggcgacaccttcctcccaggaagctgagacctttgtggtctgagcataagggagtgccagggaaggtttgaggtttgatgagtgaatattctggctggcgaactcctacacatccttcaaaacccacctggtactgttccagcatcttccctggatggctggaggaactccagaaaatatccatcttctttttgtggctgctaatggcagaagtgcctgtgctagagttccaactgtggatgcatccgtcccgtttgagtcaaagtcttacttccctgctctcacctactcacagacgggatgctaagcagtgcacctgcagtggtttaatggcagataagctccgtctgcagttccaggccagccagaaactcctgtgtccacatagagctgacgtgagaaatatctttcagcccaggagagaggggtcctgatcttaaccctttcctgggtctcagacaactcagaaggttggggggataccagagaggtggtggaataggaccgccccctccttacttgtgggatcaaatgctgtaatggtggaggtgtgggcagaggagggaggcaagtgtcctttgaaagttgtgagagctcagagtttctggggtcctcattaggagcccccatccctgtgttccccaagaattcagagaacagcactggggctggaatgatctttaatgggcccaaggccaacaggcatatgcctcactactgcctggagaagggagagattcaggtcctccagcagcctccctcacccagtatgttttacagattacggggggaccgggtgagccagtgaccccctgcagcccccagcttcaggcctcagtgtctgccagtcaagcttcacaggcattgtgatggggcagccttggggaatataaaattttgtgaagac

SEQ ID NO: 42711 - DNA, 2150 bp, Homo sapiens
ttccctagcagcgggccagacccaaggagccgcccaggaggctcctcaggccgaccccagaccctggctggccaggatgaagtatctccggcaccggcggcccaatgccaccctcattctggccatcggcgctttcaccctcctcctcttcagtctgctagtgtcaccacccacctgcaaggtccaggagcagccaccggcgatccccgaggccctggcctggcccactccacccacccgcccagccccggccccgtgccatgccaacacctctatggtcacccacccggacttcgccacgcagccgcagcacgttcagaacttcctcctgtacagacactgccgccactttcccctgctgcaggacgtgcccccctctaagtgcgcgcagccggtcttcctgctgctggtgatcaagtcctcccctagcaactatgtgcgccgcgagctgctgcggcgcacgtggggccgcgagcgcaaggtacggggtttgcagctgcgcctcctcttcctggtgggcacagcctccaacccgcacgaggcccgcaaggtcaaccggctgctggagctggaggcacagactcacggagacatcctgcagtgggacttccacgactccttcttcaacctcacgctcaagcaggtcctgttcttacagtggcaggagacaaggtgcgccaacgccagcttcgtgctcaacggggatgatgacgtctttgcacacacagacaacatggtcttctacctgcaggaccatgaccctggccgccacctcttcgtggggcaactgatccaaaacgtgggccccatccgggctttttggagcaagtactatgtgccagaggtggtgactcagaatgagcggtacccaccctattgtgggggtggtggcttcttgctgtcccgcttcacggccgctgccctgcgccgtgctgcccatgtcttggacatcttccccattgatgatgtcttcctgggtatgtgtctggagcttgagggactgaagcctgcctcccacagcggcatccgcacgtctggcgtgcgggctccatcgcaacacctgtcctcctttgacccctgcttctaccgagacctgctgctggtgcaccgcttcctaccttatgagatgctgctcatgtgggatgcgctgaaccagcccaacctcacctgcggcaatcagacacagatctactgagtcagcatcagggtccccagcctctgggctcctgtttccataggaaggggcgacaccttcctcccaggaagctgagacctttgtggtctgagcataagggagtgccagggaaggtttgaggtttgatgagtgaatattctggctggcgaactcctacacatccttcaaaacccacctggtactgttccagcatcttccctggatggctggaggaactccagaaaatatccatcttctttttgtggctgctaatggcagaagtgcctgtgctagagttccaactgtggatgcatccgtcccgtttgagtcaaagtcttacttccctgctctcacctactcacagacgggatgctaagcagtgcacctgcagtggtttaatggcagataagctccgtctgcagttccaggccagccagaaactcctgtgtccacatagagctgacgtgagaaatatctttcagcccaggagagaggggtcctgatcttaaccctttcctgggtctcagacaactcagaaggttggggggataccagagaggtggtggaataggaccgccccctccttacttgtgggatcaaatgctgtaatggtggaggtgtgggcagaggagggaggcaagtgtcctttgaaagttgtgagagctcagagtttctggggtcctcattaggagcccccatccctgtgttccccaagaattcagagaacagcactggggctggaatgatctttaatgggcccaaggccaacaggcatatgcctcactactgcctggagaagggagagattcaggtcctccagcagcctccctcacccagtatgttttacagattacggggggaccgggtgagccagtgaccccctgcagcccccagcttcaggcctcagtgtctgccagtcaagcttcacaggcattgtgatggggcagccttggggaatataaaattttgtgaagac

SEQ ID NO: 42712 - DNA, 2649 bp, Homo sapiens
ttccctagcagcgggccagacccaaggagccgcccaggaggctcctcaggccgaccccagaccctggctggccaggatgaagtatctccggcaccggcggcccaatgccaccctcattctggccatcggcgctttcaccctcctcctcttcagtctgctagtgtcaccacccacctgcaaggtccaggagcagccaccggcgatccccgaggccctggcctggcccactccacccacccgcccagccccggccccgtgccatgccaacacctctatggtcacccacccggacttcgccacgcagccgcagcacgttcagaacttcctcctgtacagacactgccgccactttcccctgctgcaggacgtgcccccctctaagtgcgcgcagccggtcttcctgctgctggtgatcaagtcctcccctagcaactatgtgcgccgcgagctgctgcggcgcacgtggggccgcgagcgcaaggtacggggtttgcagctgcgcctcctcttcctggtgggcacagcctccaacccgcacgaggcccgcaaggtcaaccggctgctggagctggaggcacagactcacggagacatcctgcagtgggacttccacgactccttcttcaacctcacgctcaagcaggtcctgttcttacagtggcaggagacaaggtgcgccaacgccagcttcgtgctcaacggggatgatgacgtctttgcacacacagacaacatggtcttctacctgcaggaccatgaccctggccgccacctcttcgtggggcaactgatccaaaacgtgggccccatccgggctttttggagcaagtactatgtgccagaggtggtgactcagaatgagcggtacccaccctattgtgggggtggtggcttcttgctgtcccgcttcacggccgctgccctgcgccgtgctgcccatgtcttggacatcttccccattgatgatgtcttcctgggtatgtgtctggagcttgagggactgaagcctgcctcccacagcggcatccgcacgtctggcgtgcgggctccatcgcaacacctgtcctcctttgacccctgcttctaccgagacctgctgctggtgcaccgcttcctaccttatgagatgctgctcatgtgggatgcgctgaaccagcccaacctcacctgcggcaatcagacacagatctactgagtcagcatcagggtccccagcctctgggctcctgtttccataggaaggggcgacaccttcctcccaggaagctgagacctttgtggtctgagcataagggagtgccagggaaggtttgaggtttgatgagtgaatattctggctggcgaactcctacacatccttcaaaacccacctggtactgttccagcatcttccctggatggctggaggaactccagaaaatatccatcttctttttgtggctgctaatggcagaagtgcctgtgctagagttccaactgtggatgcatccgtcccgtttgagtcaaagtcttacttccctgctctcacctactcacagacgggatgctaagcagtgcacctgcagtggtttaatggcagataagctccgtctgcagttccaggccagccagaaactcctgtgtccacatagagctgacgtgagaaatatctttcagcccaggagagaggggtcctgatcttaaccctttcctgggtctcagacaactcagaaggttggggggataccagagaggtggtggaataggaccgccccctccttacttgtgggatcaaatgctgtaatggtggaggtgtgggcagaggagggaggcaagtgtcctttgaaagttgtgagagctcagagtttctggggtcctcattaggagcccccatccctgtgttccccaagaattcagagaacagcactggggctggaatgatctttaatgggcccaaggccaacaggcatatgcctcactactgcctggagaagggagagattcaggtcctccagcagcctccctcacccagtatgttttacagattacggggggaccgggtgagccagtgaccccctgcagcccccagcttcaggcctcagtgtctgccagtcaagcttcacaggcattgtgatggggcagccttggggaatataaaattttgtgaagacttggagatctttttttttttttaagcaaatttacaagtttcaacagacaagtccacattcatccctaaaagtctcattttccagtagaaaatatacactggtaaaaacggggcatggggccgtggctcagggctgtaattctagcacattgggagaccaaagtgggaggatcacttgagcccaggagttctggatcctgtctctgcacaaaataaaaaattactcaggcgtggtggtgctcacatgcctgtagtcccagctatacttgggaggctgaggcgagaggatcgcttgagcccaggagttggaggctgcagtgaaccatgattgcgccactgtactccactgggcggcaataagaagacaaaaacataaaacaggacatgtgtgaggcaaaagctgcaggaatttctatcaggcagatctgacctcatcccacccaccccctgctcagatacccttcatagctccttattgctttcagctcataaccccacat

SEQ ID NO: 42713 - DNA, 2292 bp, Homo sapiens
ttccctagcagcgggccagacccaaggagccgcccaggaggctcctcaggccgaccccagaccctggctggccaggatgaagtatctccggcaccggcggcccaatgccaccctcattctggccatcggcgctttcaccctcctcctcttcagtctgctagtgtcaccacccacctgcaaggtccaggagcagccaccggcgatccccgaggccctggcctggcccactccacccacccgcccagccccggccccgtgccatgccaacacctctatggtcacccacccggacttcgccacgcagccgcagcacgttcagaacttcctcctgtacagacactgccgccactttcccctgctgcaggacgtgcccccctctaagtgcgcgcagccggtcttcctgctgctggtgatcaagtcctcccctagcaactatgtgcgccgcgagctgctgcggcgcacgtggggccgcgagcgcaaggtacggggtttgcagctgcgcctcctcttcctggtgggcacagcctccaacccgcacgaggcccgcaaggtcaaccggctgctggagctggaggcacagactcacggagacatcctgcagtgggacttccacgactccttcttcaacctcacgctcaagcaggtcctgttcttacagtggcaggagacaaggtgcgccaacgccagcttcgtgctcaacggggatgatgacgtctttgcacacacagacaacatggtcttctacctgcaggaccatgaccctggccgccacctcttcgtggggcaactgatccaaaacgtgggccccatccgggctttttggagcaagtactatgtgccagaggtggtgactcagaatgagcggtacccaccctattgtgggggtggtggcttcttgctgtcccgcttcacggccgctgccctgcgccgtgctgcccatgtcttggacatcttccccattgatgatgtcttcctgggtatgtgtctggagcttgagggactgaagcctgcctcccacagcggcatccgcacgtctggcgtgcgggctccatcgcaacacctgtcctcctttgacccctgcttctaccgagacctgctgctggtgcaccgcttcctaccttatgagatgctgctcatgtgggatgcgctgaaccagcccaacctcacctgcggcaatcagacacagatctactgagtcagcatcagggtccccagcctctgggctcctgtttccataggaaggggcgacaccttcctcccaggaagctgagacctttgtggtctgagcataagggagtgccagggaaggtttgaggtttgatgagtgaatattctggctggcgaactcctacacatccttcaaaacccacctggtactgttccagcatcttccctggatggctggaggaactccagaaaatatccatcttctttttgtggctgctaatggcagaagtgcctgtgctagagttccaactgtggatgcatccgtcccgtttgagtcaaagtcttacttccctgtgttccccaagaattcagagaacagcactggggctggaatgatctttaatgggcccaaggccaacaggcatatgcctcactactgcctggagaagggagagattcaggtcctccagcagcctccctcacccagtatgttttacagattacggggggaccgggtgagccagtgaccccctgcagcccccagcttcaggcctcagtgtctgccagtcaagcttcacaggcattgtgatggggcagccttggggaatataaaattttgtgaagacttggagatctttttttttttttaagcaaatttacaagtttcaacagacaagtccacattcatccctaaaagtctcattttccagtagaaaatatacactggtaaaaacggggcatggggccgtggctcagggctgtaattctagcacattgggagaccaaagtgggaggatcacttgagcccaggagttctggatcctgtctctgcacaaaataaaaaattactcaggcgtggtggtgctcacatgcctgtagtcccagctatacttgggaggctgaggcgagaggatcgcttgagcccaggagttggaggctgcagtgaaccatgattgcgccactgtactccactgggcggcaataagaagacaaaaacataaaacaggacatgtgtgaggcaaaagctgcaggaatttctatcaggcagatctgacctcatcccacccaccccctgctcagatacccttcatagctccttattgctttcagctcataaccccacat

SEQ ID NO: 42714 - DNA, 1735 bp, Homo sapiens
tccatggattccccaacactcctagaggcacatgataaggcctgtttggagagttgaaaccaaggcacagagagggtttcccaagtaaccccacagggcagggccttaacccaggctggattgtggacacttcctttcctgggcttagtgggctggagtggctaatagagacccaaggccaatttctccagccctcaagcaagcatgccctgtccaccctgcctgcaggtcctgttcttacagtggcaggagacaaggtgcgccaacgccagcttcgtgctcaacggggatgatgacgtctttgcacacacagacaacatggtcttctacctgcaggaccatgaccctggccgccacctcttcgtggggcaactgatccaaaacgtgggccccatccgggctttttggagcaagtactatgtgccagaggtggtgactcagaatgagcggtacccaccctattgtgggggtggtggcttcttgctgtcccgcttcacggccgctgccctgcgccgtgctgcccatgtcttggacatcttccccattgatgatgtcttcctgggtatgtgtctggagcttgagggactgaagcctgcctcccacagcggcatccgcacgtctggcgtgcgggctccatcgcaacacctgtcctcctttgacccctgcttctaccgagacctgctgctggtgcaccgcttcctaccttatgagatgctgctcatgtgggatgcgctgaaccagcccaacctcacctgcggcaatcagacacagatctactgagtcagcatcagggtccccagcctctgggctcctgtttccataggaaggggcgacaccttcctcccaggaagctgagacctttgtggtctgagcataagggagtgccagggaaggtttgaggtttgatgagtgaatattctggctggcgaactcctacacatccttcaaaacccacctggtactgttccagcatcttccctggatggctggaggaactccagaaaatatccatcttctttttgtggctgctaatggcagaagtgcctgtgctagagttccaactgtggatgcatccgtcccgtttgagtcaaagtcttacttccctgctctcacctactcacagacgggatgctaagcagtgcacctgcagtggtttaatggcagataagctccgtctgcagttccaggccagccagaaactcctgtgtccacatagagctgacgtgagaaatatctttcagcccaggagagaggggtcctgatcttaaccctttcctgggtctcagacaactcagaaggttggggggataccagagaggtggtggaataggaccgccccctccttacttgtgggatcaaatgctgtaatggtggaggtgtgggcagaggagggaggcaagtgtcctttgaaagttgtgagagctcagagtttctggggtcctcattaggagcccccatccctgtgttccccaagaattcagagaacagcactggggctggaatgatctttaatgggcccaaggccaacaggcatatgcctcactactgcctggagaagggagagattcaggtcctccagcagcctccctcacccagtatgttttacagattacggggggaccgggtgagccagtgaccccctgcagcccccagcttcaggcctcagtgtctgccagtcaagcttcacaggcattgtgatggggcagccttggggaatataaaattttgtgaagac

SEQ ID NO: 42715 - DNA, 1859 bp, Homo sapiens
ttccctagcagcgggccagacccaaggagccgcccaggaggctcctcaggccgaccccagaccctggctggccaggatgaagtatctccggcaccggcggcccaatgccaccctcattctggccatcggcgctttcaccctcctcctcttcagtctgctagtgtcaccacccacctgcaaggtccaggagcagccaccggcgatccccgaggccctggcctggcccactccacccacccgcccagccccggccccgtgccatgccaacacctctatggtcacccacccggacttcgccacgcagccgcagcacgttcagaacttcctcctgtacagacactgccgccactttcccctgctgcaggacgtgcccccctctaagtgcgcgcagccggtcttcctgctgctggtgatcaagtcctcccctagcaactatgtgcgccgcgagctgctgcggcgcacgtggggccgcgagcgcaaggtacggggtttgcagctgcgcctcctcttcctggtgggcacagcctccaacccgcacgaggcccgcaaggtcaaccggctgctggagctggaggcacagactcacggagacatcctgcagtgggacttccacgactccttcttcaacctcacgctcaagcaggtcctgttcttacagtggcaggagacaaggtgcgccaacgccagcttcgtgctcaacggggatgatgacgtctttgcacacacagacaacatggtcttctacctgcaggaccatgaccctggccgccacctcttcgtggggcaactgatccaaaacgtgggccccatccgggctttttggagcaagtactatgtgccagaggtggtgactcagaatgagcggtacccaccctattgtgggggtggtggcttcttgctgtcccgcttcacggccgctgccctgcgccgtgctgcccatgtcttggacatcttccccattgatgatgtcttcctgggtatgtgtctggagcttgagggactgaagcctgcctcccacagcggcatccgcacgtctggcgtgcgggctccatcgcaacacctgtcctcattaggagcccccatccctgtgttccccaagaattcagagaacagcactggggctggaatgatctttaatgggcccaaggccaacaggcatatgcctcactactgcctggagaagggagagattcaggtcctccagcagcctccctcacccagtatgttttacagattacggggggaccgggtgagccagtgaccccctgcagcccccagcttcaggcctcagtgtctgccagtcaagcttcacaggcattgtgatggggcagccttggggaatataaaattttgtgaagacttggagatctttttttttttttaagcaaatttacaagtttcaacagacaagtccacattcatccctaaaagtctcattttccagtagaaaatatacactggtaaaaacggggcatggggccgtggctcagggctgtaattctagcacattgggagaccaaagtgggaggatcacttgagcccaggagttctggatcctgtctctgcacaaaataaaaaattactcaggcgtggtggtgctcacatgcctgtagtcccagctatacttgggaggctgaggcgagaggatcgcttgagcccaggagttggaggctgcagtgaaccatgattgcgccactgtactccactgggcggcaataagaagacaaaaacataaaacaggacatgtgtgaggcaaaagctgcaggaatttctatcaggcagatctgacctcatcccacccaccccctgctcagatacccttcatagctccttattgctttcagctcataaccccacat

SEQ ID NO: 42716 - DNA, 974 bp, Homo sapiens
ttccctagcagcgggccagacccaaggagccgcccaggaggctcctcaggccgaccccagaccctggctggccaggatgaagtatctccggcaccggcggcccaatgccaccctcattctggccatcggcgctttcaccctcctcctcttcagtctgctagtgtcaccacccacctgcaaggtccaggagcagccaccggcgatccccgaggccctggcctggcccactccacccacccgcccagccccggccccgtgccatgccaacacctctatggtcacccacccggacttcgccacgcagccgcagcacgttcagaacttcctcctgtacagacactgccgccactttcccctgctgcaggacgtgcccccctctaagtgcgcgcagccggtcttcctgctgctggtgatcaagtcctcccctagcaactatgtgcgccgcgagctgctgcggcgcacgtggggccgcgagcgcaaggtacggggtttgcagctgcgcctcctcttcctggtgggcacagcctccaacccgcacgaggcccgcaaggtcaaccggctgctggagctggaggcacagactcacggagacatcctgcagtgggacttccacgactccttcttcaacctcacgctcaagcaggtgcgctggactggggtcacctgatcggggccacctgtccttcttgtccaaattaccacccactcctgagggacccaggggaccagaagtcctcgtcagtccatcacagcccattctgcccctctgctgtcctcaccagcctcgtggagacccaaaatggtcttcttctaggagaggctagggggaagggcagaggagctaggttactagcacagagctcaagcctgatgatgcggattcgaatccaagctctgcctcttacttggtgttcgaccttggaggagttcattcacctctctgtgcctcacttttctcacctggaaaatgggat

SEQ ID NO: 42717 - DNA, 2813 bp, Homo sapiens
  misc_feature (630)..(630): n is a, c, g, or t
gttgccctaactacctcgatgtgctgtaacaaacaagtcattgtcatagacaaaatcaaatctgcaagtattgcagacagatgtggcgcattgcatgtgggagatcacatcctctccatcgatggaaccagcatggagtactgtacacttgcagaagcaacccagttcctggccaacaccactgaccaggtcaagcttgagatccttccccatcatcagacccggctggccctaaaggggcccgaccatgtgaaaattcagaggagcgacaggcaacttacctgggattcctgggccagcaaccacagcagccttcacaccaaccatcactataacacgtaccaccctgaccattgcagagtaccagccctgacattcccgaaagcacctcctccaaacagccctccagctttggtgtcttcatccttctctcctacctccatgagtgcatacagcctgagttccctgaacatggggactctacctcgaagcctctactccaccagcccacgtggaaccatgatgaggaggagactgaaaaagaaagacttcaaaagctcattgtccttagcctccagcacagtaggattggctgggcaggttgttcacacagaaaccacagaggttgtnctgacggcagatcctgtcacaggatttgggatccaactgcagggcagtgtgtttgccacagaaactctctcttctccacctctgatttcctatatcgaagctgacagcccagcagagagatgtggggtgctacagattggagacagagtgatggccatcaatggaattccaacagaagacagcaccttcgaagaagccagtcagctcctccgagactcttcaatcacgagcaaggtcacactggaaatcgagtttgatgttgcagagtctgtcatcccaagtagtggaacatttcatgtaaagctgcctaagaagcacaatgtggaacttggaataaccataagttcaccatccagtagaaaaccaggagaccccctcgtcatttcagatatcaagaaagggagtgtggcacacagaactgggaccctggaacttggggataaattgctcgcaatagataatatccggctggacaactgttccatggaagatgcagttcagatcctccagcaatgtgaagacctggtgaagctcaaaatccgcaaagatgaagataattcagatgagcaagaaagttccggagcaattatttacaccgtggagcttaaacgctacggggggccccttggcatcacaatttcaggaactgaagagccgtttgatcctataatcatttcaagcctcactaaggggggattagctgaaagaactggcgcaatccacataggagaccgaatcctagccatcaatagcagcagcttgaaagggaagcctctgagtgaagccatccatttgttacagatggcaggagagactgtcaccttgaaaattaagaaacagacagatgcccagtcagcatcgagccccaagaagttccctatttctagccatttgagtgacctgggggatgtggaggaggactcctcaccagcacagaagccaggcaagctctccgacatgtacccctccacggtgcccagtgtggacagtgctgtggattcatgggatgggtctgcaatagacaccagctatggaactgaaggcactagttttcaggcctcaggatacaatttcaacacctatgactggaggagtccaaaacagagaggcagcttgtccccagtcactaagcctcgaagccagacttacccagatgtggggctgagttatgaagactgggaccggtccacagccagtggttttgcaggggctgccgatagtgcagagacagaacaagaggagaacttctggtctcaagcgctggaggatttggaaacctgcggacagtcaggaattctgagagaactggaggcaacaatcatgtcggggagcacgatgagtttgaatcatgaggctccaacacctcgcagtcagctggggcgacaggccagcttccaggagcgcagcagctcgcggccgcactacagccaaacaactcggagcaacaccctgccttcagatgtgggtaggaagtcagtaaccctgagaaaaatgaaacaagaaataaaggagatcatgtctccaactcctgtggagctgcacaaggtgaccttgtacaaggactctgacatggaggactttgggttcagtgtagcagatggcttactggagaaaggagtgtatgtcaaaaatattcgcccagctgggccaggagatcttggtggcttaaagccctatgacaggctcttacaggtgaatcatgtccgaaccagagactttgactgctgccttgttgtgcccctcatagcagaatccgggaataagctggacctggttattagtagaaacccactggcttcacagaagtctatagaccaacagagtctaccaggagattggagtgaacagaacagtgcttttttccagcagcctagccacggtggtaatttggagacacgagaacccactaatacattatagcaacgctttttataaagcaggacaaaagacaatatctacatggtgctaaaaatcctttaagatttctgtgacctttgaagcacagataatcaatcaacgtggcattaactgcaagcacaggggtcttttaaatctctctcatggctcatgttcacttcccttttcaagttgaagaggtttcttttttggtgaccactatggtatatggtgggcaatgccctgccagtcccaacggtagagaaaaataggccgtcccccacaac

SEQ ID NO: 42718 - DNA, 2858 bp, Homo sapiens
  misc_feature (630)..(630): n is a, c, g, or t
gttgccctaactacctcgatgtgctgtaacaaacaagtcattgtcatagacaaaatcaaatctgcaagtattgcagacagatgtggcgcattgcatgtgggagatcacatcctctccatcgatggaaccagcatggagtactgtacacttgcagaagcaacccagttcctggccaacaccactgaccaggtcaagcttgagatccttccccatcatcagacccggctggccctaaaggggcccgaccatgtgaaaattcagaggagcgacaggcaacttacctgggattcctgggccagcaaccacagcagccttcacaccaaccatcactataacacgtaccaccctgaccattgcagagtaccagccctgacattcccgaaagcacctcctccaaacagccctccagctttggtgtcttcatccttctctcctacctccatgagtgcatacagcctgagttccctgaacatggggactctacctcgaagcctctactccaccagcccacgtggaaccatgatgaggaggagactgaaaaagaaagacttcaaaagctcattgtccttagcctccagcacagtaggattggctgggcaggttgttcacacagaaaccacagaggttgtnctgacggcagatcctgtcacaggatttgggatccaactgcagggcagtgtgtttgccacagaaactctctcttctccacctctgatttcctatatcgaagctgacagcccagcagagagatgtggggtgctacagattggagacagagtgatggccatcaatggaattccaacagaagacagcaccttcgaagaagccagtcagctcctccgagactcttcaatcacgagcaaggtcacactggaaatcgagtttgatgttgcagagtctgtcatcccaagtagtggaacatttcatgtaaagctgcctaagaagcacaatgtggaacttggaataaccataagttcaccatccagtagaaaaccaggagaccccctcgtcatttcagatatcaagaaagggagtgtggcacacagaactgggaccctggaacttggggataaattgctcgcaatagataatatccggctggacaactgttccatggaagatgcagttcagatcctccagcaatgtgaagacctggtgaagctcaaaatccgcaaagatgaagataattcagatgagcaagaaagttccggagcaattatttacaccgtggagcttaaacgctacggggggccccttggcatcacaatttcaggaactgaagagccgtttgatcctataatcatttcaagcctcactaaggggggattagctgaaagaactggcgcaatccacataggagaccgaatcctagccatcaatagcagcagcttgaaagggaagcctctgagtgaagccatccatttgttacagatggcaggagagactgtcaccttgaaaattaagaaacagacagatgcccagtcagcatcgagccccaagaagttccctatttctagccatttgagtgacctgggggatgtggaggaggactcctcaccagcacagaagccaggcaagctctccgacatgtacccctccacggtgcccagtgtggacagtgctgtggattcatgggatgggtctgcaatagacaccagctatggaactgaaggcactagttttcaggcctcaggatacaatttcaacacctatgactggaggagtccaaaacagagaggcagcttgtccccagtcactaagcctcgaagccagacttacccagatgtggggctgagttatgaagactgggaccggtccacagccagtggttttgcaggggctgccgatagtgcagagacagaacaagaggagaacttctggtctcaagcgctggaggatttggaaacctgcggacagtcaggaattctgagagaactggaggagaaagctgacaggcgtgtgtctttgagaaacatgactctcttggcaacaatcatgtcggggagcacgatgagtttgaatcatgaggctccaacacctcgcagtcagctggggcgacaggccagcttccaggagcgcagcagctcgcggccgcactacagccaaacaactcggagcaacaccctgccttcagatgtgggtaggaagtcagtaaccctgagaaaaatgaaacaagaaataaaggagatcatgtctccaactcctgtggagctgcacaaggtgaccttgtacaaggactctgacatggaggactttgggttcagtgtagcagatggcttactggagaaaggagtgtatgtcaaaaatattcgcccagctgggccaggagatcttggtggcttaaagccctatgacaggctcttacaggtgaatcatgtccgaaccagagactttgactgctgccttgttgtgcccctcatagcagaatccgggaataagctggacctggttattagtagaaacccactggcttcacagaagtctatagaccaacagagtctaccaggagattggagtgaacagaacagtgcttttttccagcagcctagccacggtggtaatttggagacacgagaacccactaatacattatagcaacgctttttataaagcaggacaaaagacaatatctacatggtgctaaaaatcctttaagatttctgtgacctttgaagcacagataatcaatcaacgtggcattaactgcaagcacaggggtcttttaaatctctctcatggctcatgttcacttcccttttcaagttgaagaggtttcttttttggtgaccactatggtatatggtgggcaatgccctgccagtcccaacggtagagaaaaataggccgtcccccacaac

SEQ ID NO: 42719 - DNA, 597 bp, Homo sapiens
cagctttggtgtcttcatccttctctcctacctccatgagtgcatacagcctgagttccctgaacatggggactctacctcgaagcctctactccaccagcccacgtggaaccatgatgaggaggagactgaaaaagaaagacttcaaaagctcatgtaagtgaaatgacagccaatggcatttggcctggaaaaaacctgtgggcaatggagccttgaaaataccgaaattgtgggaagagtgtttcacagttgcttaagtgatcaggtagatgctgagcagctaacagctctgtgccaaagaccgttgacacgatacccagtatctgtttggcaatgactgcaccccaatttaacttcagactgaattcattcatactacctttgcctacaactttttatttgagatttgagatttttcttgctcttttgatgtcataacatacccaaagatatgatttttcctttaagactccttttattatattctgggtggctttggacatgaaacctttgttcttagtttcttactcattctaaagaaattttgtgaaaacgatgctccccttttgataaatataagattctcatgcattc

SEQ ID NO: 42720 - DNA, 1286 bp, Homo sapiens
ggtgtccattgagaagttcttaattcgtttctgtaagatatattcaaggtggcctcatgaatcccatctgttagagcccactcagtggaaagtgaatgcttaaaatgtagtttacagtaagcaaatgttagagcatttcaatttgcctcaaaactgccaggggtggtatttgattaaataaactcaatggcttaagtacttaaattggatttgagatgtgcattataaatgtcacttgcaaagcattttccagactttcatagttcaattagtacatccattttccagcctttggttttgccctgaagagactgtatttttacctcgcagaaggagaaatgtgcttactgttgagcaccaaatcctttccttagtccatggcttaattgtttctaaaaattgtcaatgccacaggcaacaatcatgtcggggagcacgatgagtttgaatcatgaggctccaacacctcgcagtcagctggggcgacaggccagcttccaggagcgcagcagctcgcggccgcactacagccaaacaactcggagcaacaccctgccttcagatgtgggtaggaagtcagtaaccctgagaaaaatgaaacaagaaataaaggagatcatgtctccaactcctgtggagctgcacaaggtgaccttgtacaaggactctgacatggaggactttgggttcagtgtagcagatggcttactggagaaaggagtgtatgtcaaaaatattcgcccagctgggccaggagatcttggtggcttaaagccctatgacaggctcttacaggtgaatcatgtccgaaccagagactttgactgctgccttgttgtgcccctcatagcagaatccgggaataagctggacctggttattagtagaaacccactggcttcacagaagtctatagaccaacagagtctaccaggagattggagtgaacagaacagtgcttttttccagcagcctagccacggtggtaatttggagacacgagaacccactaatacattatagcaacgctttttataaagcaggacaaaagacaatatctacatggtgctaaaaatcctttaagatttctgtgacctttgaagcacagataatcaatcaacgtggcattaactgcaagcacaggggtcttttaaatctctctcatggctcatgttcacttcccttttcaagttgaagaggtttcttttttggtgaccactatggtatatggtgggcaatgccctgccagtcccaacggtagagaaaaataggccgtcccccacaac

SEQ ID NO: 42721 - DNA, 1178 bp, Homo sapiens
taaagtgatagtgcagaaagaagactggatgtggaatgagaactgaagttagagttttaagtcctcacaaaaggatttgcctgatacctgtccttaggcaagaattcaagggctccacagtcgtcgagctgatgaagaaggaaggcactaccctgggtctgacggtatcgggaggaattgataaggatggcaagccaagagtatctaatctgcggcaaggaggaattgctgctagaagtgaccagctggatgtgggtgactacatcaaagcagtgaatggaatcaacctggccaaattccgccatgacgagatcatcagcttgctgaagaatgtgggagaaagagtggttcttgaagtagagtacgagcttccaccggtctctgtgcaaggatcaagtgttattttccgaacagtggaggtcacattacataaagaaggcaatacctttggttttgtaattcgagggggagcacatgatgatagaaataaatctcgtccagttgtgataacatgtgttcgtcctggagggcctgctgacagagagggcacgatcaaacccggtgacaggttgctcagtgtggatggaattcggcttcttggaactacgcatgctgaagccatgagtattcttaaacaatgtggacaagaagcagcactgctgatagaatatgatgtctcagtaatgggtgaatcatgtccgaaccagagactttgactgctgccttgttgtgcccctcatagcagaatccgggaataagctggacctggttattagtagaaacccactggcttcacagaagtctatagaccaacagagtctaccaggagattggagtgaacagaacagtgcttttttccagcagcctagccacggtggtaatttggagacacgagaacccactaatacattatagcaacgctttttataaagcaggacaaaagacaatatctacatggtgctaaaaatcctttaagatttctgtgacctttgaagcacagataatcaatcaacgtggcattaactgcaagcacaggggtcttttaaatctctctcatggctcatgttcacttcccttttcaagttgaagaggtttcttttttggtgaccactatggtatatggtgggcaatgccctgccagtcccaacggtagagaaaaataggccgtcccccacaac

SEQ ID NO: 42722 - DNA, 619 bp, Homo sapiens
  misc_feature (613)..(619): n is a, c, g, or t
cagggacgtgtctgtgctcctgcgtgtgaccagggttgactaaactctgccaggatgtcttgccagcaaaaccagcagcagtgccagccccctcccaagtgtcctcccaagtgtaccccaaaatgtccacctaagtgtccccctaaatgcctgccccagtgcccagctccatgttcccctgcagtctcttcttgctgtggtcccatctctgggggctgctgtggtcccagctctgggggctgctgcaactctggggctggtggctgctgcctgagccaccacaggccccgtctcttccaccggcgccggcaccagagccccgactgctgtgagagtgaaccttctgggggctctggctgctgccacagctctgggggctgctgctgacctgggctaagaagaactctttggacagaatgtttaagaacctcctacagcctgatgcttaaccctttccatttcctctcattccattcatgggtggacagcgaccacaaagactcatggggcttccctgggagaactttgcacttgatggaacacctcaattgcaggttttgttttcctcctttacctcatgttgtaataaagctctgatttctgactcacaaannnnnnn

SEQ ID NO: 42723 - DNA, 479 bp, Homo sapiens
ctgtcctgattagaattaattttcataaagagaacaagaatcttgactggttcacccttcaattccttgtgcccgcaacagtgaccggcacatggaaagcattcagggaataaaagcacaatggaaaattaaaacatactcactgcatgcctgccacctatagaaccaaattaaatcactgccaatatgcatggggaaaaccttcccatttttctggaataatgttacaaaggatggaaaataagtgcacatcacctggatggcatttaataaacgctgtgacccagtagtgtacatttcagtgaatattgccaaaggaagtaggccaacatcaggtaatctgagttaactttcctgtacattgtgtattcgtttcctgatgatcaaaactggattaattagtctacaatgtatctttcctgttagatacgaagattatctgctctatccaatttgtgttttcttagctgagaaatcac

SEQ ID NO: 42724 - DNA, 272 bp, Homo sapiens
tccaccatcgtcaaaatgtggcttccaaagtcaccatgcatgtttgcaccatgccacagaaggggaaagggcatgcagaattgtgtgtcttttctgaggtaaaaggcttccactcacattccactagctagaacccagtcactcggccattacaaagaaggcttaaaatgtcgtagaaccatctgtcctggaagaagaggaaattctagccagtctagtcagtctttgctacgctttttcagcaactgtttttgcttaataaactctttaat

SEQ ID NO: 42725 - DNA, 1819 bp, Homo sapiens
cggtgatggagcgctaaccgggggcgcggcggcggcgagggctcggcgggccattggctaccggccgcggcaaaggcagcttggggacccagcgtgcgcggggcccgcgggccgggccggggtgacctgggctgcagccatggaagaacagagggaggccctgaggaagatcatcaaaacactggctgtgaagaatgaagaaattcagagctttatctactccctgaaacagatgctgctgaacgtggaggcgaactcggcgaaggtgcaggaggacctcgaagcagagttccagtccctcttctccctcctggaggagctgaaagaaggcatgcttatgaagataaaacaggaccgtgccagccgcacctacgagctgcagaaccagctggctgcctgcacgcgggccctggagagctccgaggagcttctggagacagccaaccagactctgcaggccatggacagcgaggactttcctcaggctgccaagcaaatcaaagatggagtgaccatggcccctgccttccggctatcattgaaagcgaaggtcagtgacaacatgagtcacctcatggtggacttcgcgcaagagcggcagatgctacaggcactcaagttcctgcctgtgcccagcgcacccgtgatcgacctggctgagtccctggtggcagataactgtgtgaccctggtgtggcgcatgccggatgaggacagcaagattgaccactacgtgctggagtaccggcggaccaacttcgagggcccgccccgcctcaaggaggaccagccctggatggtcatcgagggcatccggcagacagagtacaccctgacaggtctcaagtttgacatgaaatacatgaacttccgtgtgaaggcctgtaacaaggcagttgcaggagagttctctgagccggtgactctggagacaccagcgttcatgttccgcctggatgcgtccacatcccaccagaacctgcgggtggatgatctctccgtggagtgggacgctatgggcgggaaggtgcaggatatcaaggctcgcgagaaagatggcaaggggcggacggcgtctcccatcaactccccagccagaggtactccatctcccaagaggatgccctcaggtcgtgggggacgggaccgcttcaccgctgagtcctacacagttctgggggacacgctgatcgacggcggggagcattactgggaggtgcgctacgagccggacagcaaggcgttcggcgtgggcgtggcctaccgcagcctgggccgcttcgagcaactgggcaagacggccgcctcctggtgcctgcacgtcaacaattggctgcaggtcagcttcacggccaagcacgccaacaaggtcaaggtgctggacgcccccgtgcccgactgcctgggtgtgcactgtgacttccaccaaggcctcctgtccttctacaatgcccgcaccaaacaagtgctgcacactttcaagaccaggttcacacagccgctgctgcctgctttcacggtatggtgtggcagcttccaggtgacgacaggcctgcaggtccccagtgctgtgcgctgcctgcaaaagcgaggcagtgctaccagcagctccaacaccagcctcacctaggcccccaggcacccacccagctggggtgtttttgggggagtcgccgccaagcccaggctgctggagccaggcaccctcctctgtcacttgctgcttggagccttaactccagatgggggggtcaccaagagggagtgggcaccctggcgggccctctccccacctcacctcttaataaaggtcagacac

SEQ ID NO: 42726 - DNA, 1795 bp, Homo sapiens
cggtgatggagcgctaaccgggggcgcggcggcggcgagggctcggcgggccattggctaccggccgcggcaaaggcagcttggggacccagcgtgcgcggggcccgcgggccgggccggggtgacctgggctgcagccatggaagaacagagggaggccctgaggaagatcatcaaaacactggctgtgaagaatgaagaaattcagagctttatctactccctgaaacagatgctgctgaacgtggaggcgaactcggcgaaggtgcaggaggacctcgaagcagagttccagtccctcttctccctcctggaggagctgaaagaaggcatgcttatgaagataaaacaggaccgtgccagccgcacctacgagctgcagaaccagctggctgcctgcacgcgggccctggagagctccgaggagcttctggagacagccaaccagactctgcaggccatggacagcgaggactttcctcaggctgccaagcaaatcaaagatggagtgaccatggcccctgccttccggctatcattgaaagcgaaggtcagtgacaacatgagtcacctcatggtggacttcgcgcaagagcggcagatgctacaggcactcaagttcctgcctgtgcccagcgcacccgtgatcgacctggctgagtccctggtggcagataactgtgtgaccctggtgtggcgcatgccggatgaggacagcaagattgaccactacgtgctggagtaccggcggaccaacttcgagggcccgccccgcctcaaggaggaccagccctggatggtcatcgagggcatccggcagacagagtacaccctgacaggtctcaagtttgacatgaaatacatgaacttccgtgtgaaggcctgtaacaaggcagttgcaggagagttctctgagccggtgactctggagacaccagcgttcatgttccgcctggatgcgtccacatcccaccagaacctgcgggtggatgatctctccgtggagtgggacgctatgggcgggaaggtgcaggatatcaaggctcgcgagaaagatggcaaggggcggacggcgtctcccatcaactccccagccagaggtactccatctcccaagaggatgccctcaggtcgtgggggacgggaccgcttcaccgctgagtcctacacagttctgggggacacgctgatcgacggcggggagcattactgggaggtgcgctacgagccggacagcaaggcgttcggcgtgggcgtggcctaccgcagcctgggccgcttcgagcaactgggcaagacggccgcctcctggtgcctgcacgtcaacaattggctgcaggtcagcttcacggccaagcacgccaacaaggtcaaggtgctggacgcccccgtgcccgactgcctgggcctcctgtccttctacaatgcccgcaccaaacaagtgctgcacactttcaagaccaggttcacacagccgctgctgcctgctttcacggtatggtgtggcagcttccaggtgacgacaggcctgcaggtccccagtgctgtgcgctgcctgcaaaagcgaggcagtgctaccagcagctccaacaccagcctcacctaggcccccaggcacccacccagctggggtgtttttgggggagtcgccgccaagcccaggctgctggagccaggcaccctcctctgtcacttgctgcttggagccttaactccagatgggggggtcaccaagagggagtgggcaccctggcgggccctctccccacctcacctcttaataaaggtcagacac

SEQ ID NO: 42727 - DNA, 1781 bp, Homo sapiens
cggtgatggagcgctaaccgggggcgcggcggcggcgagggctcggcgggccattggctaccggccgcggcaaaggcagcttggggacccagcgtgcgcggggcccgcgggccgggccggggtgacctgggctgcagccatggaagaacagagggaggccctgaggaagatcatcaaaacactggctgtgaagaatgaagaaattcagagctttatctactccctgaaacagatgctgctgaacgtggaggcgaactcggcgaaggtgcaggaggacctcgaagcagagttccagtccctcttctccctcctggaggagctgaaagaaggcatgcttatgaagataaaacaggaccgtgccagccgcacctacgagctgcagaaccagctggctgcctgcacgcgggccctggagagctccgaggagcttctggagacagccaaccagactctgcaggccatggacagcgaggactttcctcaggctgccaagcaaatcaaagatggagtgaccatggcccctgccttccggctatcattgaaagcgaaggtcagtgacaacatgagtcacctcatggtggacttcgcgcaagagcggcagatgctacaggcactcaagttcctgcctgtgcccagcgcacccgtgatcgacctggctgagtccctggtggcagataactgtgtgaccctggtgtggcgcatgccggatgaggacagcaagattgaccactacgtgctggagtaccggcggaccaacttcgagggcccgccccgcctcaaggaggaccagccctggatggtcatcgagggcatccggcagacagagtacaccctgacaggtctcaagtttgacatgaaatacatgaacttccgtgtgaaggcctgtaacaaggcagttgcaggagagttctctgagccggtgactctggagacaccagaacctgcgggtggatgatctctccgtggagtgggacgctatgggcgggaaggtgcaggatatcaaggctcgcgagaaagatggcaaggggcggacggcgtctcccatcaactccccagccagaggtactccatctcccaagaggatgccctcaggtcgtgggggacgggaccgcttcaccgctgagtcctacacagttctgggggacacgctgatcgacggcggggagcattactgggaggtgcgctacgagccggacagcaaggcgttcggcgtgggcgtggcctaccgcagcctgggccgcttcgagcaactgggcaagacggccgcctcctggtgcctgcacgtcaacaattggctgcaggtcagcttcacggccaagcacgccaacaaggtcaaggtgctggacgcccccgtgcccgactgcctgggtgtgcactgtgacttccaccaaggcctcctgtccttctacaatgcccgcaccaaacaagtgctgcacactttcaagaccaggttcacacagccgctgctgcctgctttcacggtatggtgtggcagcttccaggtgacgacaggcctgcaggtccccagtgctgtgcgctgcctgcaaaagcgaggcagtgctaccagcagctccaacaccagcctcacctaggcccccaggcacccacccagctggggtgtttttgggggagtcgccgccaagcccaggctgctggagccaggcaccctcctctgtcacttgctgcttggagccttaactccagatgggggggtcaccaagagggagtgggcaccctggcgggccctctccccacctcacctcttaataaaggtcagacac

SEQ ID NO: 42728 - DNA, 859 bp, Homo sapiens
cggtgatggagcgctaaccgggggcgcggcggcggcgagggctcggcgggccattggctaccggccgcggcaaaggcagcttggggacccagcgtgcgcggggcccgcgggccgggccggggtgacctgggctgcagccatggaagaacagagggaggccctgaggaagatcatcaaaacactggctgtgaagaatgaagaaattcagagctttatctactccctgaaacagatgctgctgaacgtggagtgggaggtgcgctacgagccggacagcaaggcgttcggcgtgggcgtggcctaccgcagcctgggccgcttcgagcaactgggcaagacggccgcctcctggtgcctgcacgtcaacaattggctgcaggtcagcttcacggccaagcacgccaacaaggtcaaggtgctggacgcccccgtgcccgactgcctgggtgtgcactgtgacttccaccaaggcctcctgtccttctacaatgcccgcaccaaacaagtgctgcacactttcaagaccaggttcacacagccgctgctgcctgctttcacggtatggtgtggcagcttccaggtgacgacaggcctgcaggtccccagtgctgtgcgctgcctgcaaaagcgaggcagtgctaccagcagctccaacaccagcctcacctaggcccccaggcacccacccagctggggtgtttttgggggagtcgccgccaagcccaggctgctggagccaggcaccctcctctgtcacttgctgcttggagccttaactccagatgggggggtcaccaagagggagtgggcaccctggcgggccctctccccacctcacctcttaataaaggtcagacac

SEQ ID NO: 42729 - DNA, 1728 bp, Homo sapiens
cggtgatggagcgctaaccgggggcgcggcggcggcgagggctcggcgggccattggctaccggccgcggcaaaggcagcttggggacccagcgtgcgcggggcccgcgggccgggccggggtgacctgggctgcagccatggaagaacagagggaggccctgaggaagatcatcaaaacactggctgtgaagaatgaagaaattcagagctttatctactccctgaaacagatgctgctgaacgtggaggcgaactcggcgaaggtgcaggaggacctcgaagcagagttccagtccctcttctccctcctggaggagctgaaagaaggcatgcttatgaagataaaacaggaccgtgccagccgcacctacgagctgcagaaccagctggctgcctgcacgcgggccctggagagctccgaggagcttctggagacagccaaccagactctgcaggccatggacagcgaggactttcctcaggctgccaagcaaatcaaagatggagtgaccatggcccctgccttccggctatcattgaaagcgaaggtcagtgacaacatgagtcacctcatggtggacttcgcgcaagagcggcagatgctacaggcactcaagttcctgcctgtgcccagcgcacccgtgatcgacctggctgagtccctggtggcagataactgtgtgaccctggtgtggcgcatgccggatgaggacagcaagattgaccactacgtgctggagtaccggcggaccaacttcgagggcccgccccgcctcaaggaggaccagccctggatggtcatcgagggcatccggcagacagagtacaccctgacaggtctcaagtttgacatgaaatacatgaacttccgtgtgaaggcctgtaacaaggcagttgcaggagagttctctgagccggtgactctggagacaccagcgttcatgttccgcctggatgcgtccacatcccaccagaacctgcgggtggatgatctctccgtggagtgggacgctatgggcgggaaggtgcaggatatcaaggctcgcgagaaagatggcaaggggcggacggcgtctcccatcaactccccagccagaggtactccatctcccaagaggatgccctcaggtcgtgggggacgggaccgcttcaccgctgagtcctacacagttctgggggacacgctgatcgacggcggggagcattactgggaggtgcgctacgagccggacagcaaggcgttcggcgtgggcgtggcctaccgcagcctgggccgcttcgagcaactgggcaagacggccgcctcctggtgcctgcacgtcaacaattggctgcaggcctcctgtccttctacaatgcccgcaccaaacaagtgctgcacactttcaagaccaggttcacacagccgctgctgcctgctttcacggtatggtgtggcagcttccaggtgacgacaggcctgcaggtccccagtgctgtgcgctgcctgcaaaagcgaggcagtgctaccagcagctccaacaccagcctcacctaggcccccaggcacccacccagctggggtgtttttgggggagtcgccgccaagcccaggctgctggagccaggcaccctcctctgtcacttgctgcttggagccttaactccagatgggggggtcaccaagagggagtgggcaccctggcgggccctctccccacctcacctcttaataaaggtcagacac

SEQ ID NO: 42730 - DNA, 1531 bp, Homo sapiens
gagaaaccctgtctctactaaaaatataaaaaattagccgggccatggtggctcacgactgtaatcccagctactcaggaggctgaggcaggagaatcgcttgaaccagggagtcggaggttgcagtgagccaagatcgtgccactgcactccagcctgggtgacaagagcaagactctgtctctaaaaaaaaaaaagtctccaccctgccaaacatggaacccctttgtggccatgcccccaaaattgtccaacatgtggttgggcagccctgcagcaagccccctgccccctgaaccaggcacagaatcccgaccccctctcctttccgtcttggtcagtgcccagcgcacccgtgatcgacctggctgagtccctggtggcagataactgtgtgaccctggtgtggcgcatgccggatgaggacagcaagattgaccactacgtgctggagtaccggcggaccaacttcgagggcccgccccgcctcaaggaggaccagccctggatggtcatcgagggcatccggcagacagagtacaccctgacaggtctcaagtttgacatgaaatacatgaacttccgtgtgaaggcctgtaacaaggcagttgcaggagagttctctgagccggtgactctggagacaccagcgttcatgttccgcctggatgcgtccacatcccaccagaacctgcgggtggatgatctctccgtggagtgggacgctatgggcgggaaggtgcaggatatcaaggctcgcgagaaagatggcaaggggcggacggcgtctcccatcaactccccagccagaggtactccatctcccaagaggatgccctcaggtcgtgggggacgggaccgcttcaccgctgagtcctacacagttctgggggacacgctgatcgacggcggggagcattactgggaggtgcgctacgagccggacagcaaggcgttcggcgtgggcgtggcctaccgcagcctgggccgcttcgagcaactgggcaagacggccgcctcctggtgcctgcacgtcaacaattggctgcaggtcagcttcacggccaagcacgccaacaaggtcaaggtgctggacgcccccgtgcccgactgcctgggtgtgcactgtgacttccaccaaggcctcctgtccttctacaatgcccgcaccaaacaagtgctgcacactttcaagaccaggttcacacagccgctgctgcctgctttcacggtatggtgtggcagcttccaggtgacgacaggcctgcaggtccccagtgctgtgcgctgcctgcaaaagcgaggcagtgctaccagcagctccaacaccagcctcacctaggcccccaggcacccacccagctggggtgtttttgggggagtcgccgccaagcccaggctgctggagccaggcaccctcctctgtcacttgctgcttggagccttaactccagatgggggggtcaccaagagggagtgggcaccctggcgggccctctccccacctcacctcttaataaaggtcagacac

SEQ ID NO: 42731 - DNA, 286 bp, Homo sapiens
gtgaagaatgaagaaattcagagctttatctactccctgaaacagatgctgctgaacgtggagaggcggtggggcagtcctggggaggtaaggggaggggaggaagctggagggtgcagccttaggaactggcccattgctgttgatgcctgtgggaggtctcaggttccctctctgaacacgggctttggccgattctggctgttccgacccaggcgaactcggcgaaggtgcaggaggacctcgaagcagagttccagtccctcttctccctcctggaggagct

SEQ ID NO: 42732 - DNA, 1488 bp, Homo sapiens
gacagaactcagagctgcaagagaaagaagactgaattcagtctctcttgcagaaaaattgttttccgtcaagttgataataatgatcacactgagaatgaatgactcaagatgaatatccaaagatatatcaaaacctggtcagcagtcgtggggaaaggaagaaagcctgagttgagtttatgaaagttttccactaaagtcagcaacagcttaaattcaaaccaggcacaagacgcttgaatctccatatgagttgttcatcaaagggctgaaagaaaagaaatctgagcccgagcacggtctggcctaaaagctttcaagtgactcctttctgttgcaaatgaaagaagtcctgctactctaaagaataactaaaccagactggagtcactgaaactgatggaagaacatctcaggcatgagtgccatggtgacgtcatcagctccgttcacaaccactcaccatgaggccattgctcctgtggaggacactggctttaggactcatgaagtagtacctcaggaaggtgtctctgtaagtgttccttccaccagctccaagacacaatgagatggagagaactggaacaattccctatgattgcagctggatattttcacatgaactatctagtaatgaaggcaatggcatgtggtgtggcaaagactggccccagattacatttccagtccttttgtactgaggaggggctttgggaccaagacagtaggagtgagggtacaggttccacattctatttctctcttagttttctgtggttatcttggtgactgcatggtaaagatggaggtgacaaaagatggaaggagcctggatccctgaatgacttcatggtgcagagccttacactacccccaactcatactaaaacaggggtgggaggaacaatagaccattattctgttaaggtgctgaaattgtagagctgttaatttgaacagttagagtttcttatactgatacagtatccttaccctggattgttgaaataattagtccaaatagtttctttgcctaaaactgtggacagagcctaagcaatattgaatccaagacaaggtatatttatcaaatgctactcactatacaatacagatgaatgtggcacttacttcccgtgttgttacccagcctgcttctagtattctttacacaaaataacattcatgagcaacctgggcacaagaggtctctgtcaaaataagtctttgatttctctccagataaactcgtgtgtgtgtgtgtgtgtgtgtgtgtgtgtgtgcatgtccattttatatttggttttagttacaattcaaggagtctttccttttagacaatggtccatacattcatggaaggcagaactaatcagagaacctggttcaaaagttttaggggattctttgagaaatgtttcccagaatttaaacttgggacttgactataagtattagtgtacaaaatcacagaggatatca

SEQ ID NO: 42733 - DNA, 878 bp, Homo sapiens
  misc_feature (23)..(23): n is a, c, g, or t
  misc_feature (31)..(31): n is a, c, g, or t
  misc_feature (34)..(34): n is a, c, g, or t
  misc_feature (39)..(39): n is a, c, g, or t
  misc_feature (42)..(43): n is a, c, g, or t
  misc_feature (826)..(826): n is a, c, g, or t
cgacttaagtgcgagggactctnttaatacnccnccgcnacnnttgcaaatgaaagaagtcctgctactctaaagaataactaaaccagactggagtcactgaaactgatggaagaacatctcaggcatgagtgccatggtgacgtcatcagctccgttcacaaccactcaccatgaggccattgctcctgtggaggacactggctttaggactcatgaagtagtacctcaggaaggtgtctctgtaagtgttccttccaccagctccaagacacaatgagatggagagaactggaacaattccctatgattgcagctggatattttcacatgaactatctagtaatgaaggcaatggcatgtggtgtggcaaagactggccccagattacatttccagtccttttgtactgaggaggggctttgggaccaagacagtaggagtgagggtacaggttccacattctatttctctcttagttttctgtggttatcttggtgactgcatggtaaagatggaggtgacaaaagatggaaggagcctggatccctgaatgacttcatggtgcagagccttacactacccccaactcatactaaaacaggggtgggaggaacaatagaccattattctgttaaggtgctgaaattgtagagctgttaatttgaacagttagagtttcttatactgatacagtatccttaccctggattgttgaaataattagtccaaatagtttctttgcctaaaactgtggacagagcctaagcaatattgaatccaagacaaggtatatttatcaaatgctactcactatacaataaantccgatgcggccgatatatggcggcaaagagattgtgtataataaaaaaata

SEQ ID NO: 42734 - DNA, 1194 bp, Homo sapiens
  misc_feature (23)..(23): n is a, c, g, or t
  misc_feature (31)..(31): n is a, c, g, or t
  misc_feature (34)..(34): n is a, c, g, or t
  misc_feature (39)..(39): n is a, c, g, or t
  misc_feature (42)..(43): n is a, c, g, or t
cgacttaagtgcgagggactctnttaatacnccnccgcnacnnttgcaaatgaaagaagtcctgctactctaaagaataactaaaccagactggagtcactgaaactgatggaagaacatctcaggcatgagtgccatggtgacgtcatcagctccgttcacaaccactcaccatgaggccattgctcctgtggaggacactggctttaggactcatgaagtagtacctcaggaaggtgtctctgtaagtgttccttccaccagctccaagacacaatgagatggagagaactggaacaattccctatgattgcagctggatattttcacatgaactatctagtaatgaaggcaatggcatgtggtgtggcaaagactggccccagattacatttccagtccttttgtactgaggaggggctttgggaccaagacagtaggagtgagggtacaggttccacattctatttctctcttagttttctgtggttatcttggtgactgcatggtaaagatggaggtgacaaaagatggaaggagcctggatccctgaatgacttcatggtgcagagccttacactacccccaactcatactaaaacaggggtgggaggaacaatagaccattattctgttaaggtgctgaaattgtagagctgttaatttgaacagttagagtttcttatactgatacagtatccttaccctggattgttgaaataattagtccaaatagtttctttgcctaaaactgtggacagagcctaagcaatattgaatccaagacaaggtatatttatcaaatgctactcactatacaatacagatgaatgtggcacttacttcccgtgttgttacccagcctgcttctagtattctttacacaaaataacattcatgagcaacctgggcacaagaggtctctgtcaaaataagtctttgatttctctccagataaactcgtgtgtgtgtgtgtgtgtgtgtgtgtgtgtgtgcatgtccattttatatttggttttagttacaattcaaggagtctttccttttagacaatggtccatacattcatggaaggcagaactaatcagagaacctggttcaaaagttttaggggattctttgagaaatgtttcccagaatttaaacttgggacttgactataagtattagtgtacaaaatcacagaggatatca

SEQ ID NO: 42735 - DNA, 438 bp, Homo sapiens
aggctgggcgcggtgtcacgcctgtaatcccagcactttgggaggccagaggcaggcggatcacaaggtcaggagatcgagaccatcctggctaaaacggtgaaaccccgtctctactaaaaatacaaaaaaattagccgggcatggtggcgggcacctgtagtcccagctactcgggaggctgagacaggagaatggcttgaacccgggaggcagaggttgcagtgaaccgagattgtgccattgcactccagcctggttgacaagagcaagacttcatcacaaaaaaaaaaaaaaaagaaaaaaacccaaaaacaagatagcccatggaacagaatagagaggaagagacaggcccccacatatactgtcctctgatttattactaaagtcctactgcaatttagtgggaggaggaagatcttttaaataaatggt

SEQ ID NO: 42736 - DNA, 120 bp, Homo sapiens
ctatctaccttcttccactgtaggtgtcctggttctcaataggcatcagcacatttacttattagctcaatcctacaatatacctaaaacaatttcagaattgctttgctggtacgtcta

SEQ ID NO: 42737 - DNA, 790 bp, Homo sapiens
tggacttaagcaatctgcctgcttcagccccccaaagggccgggattacaggtgtgagccactgctcccagcctcctaagctctttacatgttaaacagcagcactagttgagtacctcttacccaaaatgctttggaccatattattgcggatttctgactttttcagattttggaatgtttgcaatatacttaccagttaaaccttccaattctgaaaatccaaaatgctccaatgagcatttcctttgggtgtctttttggcactcagaaaatttcagatttggggttttcagatttaggatgctcaatcatgatgtagtaatcatgacagtgagacactttaaaaatgtcattgaaaaacaaaaacaaaaataagaaaaaagaaaaaaatatataattgaagatttaaattacatgcttacctgagtttctttcataagtctgctgtatacaacctaggaaatgcaaaaactaaaataaaaattacctataactcatttacttagagatagactcaatattttcatttatttcctattttgttttactgtgcagatacattttaaacttttatgaattttaagttgaaaaactaatacatgaacatattcttattgcaaaaattcaaaccttatacgtaaagctgaaggcccccaatgacttccattcctagactcagtcccttttgcagagattctgtgaggagtttggtatatatagtattttcaagatctctctttgtagaaatagggtattgttttatggtgttaaaagaaatacttatgta

SEQ ID NO: 42738 - DNA, 476 bp, Homo sapiens
tgtgtatggtgcgaaaatggggttggagagactcattaatgggtttgctccatagtgcccttgtgtggggtatacactttttttttctttgaggcacagtgcagtggcgcaatcccagctcactgcaacctccgcctcctgggctcaagcgattctcctgcctcagcctcccaagtagctgggactacaggtgcccgccaccacactctgctaattttttgtagtttgagtagagatggggtttcaccatgttggccaggctggtctcaaactcctgacctcaattgatccgcccacctcggcctcccaaagtgctgggattacaggtgtgagcctctgtgcccggccgggtgtacacttttatatgacacataaggctgggtctaggcagaattataaatagattattgccttttgccttttttttccctctgttttcccccatgtctttcttcattgtccccatagaccctaat

SEQ ID NO: 42739 - DNA, 474 bp, Homo sapiens
aaacctcgtctctactaaaaataccaaaaattagccaggcgaggtggcagatgcctgtaatcccagttactttggaggctgaggcaggagaattgcttgaatccgggaggcggaggttccggtgagccaagatcatgccactgcactctagcctgggtgacagagtgagactctgtctcaaaaaaaaaaaaaaaatcttttggagatagaattactttgatagggactttcatcatgtaaaaacaaacatcaacaaaccctgacgaatatctgctgaaatctaaagactgtctaccgttagtagtgactgatgtttccacagactttcacaaacaagagacagcaataccaacatgattatgagctatgagaaagtgtccattaatacctgtcctaagtagatcaaaaatgaaaatagttctataccacatattttgctgtcgtaatccaacattatttgttaagagtaccaca

SEQ ID NO: 42740 - DNA, 965 bp, Homo sapiens
catttcagcctgcaggtgccccgggctttagtcctggatctgaggcttgggcccggcattcatccccaccaccaccaccaccaaaagcagttcttagtgaaaattgtaggcgagcctgttaagcgttgtagaagaggaagccttccaggagaggtgccatgcggtgccctttagtggcagcacggcaaggttctggaggcgggggaagccaccaagagacagtgacagggtcagcgggggcagacgccacatggcaaagagcagagaagcccgggaggtgtgaggagtggccgacctggcctcagcgcatctgggcactgggcgcaagatgaagcttcagggggcagatgtgactgggctccacagcagggagggggaggggaagagagaacacatcacagaaactgcacaaaataagcagcccatgaaaaacaacctagaaaaagaggcgaaaaatgaacagcaaaccggaccctgcttcctccagcaggaggctcccacccactgctggtcacaacccgctgtctggacctgccgcttacgggatgaggtgggcctgcagggaacgcggggcttctggttgctgttagtggtggcttttcttctcactttgtgtagcccccagaaccgtgaggggcatccgagtgggtgagcacaggcgtccgctgaagagccgcctggaccagggcggtcagcgctgtggggaggcctttgcccgaccgcgccactgtttctcaccaacattcactgtgtcctgcggggcttgaggcttagactgacgggagctattccgggtgtttaattgaaggtctagcacttgaccagcccctggaggagctgacaaccacctaagacacatttggacttggtgtccaccaagagtgactttgtgcaaagaaatggctgagcactagaataactaaatgcaaataaaatgcgtctttcagtgcagttcagacaggtca

SEQ ID NO: 42741 - DNA, 409 bp, Homo sapiens
gtatctcctcttctccgagtacctgtccctcaagatattctctgccccagaggtacattctgcccccactttctgtctcttaaaaaaacaactttgcccatttaaaaaagaattttgacttaggcagctttaattctctgcactgagtgttcttatctgtggatggaggtataagatttcaagagtaataccccctcccaatgtttcagtaataatctaaattcacattaagccttaggctggagaacatttgagctattcgctttagctactagctctgaaaacttcaaagcataacattcccaagtttatctaaaacttgaatcttaaaaataatgataattatctgttatgcttcaaagcataacattcccaagtttattaaaaacttgaatcttaaaaatactga

SEQ ID NO: 42742 - DNA, 293 bp, Homo sapiens
atagatttaaattttatagaaaccttttcccttatctagtgcaagaggtagctaagtgcttattttctcaaagtactgtgttataaaaagtattcctagtgtagtcaaagcttctctttagactgataaaacttagagcacctgcatttacttccaacaaagcagaattaaagaaaatgagacttggccgggtacgtttgtaatcccagcactttgggaggccgaggcaggtggatcatgaggttaggagatcaagaccattctggctaacatggtgaaaccctgtctctacc

SEQ ID NO: 42743 - DNA, 578 bp, Homo sapiens
catcctaagcccgcgtgtatcctaccccctccttctgcagatccaatgtccgtctggcaattgccccattccctctcgctggagagatcccttccgcctcgccacaggcgtcccacgctgcccggagtcgtgcgccccgggacgggtagttttgggttcctcgacgcttggccaggtttaggaaagacccgctgtcttccttgctgcccccacctaggagactcggcgccttgcgctccgtcctttttaatggtgtcgcggcttgtccctctggcttgctccctcctagtccctaccccacacggctcccttcgccagctccatgacaatcccactcgtgctgaagaccttgggcaaagaagtaaccatcggtcttcccctcccttcccattcctccggcggcaggactagggggaaaggtgcccgggatacaagcccctcacgcagacccactgatgcggccgtggttctgccattggcccctctccgaatggtgaggttctcctgctaaccctggccccatggcataactagtataaccccagtgagaggaacccagagttccagtcctcccctgc

SEQ ID NO: 42744 - DNA, 148 bp, Homo sapiens
aaaattaaggaaagccatatgaaatgttcaaaatgatcaaaaataattggataggaaaaggaaaaggataaaaaaaggatgggcctggtgcggtgcctcatgcctataatcccagcactttaggaggccaaggcgggaggatcacctg

SEQ ID NO: 42745 - DNA, 301 bp, Homo sapiens
gacaagaagtaagaaacaatagggggccttatctacaaactctctggtcttctatttgcagattttgataatcactctgttcctaaatctttctgctttgcatgtaacttcccataactgtcaggggactaggcatttctttgcatagtaaatttattctgtatgttcagtgatcttgttttgatttttctttatttctgtcctttttcctcattgcctattcgccaaattcccaccccaccctgtgctcactctccaccctctgtattccccatcttcatctgccttcagaccatgagag

SEQ ID NO: 42746 - DNA, 316 bp, Homo sapiens
  misc_feature (269)..(269): n is a, c, g, or t
  misc_feature (277)..(277): n is a, c, g, or t
  misc_feature (279)..(279): n is a, c, g, or t
tgcattgagagtgcacacgttgctatatggctctgagcctgctgagtcagggccaaccctctgatcaccctcctgtagctccaagaaggagggcagttattcaccctccacgccgttccttcctgggttcgggggcagctccccggaggcttcaggtacccacctttcctgcaggtgtccaggctcctctgcctaccagtggggtggcgaccatcaccaaggtgtgaggggcggggggacctgcctgggggctgatcaggcaggtccanagcctctntnaatgacttcaccaataaaatttctaacttcctgttcc

SEQ ID NO: 42747 - DNA, 389 bp, Homo sapiens
tactcaggaaggatttgggacgatcacttgaggctaagagtttgagaccagccagggcaacatagcaagactccatctctacaaaaaataaaataagtagctggacacgatggcacacaccttaagtcccagctacttgggagtctgaggcagaaggatcacttgaacccaggagttggaggctgcagtgagctatgatcacgccattgcgatcataggctgggtgacagagcaagagaccctgtctcttaaaaaaagaaagaaagaaaagaaaaatgatactcaacccttgtccattgggcctgactctcacctcccacctctactttgtgaggaagggacagggtgttaatatgtcttcattggagggtactggggcccagagaggg

SEQ ID NO: 42748 - DNA, 363 bp, Homo sapiens
cgggttccctggactgccttcttattttgtctctcttagtcagcttccctctcaggtgaaatctcacctctactcccagtgcctaagatctggcttgctgagaagccagatgatggcacccagaagttcaggagggcagctccccaaatttctccctctttctcccactctgtgtactgcttcgtggcgtgatttttttttttttttttgagacaggatcgccccctgtcacccaggctggagtgcagtagcacgatcatggctcactgcagccttgacttcccaggctcaaacaatcctcctgcctcagcctcctggagagctgggactacaggtgtgtgccaccacatccagctaattttt

SEQ ID NO: 42749 - DNA, 548 bp, Homo sapiens
tttagactcttcccttttttggagggaggaaataagtaaatctatagttttgtggggttttttcccccttctatttaggatgtttccttagggtagacagccagaaattagaacttctgggtcaaagaacatttaaaaaaatttttatgcatgttaaaatgttttattttctaaaaatattctatcattttgcattttcacaagtgttttgtgagctgtacaaatgttcttttcaccacatttttaaaaagtcacacgaaaggctgggcgtggtggctcacgcctgtaatcccagcactttgggaggccaaggcgggctgatcacgaggtctggagttcaggaccagcctgaccaacatggtgaaaccccgtctctacaagtacaaaaattggttggatgtgattgtgcgcatctgtggtcccagctacttggggggctgagacgggagaattgcttgaacctgggaggcagagcttgtggtgggccgagatcgcgccactgcactccagcctgggcgacagagtttggctctgtttcaaaaaaaaca

SEQ ID NO: 42750 - DNA, 526 bp, Homo sapiens
tttagactcttcccttttttggagggaggaaataagtaaatctatagttttgtggggttttttcccccttctatttaggatgtttccttagggtagacagccagaaattagaacttctgggtcaaagaacatttaaaaaaatttttatgcatgttaaaatgttttattttctaaaaatattctatcattttgcattttcacaagtgttttgtgagctgtacaaatgttcttttcaccacatttttaaaaagcccagcctaaaatatatttaaaattaaaacatagattgatacacatctaaactgggaagaggctagaagcggtggctcactcctgtggtcccagctacttgggaggctgaggtgggaggattgcttgagcctggaagctggagcctgcagtgaactatcattgtgccactgtactccagcctaggcaacaaaatgagatcctgtctaaaaataaatacatatgtgtgtgtaaggttgcagctgggcacaatgctttatgcgtgtaatcctagcac

SEQ ID NO: 42751 - DNA, 271 bp, Homo sapiens
ggctgctggattggagggccttggtccactaatgcggtttgtcgtggaaactaggctccactgacccagcccacagctcccctggctgcagtgcttcgtaaatacttcagcaaaaatcaaagaggaatgaggctgctggtcctgctcctgatgtgtccgtatctggctaggggagacatgcacatactcagtgacttaaggctcttgatccatataacttcaggcaggcactaagggatctgatataatctgaagtaatgaacaatgcccc

SEQ ID NO: 42752 - DNA, 2576 bp, Homo sapiens
ccccaacacacgaagactgacggtggcgggtgctgcacatctcagccggagctctgaaggcatttagctgagcgctggcctgcacctggagagagtgagagacaccagcctccactgccaggaaggcccagggtcctcagggaccaagacgcaggagacggccgctgccagggtcctcgggacttctgtgtggccttcgctaccggagccctgaggcgccatccccatgtgcccttcgggctggtccaggaggaggccctgcggcggccacagactggggggacaaagccccaggaactcagaaccttgtgggttttggaagaggagccgcgcagcaaggtcccgacgcctgcagggagctgaacggggagccgcgcgaggaagggagtgcagcagacccagtacgcaaatgctgaccctacaaaacgcaccgcgggttctcgagccgtggggatcccggcggtgctctccagagaccgcagctgcaggagctgggcggtccccggcaggtgccacgagggtgcgatctcggccgagaaccaccaggcgtccacgtccacggagggactcattctccgtgcccatctcacagggagcaaaggaggcggagggagccccggactcactgggttctgacccagacccttctcttctgcagggtggagtcctcctcccagagaagcccagacgttcgtttgggagacccagggacactcggggccatcacctgcccctcactggggctcccaggggagacttcacgcagtgcccagtgtcctcccgctgggatcctcctgcccccgaggggcgcccgtgtcccccagcaccccaaggaagagaatgagctgtctttggcgggtgctgtgctattttctgtccttatttcacctagaatggccatttccagaactcaatccctgcaaatgaatttcttctaacgccccttttcagtatcaaggagcaggaagcaatatcctttaaaaaccgatcggccatacatttctgctcattaaataaatatttttactttggacccgattgatttttcagacacacggaacaatgggactgactcacctgtgtgcagctgggagcctccttcctccccggggacctttgaagtcacagtgaggcggccacacctggtgcacaggtggagcccggccgataggcacctgaattctcaccaacttcacagggtgttcagaaacgggctcgcactcggccgacacgcccccttcctggatccctggggtgggatgcccagtgtggctgcaccggagaaagggtgaaaaccagcggagagagggccgggaaaggctcccccacaggcatgtcaaggagagaacctgcagttccaccacaccctccagccccctcccaggcaatctccccactccagcccctgacccctgaccaccttgctccttggtatccagagccaggccggaactcagggagggccgcgccgttcacttctgtaagggagcctccgttcagtcagtcattcaacaaacatgaatccagagccgcatgcactgctggtcccgtcccagctgctggtcacggagcggagaaagcttgaaggccgtggtgtctactgagaggcagatgacaaaccaggagcacgagtcacagcacacactggcgcagctgcagggagctgggcagagccgggcctggcacatggggcaggaggctgtggccctaacgccatggtgggcgccacagaccttgtcagaaggggtctgagcagagacattgatttggtttcattatcatatagaacagaatagaaaactcagacatgaagctgcacacatacacccgtctggtctttgacaagaccaacgaaaacaagccgcggggaaaggactccctgtccgatagatggtgctgggataagcagctcagtcacaggcagaagaaggaaactggactcttacccttccgcatagacgaaaatcaactctagatggattaaagactcaaatgcaagacgtcaaactataaacatcctggaagacaacgtcttcttgactttggcgttggcaaagaacgctggctaagtcctcaaaagcaattgcaacaaaaacaaaaatagacaagtgatacctaattaaactgaagagcttctgcacagcagaagaaactgccaacggaggaaacagacaccctacagaatgggagaaaatgtctgcaaactatgcatctgacaaaggcctaatatccagcatctataggacgcttacacaaatcaacaagcaaaaaacaaccccattaaaaaatgggcggccgggcgcggtggctcatgcctgtaatccgagcacttcgggaagctgaggcgggcggatcacaaggtcaggagatcgagaccatcctggctaacacggtgaaactccgtctctactaaaaaatattaaaaaattagctgggcgtggtggtggccgcctgtagtcccagctactcgggaggctgaggcaggagaatggcgtgaaccagggaggaggagcttgcagtgagccgagattgcgccactgcactccagcgtgggctacagagtgaaactctgtctc

SEQ ID NO: 42753 - DNA, 383 bp, Homo sapiens
ccaagttaaaaaattgttatatgctgggcacagtggcacaaacctgtagtcccagttacttgggaggctgaggcatgaggattgctcgagcccaggagtttgaggtcggcctgggcaacatagtgagacctcatctttttttaaaaaataattgttatattaatgtttaacaataaatttatgagacagtacagtagactggttaatcgtggaagattgggtgtcaagccaacctgtttactagctgtattactttggaaggattccttaatctctgagccttagtttgtttatctgtaaaaggaatgcaatagcatttaaaaggtgtttaacattgttagtgaatgaatgaatgtcatatataaagtactatagacagttct

SEQ ID NO: 42754 - DNA, 306 bp, Homo sapiens
agccccaggattgggttagatgctcctgggctgtgctcctgcagcatcctgaatgtacactcctggtatgaattatcactccacattataattgcctaattgctggcttgcgctcccctctatgctgtaagcccttggacagcaatgttgtgtatttttcttatatcaacagtactggctagtggctcacagtaatcccagtactttgggatgccgaagcaggaagattgcttaagcccaggagttcgagaccagcctgggcaacaaagtgagacgtcactcatctctaccaaaaatgaaaaaaaa

SEQ ID NO: 42755 - DNA, 595 bp, Homo sapiens
atttggtgagaaacccaactcagtaacctaatacctgcctttgtgtgtgtgtacaaaaataaatgatgcaaaattgtaagtttcaaagacttgaataactttattggctaatattaatttagcaatgttaaccatcagattaattttaggcttggggcagttttagtgattgggggagaacaagagatggacttttgagttttaggtatctgtatgtatgtactttcttgacctctgttatatttctccagataagtactgtttaaataacatataaagatgtcagatgagcaatagatagataagaatggtgcaaaaaaaaatcaaaatatgaagctactgagagcaatttctgagtctcagcatactgagttttggccccaaagtgcctggggaaaatggacatatcatctaaaaagctgtaaataccagccaacaacaggaagtcttagactcctgtcccacacttctgagctgcagggtgtgggggaagccccatgcctttatctcactgtctctatctctagcaaggaaacctgtttcctgactctgcagaatttcgctttccccctttttccttaaaagcagagttaca

SEQ ID NO: 42756 - DNA, 1199 bp, Homo sapiens
cagaaataagtgagtgtctcttagcagcagaaatgcagctgtgagctgctggggagtgtagggatggcaggaacaccaaacacgtgtccaacctcgaggacaacaggcagatggtggggacaaagcaggagacctgcctttgagcctctgctctgctagctattagtggtgaccttgggcaagccacttcatctctctcagcttcttcctctgtaaaatggagagcataaccctacttcttttaggacttgagcatgcaagggttggaaataatgtagatagagcttctggaagggctcagcttggaatgtggaagcccctgttggtgcaaagagctgggcccaaaggaaagaaggaaagggctcgtgagcacagacgcaggggtggagccagagaatgggtctggaagaggaagcatggagctgggtcttgacactgagctcttgcgttcctcgcctccctttctcttggcatttcctcaccacccttccaacatctttacagttggggcttactctttgccaccattggtcccccatccaggccagccttccttggctcagttccaggctcatcaaaagccttattcctccaggatggcccttggcagctggttgggagggaaaggatctcatggggtttccatacacactgaggggtgagtgactcactgcagctgggagtccaaggacaatcctactagctgctgacaaaacctggcttctgcctctgaagcgaaccaagccctgacggtggaatttccagcagtgggtgaaaaaccttcctagtcttcatcagttcacatatatcaaggacactccaaagatggaggtcaaatgaaacccgaagtcacagaaaaaggagagtaagaaaataaaagagataaataataattgtctccaaggtagacaaaagaaagccccaccaggcaccttctgtgtgcaggaggagatggcactctcgctgagtctcccagaaggaactgtggccctttaaggaagctggtacatacaggagcctgaaattactgagcctgaaataagtcttacgtaaatgccaatttcttacggggcttttttgtatgtctttctttctttatctctctctcttttttttaaaggtatgatatataatgggttccttttgcagaatgcagcctctacttgaactctctcttaattaaagctcattgtggatta

SEQ ID NO: 42757 - DNA, 266 bp, Homo sapiens
tgtcttaataaaagccattctgacaggtgggcggtgatacctcattgtggttttgatttgcagttccttgatgattagtgatattgaacatcttttcatttacctgctggccatttgtatgtcttcctttgagaaatgtctattcctgaatagcttttgcccattttttaacagagtcttttaaaatattgagttgttttaggtcctcatgtattttagatattccttatcagatgtatggtttgcaaatacaatatttcctctca

SEQ ID NO: 42758 - DNA, 523 bp, Homo sapiens
gtgttcaactgacaagtctataatgcagatatcctgaaatctgaaacacttctggtcccaagcattttagttaagagatagtcaacctgtattctatttaatcttaatttacaaacaattctaacaaacatggctgtttgatttccaactccatagcagactcaggaaggaagctgaatgaagagataaaagtgtgtccattggcagaggactaaaggagatttgagcacctgtcagatgggtactgtaccagaagaaaggagcactttgaaagcgtagcttatggggtaggaaagtattttatttaggaaaaaaaacccttcatttattccaaatgataaaatgtaaaatgggtttccataaagtgccagatacatgagatgttgttgattttataaatgatgatcatgtatttacagccttttacagttttttatatccattgacttatttgtgtctttgtctttaaaatctgccattgcaaatagctgttttaataaaccaattttgccttggcccctga

SEQ ID NO: 42759 - DNA, 449 bp, Homo sapiens
atccagcctgaggatagactgccccggttgaagtgacggattaagaaggcccctaaatggtgccctttgagtggcccaaagcacataaatcagctgttgagaagttcaatcagaaaccaacttttagcaaacatacttctcaaaacaaataagcattttgaccttcatgtagaagctctaaatacagtaaattcaagttacaaccctgtggacatgtagactagtgattaaataaagatcaggttactgatggccctgaagaactcatttttgggggttatatctgttgacacttaactatgttatcaattaaaactgagaatttaaggatacatatatttttaattttatttttaaataacagtaagccccaaacatcttaccgtatgacatattggaaaaacaactgtatttccaaaaataaaaaacataatgaaaagaaaaaaaaa

SEQ ID NO: 42760 - DNA, 546 bp, Homo sapiens
ctaccactatctgtttaaatcatcgtttatttatattccttaaatattcatacctttcacataagtgagatacattatttttaaaaacgcagttttccttcttgattttttcatattgtcccattattctgagaagagtttattttatgagaattaagttattatcttacagaataaatctgattactgactagatacaagataaccacatatttttcctagaataatttaattccaattttacttatttgtaccttatatgacttattttcaggttagaaaaatgtggtcctacagttttgttttgaagtttgcctgggccatgtgaagccaccattatcatttacgtcaaaaatgaaggttatctgttgcccaagagaaaaatacagcattctcaatttaaaacactaaaatagtgagggtttcataagctgtttcagtgatttctgaccttgggttggaaagctctcatgtctcagttacctcagtgggtatagtgacattgtcccagtctgcattaccaaattgtttcaaatcactttaatt

SEQ ID NO: 42761 - DNA, 765 bp, Homo sapiens
gtctgccttttctctccttaattgatcacacattttttcaaaataatatattcctggtgattaataatgactgactatacattgaagatgtttttctgagccaaggtttttctcaacctccacactgttgacatttgggccaggtaattctttgtagagaggagatgtggggggctattgtgtttatacagaatgttaagcaatattcctggccttggcctacaagatgctagtagcactttctgtttctaacccccatagcctctattgtgacagacacaaatgttttcagacattggcagatgtcacctggggaaaaaaaattgccccctgttgaaaaccattgctcatgggtcatgtatagcttatgcagactcttggtctccgttaatatccttcatcaccctttttcactgtctctaatagataagaaatttggctaatcagggataaatggaaataaaggaggggaaacatatgcaataacaatataacaatgtagatatgaaaattctgtgacagcaatgtagctatactatttttatcacatagtttttttcttttgggaaaacctgatagagaccagtaacaaaacggtgaatttaaaagaatcagttcatccattattttaagatagaattaatatttgatcacattttcaaccaagaaggatttctgtgccattcagatatgaatacaaataacagtatatgaagaagggaaacatttattgtttatattctaaagtttccaaattagtctccc

SEQ ID NO: 42762 - DNA, 436 bp, Homo sapiens
  misc_feature (2)..(2): n is a, c, g, or t
  misc_feature (263)..(263): n is a, c, g, or t
cngtctcgtggcgatacctgaaatgcacccgcttcccggcccatgcaggagagtctgaaggaaggcctgacggtgcaagaacggttgaagctctttgaatccagggacttgaagaaagactaggtgtgtcccatccaagttgagcacgcgccttccccagcttgcagcagcacaccccaagcgctgcttttcacctgtacctttgttttattattattattattattgctgttgttgtcatcgttaactgtgggcatggaatngtgaggctggcttctgggttgtccacaccactctctgctgtgttgacttcctgttgtcttcatcaaagcttttttccgtggtattctaaaattaggccagcagtggggctgggagggcatctgtgttagtcccttcctggctgtgatccgccacactcactgtcagtattaag

SEQ ID NO: 42763 - DNA, 369 bp, Homo sapiens
gtgtaaagcatgccgtctctcctcatctcacacggaaatcctgaacatccttcaaggctcacgttggagacgggtcctctcttttgtgttcggcactagtggtagctgacactatgtgccaggtgctggctaagcacttcatatcctttatctcgttgtgtcttcaccactctctaaggtaggtactataatttcctctattttatgtatgaggaaactgaagcccagagagggtggataatttgccagcgtcacacagtgaggggtggaaccagctttcaagctcaggtcttcctcactccaacgtcaacgctctcagccactacattaatttttccttatgttacagacgtggcaaactcaaatgtc

SEQ ID NO: 42764 - DNA, 414 bp, Homo sapiens
agcgagaccctatctcagaaaacaaaaaaagaaagaaaaaacccagcttgaagttagtgtaaacaactaaagcacaaaactatgatcttatcccactggacattttactatctgaattcactcacagtacttggtccctaagtctgtgtaaccattgctggctgcctttgacttaagggctcagttggttaaagcccaaagctgaggctcaagtcatgggtccagtctcattaatggccagttattttgctctgttcttattctatatcccggaccccactttctgtgttgcatatttatgacgttggtcacgagggtggcttgaccagagagggaacagaggaaggcaaatccatcaccacagctactagcaaaacaagcacaaatcctgtgaatggaggataagatatgttt

SEQ ID NO: 42765 - DNA, 272 bp, Homo sapiens
tcagctggagagacatgggagatgcaacctgaaaggtgtacgccatattgagatgcctggacttcatcctgtgagcagcagagtgtttggatagattctgggaagtgaaaatgttggggcaaaggggatgaatatttgaagtttttcaatactggacttccaatttgcttttcaaaagtttataataatttatattcatctaagcaatcacgagggtccctttattgcattcctgcctgcactgagtgctctcattaaaagcaatctttgtg

SEQ ID NO: 42766 - DNA, 405 bp, Homo sapiens
caccccttcacccgttccagttttacataagttttcctcactacacagagatggtgtggtgccaccaagatcattattcattttacaaccttactgggatcccctgatgaaatccctctgagactacagcacagtagcccctggcagaagagaggaccctgtacctacaagatgccttgcctatctcagagatccagaccattgtcagattttagagttcctagtatggagaaaagtcccttgagaacagtagagcctggattgaactcttttaaaataagtaggaggtaggcgcttgtggtcccagctactcgggaagctgaggcaggaggatcgctggagcccatgatgcagagagacacgattgcgccactgcactgcagcgtgggcaacagagtgagactg

SEQ ID NO: 42767 - DNA, 391 bp, Homo sapiens
ctagattgagttattcattctgtttttctttttcttttattaaaaatccaaatactcaaaaatcaaaacacaaaaatgtgttaagtgaaagaagccagtcacaaaaaatcacgttgtatgattctgtttgattctatttctgtgaaatgtccagaaaagacaaatccatagagacagaatgtagattagttggggggcaggggatggagcgaggagataggaccttaccccactaaaggctacaggtgttttcagggtgatgaaaatacagccctcctgggccaggcacagtggctcatgcctgtaattcctgcacattgggaggctgaggcaggtgaatcacttgagcccaggagttggagaccagcctagagatggcaaaccctgtcta

SEQ ID NO: 42768 - DNA, 651 bp, Homo sapiens
catctgtaaaatagcagttttttgtgagattgtgtttttttgtgagatttcaatgcaactaaatgtgctaaagaataggtaaaactgaacacagtaaatacgtttctgctccctctgctctgatggccaatctcttttcttcattttaccatcacacatgttgaacagtctgtacttgttagtttcagttctatttttttttaagaggcagagtctaactctgtcatccagcctggagtacagtggcatgatcaaagctcactgcaacatccaactcctgggcttaagggatcctagctacttgggaggctgaagtgggaagatcacttgagcccaaggagttcaaggcttcagtgagccatgattggtgccactgcacgtccagcctgggggacagagtgagaccctgtctcttaaaaagcaagaaaagaaagagaagactgagaataagaagatctctttgaaaataaaataagactgctaaaagtatttggtatacagtctggaaaataaagttgagggaatctctccagataaagagcaaaaagaaatagatagaaaaatataaagaaagaaaaaagacatagacaatcaatatgtaatgttaggagttcctggaagagagaacagagacagtgtaggtgaagaaat

SEQ ID NO: 42769 - DNA, 386 bp, Homo sapiens
acagacatgtgccactgcatgcagcctgaagtattttttttaaacttctctatgtatccatatattattaccacttttttcaacataagtgacagccattacttggacatgcctgctcccaagaagtcatatttaataaataagctattaatcctctaggcgaaggactccaatatgcaattctctaacacaggtcacaaattagcattctaaaaccagacttacaccttaaagggcatggataatatgggagaaaatacaaatcagtaatttattttgaaacaagaaactattataagataccattcctctagaaaaatactaatcctttagcattctaatacttttatttctagatttgtaggttcatggggaaaaaaaagagt

SEQ ID NO: 42770 - DNA, 549 bp, Homo sapiens
attctgacggttaattttagacatctacttgagtggattgagagacacacatagctggtcaaacacgatttcagccatgaatcaggcataaatattctgatggttaattgtagacgtctacttgactggattgagagacacacacagctggtcaaacacgatttctgggcatatctatgagggcgtttctggaagacactgagataaccatgacccaatgtggatgggcactgatatggtttggctgtgtccccacccagatctcatcttgaattgtagttcctgtaatacctacatgtcgtgggagggacccaatgggaggtgactgaatcatggtggtggttactgccatgatgttctcatgacagtgagtgagttctcatgatctgatggttttataaggggcttttcccgtttggctcagcacttcttgttgctgccatgtgaagagggatagctttgcttccccttctgccatgattgtgaggcccctgcagccatgtggaactgtcagcccattaaacccctttgttctttataaattgctca

SEQ ID NO: 42771 - DNA, 430 bp, Homo sapiens
tctggagcacacagaagtgcccctggaattctcccagcatcccacatgactggctccttccccctgggtctgtgcttacatgctccctgctctgaccgtccctgaccacccgattgaaaatgtcatcctccaccccggcactgcctgcctgctgctccaggcacgccctcttccagagcaccctagaatccaggtgttgtggctctcccacttgactgtgatctccacatgagcaggcgttaggtgtctgttcactgctacatcctggtgtgtaacaggcacttggcaaacgtggagggaatgaagggctgttgccatgtgtgtgtgttggcgaggggggttacgtttaagcagccacctgtgtgagctcaccttcatcagtaggcagcgtgaccatccaggcaggtatgagatagccactctggcaagg

SEQ ID NO: 42772 - DNA, 227 bp, Homo sapiens
aaactttcagttatcagatgagcaaattctggggatctagtgtagaaaatgggtggtgttggatgtgttaattaatttgattttggtaatcattacacagtgtacatgcatatcaagtcaacaccgtacatcttgaatgtattcagtctttctcagttaaatatttaaatttaaaattaaatattcaattatatattattcaataaaatcaattacatgttatagtt

SEQ ID NO: 42773 - DNA, 1296 bp, Homo sapiens
ggaacactcacagcagcctttcccagcacctgacctcaagggatatggcgtctaccaatttacataattgcctttgtcatcagttttcccataacatggtacgaagttaaatgagagcacctgagctccccttcctctgagtgcatttattccatccctccaagctgtggccttccatccccatccaagagacctgcagctgtgaagaagctcaagacttctttctcattgcctgcctcccagccattagtccccaccacagcccaggccacctggaaaatgggttccaaagcactatcactactaggtgacccctgaatgtggacaaggccacagctcttcaggcagcatttcaggggctatccagttgtcatccctctcatacccctctcctacccacccctatccccactattgtggaatgcacgaagggacagctggcaaaggcagtgaaccaagatgcagggaaggccctgtatgatggggaggatctaaagcaaaagccttttgtgcattgcctcaggttcagcagcagcagccctcactctgaagcctaccttgagaagccaggcatttctgtgaaaagctcatcagcatgtatttacaatgcaaactagaaccaactcccagtcagctaataacagaccccaggaaaaagaaaaggtcttccagacctccccgacacactttagaaccctcaggggtgaaaaagagggtgctccagggcagtgcaacttaaactgtggttgaaggacaaacagcctctgcaatacttgaggagcttgttagaaacccaaactcacagccccctccagacctacgtacagaatgtatattagcaagattcgctaggtggtttatgtgcacgttaaagtttaagaagcactgcctgagaatcccttggtcctaattaattcttttccacactcagatttgctaatgggtttcaccttatctcttgactcttgtttgatggcaacaggaaatagtagcatttcaggaagggtggaaaatataaaaagcactcccaacccaagcctccaaaaaacagcaattttcattttgtgtccatatattcccttctaatcattgtcctcatgcaagattttttttcataaagatgatctgctacataattttatatcatactctttctcctaacattacatcacaagtatactttcatgttgctgctacattcttcacacttgtcattttaatggccataaaacatgacatctagtgcacatatataattatgtagactcctattattaaatatttggatttcttcca

SEQ ID NO: 42774 - DNA, 510 bp, Homo sapiens
ggtaaggaggcctgcgggcttgagcctctgtgacagaaacattttggtccactaacaaatatggcgaaaccgttgggatttgttcatgttaggtgaaggcgttaaggatgagcagtgtggtattatcatgctttgtgtttgaaatatatcataagataaaaatttaaatgcaaaccataaaattatgaatatatcattaaattttggtacatctaactggtagggaatgttatgaagcctttaaattttcttttctggctgggtactgtggctcacacctgtaatcccagcattttgggaggccgaggcagaaggatcacttgagccccaaagttcaagaccagcccgggcaacatggcaagaccccatctctacaaaaaaaatttaaaaattagctgggcctggtggtgcacacctataacaccagctacacagaaggctggcatgagaggtgagctacgattgcaccactgcactccagtctggttgacagaccatgactctctcttt

SEQ ID NO: 42775 - DNA, 567 bp, Homo sapiens
attttgctgacggatggtctggtctggaagatctaagatggcttctcttaacaggtctagtgacttggcaggagatggccagaggctgcgacttagctgggactgttgactagaacacctacatgtagcctctctagcatagccatatcagggtaactggacttctcacatggtaactatattcccccagagtgaacattccaagagaaccaggcagaggcttatgtctttgttgcctggtctcagaattcacgtagcattattactaccatactctgttggtcaaagcagtcatgaatctgcccagatttaaggggagaggaatagactctaccatttgataagggagtggcatggtaactttggcaaagaacatatgggatagaagatattgttggaaaatacgatctggatttggaaaatacaatctgccagtttataagctatattaaagtttcccagggaatatttttcctgaattctgtgggatcagtaggaaaaacatagaattccaagagcgttcattgcaatttgcccaagtatggctaactaccatgagggttagtg

SEQ ID NO: 42776 - DNA, 572 bp, Homo sapiens
ggattatattgggaaatctttcaaaagtttacctcttcggaatatgcattttaagaagtttcttttgtacctgagactggcctgcttttagggagcttgacctattttatggctatgagcattaaactacgttagataattttctagaatctagataatgcaagccagaaaaaatctgattgcttcattggtttatttttttccagctgaagatttttcttgaccttaattatatggttaattgcctcaaatcctgattatacttcacatgtggaaatatagcctcaggtatcaagaacaactggagcaaaagcttcctaaataattttcaacattagcattagtaatactggttttcttaaacggagaaaaactacacaaattgctgtttgcatctcagttaatctgaatcatatttctttcctttgaaaatgcttattctctttgatttataaagttttataatggaggcttctgaaaaagtcttaaagtaaggcaaatgacttggggtaatgcctactttagtactttaaagaatgatttgatctctaagaaatagctatgttccatga

SEQ ID NO: 42777 - DNA, 2407 bp, Homo sapiens
taatgagagggaaaacaagtatgaagctgtgtggctgaaaccgtcttggcaagttagggaaagaaaacggaagtcactggggctgatcacagtgctaagcatgagagcactgcaagatgaggtcacggaggtgggcagggaccggcttgtgccaggccttgctggcagggtgaagagtttgccttttctctgcgtacaatggaaaggagaagaggttttaagcaagagaatggcttggtcatgtgtatgtctttgagacaccctggctagtctatgtatgatgcaaaaggtgggtggggcagggtgacaagaaaatactgttccggagcttcctgtggctgtgcctataagaggtggtggtggtggtgtggaaggaggtgtggcagtgaataaacagagatgtagaaacagcgtgtacatatattttaaggaacactgaggacgtgatgctggaatttgtgatgagagagtggaaaaaatccagctgctgtatgtttccaggaaacttctaggacagaggctattcaacaagctcatgaagatgaccttctatgggcattttgtagccggggaggaccaggagtccatccagcccctgcttcggcactacagggccttcggtgtcagcgccatcctggactatggagtggaggaggacctgagccccgaggaggcagagcacaaggagatggagtcctgcacctcagctgcggagagggatggcagtggcacgaataagcgggacaagcaataccaggcccaccgggccttcggggaccgcaggaatggtgtcatcagtgcccgcacctacttctacgccaatgaggccaagtgcgacagccacatggagacattcttgcgctgcatcgaagcctcaggtagagtcagcgatgacggcttcatagccattaagctcacagcactggggagaccccagtttctgctgcagttctcagaggtgctggccaagtggaggtgcttctttcaccaaatggctgtggagcaagggcaggcgggcctggctgccatggacaccaagctggaggtggcggtgctgcaggaaagtgtcgcaaagttgggcatcgcatccagggctgagattgaggactggttcacggcagagaccctgggagtgtctggcaccatggacctgctggactggagcagcctcatcgacagcaggaccaagctgtccaagcacctggtagtccccaacgcacagacaggacagctggagcccctgctgtcccggttcactgaggaggaggagctacagatgaccaggatgctacagcggatggatgtcctggccaagaaagccacagagatgggcgtgcggctgatggtggatgccgagcagacctacttccagccggccatcagccgcctgacgctggagatgcagcggaagttcaatgtggagaagccgctcatcttcaacacataccagtgctacctcaaggatgcctatgacaatgtgaccctggacgtggagctggctcgccgtgagggctggtgttttggggccaagctggtgcggggcgcatacctggcccaggagcgagcccgtgcggcagagatcggctatgaggaccccatcaaccccacgtacgaggccaccaacgccatgtaccacaggtgcctggactacgtgttggaggagctgaagcacaacgccaaggccaaggtgatggtggcctcccacaatgaggacacagtgcgcttcgcactgcgcaggatggaggagctgggcctgcatcctgctgaccaccaggtgtactttggacagctgctaggcatgtgtgaccagatcagcttcccgctgggccaggccggctaccccgtgtacaagtacgtgccctatggccccgtgatggaggtgctgccctacttgtcccgccgtgccctggagaacagcagcctcatgaagggcacccatcgggagcggcagttgctgtggctggagctcttgaggcggctccgaactggcaacctcttccatcgccctgcctagcacccgccagcacaccctcagcctccagcaccccccgcccccgcccaggccatcaccacagctgcagccaaccccatcctcacacagattcaccttttttcaccccacacttgcagagctgctggaggtgaggtcaggtgcctcccagccctgcccagagtatgggcactcaggtgtgggccgaacctgatacctgcctgggacagccactggaaacttttgggaactctcctcgaatgtgtgggcccaaggcccccacctctgtgacccccatgtccttggacctagaggattgtccaccttctgccaaggccagcccacacagcccgagccccttggggagcagtggccgggctggggaggcctgcctggtcaataaaccactgttcctgc

SEQ ID NO: 42778 - DNA, 2400 bp, Homo sapiens
ggtctcactctgttgctgtcttcacggagagcaggagcagaggctttgagaagccagtgggccttggcctcagccctgccggcagagggtccccaccatgcagctgaagtgccagggtgcttgtgaagtctaagcccttgtctggcatttgtcaggaatataggcgcacacttaagcggcccgggcgggtaccgccgtcccgccatggctctgaggcgcgccctgcccgcgctgcgcccctgcattccccgcttcgtccagctgtccacggcgccggcctcccgcgagcagcccgcagcgggcccagcggccgtgccaggaggtgggtcggccacggcagtgcggccgccggtgcccgccgtggacttcggcaacgcgcaggaggcgtaccgcagccggcgaacctgggagctggcgcggagcctgctggtgctgcgcttgtgcgcctggcccgcgctgctggcgcgccacgagcagctgctgtatgtttccaggaaacttctaggacagaggctattcaacaagctcatgaagatgaccttctatgggcattttgtagccggggaggaccaggagtccatccagcccctgcttcggcactacagggccttcggtgtcagcgccatcctggactatggagtggaggaggacctgagccccgaggaggcagagcacaaggagatggagtcctgcacctcagctgcggagagggatggcagtggcacgaataagcgggacaagcaataccaggcccaccgggccttcggggaccgcaggaatggtgtcatcagtgcccgcacctacttctacgccaatgaggccaagtgcgacagccacatggagacattcttgcgctgcatcgaagcctcaggtagagtcagcgatgacggcttcatagccattaagctcacagcactggggagaccccagtttctgctgcagttctcagaggtgctggccaagtggaggtgcttctttcaccaaatggctgtggagcaagggcaggcgggcctggctgccatggacaccaagctggaggtggcggtgctgcaggaaagtgtcgcaaagttgggcatcgcatccagggctgagattgaggactggttcacggcagagaccctgggagtgtctggcaccatggacctgctggactggagcagcctcatcgacagcaggaccaagctgtccaagcacctggtagtccccaacgcacagacaggacagctggagcccctgctgtcccggttcactgaggaggaggagctacagatgaccaggatgctacagcggatggatgtcctggccaagaaagccacagagatgggcgtgcggctgatggtggatgccgagcagacctacttccagccggccatcagccgcctgacgctggagatgcagcggaagttcaatgtggagaagccgctcatcttcaacacataccagtgctacctcaaggatgcctatgacaatgtgaccctggacgtggagctggctcgccgtgagggctggtgttttggggccaagctggtgcggggcgcatacctggcccaggagcgagcccgtgcggcagagatcggctatgaggaccccatcaaccccacgtacgaggccaccaacgccatgtaccacaggtgcctggactacgtgttggaggagctgaagcacaacgccaaggccaaggtgatggtggcctcccacaatgaggacacagtgcgcttcgcactgcgcaggatggaggagctgggcctgcatcctgctgaccaccaggtgtactttggacagctgctaggcatgtgtgaccagatcagcttcccgctgggccaggccggctaccccgtgtacaagtacgtgccctatggccccgtgatggaggtgctgccctacttgtcccgccgtgccctggagaacagcagcctcatgaagggcacccatcgggagcggcagttgctgtggctggagctcttgaggcggctccgaactggcaacctcttccatcgccctgcctagcacccgccagcacaccctcagcctccagcaccccccgcccccgcccaggccatcaccacagctgcagccaaccccatcctcacacagattcaccttttttcaccccacacttgcagagctgctggaggtgaggtcaggtgcctcccagccctgcccagagtatgggcactcaggtgtgggccgaacctgatacctgcctgggacagccactggaaacttttgggaactctcctcgaatgtgtgggcccaaggcccccacctctgtgacccccatgtccttggacctagaggattgtccaccttctgccaaggccagcccacacagcccgagccccttggggagcagtggccgggctggggaggcctgcctggtcaataaaccactgttcctgc

SEQ ID NO: 42779 - DNA, 506 bp, Homo sapiens
aatatttatatttcctctgtcttttaaaactgaacaccgaggtgggttttgtggtgggtggtgaacggacaggtttgggcctcgatcccccacccgaccctagcacccacaggtgggggtgccccctctgctgatgcgcctcctccctcagcaccatggacctgctggactggagcagcctcatcgacagcaggaccaagctgtccaagcacctggtagtccccaacgcacagacaggacagctggagcccctgctgtcccggttcactgaggaggaggagctacagatgaccaggatgctacagcggatggatgtcctggccaaggtgagctgtcccgctcgggcagagggtacctgggactcgtggagaagagggcacctgcctcacttgagcaacagttgctcccactctcccaccccctgcgcctctcagaaagccacagagatgggcgtgcggctgatggtggatgccgagtccgctgcattggatcctctagacaccagc

SEQ ID NO: 42780 - DNA, 610 bp, Homo sapiens
  misc_feature (24)..(24): n is a, c, g, or t
agagtcgactctaagatcccctgncatatgccaaggccaaggtgatggtggcctcccacaatgaggacacagtgcgcttcgcactgcgcaggtaggtgtgccccaccctgcaccgaaaccccaacctgagccgttgtctcctccggctggggagaggtggcagcagcgcagagctcagggtgggcagagcgacctgctgggtggtcgggcatttgtggggaaaggctggtgaaatgagctggagggtggcttcagtgggcaggcccaggcccgctggcgttctggacatcggactgtgagagcacaatggctttttgcagttacgttggtttttaaaattaacttttttctttttttgagatagaatctcgctctgtcacctatgctggagtgcagtggcgtggtctcggctcactgcaacctccgcttcccaagttcaagcaattcttcatgcctcagcctcccaagtagctgggattacaggcatgtgccaccacgcctggctaatgttttgtatttttagcagagacagggtttcaccgtgttggccagactggtctcaaactcctggcctcaagtgatcctcccttcttgggcttgccatatgcaa

SEQ ID NO: 42781 - DNA, 3896 bp, Homo sapiens
  misc_feature (2492)..(2492): n is a, c, g, or t
ggtctcactctgttgctgtcttcacggagagcaggagcagaggctttgagaagccagtgggccttggcctcagccctgccggcagagggtccccaccatgcagctgaagtgccagggtgcttgtgaagtctaagcccttgtctggcatttgtcaggaatataggcgcacacttaagcggcccgggcgggtaccgccgtcccgccatggctctgaggcgcgccctgcccgcgctgcgcccctgcattccccgcttcgtccagctgtccacggcgccggcctcccgcgagcagcccgcagcgggcccagcggccgtgccaggagctgctgtatgtttccaggaaacttctaggacagaggctattcaacaagctcatgaagatgaccttctatgggcattttgtagccggggaggaccaggagtccatccagcccctgcttcggcactacagggccttcggtgtcagcgccatcctggactatggagtggaggaggacctgagccccgaggaggcagagcacaaggagatggagtcctgcacctcagctgcggagagggatggcagtggcacgaataagcgggacaagcaataccaggcccaccgggccttcggggaccgcaggaatggtgtcatcagtgcccgcacctacttctacgccaatgaggccaagtgcgacagccacatggagacattcttgcgctgcatcgaagcctcaggtagagtcagcgatgacggcttcatagccattaagctcacagcactggggagaccccagtttctgctgcagttctcagaggtgctggccaagtggaggtgcttctttcaccaaatggctgtggagcaagggcaggcgggcctggctgccatggacaccaagctggaggtggcggtgctgcaggaaagtgtcgcaaagttgggcatcgcatccagggctgagattgaggactggttcacggcagagaccctgggagtgtctggcaccatggacctgctggactggagcagcctcatcgacagcaggaccaagctgtccaagcacctggtagtccccaacgcacaggtaacacctccgctcctcagtgaggcccagctcagcagggcgctgcgctaagaagggaattcagcctgccacgtgtgtctcttgttgcctaccctgggaacttaacatgaccaaaatcactgcacactatggccccacagaccccctgtggtccagggggaagaagacaagcccactagtgtccacagagtgcttggcgggacagagacccacgcggagccttaagacaccacaaggagagggggtctgggggccttccccaagtcatctgtcttgtgcatcaggtcaccccaaacttcagaggcctgaaacggcagcagccactctgcttctgcctcatggttctggggttgacagggctcagctgggcagtcctcccctggggtctcctgggtagctgtactcacagagtggtggcgctgggacctgggggaggcacccattcacatgtctgggagttggtgctggctgtggcttgggctttttcccaacatggcagctgggctctaagggccagtgtcacctgagacgtgagagccaggcagaagctgggtgaccttttcctgcctcgcctcagaagtcacacggtgtcttttctggcaagttctgtttgttagaagcatgtcaccaggccagcctgtatacagcggggagaggaatgagactcatctgcctgtgggaggggggcccaggacctggcagactgcttgaaaccacagcttaaactgggattcaaagaaagaacagaagcaccttcagaaaacatcctgcagaggcagctttccatgacacatctagccccagtccactaagggcccagcctcaaacttagagcccccgacccagagcctcggggcgcagtgcgtacagtgtggctgtgcaccaaggccaccagctgttggagactttagcatggtgtagcaagggatagagtggtactgtttgtgcccagtgaggcaaggctgctggggccagcaaaggggtgagcgggaggccctgcgggatgggtccccacggcctctgagcaccagcaacttgaaggcctcatcctggtggttgccctggtccctggctacgtgtcagcacgtgctgcacaactgccctgtctgcctgtagccaggggtcttcctcctgggccctctgcctgctccgggtggagcccttctgtttgacgattgggtgatcagtgttcacttgttcaatgtcacatgggagttgcagggggctctcccacaacggtggggcctctgtgggaactggggagtacacacttcggagtgcaggcctggactgagcctggggcccactgacatgggcactgagctccctcgtggtacccctaggccccgcatagggcagtgcactggctgcgttggaggttcaggggcactgtgctgcttgtccaggtggccctccctcccagccctgcacngacgggtgagagggttcctgtgggctgggaatactgagagaggtttagcctgggcctcagggtggcactttcccgcccttgctgtggcctgaccgcgtgttgcacccccagacaggacagctggagcccctgctgtcccggttcactgaggaggaggagctacagatgaccaggatgctacagcggatggatgtcctggccaaggtgagctgtcccgctcgggcagagggtacctgggactcgtggagaagagggcacctgcctcacttgagcaacagttgctcccactctcccaccccctgcgcctctcagaaagccacagagatgggcgtgcggctgatggtggatgccgagcagacctacttccagccggccatcagccgcctgacgctggagatgcagcggaagttcaatgtggagaagccgctcatcttcaacacataccagtgctacctcaaggatgcctatgacaatgtgaccctggacgtggagctggctcgccgtgagggctggtgttttggggccaagctggtgcggggcgcatacctggcccaggagcgagcccgtgcggcagagatcggctatgaggaccccatcaaccccacgtacgaggccaccaacgccatgtaccacaggtgcctggactacgtgttggaggagctgaagcacaacgccaaggccaaggtgatggtggcctcccacaatgaggacacagtgcgcttcgcactgcgcaggatggaggagctgggcctgcatcctgctgaccaccaggtgtactttggacagctgctaggcatgtgtgaccagatcagcttcccgctgggccaggccggctaccccgtgtacaagtacgtgccctatggccccgtgatggaggtgctgccctacttgtcccgccgtgccctggagaacagcagcctcatgaagggcacccatcgggagcggcagttgctgtggctggagctcttgaggcggctccgaactggcaacctcttccatcgccctgcctagcacccgccagcacaccctcagcctccagcaccccccgcccccgcccaggccatcaccacagctgcagccaaccccatcctcacacagattcaccttttttcaccccacacttgcagagctgctggaggtgaggtcaggtgcctcccagccctgcccagagtatgggcactcaggtgtgggccgaacctgatacctgcctgggacagccactggaaacttttgggaactctcctcgaatgtgtgggcccaaggcccccacctctgtgacccccatgtccttggacctagaggattgtccaccttctgccaaggccagcccacacagcccgagccccttggggagcagtggccgggctggggaggcctgcctggtcaataaaccactgttcctgc

SEQ ID NO: 42782 - DNA, 1526 bp, Homo sapiens
aatatttatatttcctctgtcttttaaaactgaacaccgaggtgggttttgtggtgggtggtgaacggacaggtttgggcctcgatcccccacccgaccctagcacccacaggtgggggtgccccctctgctgatgcgcctcctccctcagcaccatggacctgctggactggagcagcctcatcgacagcaggaccaagctgtccaagcacctggtagtccccaacgcacagacaggacagctggagcccctgctgtcccggttcactgaggaggaggagctacagatgaccaggatgctacagcggatggatgtcctggccaaggtgagctgtcccgctcgggcagagggtacctgggactcgtggagaagagggcacctgcctcacttgagcaacagttgctcccactctcccaccccctgcgcctctcagaaagccacagagatgggcgtgcggctgatggtggatgccgagcagacctacttccagccggccatcagccgcctgacgctggagatgcagcggaagttcaatgtggagaagccgctcatcttcaacacataccagtgctacctcaaggatgcctatgacaatgtgaccctggacgtggagctggctcgccgtgagggctggtgttttggggccaagctggtgcggggcgcatacctggcccaggagcgagcccgtgcggcagagatcggctatgaggaccccatcaaccccacgtacgaggccaccaacgccatgtaccacaggtgcctggactacgtgttggaggagctgaagcacaacgccaaggccaaggtgatggtggcctcccacaatgaggacacagtgcgcttcgcactgcgcaggatggaggagctgggcctgcatcctgctgaccaccaggtgtactttggacagctgctaggcatgtgtgaccagatcagcttcccgctgggccaggccggctaccccgtgtacaagtacgtgccctatggccccgtgatggaggtgctgccctacttgtcccgccgtgccctggagaacagcagcctcatgaagggcacccatcgggagcggcagttgctgtggctggagctcttgaggcggctccgaactggcaacctcttccatcgccctgcctagcacccgccagcacaccctcagcctccagcaccccccgcccccgcccaggccatcaccacagctgcagccaaccccatcctcacacagattcaccttttttcaccccacacttgcagagctgctggaggtgaggtcaggtgcctcccagccctgcccagagtatgggcactcaggtgtgggccgaacctgatacctgcctgggacagccactggaaacttttgggaactctcctcgaatgtgtgggcccaaggcccccacctctgtgacccccatgtccttggacctagaggattgtccaccttctgccaaggccagcccacacagcccgagccccttggggagcagtggccgggctggggaggcctgcctggtcaataaaccactgttcctgc

SEQ ID NO: 42783 - DNA, 3801 bp, Homo sapiens
  misc_feature (2647)..(2647): n is a, c, g, or t
ggtctcactctgttgctgtcttcacggagagcaggagcagaggctttgagaagccagtgggccttggcctcagccctgccggcagagggtccccaccatgcagctgaagtgccagggtgcttgtgaagtctaagcccttgtctggcatttgtcaggaatataggcgcacacttaagcggcccgggcgggtaccgccgtcccgccatggctctgaggcgcgccctgcccgcgctgcgcccctgcattccccgcttcgtccagctgtccacggcgccggcctcccgcgagcagcccgcagcgggcccagcggccgtgccaggaggtgggtcggccacggcagtgcggccgccggtgcccgccgtggacttcggcaacgcgcaggaggcgtaccgcagccggcgaacctgggagctggcgcggagcctgctggtgctgcgcttgtgcgcctggcccgcgctgctggcgcgccacgagcagctgctgtatgtttccaggaaacttctaggacagaggctattcaacaagctcatgaagatgaccttctatgggcattttgtagccggggaggaccaggagtccatccagcccctgcttcggcactacagggccttcggtgtcagcgccatcctggactatggagtggaggaggacctgagccccgaggaggcagagcacaaggagatggagtcctgcacctcagctgcggagagggatggcagtggcacgaataagcgggacaagcaataccaggcccaccgggccttcggggaccgcaggaatggtgtcatcagtgcccgcacctacttctacgccaatgaggccaagtgcgacagccacatggagacattcttgcgctgcatcgaagcctcaggtagagtcagcgatgacggcttcatagccattaagctcacagcactggggagaccccagtttctgctgcagttctcagaggtgctggccaagtggaggtgcttctttcaccaaatggctgtggagcaagggcaggcgggcctggctgccatggacaccaagctggaggtggcggtgctgcaggaaagtgtcgcaaagttgggcatcgcatccagggctgagattgaggactggttcacggcagagaccctgggagtgtctggcaccatggacctgctggactggagcagcctcatcgacagcaggaccaagctgtccaagcacctggtagtccccaacgcacaggtaacacctccgctcctcagtgaggcccagctcagcagggcgctgcgctaagaagggaattcagcctgccacgtgtgtctcttgttgcctaccctgggaacttaacatgaccaaaatcactgcacactatggccccacagaccccctgtggtccagggggaagaagacaagcccactagtgtccacagagtgcttggcgggacagagacccacgcggagccttaagacaccacaaggagagggggtctgggggccttccccaagtcatctgtcttgtgcatcaggtcaccccaaacttcagaggcctgaaacggcagcagccactctgcttctgcctcatggttctggggttgacagggctcagctgggcagtcctcccctggggtctcctgggtagctgtactcacagagtggtggcgctgggacctgggggaggcacccattcacatgtctgggagttggtgctggctgtggcttgggctttttcccaacatggcagctgggctctaagggccagtgtcacctgagacgtgagagccaggcagaagctgggtgaccttttcctgcctcgcctcagaagtcacacggtgtcttttctggcaagttctgtttgttagaagcatgtcaccaggccagcctgtatacagcggggagaggaatgagactcatctgcctgtgggaggggggcccaggacctggcagactgcttgaaaccacagcttaaactgggattcaaagaaagaacagaagcaccttcagaaaacatcctgcagaggcagctttccatgacacatctagccccagtccactaagggcccagcctcaaacttagagcccccgacccagagcctcggggcgcagtgcgtacagtgtggctgtgcaccaaggccaccagctgttggagactttagcatggtgtagcaagggatagagtggtactgtttgtgcccagtgaggcaaggctgctggggccagcaaaggggtgagcgggaggccctgcgggatgggtccccacggcctctgagcaccagcaacttgaaggcctcatcctggtggttgccctggtccctggctacgtgtcagcacgtgctgcacaactgccctgtctgcctgtagccaggggtcttcctcctgggccctctgcctgctccgggtggagcccttctgtttgacgattgggtgatcagtgttcacttgttcaatgtcacatgggagttgcagggggctctcccacaacggtggggcctctgtgggaactggggagtacacacttcggagtgcaggcctggactgagcctggggcccactgacatgggcactgagctccctcgtggtacccctaggccccgcatagggcagtgcactggctgcgttggaggttcaggggcactgtgctgcttgtccaggtggccctccctcccagccctgcacngacgggtgagagggttcctgtgggctgggaatactgagagaggtttagcctgggcctcagggtggcactttcccgcccttgctgtggcctgaccgcgtgttgcacccccagacaggacagctggagcccctgctgtcccggttcactgaggaggaggagctacagatgaccaggatgctacagcggatggatgtcctggccaaggtgagctgtcccgctcgggcagagggtacctgggactcgtggagaagagggcacctgcctcacttgagcaacagttgctcccactctcccaccccctgcgcctctcagaaagccacagagatgggcgtgcggctgatggtggatgccgagcagacctacttccagccggccatcagccgcctgacgctggagatgcagcggaagttcaatgtggagaagccgctcatcttcaacacataccagtgctacctcaaggatgcctatgacaatgtgaccctggacgtggagctggctcgccgtgagggctggtgttttggggccaagctggtgcggggcgcatacctggcccaggagcgagcccgtgcggcagagatcggctatgaggaccccatcaaccccacgtacgaggccaccaacgccatgtaccacaggtgcctggactacgtgttggaggagctgaagcacaacgccaaggccaaggtgatggtggcctcccacaatgaggacacagtgcgcttcgcactgcgcaggatggaggagctgggcctgcatcctgctgaccaccaggtgtactttggacagctgctaggcatgtgtgaccagatcagcttcccgctggtgcagccaaccccatcctcacacagattcaccttttttcaccccacacttgcagagctgctggaggtgaggtcaggtgcctcccagccctgcccagagtatgggcactcaggtgtgggccgaacctgatacctgcctgggacagccactggaaacttttgggaactctcctcgaatgtgtgggcccaaggcccccacctctgtgacccccatgtccttggacctagaggattgtccaccttctgccaaggccagcccacacagcccgagccccttggggagcagtggccgggctggggaggcctgcctggtcaataaaccactgttcctgc

SEQ ID NO: 42784 - DNA, 2961 bp, Homo sapiens
  misc_feature (1665)..(1665): n is a, c, g, or t
aatatttatatttcctctgtcttttaaaactgaacaccgaggtgggttttgtggtgggtggtgaacggacaggtttgggcctcgatcccccacccgaccctagcacccacaggtgggggtgccccctctgctgatgcgcctcctccctcagcaccatggacctgctggactggagcagcctcatcgacagcaggaccaagctgtccaagcacctggtagtccccaacgcacaggtaacacctccgctcctcagtgaggcccagctcagcagggcgctgcgctaagaagggaattcagcctgccacgtgtgtctcttgttgcctaccctgggaacttaacatgaccaaaatcactgcacactatggccccacagaccccctgtggtccagggggaagaagacaagcccactagtgtccacagagtgcttggcgggacagagacccacgcggagccttaagacaccacaaggagagggggtctgggggccttccccaagtcatctgtcttgtgcatcaggtcaccccaaacttcagaggcctgaaacggcagcagccactctgcttctgcctcatggttctggggttgacagggctcagctgggcagtcctcccctggggtctcctgggtagctgtactcacagagtggtggcgctgggacctgggggaggcacccattcacatgtctgggagttggtgctggctgtggcttgggctttttcccaacatggcagctgggctctaagggccagtgtcacctgagacgtgagagccaggcagaagctgggtgaccttttcctgcctcgcctcagaagtcacacggtgtcttttctggcaagttctgtttgttagaagcatgtcaccaggccagcctgtatacagcggggagaggaatgagactcatctgcctgtgggaggggggcccaggacctggcagactgcttgaaaccacagcttaaactgggattcaaagaaagaacagaagcaccttcagaaaacatcctgcagaggcagctttccatgacacatctagccccagtccactaagggcccagcctcaaacttagagcccccgacccagagcctcggggcgcagtgcgtacagtgtggctgtgcaccaaggccaccagctgttggagactttagcatggtgtagcaagggatagagtggtactgtttgtgcccagtgaggcaaggctgctggggccagcaaaggggtgagcgggaggccctgcgggatgggtccccacggcctctgagcaccagcaacttgaaggcctcatcctggtggttgccctggtccctggctacgtgtcagcacgtgctgcacaactgccctgtctgcctgtagccaggggtcttcctcctgggccctctgcctgctccgggtggagcccttctgtttgacgattgggtgatcagtgttcacttgttcaatgtcacatgggagttgcagggggctctcccacaacggtggggcctctgtgggaactggggagtacacacttcggagtgcaggcctggactgagcctggggcccactgacatgggcactgagctccctcgtggtacccctaggccccgcatagggcagtgcactggctgcgttggaggttcaggggcactgtgctgcttgtccaggtggccctccctcccagccctgcacngacgggtgagagggttcctgtgggctgggaatactgagagaggtttagcctgggcctcagggtggcactttcccgcccttgctgtggcctgaccgcgtgttgcacccccagacaggacagctggagcccctgctgtcccggttcactgaggaggaggagctacagatgaccaggatgctacagcggatggatgtcctggccaagaaagccacagagatgggcgtgcggctgatggtggatgccgagcagacctacttccagccggccatcagccgcctgacgctggagatgcagcggaagttcaatgtggagaagccgctcatcttcaacacataccagtgctacctcaaggatgcctatgacaatgtgaccctggacgtggagctggctcgccgtgagggctggtgttttggggccaagctggtgcggggcgcatacctggcccaggagcgagcccgtgcggcagagatcggctatgaggaccccatcaaccccacgtacgaggccaccaacgccatgtaccacaggtgcctggactacgtgttggaggagctgaagcacaacgccaaggccaaggtgatggtggcctcccacaatgaggacacagtgcgcttcgcactgcgcaggatggaggagctgggcctgcatcctgctgaccaccaggtgtactttggacagctgctaggcatgtgtgaccagatcagcttcccgctgggccaggccggctaccccgtgtacaagtacgtgccctatggccccgtgatggaggtgctgccctacttgtcccgccgtgccctggagaacagcagcctcatgaagggcacccatcgggagcggcagttgctgtggctggagctcttgaggcggctccgaactggcaacctcttccatcgccctgcctagcacccgccagcacaccctcagcctccagcaccccccgcccccgcccaggccatcaccacagctgcagccaaccccatcctcacacagattcaccttttttcaccccacacttgcagagctgctggaggtgaggtcaggtgcctcccagccctgcccagagtatgggcactcaggtgtgggccgaacctgatacctgcctgggacagccactggaaacttttgggaactctcctcgaatgtgtgggcccaaggcccccacctctgtgacccccatgtccttggacctagaggattgtccaccttctgccaaggccagcccacacagcccgagccccttggggagcagtggccgggctggggaggcctgcctggtcaataaaccactgttcctgc

SEQ ID NO: 42785 - DNA, 4145 bp, Homo sapiens
  misc_feature (2647)..(2647): n is a, c, g, or t
ggtctcactctgttgctgtcttcacggagagcaggagcagaggctttgagaagccagtgggccttggcctcagccctgccggcagagggtccccaccatgcagctgaagtgccagggtgcttgtgaagtctaagcccttgtctggcatttgtcaggaatataggcgcacacttaagcggcccgggcgggtaccgccgtcccgccatggctctgaggcgcgccctgcccgcgctgcgcccctgcattccccgcttcgtccagctgtccacggcgccggcctcccgcgagcagcccgcagcgggcccagcggccgtgccaggaggtgggtcggccacggcagtgcggccgccggtgcccgccgtggacttcggcaacgcgcaggaggcgtaccgcagccggcgaacctgggagctggcgcggagcctgctggtgctgcgcttgtgcgcctggcccgcgctgctggcgcgccacgagcagctgctgtatgtttccaggaaacttctaggacagaggctattcaacaagctcatgaagatgaccttctatgggcattttgtagccggggaggaccaggagtccatccagcccctgcttcggcactacagggccttcggtgtcagcgccatcctggactatggagtggaggaggacctgagccccgaggaggcagagcacaaggagatggagtcctgcacctcagctgcggagagggatggcagtggcacgaataagcgggacaagcaataccaggcccaccgggccttcggggaccgcaggaatggtgtcatcagtgcccgcacctacttctacgccaatgaggccaagtgcgacagccacatggagacattcttgcgctgcatcgaagcctcaggtagagtcagcgatgacggcttcatagccattaagctcacagcactggggagaccccagtttctgctgcagttctcagaggtgctggccaagtggaggtgcttctttcaccaaatggctgtggagcaagggcaggcgggcctggctgccatggacaccaagctggaggtggcggtgctgcaggaaagtgtcgcaaagttgggcatcgcatccagggctgagattgaggactggttcacggcagagaccctgggagtgtctggcaccatggacctgctggactggagcagcctcatcgacagcaggaccaagctgtccaagcacctggtagtccccaacgcacaggtaacacctccgctcctcagtgaggcccagctcagcagggcgctgcgctaagaagggaattcagcctgccacgtgtgtctcttgttgcctaccctgggaacttaacatgaccaaaatcactgcacactatggccccacagaccccctgtggtccagggggaagaagacaagcccactagtgtccacagagtgcttggcgggacagagacccacgcggagccttaagacaccacaaggagagggggtctgggggccttccccaagtcatctgtcttgtgcatcaggtcaccccaaacttcagaggcctgaaacggcagcagccactctgcttctgcctcatggttctggggttgacagggctcagctgggcagtcctcccctggggtctcctgggtagctgtactcacagagtggtggcgctgggacctgggggaggcacccattcacatgtctgggagttggtgctggctgtggcttgggctttttcccaacatggcagctgggctctaagggccagtgtcacctgagacgtgagagccaggcagaagctgggtgaccttttcctgcctcgcctcagaagtcacacggtgtcttttctggcaagttctgtttgttagaagcatgtcaccaggccagcctgtatacagcggggagaggaatgagactcatctgcctgtgggaggggggcccaggacctggcagactgcttgaaaccacagcttaaactgggattcaaagaaagaacagaagcaccttcagaaaacatcctgcagaggcagctttccatgacacatctagccccagtccactaagggcccagcctcaaacttagagcccccgacccagagcctcggggcgcagtgcgtacagtgtggctgtgcaccaaggccaccagctgttggagactttagcatggtgtagcaagggatagagtggtactgtttgtgcccagtgaggcaaggctgctggggccagcaaaggggtgagcgggaggccctgcgggatgggtccccacggcctctgagcaccagcaacttgaaggcctcatcctggtggttgccctggtccctggctacgtgtcagcacgtgctgcacaactgccctgtctgcctgtagccaggggtcttcctcctgggccctctgcctgctccgggtggagcccttctgtttgacgattgggtgatcagtgttcacttgttcaatgtcacatgggagttgcagggggctctcccacaacggtggggcctctgtgggaactggggagtacacacttcggagtgcaggcctggactgagcctggggcccactgacatgggcactgagctccctcgtggtacccctaggccccgcatagggcagtgcactggctgcgttggaggttcaggggcactgtgctgcttgtccaggtggccctccctcccagccctgcacngacgggtgagagggttcctgtgggctgggaatactgagagaggtttagcctgggcctcagggtggcactttcccgcccttgctgtggcctgaccgcgtgttgcacccccagacaggacagctggagcccctgctgtcccggttcactgaggaggaggagctacagatgaccaggatgctacagcggatggatgtcctggccaaggtgagctgtcccgctcgggcagagggtacctgggactcgtggagaagagggcacctgcctcacttgagcaacagttgctcccactctcccaccccctgcgcctctcagaaagccacagagatgggcgtgcggctgatggtggatgccgagcagacctacttccagccggccatcagccgcctgacgctggagatgcagcggaagttcaatgtggagaagccgctcatcttcaacacataccagtgctacctcaaggatgcctatgacaatgtgaccctggacgtggagctggctcgccgtgagggctggtgttttggggccaagctggtgcggggcgcatacctggcccaggagcgagcccgtgcggcagagatcggctatgaggaccccatcaaccccacgtacgaggccaccaacgccatgtaccacaggtgcctggactacgtgttggaggagctgaagcacaacgccaaggccaaggtgatggtggcctcccacaatgaggacacagtgcgcttcgcactgcgcaggatggaggagctgggcctgcatcctgctgaccaccaggtgtactttggacagctgctaggcatgtgtgaccagatcagcttcccgctgggccaggccggctaccccgtgtacaagtacgtgccctatggccccgtgatggaggtgctgccctacttgtcccgccgtgccctggagaacagcagcctcatgaagggcacccatcgggagcggcagttgctgtggctggagctcttgaggcggctccgaactggcaacctcttccatcgccctgcctagcacccgccagcacaccctcagcctccagcaccccccgcccccgcccaggccatcaccacagctgcagccaaccccatcctcacacagattcaccttttttcaccccacacttgcagagctgctggaggtgaggtcaggtgcctcccagccctgcccagagtatgggcactcaggtgtgggccgaacctgatacctgcctgggacagccactggaaacttttgggaactctcctcgaatgtgtgggcccaaggcccccacctctgtgacccccatgtccttggacctagaggattgtccaccttctgccaaggccagcccacacagcccgagccccttggggagcagtggccgggctggggaggcctgcctggtcaataaaccactgttcctgcagctgagagccctttgccctcacacagggtcagctctgggcaacaaagagggagtggctcagacagggtcagagaagtctcatcccagactctg

SEQ ID NO: 42786 - DNA, 3564 bp, Homo sapiens
  misc_feature (2160)..(2160): n is a, c, g, or t
agctggggccagtcgtgcagaagccatgcccaccttgtggccgggatggagtggggactaggaaggcaccagccggggaggaccaggagtccatccagcccctgcttcggcactacagggccttcggtgtcagcgccatcctggactatggagtggaggaggacctgagccccgaggaggcagagcacaaggagatggagtcctgcacctcagctgcggagagggatggcagtggcacgaataagcgggacaagcaataccaggcccaccgggccttcggggaccgcaggaatggtgtcatcagtgcccgcacctacttctacgccaatgaggccaagtgcgacagccacatggagacattcttgcgctgcatcgaagcctcaggtagagtcagcgatgacggcttcatagccattaagctcacagcactggggagaccccagtttctgctgcagttctcagaggtgctggccaagtggaggtgcttctttcaccaaatggctgtggagcaagggcaggcgggcctggctgccatggacaccaagctggaggtggcggtgctgcaggaaagtgtcgcaaagttgggcatcgcatccagggctgagattgaggactggttcacggcagagaccctgggagtgtctggcaccatggacctgctggactggagcagcctcatcgacagcaggaccaagctgtccaagcacctggtagtccccaacgcacaggtaacacctccgctcctcagtgaggcccagctcagcagggcgctgcgctaagaagggaattcagcctgccacgtgtgtctcttgttgcctaccctgggaacttaacatgaccaaaatcactgcacactatggccccacagaccccctgtggtccagggggaagaagacaagcccactagtgtccacagagtgcttggcgggacagagacccacgcggagccttaagacaccacaaggagagggggtctgggggccttccccaagtcatctgtcttgtgcatcaggtcaccccaaacttcagaggcctgaaacggcagcagccactctgcttctgcctcatggttctggggttgacagggctcagctgggcagtcctcccctggggtctcctgggtagctgtactcacagagtggtggcgctgggacctgggggaggcacccattcacatgtctgggagttggtgctggctgtggcttgggctttttcccaacatggcagctgggctctaagggccagtgtcacctgagacgtgagagccaggcagaagctgggtgaccttttcctgcctcgcctcagaagtcacacggtgtcttttctggcaagttctgtttgttagaagcatgtcaccaggccagcctgtatacagcggggagaggaatgagactcatctgcctgtgggaggggggcccaggacctggcagactgcttgaaaccacagcttaaactgggattcaaagaaagaacagaagcaccttcagaaaacatcctgcagaggcagctttccatgacacatctagccccagtccactaagggcccagcctcaaacttagagcccccgacccagagcctcggggcgcagtgcgtacagtgtggctgtgcaccaaggccaccagctgttggagactttagcatggtgtagcaagggatagagtggtactgtttgtgcccagtgaggcaaggctgctggggccagcaaaggggtgagcgggaggccctgcgggatgggtccccacggcctctgagcaccagcaacttgaaggcctcatcctggtggttgccctggtccctggctacgtgtcagcacgtgctgcacaactgccctgtctgcctgtagccaggggtcttcctcctgggccctctgcctgctccgggtggagcccttctgtttgacgattgggtgatcagtgttcacttgttcaatgtcacatgggagttgcagggggctctcccacaacggtggggcctctgtgggaactggggagtacacacttcggagtgcaggcctggactgagcctggggcccactgacatgggcactgagctccctcgtggtacccctaggccccgcatagggcagtgcactggctgcgttggaggttcaggggcactgtgctgcttgtccaggtggccctccctcccagccctgcacngacgggtgagagggttcctgtgggctgggaatactgagagaggtttagcctgggcctcagggtggcactttcccgcccttgctgtggcctgaccgcgtgttgcacccccagacaggacagctggagcccctgctgtcccggttcactgaggaggaggagctacagatgaccaggatgctacagcggatggatgtcctggccaaggtgagctgtcccgctcgggcagagggtacctgggactcgtggagaagagggcacctgcctcacttgagcaacagttgctcccactctcccaccccctgcgcctctcagaaagccacagagatgggcgtgcggctgatggtggatgccgagcagacctacttccagccggccatcagccgcctgacgctggagatgcagcggaagttcaatgtggagaagccgctcatcttcaacacataccagtgctacctcaaggatgcctatgacaatgtgaccctggacgtggagctggctcgccgtgagggctggtgttttggggccaagctggtgcggggcgcatacctggcccaggagcgagcccgtgcggcagagatcggctatgaggaccccatcaaccccacgtacgaggccaccaacgccatgtaccacaggtgcctggactacgtgttggaggagctgaagcacaacgccaaggccaaggtgatggtggcctcccacaatgaggacacagtgcgcttcgcactgcgcaggatggaggagctgggcctgcatcctgctgaccaccaggtgtactttggacagctgctaggcatgtgtgaccagatcagcttcccgctgggccaggccggctaccccgtgtacaagtacgtgccctatggccccgtgatggaggtgctgccctacttgtcccgccgtgccctggagaacagcagcctcatgaagggcacccatcgggagcggcagttgctgtggctggagctcttgaggcggctccgaactggcaacctcttccatcgccctgcctagcacccgccagcacaccctcagcctccagcaccccccgcccccgcccaggccatcaccacagctgcagccaaccccatcctcacacagattcaccttttttcaccccacacttgcagagctgctggaggtgaggtcaggtgcctcccagccctgcccagagtatgggcactcaggtgtgggccgaacctgatacctgcctgggacagccactggaaacttttgggaactctcctcgaatgtgtgggcccaaggcccccacctctgtgacccccatgtccttggacctagaggattgtccaccttctgccaaggccagcccacacagcccgagccccttggggagcagtggccgggctggggaggcctgcctggtcaataaaccactgttcctgc

SEQ ID NO: 42787 - DNA, 1276 bp, Homo sapiens
ggtctcactctgttgctgtcttcacggagagcaggagcagaggctttgagaagccagtgggccttggcctcagccctgccggcagagggtccccaccatgcagctgaagtgccagggtgcttgtgaagtctaagcccttgtctggcatttgtcaggaatataggcgcacacttaagcggcccgggcgggtaccgccgtcccgccatggctctgaggcgcgccctgcccgcgctgcgcccctgcattccccgcttcgtccagctgtccacggcgccggcctcccgcgagcagcccgcagcgggcccagcggccgtgccaggaggtgggtcggccacggcagtgcggccgccggtgcccgccgtggacttcggcaacgcgcaggaggcgtaccgcagccggcgaacctgggagctggcgcggagcctgctggtgctgcgcttgtgcgcctggcccgcgctgctggcgcgccacgagcagctgctgtatgtttccaggaaacttctaggacagaggctattcaacaagctcatgaagatgaccttctatgggcattttgtagccggggaggaccaggagtccatccagcccctgcttcggcactacagggccttcggtgtcagcgccatcctggactatggagtggaggaggacctgagccccgaggaggcagagcacaaggagatggagtcctgcacctcagctgcggagagggatggcagtggcacgaataagcgggacaagcaataccaggcccaccgggccttcggggaccgcaggaatggtgtcatcagtgcccgcacctacttctacgccaatgaggccaagtgcgacagccacatggagacattcttgcgctgcatcgaagcctcaggtagagtcagcgatgacggcttcatagccattaagctcacagcactggggagaccccagtttctgctgcagttctcagaggtgctggccaagtggaggtgcttctttcaccaaatggctgtggagcaagggcaggcgggcctggctgccatggacaccaagctggaggtggcggtgctgcaggaaagtgtcgcaaagttgggcatcgcatccagggctgagattgaggactggttcacggcagagaccctgggagtgtctggcaccatggacctgctggactggagcagcctcatcgacagcaggaccaagctgtccaagcacctggtagtccccaacgcacagacaggacagctgagccctgctgtcccgttcactgagggatcttctgtcaacggtaccgaca

SEQ ID NO: 42788 - DNA, 134 bp, Homo sapiens
aaattcatatatgaatgcaagatgtgtggcaatggtggcattaaaagccggtggggaaagtatgggttgctcagtacatggtggtaggacaattggttatccatatgggaaaaagtaaaattagatcctggtga

SEQ ID NO: 42789 - DNA, 374 bp, Homo sapiens
gatttttttaaaaaactcaaaccaaatatgaataattttaatgtcctcattaagcatcaaggaaggaacttgttacagtgttacaattttacctaatctgcattaggttgcaaagttatctaatgcagatttcaaaaggtttctagtcactatacatcaggatgaaattggagaactttggagttgcattctttaattttatgtgtcaacttgcctgtgccacccagtgtccagattaaacattatttctgagcgtgtctgaaagggcatttccagaggagattagcattgcaattggtggacttggatttccttcccaatgtggttggacatcatccaacccattgaggcctgaataggatgaaaaggcaaag

SEQ ID NO: 42790 - DNA, 415 bp, Homo sapiens
agaaagtggaagaattgtcagacggtgttgagtaagtatttgaggttggtgattccgctttgcacaatggaaacagctctctgcttttgtttagccttgcttggtgggggcagtggcagggtccatcaaaggcttcaggtttgccagagaattccaaggcagggaaagacatggaagtgtggccattacagcactgatacacagagaaaaaggttggaatccatgggatgaaagtcttgaaaaactttccatgagggatccttgagaaaataaaatagaagaagcactcatccattcaacaaatagttattagcatcaatcatgtgccaaattatcttttacatctggagaaaccacactgcagaaaaaaggaaaagaaaaccccttgtgtttacagagcttatggtctagctaa

SEQ ID NO: 42791 - DNA, 313 bp, Homo sapiens
gtttgactctggcagcctaatgtccagagtccctaatttggtgttggggtgatgagcacttttgctcctgtgtttgagcaaggcctgcccagggcctggtactacctgaggagccccttctactggcacaacagcctgggggcgtgggtgccagtgccctttggatagccttgacttgcccaaggtcagcccaaggccagggagtatctggaggctctggcatatttgcatacaaaaggctgtttgccttggaatttgtgctgggaatggagcttagtctggcaccctgtgctcttgttcatcctgcctggcc

SEQ ID NO: 42792 - DNA, 798 bp, Homo sapiens
agaactgggtaggcctctcccaccatgtgcagtctcatggggagaggcttctttcgtttcctcgtcaaacatctgattgacgcttgcaaactgtctgaatttgccatgcaaggttttcaaacaatttgcatgtttttcagatgctttcaaatctttttttaaaaaaatagtgtaaaatattttaataagccaaagccatgtggaatttttgtttagatgccttaactgtgccacaccccacaaccccctatattattttggttgtctatttctcacagcatattttcagttttttgtccatttgacatcagtctgtggtttattttgtcatcagattacttgtgggtatacctaccccaaaattgttttctcattcacagcattagcatattcagcaaatccatctgtggtgggaattaaaaatattattggtattaaagaaatccattcaccccaaaacttgttttacaggattacaattttaattcaaaatttccagatttgggctatttctgtatgatccaataacttattttgtcacagggcttaatttgccatttttggggatttgtcgactcattttgtctgaattttcacaactggtattatgtcactagctacctgatatggctatttcccttataactcaatagtaccttaacacaaagtataactctgtagagttggtgaatattttagggaaatattagcaaaatgcatgtagtaaagacatcttatgaaaactgtattcatggaatttgatttagcatgctcaagcgacggccagcgaaaccgtat

SEQ ID NO: 42793 - DNA, 737 bp, Homo sapiens
ttcaaatctttttttaaaaaaatagtgtaaaatattttaataagccaaagccatgtggaatttttgtttagatgccttaactgtgccacaccccacaaccccctatattattttggttgtctatttctcacagcatattttcagttttttgtccatttgacatcagtctgtggtttattttgtcatcagattacttgtgggtatacctaccccaaaattgttttctcattcacagcattagcatattcagcaaatccatctgtggtgggaattaaaaatattattggtattaaagaaatccattcaccccaaaacttgttttacaggattacaattttaattcaaaatttccagatttgggctatttctgtatgatccaataacttattttgtcacagggcttaatttgccatttttggggatttgtcgactcattttgtctgaattttcacaactggtattatgtcactagctacctgatatggctatttcccttataactcaatagtaccttaacacaaagtataactctgtagagttggtgaatattttagggaaatattagcaaaatgcatgtagtaaagacatcttatgaaaactgtattcatggaatttgatttagcatgctcagttgccagttcccattatcgatactctttctatgcagaataccttagaaccgttatttccctcagtgtagattgctcttaaaatgtattcagttatttagtggcccc

SEQ ID NO: 42794 - DNA, 262 bp, Homo sapiens
gcgggtgtgatggctcatgcctgtaatcccagctcttagggaggcagaggtgggagaatagcttgagcccaggcaggtcaaatgaggtccttagggaagaccctaatctaatatcactgatatccttacaaaaaggggaagtctggaaacagagagctacagggagaatgccatgtgaccatgaagatggccatctacaagccatagagggaggcctggaacatatcctgccttcgcagccctcagaaagaaccagccctac

SEQ ID NO: 42795 - DNA, 792 bp, Homo sapiens
gcacattcctcgcattctaggattgagatacacagtttggttcttgtgagggcagccagggctggggaggagggcagagaacatcccagagatcaagactgctcttcttgctccctccccgactgacttggcccacactgactggcctgccacccctttacagtgatctccacccagtctctctctgcaaaggcctcccttggctctctgataaagttggagctgtgggtgcagcatttcacttggacctagcagcatcaatgagccagctcctcactggggaacatgcaaacccccagctgctggtgtgcaggaaaagaatccaggagatcacctgatgaagcccagcattttacagagcaaagtggtgaaaggaccctggtgagaggcccaaagaacaggaggtgtgagccaagagaaggtcctgccaggcctatgttgcaggctatttggaggctgaacttgaggaagacagatgtcagctttctgaagaaagtgtcaagcatttgtcccttacaaggactgggaagaaagagcatacattttccccgttgcctgcccttgacatatttataacatcccaggactggcactgaccatcctctcccaagtaacggaatgtcaagatgactgcagagattatgctgtgagtagaaaagctttatagtaagccgaggtgatcaccagcctccctgagctaaaataatcacagactttttttcttagtgacccctgtcctactctcaggcaccttatatcctcaaatcttaaatagagttaagagattgggca

SEQ ID NO: 42796 - DNA, 703 bp, Homo sapiens
gcacattcctcgcattctaggattgagatacacagtttggttcttgtgagggcagccagggctggggaggagggcagagaacatcccagagatcaagactgctcttcttgctccctccccgactgacttggcccacactgactggcctgccacccctttacagtgatctccacccagtctctctctgcaaaggcctcccttggctctctgataaagttggagctgtgggtgcagcatttcacttggacctagcagcatcaatgagccagctcctcactggggaacatgcaaacccccagctgctggtgtgcaggaaaagaatccaggagatcacctgatgaagcccagcattttacagataggcagtggagcaggggaatccagttgacactgtggctaaatttcagaaaacctcccatgagatcttgcaaaggagatggagaaaatatggctgaatgccagcaaggtaggacggaagcatgactgctctaacaaccaagctcaaagagcactgctcacccaatgtttccttcatgactagagcaaagtggtgaaaggaccctggtgagaggcccaaagaacaggaggtgtgagccaagagaaggtcctgccaggcctatgttgcaggctatttggaggctgaacttgaggtcagtatcaccagcatttttaggacggcagtggcctgatcaagtttatattc

SEQ ID NO: 42797 - DNA, 758 bp, Homo sapiens
gcacattcctcgcattctaggattgagatacacagtttggttcttgtgagggcagccagggctggggaggagggcagagaacatcccagagatcaagactgctcttcttgctccctccccgactgacttggcccacactgactggcctgccacccctttacagtgatctccacccagtctctctctgcaaaggcctcccttggctctctgataaagttggagctgtgggtgcagcatttcacttggacctagcagcatcaatgagccagctcctcactggggaacatgcaaacccccagctgctggtgtgcaggaaaagaatccaggagatcacctgatgaagcccagcattttacagataggcagtggagcaggggaatccagttgacactgtggctaaatttcagaaaacctcccatgagatcttgcaaaggagatggagaaaatatggctgaatgccagcaagagcaaagtggtgaaaggaccctggtgagaggcccaaagaacaggaggtgtgagccaagagaaggtcctgccaggcctatgttgcaggctatttggaggctgaacttgaggttgaggcagaattaactgttgcatgagatgtggggtatgggagaaggcctgagtacctagaaggattgggatgccatgaactgacagaggttgtgtaatagtgtgatataataagaaatacatggtgggcatggtggctcaagcctgtaatcccagcaccttggccaccactgcaggaccat

SEQ ID NO: 42798 - DNA, 730 bp, Homo sapiens
gcacattcctcgcattctaggattgagatacacagtttggttcttgtgagggcagccagggctggggaggagggcagagaacatcccagagatcaagactgctcttcttgctccctccccgactgacttggcccacactgactggcctgccacccctttacagtgatctccacccagtctctctctgcaaaggcctcccttggctctctgataaagttggagctgtgggtgcagcatttcacttggacctagcagcatcaatgagccagctcctcactggggaacatgcaaacccccagctgctggtgtgcaggaaaagaatccaggagatcacctgatgaagcccagcattttacaggccaatgaagatacacaggctttccatggcgcacatgagggaggacatggacttgagaattgtgaggcttgaagaatcctcagagatcacctagcataacaggaaaccaaggatttggagggaaaaatcttgtcgcagatcacacagaaatatcagggcctggtttgaatcttacctctgccccaaccagttgtgtgaccttgagaaagtgaagatcttttttgttcattggtttcctcatctgtaaaatagggatttaattttacctgcctcagaagattgtagtgaggattaaatgaggtgataaaactataatgtttaggacagtaaattgtatgtaatataatattaataaatattagccattattaa

SEQ ID NO: 42799 - DNA, 975 bp, Homo sapiens
gcacattcctcgcattctaggattgagatacacagtttggttcttgtgagggcagccagggctggggaggagggcagagaacatcccagagatcaagactgctcttcttgctccctccccgactgacttggcccacactgactggcctgccacccctttacagtgatctccacccagtctctctctgcaaaggcctcccttggctctctgataaagttggagctgtgggtgcagcatttcacttggacctagcagcatcaatgagccagctcctcactggggaacatgcaaacccccagctgctggtgtgcaggaaaagaatccaggagatcacctgatgaagcccagcattttacagataggcagtggagcaggggaatccagttgacactgtggctaaatttcagaaaacctcccatgagatcttgcaaaggagatggagaaaatatggctgaatgccagcaaggtaggacggaagcatgactgctctaacaaccaagctcaaagagcactgctcacccaatgtttccttcatgactagagcaaagtggtgaaaggaccctggtgagaggcccaaagaacaggaggtgtgagccaagagaaggtcctgccaggcctatgttgcaggctatttggaggctgaacttgaggaagacagatgtcagctttctgaagaaagtgtcaagcatttgtcccttacaaggactgggaagaaagagcatacattttccccgttgcctgcccttgacatatttataacatcccaggactggcactgaccatcctctcccaagtaacggaatgtcaagatgactgcagagattatgctgtgagtagaaaagctttatagtaagccgaggtgatcaccagcctccctgagctaaaataatcacagactttttttcttagtgacccctgtcctactctcaggcaccttatatcctcaaatcttaaatagagttaagagattgggca

SEQ ID NO: 42800 - DNA, 812 bp, Homo sapiens
gcacattcctcgcattctaggattgagatacacagtttggttcttgtgagggcagccagggctggggaggagggcagagaacatcccagagatcaagactgctcttcttgctccctccccgactgacttggcccacactgactggcctgccacccctttacagtgatctccacccagtctctctctgcaaaggcctcccttggctctctgataaagttggagctgtgggtgcagcatttcacttggacctagcagcatcaatgagccagctcctcactggggaacatgcaaacccccagctgctggtgtgcaggaaaagaatccaggagatcacctgatgaagcccagcattttacagataggcagtggagcaggggaatccagttgacactgtggctaaatttcagaaaacctcccatgagatcttgcaaaggagatggagaaaatatggctgaatgccagcaaggtaggacggaagcatgactgctctaacaaccaagctcaaagagcactgctcacccaatgtttccttcatgactagagcaaagtggtgaaaggaccctggtgagaggcccaaagaacaggaggtgtgagccaagagaaggtcctgccaggcctatgttgcaggctatttggaggctgaacttgagagtggctgtgagaggaaattcagaagtatctttggaagcattttgttaattttgagatgctggggacatcatcaaaatgaaaaacttttgtgcctcaaagaacaccatcaagaaactgaaaagacaacccaagaagacaaaatttgcaaatcttatatctga

SEQ ID NO: 42801 - DNA, 291 bp, Homo sapiens
actaagacttgtaaaacatcaggagttctcgtactaatggtctcagtatccctttatactcttaaaaattactgagaactccaaagagcttttaagtggaatgataggtagatagatagatagtaaatagatagatatctgtcattatttgccatatttgaaattgagactgataatatttaaaaattgttatcagttcatttaaaaataataataataaactcagaaaacttttgtgttgttataaaaattgttttaaaatcacagaacccttgaaatggtctgtcgacg

SEQ ID NO: 42802 - DNA, 429 bp, Homo sapiens
aaataatatctgatacactttttaaattattgcagatggaaaaattctatttcagcacagataaatagaaaaaattctattttaccgctgtcaaactgttgaagaaaagcagtattactgaaatggctcagtcataccagtttgaaggcactttgtccttaaatccagttattgctgtcagcgtcttcaaataggaatactcgactacagcaaagcccttacacctttaatacactgggaagcacttgggctttgccagccacaaacacattacttactgtgttaggctcacctccactttcttctcactaatcaaaagtagcacataactccttcgcatacatcattttcatgacctcaagccgatttactaagaaataaatttcttactcactttataaagaaatgtatgaagtatatgtatacata

SEQ ID NO: 42803 - DNA, 709 bp, Homo sapiens
gtaggaagttcattccagttctgcaaggtgtctgctttcagaatggagcccactttggtggtggcaaggcctggctgagttctttcaaagcaacatccaacttctctttgctctttgacttcctccagattctctcctgtgctggaggtaataagggttgcacttccctctttacttacactggtgaaacatgcagcgaggattcaaggtcaaaattgggtcaaagttaaactaacacagtctcctgccccacttacctgtcctctaaccccatccaccagccctaagtggtcatcacatgatcagaagtcagctgggggaagagcagggatagatagagcaattaaggagcctcttttggggtaagccacatgacaggggctttgcaacagtctttcatgagtggccgaaatcccccactcactgcaaatgtgcttctcaaagatgcaggattttttaataaacagaggaaatgataaattatgttgtaattccactccaaaggcatttggttcttaacagccaaatcctctgtagtctttaaataaacaaaaacttatttggtgaacagacagggaggaaaatgaaagattttctgtacttgggttccacatgtcaacaatttctctcctgtgtgtatgttggccaaagctgtatcatgataaatgaataaaggaaaacctcgagcccagggcagtcagacagctca

SEQ ID NO: 42804 - DNA, 1071 bp, Homo sapiens
gtgtatctgtgtattctttaccctcttggatgagtattgctttacattaagttcccagaagtataaattctagacccaaagaaatgtatatttttaactgaaaaggtgatgacaaattgttcttcagaaaaattacatgaaggctggacgcagtggctcatgcctgtaatcccagcattttgggaggctgaagcaggaggatcacttgaggtcaggaatttgagaccagcctggccaacatgtcaaaacccaatctctactaaaaataaagaaattagccaggtgtggtgatgggcatctgtaatcctagctattcaggaggctgaggcatgagaattgcttgaacccaggaggcagaggttgcagtgagctgagatcacacctctgcagtccagcctgggcaacagagtgagacttggtctcaaaaaaaaaaatgtatgaatgttcactcccacaaatagtattaacctgtttcccttatactgttcatcatcagtctcggcaacctgagataaatataatgatactttatgcttagtttagtttgcatttcttttattattagtgatgttgaccttctttttgtaagttaattctcaattttcttctgtggattatctgtttatatcctttgcccttttcctttaggtcttatcattcgttatattgatttgtaaaagcttctcgtatgttcaggatattagtgttgcaaatgtttgggcctttgttgatatttcttctgtgtccaattacagtttaaaattttatgtgataaaattgtaagtatttataattatggtcctttggtttcatctcatgcttagaaaggggttccccactccataattactaaaatatttattcatgccgggggcagtggctcacgcttgcaatcccagcactttgggaggccaaggtgggcggatcacttgaggtcgggagttcaaaaccagcctggacaacatggcgaaacctcatctctactaaaaatacaaaaattagctgggcacagtggtgggcgcttgtaatcccagctacttgggaagctgaggcaggagaatcatttgaacc

SEQ ID NO: 42805 - DNA, 454 bp, Homo sapiens
gacttaaatctatgttccctgtttcctggctgttgcattgtgtaggcccatttgatagttatactttgagattattgtaaacagaaggagttaacacagcttgctttggccagtgcttagctattaatacagtggtatctgtagggcctgtagtacctgccacagcctggaaagggggaccttagagcatgctagcctatgtaaactcagtattctggcccaacaacagccatcactgtgagtttcatctgtaatggctggctgcccatttctacctatactctgaataaccagagtgatactcccttctgagggttctcttgtatgacttcagaatgttccccaaactgaaagctcccgagtcaaagttcttacccattttctggcattctctgagtacaggctttctaaagcgtggggagaagtggatatgaagagctgagtactctctggg

SEQ ID NO: 42806 - DNA, 301 bp, Homo sapiens
ggcacgagcggcacgagcggcacgagtagaatattcatagcagcactgtttgtgcccaagactgcaagcagcctaaatccccataacatttttttacttggaaaaatatttatttagtatttattgtttgtttaattatttataagaacatttaatatgtgatctaccctcttagtgaatttttaaatttgcattatttttgactgtaggtacaatgttgtacagcagatctgtggagcttattcaacttgtttgactgaaactttatgccagctgatcagtaactccccatttcctcctc

SEQ ID NO: 42807 - DNA, 389 bp, Homo sapiens
atagtttccatcaattcttaaaagaagctgtatgtacaattcaagttcaccatcgttactggcatttggtctgataactggctactgttaatagtggcaaacagacttaaatacaggatactttacatatgacactttacctgcctcttttaaattttaaaattattctatttaaaataatctgacattataaatttctatgagtaaattatagaatggtctattaatttttcctttagtttgttgtgctttctgtggtcacagaaaatgctttagaaaaaataaaattattctagcccaggcacagtggctcatacctgtaatcccagcactttgggaggctgaggtgggcagaacacaaggtcaggagttcaagaccagcctggcca

SEQ ID NO: 42808 - DNA, 682 bp, Homo sapiens
atatcgtcgacccgcgccgtcggtgacacacagacctacttggaatggacaatgacagtaacacctatgtgacagctagtatcttgatataaagaacctattttagcatggcccatgggtctgtcggaagaaaaaaatgaatactaaccagtgaccattcaaccttaagaaatggggagagggagaagaggttgaaaatggtcacataaagcataatgaaatgaaaagaatgctttaggtggggacaacgggagtagaagtgttctgatgctactctatgtcatttgtttttacagaaatatcttgtgaagtcagggagtattcctttatcagcaaaaacttcacaattggtgttccagctgtggctgaccagctaaatagtttgaaagaaaaataatattttaaaataaagtttaaagagctttaaaagaaaaacatttaaaaaggaaaaaatcatttttaagattttaaaagaaaaaaacttttaaatgttgaaaaaaatttaagttgttatttttaaaagaaatattttaaaagttaaaaataattttttaatttaaagaagtttcagaattttaaaaattaaaagcaaagaaaattaaattcttaaagtttaaaaatgtaaaataaattaaggaacaaggttaaaaatgaaagtttaccaaaaaaggaagaaaatact

SEQ ID NO: 42809 - DNA, 1248 bp, Homo sapiens
agcacagtgagcagggatgaccacataccaggaatcccctcacttacagactgtctacagtggtttacaaggccagagcacctaggaagcagtgccaaaatcaaatgcaatagttgccaaagctaccaggagtctactaaacagctcacaatgaaaaaattacccattgtggcttgttttcatctcaagcggtttgagcatgtaggcaaacagaggcgaaagattaatacctttatctcctttcccttggagctggacatgactccgtttttggcctctactaaagagagcagaatgaaagaaggccagccaccaacagattgtgtgcccaatgagaataagtattccttgtttgcagtgattaatcaccatggaactttggaaagtggccactataccagcttcatccggcaacaaaaggaccagtggttcagctgtgatgatgccatcatcaccaaggctaccattgaggacttactctacagtgaagggtatttactgttctatcacaaacagggtctagagaaagactagtcttaccagaccacttactgaaaaaaaagtaaatgattaggcaaggattttgaagtgacacacagacctacttggaatggacaatgacagtaacacctatgtgacagctagtatcttgatataaagaacctattttagcatggcccatgggtctgtcggaagaaaaaaatgaatactaaccagtgaccattcaaccttaagaaatggggagagggagaagaggttgaaaatggtcacataaagcataatgaaatgaaaagaatgctttaggtggggacaacgggagtagaagtgttctgatgctactctatgtcatttgtttttacagaaatatcttgtgaagtcagggagtattcctttatcagcaaaaacttcacaattggtgttccagctgtggctgaccagctaaatagtttgaaagaaaaataatattttaaaataaagtttaaagagctttaaaagaaaaacatttaaaaaggaaaaaatcatttttaagattttaaaagaaaaaaacttttaaatgttgaaaaaaatttaagttgttatttttaaaagaaatattttaaaagttaaaaataattttttaatttaaagaagtttcagaattttaaaaattaaaagcaaagaaaattaaattcttaaagtttaaaaatgtaaaataaattaaggaacaaggttaaaaatgaaagtttaccaaaaaaggaagaaaatact

SEQ ID NO: 42810 - DNA, 423 bp, Homo sapiens
gtgaataagtctcatgagatctgatggttttacaaaggggagctcccctgcacatgccctctctcttgtctgccatgtaagatgtgcctttgcttttcctttgccttctatcatgattgtgagttctccccagccatgtggaaccgtgagttcactaaacctctttcttttataaattacccagtcttgggtatgtctttattagcagcatgagaacagactaatacacctgccaagaattttttctatattttggccagattgtatagttttttatggtgggagggtgaatctgacacaagctatttggtgtcaagtatccaagtcacatactaatttatttttaatgtaaagctatacaaccttctttctatacctaaatttttaattaaaatataataattaaaatattactaaaaattt

SEQ ID NO: 42811 - DNA, 684 bp, Homo sapiens
tattggccaggctggtcttgagctccagacctcaagtgatccacctgccttggcctcccgaagtgctgggttacctgtgagccactgcgcccagccaatatgcctttcttttaaattgccaactagagtgtgacaagaaagcctttggcctctcgtttgatcaggtttcttgaagaagcttttcgtgaaagatagagtggtagttatttatgtttcagagacttttaaaaaatccatacacaagtctttcaggatcttctcattccttttttagttatttcttttaaaaagtagtctgatatcttaccttacaggttggagaccctgatggattctgcatcgttttaggatttgcctctgattcttgctagtgttctcttttctgtcattatggggtttgccccgttttctctaatgtgctattcctgtgttttggttttgagttcttggttgcatgtgacctgactgcttctggagacagtacagtgcttgtcgtctctcagctgctgcttctgtgtctcaggagggctgagggctgccctccctcgggagcctccgtgcttcctcaggctttgctctttgttctgtacctctcttcacgttacctttgggtggtggttttcattcctgtgccgcctgcttctgggccagtgatccaggtgtctggtgaccacccgggcacag

SEQ ID NO: 42812 - DNA, 528 bp, Homo sapiens
gcagaatctcctgcctaggggatcagagcccagatgagtgcctctaaacagggctgaagagaaggctgcaggcctggaacagaggtgatagaattagatttcagctttgtgtctcagtgaaggaaacacaggcatccattaaaagcaccttcccttctggccttgctgctgcggagagcggcagcgtgcaaatccagcccctacctctcctcactcatctgttcacagcactgtggccttcagaacagtgtgtcagaaattaccttcttccataactgatcttcaggcctgaaaaggaaaaatttccaagcatagatctcctgaaatccctaaggagattgggcaaagagcctaaggaaaacaggactttgcatgttgttcctcatgcctacctaaaaatgctggttgcaccaggcaagtccttggttaatgcatcagtgaaatggattttgtagttcccagcacatgcactaatggaagtccctgcatgaatttcatgcctgcacttcttattggcaagagcagcgt

SEQ ID NO: 42813 - DNA, 333 bp, Homo sapiens
actggagctaattagcggctatccactttatatgaggtatgtgctcttcagttcaacatagtttccattacttcaccttcaaactatatccagaacccaaccattccacaccacttcactgttatctccttagttctaactgacatcacctctcacctggattattacaaattacctcttaacggaactctttgctttcttccattctccctttggggatatactcttaatataatggccagagtgatcctgttaaaagcctaagttattcatttatttaacaacatttattgagcacccttatataccagccacagttttagtgcttggaat

SEQ ID NO: 42814 - DNA, 432 bp, Homo sapiens
gactggtcatcttttacagctttgattcatgctcttagtttccagttttatatgtgcttaagcattataagacacctcagtatttttaggaaataagtggggacataaatataaacaacccggaaatcactgcccctagaattcacagagtggaagaaccaagctttttagggctgatgtggcgtgggctgggagacttctcttttgagaggctgatactggtctttgaatgaactctttaccccaccaaaagtagaaaaaggattccagtgacttcagaaatttttgttgttgttttgagaatgttggcaccactgggaataatgagagacgcctggcctattcaaaagtggcatcagaaacctcagtgttggaaatgcagcctttggttgtccatccccgcagctagagcatgagccccccaaggccaga

SEQ ID NO: 42815 - DNA, 388 bp, Homo sapiens
gtcctatagaagtctatatacagattcatttgattgttccatacactgtcttgcctgtaaatattaatttggatgttgatttttatttaatataaaaacagaaaaggggtcaggcgcggtggctcacacttgtagtcccaacactttgggaggccgaggcaggcggatcacttgacgccagcagtttgagaccagcctggccaacatggtgaaaccccatctctgctaaaaatacaaaaattaaccaggcatggtggtgcctgtaatcccagctactcgggaggctgaggcaggagaatcacttgaacctgggaggcggaggttgcagtgagccgagattgcgccactccagcctggacgacacagtgagaccctgtctcaaaaaaaa

SEQ ID NO: 42816 - DNA, 422 bp, Homo sapiens
tgtaatctaaaaatggtgatgctcaggaattaaaaataaattgaacccgctgtctgcaattcccttacattccctgcaacacacaatctcatcaactcttcaaggaaagactatacaagctctagaaagtgaagttctcaggtagcctccttcttttcctcccaccatttccaacctttggtagattaaaagggtaacttcctgtttttcattatctaaaatgaactgacctaatcagttggctctgtttctcattggagttttccttggttcttctcatttataaaaagaaatgcataataagaaatgcaaatttgggatgaaataacctgtaccataaacccccatgacacaagtttacctatataacaaacctagacatgtacccctgaacttaaaacaaaagttaaaaacaaacaaac

SEQ ID NO: 42817 - DNA, 433 bp, Homo sapiens
agaaaccccggaacagaactcgagttacctcaattccgttattctctcagagttttgtatttaaatttgaaacaacaaaggagaatgcaaactacaaagtataattaatgctgattggtaagtgcaagttttaattcatacatgaaatatcttactgaattattgttattattttttagagacagggtctcactttgtcatccaggctggagtgcagtgttgtgatcatggctcactgcagccttgatctcctgggctcaagccattccctgtctcagcctcctgagtagctaaggctacaggtacatgctaccatgcccaactaattaaaagaactttttggtagagatgtttgttcatttttgttttttgtttgtttgttttcagacagtctcactccagcctgggtaacaagagtgaaactccatctcga

SEQ ID NO: 42818 - DNA, 3389 bp, Homo sapiens
tctccctgcggacgggcgctgattggcccgtttgaaatgcgccaggcgggagctcacctgggctcttagcgtcgccgccggcttcgcagagcaccgcgccttagccgcgaagttctagttcttgctgccggtcctaacgtcccgcagtcttcgccagccagccgtcccgcatgcgcgtttgggcggcgtggagcctgctgccatgaagtcagcgagagctaagacaccccggaaacctaccgtgaaaaaagggtcccaaacgaaccttaaagacccagttggggtatactgtagggtgcgcccactgggctttcctgatcaagagtgttgcatagaagtgatcaataatacaactgttcagcttcatactcctgagggctacagactcaaccgaaatggagactataaggagactcagtattcatttaaacaagtatttggcactcacaccacccagaaggaactctttgatgttgtggctaatcccttggtcaatgacctcattcatggcaaaaatggtcttctttttacatatggtgtgacgggaagtggaaaaactcacacaatgactggttctccaggggaaggagggctgcttcctcgttgtttggacatgatctttaacagtatagggtcatttcaagctaaacgatatgttttcaaatctaatgataggaatagtatggatatacagtgtgaggttgatgccttattagaacgtcagaaaagagaagctatgcccaatccaaagacttcttctagcaaacgacaagtagatccagagtttgcagatatgataactgtacaagaattctgcaaagcagaagaggttgatgaagatagtgtctatggtgtatttgtctcttatattgaaatatataataattacatatatgatctattggaagaggtgccgtttgatcccataaaacccaaacctccacaatctaaattgcttcgtgaagataagaaccataacatgtatgttgcaggatgtacagaagttgaagtgaaatctactgaggaggcttttgaagttttctggagaggccagaaaaagagacgtattgctaatacccatttgaatcgtgagtccagccgttcccatagcgtgttcaacattaaattagttcaggctcccttggatgcagatggagacaatgtcttacaggaaaaagaacaaatcactataagtcagttgtccttggtagatcttgctggaagtgaaagaactaaccggaccagagcagaagggaacagattacgtgaagctggtaatattaatcagtcactaatgacgctaagaacatgtatggatgtcctaagagagaaccaaatgtatggaactaacaagatggttccatatcgagattcaaagttaacccatctgttcaagaactactttgatggggaaggaaaagtgcggatgatcgtgtgtgtgaaccccaaggctgaagattatgaagaaaacttgcaagtcatgagatttgcggaagtgactcaagaagttgaagtagcaagacctgtagacaaggcaatatgtggtttaacgcctgggaggagatacagaaaccagcctcgaggtccagttggaaatgaaccattggttactgacgtggttttgcagagttttccacctttgccgtcatgcgaaattttggatatcaacgatgagcagacacttccaaggctgattgaagccttagagaaacgacataacttacgacaaatgatgattgatgagtttaacaaacaatctaatgcttttaaagctttgttacaagaatttgacaatgctgttttaagtaaagaaaaccacatgcaagggaaactaaatgaaaaggagaagatgatctcaggacagaaattggaaatagaacgactggaaaagaaaaacaaaactttagaatataagattgagattttagagaaaacaactactatctatgaggaagataaacgcaatttgcaacaggaacttgaaactcagaaccagaaacttcagcgacagttttctgacaaacgcagattagaagccaggttgcaaggcatggtgacagaaacgacaatgaagtgggagaaagaatgtgagcgtagagtggcagccaaacagctggagatgcagaataaactctgggttaaagatgaaaagctgaaacaactgaaggctattgttactgaacctaaaactgagaagccagagagaccctctcgggagcgagatcgagaaaaagttactcaaagatctgtttctccatcacctgtgcctttactctttcaacctgatcagaacgcaccaccaattcgtctccgacacagacgatcacgctctgcaggagacagatgggtagatcataagcccgcctctaacatgcaaactgaaacagtcatgcagccacatgtccctcatgccatcacagtatctgttgcaaatgaaaaggcactagctaagtgtgagaagtacatgctgacccaccaggaactagcctccgatggggagattgaaactaaactaattaagggtgatatttataaaacaaggggtggtggacaatctgttcagtttactgatattgagactttaaagcaagaatcaccaaatggtagtcgaaaacgaagatcttccacagtagcacctgcccaaccagatggtgcagagtctgaatggaccgatgtagaaacaaggtgttctgtggctgtggagatgagagcaggatcccagctgggacctggatatcagcatcacgcacaacccaagcgcaaaaagccatgaactgacagtcccagtactgaaagaacattttcatttgtgtggatgatttctcgaaagccatgccagaagcagtcttccaggtcatcttgtagaactccagctttgttgaaaatcacggacctcagctacatcatacactgacccagagcaaagctttccctatggttccaaagacaactagtattcaacaaaccttgtatagtgtatgttttgccatatttaatattaatagcagaggaagactccttttttcatcactgtatgaattttttataatgtttttttaaaatatatttcatgtatacttataaactaattcacacaagtgtttgtcttagatgattaaggaagactatatctagatcatgtctgattttttattgtgacttctccagccctggtctgaatttcttaaggttttataaacaaatgctgctatttattagctgcaagaatgcactttagaactatttgacaattcagactttcaaaataaagatgtaaatgactggccaataataaccattttaggaaggtgttttgaattctgtatgtatatattcactttctgacatttagatatgccaaaagaattaaaatcaaaagcactaagaaa

SEQ ID NO: 42819 - DNA, 354 bp, Homo sapiens
tctccctgcggacgggcgctgattggcccgtttgaaatgcgccaggcgggagctcacctgggctcttagcgtcgccgccggcttcgcagagcaccgcgccttagccgcgaagttctagttcttgctgccggtcctaacgtcccgcagtcttcgccagccagccgtcccgcatgcgcgtttgggcggcgtggagcctgctgccatgaagtcagcgtgagtacgaggccgccgagcagggagagagggcggacgggggccgaggcctcggggctgggggcaggcgtctccactcagggggcaggcgtctccactcaggccgcggccgtacgcgggcagcgcggacagcatcccgcc

SEQ ID NO: 42820 - DNA, 3701 bp, Homo sapiens
tctccctgcggacgggcgctgattggcccgtttgaaatgcgccaggcgggagctcacctgggctcttagcgtcgccgccggcttcgcagagcaccgcgccttagccgcgaagttctagttcttgctgccggtcctaacgtcccgcagtcttcgccagccagccgtcccgcatgcgcgtttgggcggcgtggagcctgctgccatgaagtcagcgagagctaagacaccccggaaacctaccgtgaaaaaagggtcccaaacgaaccttaaagacccagttggggtatactgtagggtgcgcccactgggctttcctgatcaagagtgttgcatagaagtgatcaataatacaactgttcagcttcatactcctgagggctacagactcaaccgaaatggagactataaggagactcagtattcatttaaacaagtatttggcactcacaccacccagaaggaactctttgatgttgtggctaatcccttggtcaatgacctcattcatggcaaaaatggtcttctttttacatatggtgtgacgggaagtggaaaaactcacacaatgactggttctccaggggaaggagggctgcttcctcgttgtttggacatgatctttaacagtatagggtcatttcaagctaaacgatatgttttcaaatctaatgataggaatagtatggatatacagtgtgaggttgatgccttattagaacgtcagaaaagagaagctatgcccaatccaaagacttcttctagcaaacgacaagtagatccagagtttgcagatatgataactgtacaagaattctgcaaagcagaagaggttgatgaagatagtgtctatggtgtatttgtctcttatattgaaatatataataattacatatatgatctattggaagaggtgccgtttgatcccataaaacccaaacctccacaatctaaattgcttcgtgaagataagaaccataacatgtatgttgcaggatgtacagaagttgaagtgaaatctactgaggaggcttttgaagttttctggagaggccagaaaaagagacgtattgctaatacccatttgaatcgtgagtccagccgttcccatagcgtgttcaacattaaattagttcaggctcccttggatgcagatggagacaatgtcttacaggaaaaagaacaaatcactataagtcagttgtccttggtagatcttgctggaagtgaaagaactaaccggaccagagcagaagggaacagattacgtgaagctggtaatattaatcagtcactaatgacgctaagaacatgtatggatgtcctaagagagaaccaaatgtatggaactaacaagatggttccatatcgagattcaaagttaacccatctgttcaagaactactttgatggggaaggaaaagtgcggatgatcgtgtgtgtgaaccccaaggctgaagattatgaagaaaacttgcaagtcatgagatttgcggaagtgactcaagaagttgaagtagcaagacctgtagacaaggcaatatgtggtttaacgcctgggaggagatacagaaaccagcctcgaggtccagttggaaatgaaccattggttactgacgtggttttgcagagttttccacctttgccgtcatgcgaaattttggatatcaacgatgagcagacacttccaaggctgattgaagccttagagaaacgacataacttacgacaaatgatgattgatgagtttaacaaacaatctaatgcttttaaagctttgttacaagaatttgacaatgctgttttaagtaaagaaaaccacatgcaagggaaactaaatgaaaaggagaagatgatctcaggacagaaattggaaatagaacgactggaaaagaaaaacaaaactttagaatataagattgagattttagagaaaacaactactatctatgaggaagataaacgcaatttgcaacaggaacttgaaactcagaaccagaaacttcagcgacagttttctgacaaacgcagattagaagccaggttgcaaggcatggtgacagaaacgacaatgaagtgggagaaagaatgtgagcgtagagtggcagccaaacagctggagatgcagaataaactctgggttaaagatgaaaagctgaaacaactgaaggctattgttactgaacctaaaactgagaagccagagagaccctctcgggagcgagatcgagaaaaagttactcaaagatctgtttctccatcacctgtgcctctttctagtaactatattgctcagatttccaacggccagcaactcatgagccagccacagctacataggcgctctaactcttgcagcagcatttctgtagcttcctgtatttcggaatgggagcagaaaattcctacgtacaacacacctctcaaagtcacatctattgcaaggcgtaggcagcaggagccaggacaaagcaaaacttgtatcgtgtcagacagaaggcgagggatgtactggactgaaggcagggaggtggttcctacattcagaaatgagatagaaatagaagaggatcattgcggcaggttactctttcaacctgatcagaacgcaccaccaattcgtctccgacacagacgatcacgctctgcaggagacagatgggtagatcataagcccgcctctaacatgcaaactgaaacagtcatgcagccacatgtccctcatgccatcacagtatctgttgcaaatgaaaaggcactagctaagtgtgagaagtacatgctgacccaccaggaactagcctccgatggggagattgaaactaaactaattaagggtgatatttataaaacaaggggtggtggacaatctgttcagtttactgatattgagactttaaagcaagaatcaccaaatggtagtcgaaaacgaagatcttccacagtagcacctgcccaaccagatggtgcagagtctgaatggaccgatgtagaaacaaggtgttctgtggctgtggagatgagagcaggatcccagctgggacctggatatcagcatcacgcacaacccaagcgcaaaaagccatgaactgacagtcccagtactgaaagaacattttcatttgtgtggatgatttctcgaaagccatgccagaagcagtcttccaggtcatcttgtagaactccagctttgttgaaaatcacggacctcagctacatcatacactgacccagagcaaagctttccctatggttccaaagacaactagtattcaacaaaccttgtatagtgtatgttttgccatatttaatattaatagcagaggaagactccttttttcatcactgtatgaattttttataatgtttttttaaaatatatttcatgtatacttataaactaattcacacaagtgtttgtcttagatgattaaggaagactatatctagatcatgtctgattttttattgtgacttctccagccctggtctgaatttcttaaggttttataaacaaatgctgctatttattagctgcaagaatgcactttagaactatttgacaattcagactttcaaaataaagatgtaaatgactggccaataataaccattttaggaaggtgttttgaattctgtatgtatatattcactttctgacatttagatatgccaaaagaattaaaatcaaaagcactaagaaa

SEQ ID NO: 42821 - DNA, 2587 bp, Homo sapiens
tggtacggtccggagccgctggtatcttggatgcagatgcgcgacaatgtcttacaggaaaaagaacaaatcactataagtcagttgtccttggtagatcttgctggaagtgaaagaactaaccggaccagagcagaagggaacagattacgtgaagctggtaatattaatcagtcactaatgacgctaagaacatgtatggatgtcctaagagagaaccaaatgtatggaactaacaagatggttccatatcgagattcaaagttaacccatctgttcaagaactactttgatggggaaggaaaagtgcggatgatcgtgtgtgtgaaccccaaggctgaagattatgaagaaaacttgcaagtcatgagatttgcggaagtgactcaagaagttgaagtagcaagacctgtagacaaggcaatatgtggtttaacgcctgggaggagatacagaaaccagcctcgaggtccagttggaaatgaaccattggttactgacgtggttttgcagagttttccacctttgccgtcatgcgaaattttggatatcaacgatgagcagacacttccaaggctgattgaagccttagagaaacgacataacttacgacaaatgatgattgatgagtttaacaaacaatctaatgcttttaaagctttgttacaagaatttgacaatgctgttttaagtaaagaaaaccacatgcaagggaaactaaatgaaaaggagaagatgatctcaggacagaaattggaaatagaacgactggaaaagaaaaacaaaactttagaatataagattgagattttagagaaaacaactactatctatgaggaagataaacgcaatttgcaacaggaacttgaaactcagaaccagaaacttcagcgacagttttctgacaaacgcagattagaagccaggttgcaaggcatggtgacagaaacgacaatgaagtgggagaaagaatgtgagcgtagagtggcagccaaacagctggagatgcagaataaactctgggttaaagatgaaaagctgaaacaactgaaggctattgttactgaacctaaaactgagaagccagagagaccctctcgggagcgagatcgagaaaaagttactcaaagatctgtttctccatcacctgtgcctctttctagtaactatattgctcagatttccaacggccagcaactcatgagccagccacagctacataggcgctctaactcttgcagcagcatttctgtagcttcctgtatttcggaatgggagcagaaaattcctacgtacaacacacctctcaaagtcacatctattgcaaggcgtaggcagcaggagccaggacaaagcaaaacttgtatcgtgtcagacagaaggcgagggatgtactggactgaaggcagggaggtggttcctacattcagaaatgagatagaaatagaagaggatcattgcggcaggttactctttcaacctgatcagaacgcaccaccaattcgtctccgacacagacgatcacgctctgcaggagacagatgggtagatcataagcccgcctctaacatgcaaactgaaacagtcatgcagccacatgtccctcatgccatcacagtatctgttgcaaatgaaaaggcactagctaagtgtgagaagtacatgctgacccaccaggaactagcctccgatggggagattgaaactaaactaattaagggtgatatttataaaacaaggggtggtggacaatctgttcagtttactgatattgagactttaaagcaagaatcaccaaatggtagtcgaaaacgaagatcttccacagtagcacctgcccaaccagatggtgcagagtctgaatggaccgatgtagaaacaaggtgttctgtggctgtggagatgagagcaggatcccagctgggacctggatatcagcatcacgcacaacccaagcgcaaaaagccatgaactgacagtcccagtactgaaagaacattttcatttgtgtggatgatttctcgaaagccatgccagaagcagtcttccaggtcatcttgtagaactccagctttgttgaaaatcacggacctcagctacatcatacactgacccagagcaaagctttccctatggttccaaagacaactagtattcaacaaaccttgtatagtgtatgttttgccatatttaatattaatagcagaggaagactccttttttcatcactgtatgaattttttataatgtttttttaaaatatatttcatgtatacttataaactaattcacacaagtgtttgtcttagatgattaaggaagactatatctagatcatgtctgattttttattgtgacttctccagccctggtctgaatttcttaaggttttataaacaaatgctgctatttattagctgcaagaatgcactttagaactatttgacaattcagactttcaaaataaagatgtaaatgactggccaataataaccattttaggaaggtgttttgaattctgtatgtatatattcactttctgacatttagatatgccaaaagaattaaaatcaaaagcactaagaaa

SEQ ID NO: 42822 - DNA, 2838 bp, Homo sapiens
  misc_feature (25)..(26): n is a, c, g, or t
tctaattccaaaaattaaggatagnngttagaaccagaaaaactccacatactacaacattaaattagttcaggctcccttggatgcagatggagacaatgtcttacaggtaaagttgtagtatgtggagtttttctggttctaactctatccttaatttttggaattagagtaatccagccaacatggcaaaaacctgtctcgagtaaaattggaaaaatcagccaggcatggtgatgcaccactcctgtaatcccagctacttgtgtacctgaggcaggaggatcgcttgaacctgggaggcagaggaaaaagaacaaatcactataagtcagttgtccttggtagatcttgctggaagtgaaagaactaaccggaccagagcagaagggaacagattacgtgaagctggtaatattaatcagtcactaatgacgctaagaacatgtatggatgtcctaagagagaaccaaatgtatggaactaacaagatggttccatatcgagattcaaagttaacccatctgttcaagaactactttgatggggaaggaaaagtgcggatgatcgtgtgtgtgaaccccaaggctgaagattatgaagaaaacttgcaagtcatgagatttgcggaagtgactcaagaagttgaagtagcaagacctgtagacaaggcaatatgtggtttaacgcctgggaggagatacagaaaccagcctcgaggtccagttggaaatgaaccattggttactgacgtggttttgcagagttttccacctttgccgtcatgcgaaattttggatatcaacgatgagcagacacttccaaggctgattgaagccttagagaaacgacataacttacgacaaatgatgattgatgagtttaacaaacaatctaatgcttttaaagctttgttacaagaatttgacaatgctgttttaagtaaagaaaaccacatgcaagggaaactaaatgaaaaggagaagatgatctcaggacagaaattggaaatagaacgactggaaaagaaaaacaaaactttagaatataagattgagattttagagaaaacaactactatctatgaggaagataaacgcaatttgcaacaggaacttgaaactcagaaccagaaacttcagcgacagttttctgacaaacgcagattagaagccaggttgcaaggcatggtgacagaaacgacaatgaagtgggagaaagaatgtgagcgtagagtggcagccaaacagctggagatgcagaataaactctgggttaaagatgaaaagctgaaacaactgaaggctattgttactgaacctaaaactgagaagccagagagaccctctcgggagcgagatcgagaaaaagttactcaaagatctgtttctccatcacctgtgcctctttctagtaactatattgctcagatttccaacggccagcaactcatgagccagccacagctacataggcgctctaactcttgcagcagcatttctgtagcttcctgtatttcggaatgggagcagaaaattcctacgtacaacacacctctcaaagtcacatctattgcaaggcgtaggcagcaggagccaggacaaagcaaaacttgtatcgtgtcagacagaaggcgagggatgtactggactgaaggcagggaggtggttcctacattcagaaatgagatagaaatagaagaggatcattgcggcaggttactctttcaacctgatcagaacgcaccaccaattcgtctccgacacagacgatcacgctctgcaggagacagatgggtagatcataagcccgcctctaacatgcaaactgaaacagtcatgcagccacatgtccctcatgccatcacagtatctgttgcaaatgaaaaggcactagctaagtgtgagaagtacatgctgacccaccaggaactagcctccgatggggagattgaaactaaactaattaagggtgatatttataaaacaaggggtggtggacaatctgttcagtttactgatattgagactttaaagcaagaatcaccaaatggtagtcgaaaacgaagatcttccacagtagcacctgcccaaccagatggtgcagagtctgaatggaccgatgtagaaacaaggtgttctgtggctgtggagatgagagcaggatcccagctgggacctggatatcagcatcacgcacaacccaagcgcaaaaagccatgaactgacagtcccagtactgaaagaacattttcatttgtgtggatgatttctcgaaagccatgccagaagcagtcttccaggtcatcttgtagaactccagctttgttgaaaatcacggacctcagctacatcatacactgacccagagcaaagctttccctatggttccaaagacaactagtattcaacaaaccttgtatagtgtatgttttgccatatttaatattaatagcagaggaagactccttttttcatcactgtatgaattttttataatgtttttttaaaatatatttcatgtatacttataaactaattcacacaagtgtttgtcttagatgattaaggaagactatatctagatcatgtctgattttttattgtgacttctccagccctggtctgaatttcttaaggttttataaacaaatgctgctatttattagctgcaagaatgcactttagaactatttgacaattcagactttcaaaataaagatgtaaatgactggccaataataaccattttaggaaggtgttttgaattctgtatgtatatattcactttctgacatttagatatgccaaaagaattaaaatcaaaagcactaagaaa

SEQ ID NO: 42823 - DNA, 3440 bp, Homo sapiens
tctccctgcggacgggcgctgattggcccgtttgaaatgcgccaggcgggagctcacctgggctcttagcgtcgccgccggcttcgcagagcaccgcgccttagccgcgaagttctagttcttgctgccggtcctaacgtcccgcagtcttcgccagccagccgtcccgcatgcgcgtttgggcggcgtggagcctgctgccatgaagtcagcgagagctaagacaccccggaaacctaccgtgaaaaaagggtcccaaacgaaccttaaagacccagttggggtatactgtagggtgcgcccactgggctttcctgatcaagagtgttgcatagaagtgatcaataatacaactgttcagcttcatactcctgagggctacagactcaaccgaaatggagactataaggagactcagtattcatttaaacaagtatttggcactcacaccacccagaaggaactctttgatgttgtggctaatcccttggtcaatgacctcattcatggcaaaaatggtcttctttttacatatggtgtgacgggaagtggaaaaactcacacaatgactggttctccaggggaaggagggctgcttcctcgttgtttggacatgatctttaacagtatagggtcatttcaagctaaacgatatgttttcaaatctaatgataggaatagtatggatatacagtgtgaggttgatgccttattagaacgtcagaaaagagaagctatgcccaatccaaagacttcttctagcaaacgacaagtagatccagagtttgcagatatgataactgtacaagaattctgcaaagcagaagaggttgatgaagatagtgtctatggtgtatttgtctcttatattgaaatatataataattacatatatgatctattggaagaggtgccgtttgatcccataaaacccaaacctccacaatctaaattgcttcgtgaagataagaaccataacatgtatgttgcaggatgtacagaagttgaagtgaaatctactgaggaggcttttgaagttttctggagaggccagaaaaagagacgtattgctaatacccatttgaatcgtgagtccagccgttcccatagcgtgttcaacattaaattagttcaggctcccttggatgcagatggagacaatgtcttacaggaaaaagaacaaatcactataagtcagttgtccttggtagatcttgctggaagtgaaagaactaaccggaccagagcagaagggaacagattacgtgaagctggtaatattaatcagtcactaatgacgctaagaacatgtatggatgtcctaagagagaaccaaatgtatggaactaacaagatggttccatatcgagattcaaagttaacccatctgttcaagaactactttgatggggaaggaaaagtgcggatgatcgtgtgtgtgaaccccaaggctgaagattatgaagaaaacttgcaagtcatgagatttgcggaagtgactcaagaagttgaagtagcaagacctgtagacaaggcaatatgtggtttaacgcctgggaggagatacagaaaccagcctcgaggtccagttggaaatgaaccattggttactgacgtggttttgcagagttttccacctttgccgtcatgcgaaattttggatatcaacgatgagcagacacttccaaggctgattgaagccttagagaaacgacataacttacgacaaatgatgattgatgagtttaacaaacaatctaatgcttttaaagctttgttacaagaatttgacaatgctgttttaagtaaagaaaaccacatgcaagggaaactaaatgaaaaggagaagatgatctcaggacagaaattggaaatagaacgactggaaaagaaaaacaaaactttagaatataagattgagattttagagaaaacaactactatctatgaggaagataaacgcaatttgcaacaggaacttgaaactcagaaccagaaacttcagcgacagttttctgacaaacgcagattagaagccaggttgcaaggcatggtgacagaaacgacaatgaagtgggagaaagaatgtgagcgtagagtggcagccaaacagctggagatgcagaataaactctgggttaaagatgaaaagctgaaacaactgaaggctattgttactgaacctaaaactgagaagccagagagaccctctcgggagcgagatcgagaaaaagttactcaaagatctgtttctccatcacctgtgcctctttctagtaactatattgctcagatttccaacggccagcaactcatgagccagccacagctacataggcgctctaactcttgcagcagcatttctgtagcttcctgtatttcggaatgggagcagaaaattcctacgtacaacacacctctcaaagtcacatctattgcaaggcgtaggcagcaggagccaggacaaagcaaaacttgtatcgtgtcagacagaaggcgagggatgtactggactgaaggcagggaggtggttcctacattcagaaatgagatagaaatagaagaggatcattgcggcaggttactctttcaacctgatcagaacgcaccaccaattcgtctccgacacagacgatcacgctctgcaggagacagatgggtagatcataagcccgcctctaacatgcaaactgaaacagtcatgcagccacatgtccctcatgccatcacagtatctgttgcaaatgaaaaggcactagctaagtgtgagaagtacatgctgacccaccaggaactagcctccgatggggagattgaaactaaactaattaagggtgatatttataaaacaaggggtggtggacaatctgttcagtttactgatattgagactttaaagcaagaatcaccaaatggtagtcgaaaacgaagatcttccacagtagcacctgcccaaccagatggtgcagagtctgaatggaccgatgtagaaacaaggtgttctgtggctgtggagatgagagcaggatcccagctgggacctggatatcagcatcacgcacaacccaagcgcaaaaagccatgaactgacagtcccagtactgaaagaacattttcatttgtgtggatgatttctcgaaagccatgccagaagcagtcttccaggtcatcttgtagaactccagctttgttgaaaatcacggacctcagctacatcatacactgacccagagcaaagctttccctatggttccaaagacaactagtattcaacaaaccttgtatagtgtatgttttgccatatttaatattaatagcagaggaagactccttttttcatcactgtatgaattttttataatgtttttttaaaatatatttcatgtccccgtacatcgttagaagcttgaattcgagcagtagtagtagtaggcggccgc

SEQ ID NO: 42824 - DNA, 3348 bp, Homo sapiens
tctccctgcggacgggcgctgattggcccgtttgaaatgcgccaggcgggagctcacctgggctcttagcgtcgccgccggcttcgcagagcaccgcgccttagccgcgaagttctagttcttgctgccggtcctaacgtcccgcagtcttcgccagccagccgtcccgcatgcgcgtttgggcggcgtggagcctgctgccatgaagtcagcgagagctaagacaccccggaaacctaccgtgaaaaaagggtcccaaacgaaccttaaagacccagttggggtatactgtagggtgcgcccactgggctttcctgatcaagagtgttgcatagaagtgatcaataatacaactgttcagcttcatactcctgagggctacagactcaaccgaaatggagactataaggagactcagtattcatttaaacaagtatttggcactcacaccacccagaaggaactctttgatgttgtggctaatcccttggtcaatgacctcattcatggcaaaaatggtcttctttttacatatggtgtgacgggaagtggaaaaactcacacaatgactggttctccaggggaaggagggctgcttcctcgttgtttggacatgatctttaacagtatagggtcatttcaagctaaacgatatgttttcaaatctaatgataggaatagtatggatatacagtgtgaggttgatgccttattagaacgtcagaaaagagaagctatgcccaatccaaagacttcttctagcaaacgacaagtagatccagagtttgcagatatgataactgtacaagaattctgcaaagcagaagaggttgatgaagatagtgtctatggtgtatttgtctcttatattgaaatatataataattacatatatgatctattggaagaggtgccgtttgatcccataaaacccaaacctccacaatctaaattgcttcgtgaagataagaaccataacatgtatgttgcaggatgtacagaagttgaagtgaaatctactgaggaggcttttgaagttttctggagaggccagaaaaagagacgtattgctaatacccatttgaatcgtgagtccagccgttcccatagcgtgttcaacattaaattagttcaggctcccttggatgcagatggagacaatgtcttacaggaaaaagaacaaatcactataagtcagttgtccttggtagatcttgctggaagtgaaagaactaaccggaccagagcagaagggaacagattacgtgaagctggtaatattaatcagtcactaatgacgctaagaacatgtatggatgtcctaagagagaaccaaatgtatggaactaacaagatggttccatatcgagattcaaagttaacccatctgttcaagaactactttgatggggaaggaaaagtgcggatgatcgtgtgtgtgaaccccaaggctgaagattatgaagaaaacttgcaagtcatgagatttgcggaagtgactcaagaagttgaagtagcaagacctgtagacaaggcaatatgtggtttaacgcctgggaggagatacagaaaccagcctcgaggtccagttggaaatgaaccattggttactgacgtggttttgcagagttttccacctttgccgtcatgcgaaattttggatatcaacgatgagcagacacttccaaggctgattgaagccttagagaaacgacataacttacgacaaatgatgattgatgagtttaacaaacaatctaatgcttttaaagctttgttacaagaatttgacaatgctgttttaagtaaagaaaaccacatgcaagggaaactaaatgaaaaggagaagatgatctcaggacagaaattggaaatagaacgactggaaaagaaaaacaaaactttagaatataagattgagattttagagaaaacaactactatctatgaggaagataaacgcaatttgcaacaggaacttgaaactcagaaccagaaacttcagcgacagttttctgacaaacgcagattagaagccaggttgcaaggcatggtgacagaaacgacaatgaagtgggagaaagaatgtgagcgtagagtggcagccaaacagctggagatgcagaataaactctgggttaaagatgaaaagctgaaacaactgaaggctattgttactgaacctaaaactgagaagccagagagaccctctcgggagcgagatcgagaaaaagttactcaaagatctgtttctccatcacctgtgcctctttctagtaactatattgctcagatttccaacggccagcaactcatgagccagccacagctacataggcgctctaactcttgcagcagcatttctgtagcttcctgtatttcggaatgggagcagaaaattcctacgtacaacacacctctcaaagtcacatctattgcaaggcgtaggcagcaggagccaggacaaagcaaaacttgtatcgtgtcagacagaaggcgagggatgtactggactgaaggcagggaggtggttcctacattcagaaatgagatagaaatagaagaggatcattgcggcaggttactctttcaacctgatcagaacgcaccaccaattcgtctccgacacagacgatcacgctctgcaggagacagatgggtagatcataagcccgcctctaacatgcaaactgaaacagtcatgcagccacatgtccctcatgccatcacagtatctgttgcaaatgaaaaggcactagctaagtgtgagaagtacatgctgacccaccaggaactagcctccgatggggagattgaaactaaactaattaaggtaaaaaactaattttcacaggagaaaaaaatatatttaaaaattcaacaaaagtccatttgtcctgctactcctttggtgacacacaggtagtgtcaactggaacatcagtaggtatttgatataacctttttgttagcagaaaattagtcactgcttaggttttaagtctgccaaactgggactaagtatgctttaaataggtatagattcttcggtttcttagaattctagatccatgatgtactttaattttttaatgactgtatatttagttttaaccactacttaaagtaatctaagcaaagaattcctattgctctccatcagttcaagataaaaaaacaaaaacaaaacaaaacgaaacctatgttaaaatttgacccgtcaaaattactcagtattgagctgcctaaagccgttttccagaaagagacttgcctgactatagaagaattcccctttgatcatagggtcagtgaataatcaggaaagtaaaagataagaccaaaaaa

SEQ ID NO: 42825 - DNA, 1035 bp, Homo sapiens
cttgcaagtgttattcctgaggagaatctcttggaaagaacatgggaaggtaggggtcaggaggctaagctatggccttagccaccaactctctttgcaaacttatctaaaatgagataagttacctggatgacctaaagacctttctggctcacaacatttgtggcctgtgccagaaataaattacgagtgactggtgttttaacgtaagagtctttgctgaactagaaagcaatattgcatttcacctaggtgtggagcctgctaaataactgtgttttatagactattgagaggagctgatctttttcctcttgtcattttcctctcagtgttctgtggctgtggagatgagagcaggatcccagctgggacctggatatcagcatcacgcacaacccaagcgcaaaaagccatgaactgacagtcccagtactgaaagaacattttcatttgtgtggatgatttctcgaaagccatgccagaagcagtcttccaggtcatcttgtagaactccagctttgttgaaaatcacggacctcagctacatcatacactgacccagagcaaagctttccctatggttccaaagacaactagtattcaacaaaccttgtatagtgtatgttttgccatatttaatattaatagcagaggaagactccttttttcatcactgtatgaattttttataatgtttttttaaaatatatttcatgtatacttataaactaattcacacaagtgtttgtcttagatgattaaggaagactatatctagatcatgtctgattttttattgtgacttctccagccctggtctgaatttcttaaggttttataaacaaatgctgctatttattagctgcaagaatgcactttagaactatttgacaattcagactttcaaaataaagatgtaaatgactggccaataataaccattttaggaaggtgttttgaattctgtatgtatatattcactttctgacatttagatatgccaaaagaattaaaatcaaaagcactaagaaa

SEQ ID NO: 42826 - DNA, 188 bp, Homo sapiens
tgagaatgggggtgggaattcagatgaaatgttagagaaaaaagtgctttctccatgatgtttctttccacaaatatgcttgcataagcaaattaaggaagactattttatagcgacatgaaatgtttatataccaaatattgaacatagtggtctaccttcctagattgagattttagagaaaacaa

SEQ ID NO: 42827 - DNA, 449 bp, Homo sapiens
actatttagctttacaatcttatctaagtttaatatttctctggagtattatacgttatatatatattataaaatatatataattttcattagaagaataacatgtcatgtcacttggcgttttagtcctagtcttaaatgaagataccagcatctcataatttaggagactaatcttttttttctttcccatagacctccacaatctaaattgcttcgtgaagataagaaccataacatgtatgttgcaggatgtacagaagttgaagtgaaatctactgaggaggcttttgaagttttctggagaggttagaaacacctagaactagaaaaatacagaatgatgaatatcacctagagttgctactaagtttgatggcaattttttttgacttattagaaagcatgtataatgaaatgactgagttcaggtttgaccaatgatttct

SEQ ID NO: 42828 - DNA, 397 bp, Homo sapiens
tataaaacaaggggtggtggacaatctgttcagtttactgatattgagactttaaagcaagaatcaccaaatgggtaagtaaccatcaaaaatctctgtataaaagttggtcattttcttagctgctcattttggaggaacagaatagcctgtgaaatgtatcattaattctccaaagggatgtagatagtattcccctacttctaatatttttcctcttcttagatggaaaaataattgttgcatcatgtttcccctttttcagtagtcgaaaacgaagatcttccacagtagcacctgcccaaccagatggtgcagagtctgaatggaccgatgtagaaacaagggtaggggaaaaattaaatatttgtctgcctactaaaattaggtttgtcat

SEQ ID NO: 42829 - DNA, 501 bp, Homo sapiens
cggacctcagctacatcatacactgacccagagcaaagctttccctatggttccaaagacaactagtattcaacaaaccttgtatagtgtatgttttgccatatttaatattaatagcagaggaagactccttttttcatcactgtatgaattttttataatgtttttttaaaatatatttcatgtatacttataaactaattcacacaagtgtttgtcttagatgattaaggaagactatatctagatcatgtctgattttttattgtgacttctccagccctggtctgaatttcttaaggttttataaacaaatgctgctatttattagctgcaagaatgcactttagaactatttgacaattcagactttcaaaataaagatgtaaatgactggccaataataaccattttaggaaggtgttttgaattctgtatgtatatattcactttctgacatttagatatgccaaaagaattaaaatcaaaagcactaagaaa

SEQ ID NO: 42830 - DNA, 3247 bp, Homo sapiens
gtactcctcaaccactctcctaatgattggaacaaaagaaaaaaaaagaaaaaaaaagccatgaagtcagcgagagctaagacaccccggaaacctaccgtgaaaaaagggtcccaaacgaaccttaaagacccagttggggtatactgtagggtgcgcccactgggctttcctgatcaagagtgttgcatagaagtgatcaataatacaactgttcagcttcatactcctgagggctacagactcaaccgaaatggagactataaggagactcagtattcatttaaacaagtatttggcactcacaccacccagaaggaactctttgatgttgtggctaatcccttggtcaatgacctcattcatggcaaaaatggtcttctttttacatatggtgtgacgggaagtggaaaaactcacacaatgactggttctccaggggaaggagggctgcttcctcgttgtttggacatgatctttaacagtatagggtcatttcaagctaaacgatatgttttcaaatctaatgataggaatagtatggatatacagtgtgaggttgatgccttattagaacgtcagaaaagagaagctatgcccaatccaaagacttcttctagcaaacgacaagtagatccagagtttgcagatatgataactgtacaagaattctgcaaagcagaagaggttgatgaagatagtgtctatggtgtatttgtctcttatattgaaatatataataattacatatatgatctattggaagaggtgccgtttgatcccataaaacccaaacctccacaatctaaattgcttcgtgaagataagaaccataacatgtatgttgcaggatgtacagaagttgaagtgaaatctactgaggaggcttttgaagttttctggagaggccagaaaaagagacgtattgctaatacccatttgaatcgtgagtccagccgttcccatagcgtgttcaacattaaattagttcaggctcccttggatgcagatggagacaatgtcttacaggaaaaagaacaaatcactataagtcagttgtccttggtagatcttgctggaagtgaaagaactaaccggaccagagcagaagggaacagattacgtgaagctggtaatattaatcagtcactaatgacgctaagaacatgtatggatgtcctaagagagaaccaaatgtatggaactaacaagatggttccatatcgagattcaaagttaacccatctgttcaagaactactttgatggggaaggaaaagtgcggatgatcgtgtgtgtgaaccccaaggctgaagattatgaagaaaacttgcaagtcatgagatttgcggaagtgactcaagaagttgaagtagcaagacctgtagacaaggcaatatgtggtttaacgcctgggaggagatacagaaaccagcctcgaggtccagttggaaatgaaccattggttactgacgtggttttgcagagttttccacctttgccgtcatgcgaaattttggatatcaacgatgagcagacacttccaaggctgattgaagccttagagaaacgacataacttacgacaaatgatgattgatgagtttaacaaacaatctaatgcttttaaagctttgttacaagaatttgacaatgctgttttaagtaaagaaaaccacatgcaagggaaactaaatgaaaaggagaagatgatctcaggacagaaattggaaatagaacgactggaaaagaaaaacaaaactttagaatataagattgagattttagagaaaacaactactatctatgaggaagataaacgcaatttgcaacaggaacttgaaactcagaaccagaaacttcagcgacagttttctgacaaacgcagattagaagccaggttgcaaggcatggtgacagaaacgacaatgaagtgggagaaagaatgtgagcgtagagtggcagccaaacagctggagatgcagaataaactctgggttaaagatgaaaagctgaaacaactgaaggctattgttactgaacctaaaactgagaagccagagagaccctctcgggagcgagatcgagaaaaagttactcaaagatctgtttctccatcacctgtgcctttactctttcaacctgatcagaacgcaccaccaattcgtctccgacacagacgatcacgctctgcaggagacagatgggtagatcataagcccgcctctaacatgcaaactgaaacagtcatgcagccacatgtccctcatgccatcacagtatctgttgcaaatgaaaaggcactagctaagtgtgagaagtacatgctgacccaccaggaactagcctccgatggggagattgaaactaaactaattaagggtgatatttataaaacaaggggtggtggacaatctgttcagtttactgatattgagactttaaagcaagaatcaccaaatggtagtcgaaaacgaagatcttccacagtagcacctgcccaaccagatggtgcagagtctgaatggaccgatgtagaaacaaggtgttctgtggctgtggagatgagagcaggatcccagctgggacctggatatcagcatcacgcacaacccaagcgcaaaaagccatgaactgacagtcccagtactgaaagaacattttcatttgtgtggatgatttctcgaaagccatgccagaagcagtcttccaggtcatcttgtagaactccagctttgttgaaaatcacggacctcagctacatcatacactgacccagagcaaagctttccctatggttccaaagacaactagtattcaacaaaccttgtatagtgtatgttttgccatatttaatattaatagcagaggaagactccttttttcatcactgtatgaattttttataatgtttttttaaaatatatttcatgtatacttataaactaattcacacaagtgtttgtcttagatgattaaggaagactatatctagatcatgtctgattttttattgtgacttctccagccctggtctgaatttcttaaggttttataaacaaatgctgctatttattagctgcaagaatgcactttagaactatttgacaattcagactttcaaaataaagatgtaaatgactggccaataataaccattttaggaaggtgttttgaattctgtatgtatatattcactttctgacatttagatatgccaaaagaattaaaatcaaaagcactaagaaa

SEQ ID NO: 42831 - DNA, 2993 bp, Homo sapiens
ctagaactagaaaaatacagaatgatgaatatcacctagagttgctactaagtttgatggcaattttttttgacttattagaaagcatgtataatgaaatgactgagttcaggtttgaccaatgatttctctgttgtcctaggccagaaaaagagacgtattgctaatacccatttgaatcgtgagtccagccgttcccatagcgtgttcaacattaaattagttcaggctcccttggatgcagatggagacaatgtcttacaggtaaagttgtagtatgtggagtttttctggttctaactctatccttaatttttggaattagagtaatccagccaacatggcaaaaacctgtctcgagtaaaattggaaaaatcagccaggcatggtgatgcaccactcctgtaatcccagctacttgtgtacctgaggcaggaggatcgcttgaacctgggaggcagaggaaaaagaacaaatcactataagtcagttgtccttggtagatcttgctggaagtgaaagaactaaccggaccagagcagaagggaacagattacgtgaagctggtaatattaatcagtcactaatgacgctaagaacatgtatggatgtcctaagagagaaccaaatgtatggaactaacaagatggttccatatcgagattcaaagttaacccatctgttcaagaactactttgatggggaaggaaaagtgcggatgatcgtgtgtgtgaaccccaaggctgaagattatgaagaaaacttgcaagtcatgagatttgcggaagtgactcaagaagttgaagtagcaagacctgtagacaaggcaatatgtggtttaacgcctgggaggagatacagaaaccagcctcgaggtccagttggaaatgaaccattggttactgacgtggttttgcagagttttccacctttgccgtcatgcgaaattttggatatcaacgatgagcagacacttccaaggctgattgaagccttagagaaacgacataacttacgacaaatgatgattgatgagtttaacaaacaatctaatgcttttaaagctttgttacaagaatttgacaatgctgttttaagtaaagaaaaccacatgcaagggaaactaaatgaaaaggagaagatgatctcaggacagaaattggaaatagaacgactggaaaagaaaaacaaaactttagaatataagattgagattttagagaaaacaactactatctatgaggaagataaacgcaatttgcaacaggaacttgaaactcagaaccagaaacttcagcgacagttttctgacaaacgcagattagaagccaggttgcaaggcatggtgacagaaacgacaatgaagtgggagaaagaatgtgagcgtagagtggcagccaaacagctggagatgcagaataaactctgggttaaagatgaaaagctgaaacaactgaaggctattgttactgaacctaaaactgagaagccagagagaccctctcgggagcgagatcgagaaaaagttactcaaagatctgtttctccatcacctgtgcctctttctagtaactatattgctcagatttccaacggccagcaactcatgagccagccacagctacataggcgctctaactcttgcagcagcatttctgtagcttcctgtatttcggaatgggagcagaaaattcctacgtacaacacacctctcaaagtcacatctattgcaaggcgtaggcagcaggagccaggacaaagcaaaacttgtatcgtgtcagacagaaggcgagggatgtactggactgaaggcagggaggtggttcctacattcagaaatgagatagaaatagaagaggatcattgcggcaggttactctttcaacctgatcagaacgcaccaccaattcgtctccgacacagacgatcacgctctgcaggagacagatgggtagatcataagcccgcctctaacatgcaaactgaaacagtcatgcagccacatgtccctcatgccatcacagtatctgttgcaaatgaaaaggcactagctaagtgtgagaagtacatgctgacccaccaggaactagcctccgatggggagattgaaactaaactaattaagggtgatatttataaaacaaggggtggtggacaatctgttcagtttactgatattgagactttaaagcaagaatcaccaaatggtagtcgaaaacgaagatcttccacagtagcacctgcccaaccagatggtgcagagtctgaatggaccgatgtagaaacaaggtgttctgtggctgtggagatgagagcaggatcccagctgggacctggatatcagcatcacgcacaacccaagcgcaaaaagccatgaactgacagtcccagtactgaaagaacattttcatttgtgtggatgatttctcgaaagccatgccagaagcagtcttccaggtcatcttgtagaactccagctttgttgaaaatcacggacctcagctacatcatacactgacccagagcaaagctttccctatggttccaaagacaactagtattcaacaaaccttgtatagtgtatgttttgccatatttaatattaatagcagaggaagactccttttttcatcactgtatgaattttttataatgtttttttaaaatatatttcatgtatacttataaactaattcacacaagtgtttgtcttagatgattaaggaagactatatctagatcatgtctgattttttattgtgacttctccagccctggtctgaatttcttaaggttttataaacaaatgctgctatttattagctgcaagaatgcactttagaactatttgacaattcagactttcaaaataaagatgtaaatgactggccaataataaccattttaggaaggtgttttgaattctgtatgtatatattcactttctgacatttagatatgccaaaagaattaaaatcaaaagcactaagaaa

SEQ ID NO: 42832 - DNA, 3693 bp, Homo sapiens
  misc_feature (3675)..(3675): n is a, c, g, or t
tctccctgcggacgggcgctgattggcccgtttgaaatgcgccaggcgggagctcacctgggctcttagcgtcgccgccggcttcgcagagcaccgcgccttagccgcgaagttctagttcttgctgccggtcctaacgtcccgcagtcttcgccagccagccgtcccgcatgcgcgtttgggcggcgtggagcctgctgccatgaagtcagcgagagctaagacaccccggaaacctaccgtgaaaaaagggtcccaaacgaaccttaaagacccagttggggtatactgtagggtgcgcccactgggctttcctgatcaagagtgttgcatagaagtgatcaataatacaactgttcagcttcatactcctgagggctacagactcaaccgaaatggagactataaggagactcagtattcatttaaacaagtatttggcactcacaccacccagaaggaactctttgatgttgtggctaatcccttggtcaatgacctcattcatggcaaaaatggtcttctttttacatatggtgtgacgggaagtggaaaaactcacacaatgactggttctccaggggaaggagggctgcttcctcgttgtttggacatgatctttaacagtatagggtcatttcaagctaaacgatatgttttcaaatctaatgataggaatagtatggatatacagtgtgaggttgatgccttattagaacgtcagaaaagagaagctatgcccaatccaaagacttcttctagcaaacgacaagtagatccagagtttgcagatatgataactgtacaagaattctgcaaagcagaagaggttgatgaagatagtgtctatggtgtatttgtctcttatattgaaatatataataattacatatatgatctattggaagaggtgccgtttgatcccataaaacccaaacctccacaatctaaattgcttcgtgaagataagaaccataacatgtatgttgcaggatgtacagaagttgaagtgaaatctactgaggaggcttttgaagttttctggagaggccagaaaaagagacgtattgctaatacccatttgaatcgtgagtccagccgttcccatagcgtgttcaacattaaattagttcaggctcccttggatgcagatggagacaatgtcttacaggaaaaagaacaaatcactataagtcagttgtccttggtagatcttgctggaagtgaaagaactaaccggaccagagcagaagggaacagattacgtgaagctggtaatattaatcagtcactaatgacgctaagaacatgtatggatgtcctaagagagaaccaaatgtatggaactaacaagatggttccatatcgagattcaaagttaacccatctgttcaagaactactttgatggggaaggaaaagtgcggatgatcgtgtgtgtgaaccccaaggctgaagattatgaagaaaacttgcaagtcatgagatttgcggaagtgactcaagaagttgaagtagcaagacctgtagacaaggcaatatgtggtttaacgcctgggaggagatacagaaaccagcctcgaggtccagttggaaatgaaccattggttactgacgtggttttgcagagttttccacctttgccgtcatgcgaaattttggatatcaacgatgagcagacacttccaaggctgattgaagccttagagaaacgacataacttacgacaaatgatgattgatgagtttaacaaacaatctaatgcttttaaagctttgttacaagaatttgacaatgctgttttaagtaaagaaaaccacatgcaagggaaactaaatgaaaaggagaagatgatctcaggacagaaattggaaatagaacgactggaaaagaaaaacaaaactttagaatataagattgagattttagagaaaacaactactatctatgaggaagataaacgcaatttgcaacaggaacttgaaactcagaaccagaaacttcagcgacagttttctgacaaacgcagattagaagccaggttgcaaggcatggtgacagaaacgacaatgaagtgggagaaagaatgtgagcgtagagtggcagccaaacagctggagatgcagaataaactctgggttaaagatgaaaagctgaaacaactgaaggctattgttactgaacctaaaactgagaagccagagagaccctctcgggagcgagatcgagaaaaagttactcaaagatctgtttctccatcacctgtgcctctttctagtaactatattgctcagatttccaacggccagcaactcatgagccagccacagctacataggcgctctaactcttgcagcagcatttctgtagcttcctgtatttcggaatgggagcagaaaattcctacgtacaacacacctctcaaagtcacatctattgcaaggcgtaggcagcaggagccaggacaaagcaaaacttgtatcgtgtcagacagaaggcgagggatgtactggactgaaggcagggaggtggttcctacattcagaaatgagatagaaatagaagaggatcattgcggcaggttactctttcaacctgatcagaacgcaccaccaattcgtctccgacacagacgatcacgctctgcaggagacagatgggtagatcataagcccgcctctaacatgcaaactgaaacagtcatgcagccacatgtccctcatgccatcacagtatctgttgcaaatgaaaaggcactagctaagtgtgagaagtacatgctgacccaccaggaactagcctccgatggggagattgaaactaaactaattaagggtgatatttataaaacaaggggtggtggacaatctgttcagtttactgatattgagactttaaagcaagaatcaccaaatggtagtcgaaaacgaagatcttccacagtagcacctgcccaaccagatggtgcagagtctgaatggaccgatgtagaaacaaggtgttctgtggctgtggagatgagagcaggatcccagctgggacctggatatcagcatcacgcacaacccaagcgcaaaaagccatgaactgacagtcccagtactgaaagaacattttcatttgtgtggatgatttctcgaaagccatgccagaagcagtcttccaggtcatcttgtagaactccagctttgttgaaaatcacggacctcagctacatcatacactgacccagagcaaagctttccctatggttccaaagacaactagtattcaacaaaccttgtatagtgtatgttttgccatatttaatattaatagcagaggaagactccttttttcatcactgtatgaattttttataatgtttttttaaaatatatttcatgtatacttataaactaattcacacaagtgtttgtcttagatgattaaggaagactatatctagatcatgtctgattttttattgtgacttctccagccctggtctgaatttcttaaggttttataaacaaatgctgctatttattagctgcaagaatgcactttagaactatttgacaattcagactttcaaaataaagatgtaaatgactggccaataataaccacagtaggatgggggtgtgcgttcggtgcagacatattagctatgtgacattcaggagatgccaanaagattttaaatcggaag

SEQ ID NO: 42833 - DNA, 3277 bp, Homo sapiens
tctccctgcggacgggcgctgattggcccgtttgaaatgcgccaggcgggagctcacctgggctcttagcgtcgccgccggcttcgcagagcaccgcgccttagccgcgaagttctagttcttgctgccggtcctaacgtcccgcagtcttcgccagccagccgtcccgcatgcgcgtttgggcggcgtggagcctgctgccatgaagtcagcgagagctaagacaccccggaaacctaccgtgaaaaaagggtcccaaacgaaccttaaagacccagttggggtatactgtagggtgcgcccactgggctttcctgatcaagagtgttgcatagaagtgatcaataatacaactgttcagcttcatactcctgagggctacagactcaaccgaaatggagactataaggagactcagtattcatttaaacaagtatttggcactcacaccacccagaaggaactctttgatgttgtggctaatcccttggtcaatgacctcattcatggcaaaaatggtcttctttttacatatggtgtgacgggaagtggaaaaactcacacaatgactggttctccaggggaaggagggctgcttcctcgttgtttggacatgatctttaacagtatagggtcatttcaagctaaacgatatgttttcaaatctaatgataggaatagtatggatatacagtgtgaggttgatgccttattagaacgtcagaaaagagaagctatgcccaatccaaagacttcttctagcaaacgacaagtagatccagagtttgcagatatgataactgtacaagaattctgcaaagcagaagaggttgatgaagatagtgtctatggtgtatttgtctcttatattgaaatatataataattacatatatgatctattggaagaggtgccgtttgatcccataaaacccaaacctccacaatctaaattgcttcgtgaagataagaaccataacatgtatgttgcaggatgtacagaagttgaagtgaaatctactgaggaggcttttgaagttttctggagaggccagaaaaagagacgtattgctaatacccatttgaatcgtgagtccagccgttcccatagcgtgttcaacattaaattagttcaggctcccttggatgcagatggagacaatgtcttacaggaaaaagaacaaatcactataagtcagttgtccttggtagatcttgctggaagtgaaagaactaaccggaccagagcagaagggaacagattacgtgaagctggtaatattaatcagtcactaatgacgctaagaacatgtatggatgtcctaagagagaaccaaatgtatggaactaacaagatggttccatatcgagattcaaagttaacccatctgttcaagaactactttgatggggaaggaaaagtgcggatgatcgtgtgtgtgaaccccaaggctgaagattatgaagaaaacttgcaagtcatgagatttgcggaagtgactcaagaagttgaagtagcaagacctgtagacaaggcaatatgtggtttaacgcctgggaggagatacagaaaccagcctcgaggtccagttggaaatgaaccattggttactgacgtggttttgcagagttttccacctttgccgtcatgcgaaattttggatatcaacgatgagcagacacttccaaggctgattgaagccttagagaaacgacataacttacgacaaatgatgattgatgagtttaacaaacaatctaatgcttttaaagctttgttacaagaatttgacaatgctgttttaagtaaagaaaaccacatgcaagggaaactaaatgaaaaggagaagatgatctcaggacagaaattggaaatagaacgactggaaaagaaaaacaaaactttagaatataagattgagattttagagaaaacaactactatctatgaggaagataaacgcaatttgcaacaggaacttgaaactcagaaccagaaacttcagcgacagttttctgacaaacgcagattagaagccaggttgcaaggcatggtgacagaaacgacaatgaagtgggagaaagaatgtgagcgtagagtggcagccaaacagctggagatgcagaataaactctgggttaaagatgaaaagctgaaacaactgaaggctattgttactgaacctaaaactgagaagccagagagaccctctcgggagcgagatcgagaaaaagttactcaaagatctgtttctccatcacctgtgcctctttctagtaactatattgctcagatttccaacggccagcaactcatgagccagccacagctacataggcgctctaactcttgcagcagcatttctgtagcttcctgtatttcggaatgggagcagaaaattcctacgtacaacacacctctcaaagtcacatctattgcaaggcgtaggcagcaggagccaggacaaagcaaaacttgtatcgtgtcagacagaaggcgagggatgtactggactgaaggcagggaggtggttcctacattcagaaatgagatagaaatagaagaggatcattgcggcaggttactctttcaacctgatcagaacgcaccaccaattcgtctccgacacagacgatcacgctctgcaggagacagatgggtagatcataagcccgcctctaacatgcaaactgaaacagtcatgcagccacatgtccctcatgccatcacagtatctgttgcaaatgaaaaggcactagctaagtgtgagaagtacatgctgacccaccaggaactagcctccgatggggagattgaaactaaactaattaagggtgatatttataaaacaaggggtggtggacaatctgttcagtttactgatattgagactttaaagcaagaatcaccaaatggtagtcgaaaacgaagatcttccacagtagcacctgcccaaccagatggtgcagagtctgaatggaccgatgtagaaacaaggtgttctgtggctgtggagatgagagcaggatcccagctgggacctggatatcagcatcacgcacaacccaagcgcaaaaagccatgaactgacagtcccagtactgaaagaacattttcatttgtgtggatgatttctcgaaagccatgccagaagcagtctttcacggcactatctgtgccttctaacacttagttagtgccttttcatttgcaacagatactgtgatggcatgagggacactcgtggctgcatgactgtttcagttgcatactacga

SEQ ID NO: 42834 - DNA, 193 bp, Homo sapiens
tctccccttgcttccagtgcctggcaccagcaggcagccagtgaatgtgtagaccaggggacgttcactggtcaacgggttggttagtcacctgattagctagttggcctagaggctcagtcttgagttagcagactcacgttccaacctcagctcagccacttcctagttgtatggcctgttatggaaattc

SEQ ID NO: 42835 - DNA, 307 bp, Homo sapiens
actggataaagggtgatctgtctgtattatttcttacaactacacatgaatttatagttatctcaatataggcagtttaaaattttaaaagaggccagaagagtcaagtatgtgacatgtggttgagagtaacaaactgtctatcataagagaaataaataacatggtgcagttaaatatcatcaatttggaatccaatcactttcttcgataacactcaattagcagatatgcaattatattagctgttattaacaaaaactggaaatccattacactattatactgctattacattacattatat

SEQ ID NO: 42836 - DNA, 431 bp, Homo sapiens
cttgttaactggttctcagattaaattaagtatatattgtgatggtagtaattctctccactaggtggtagtatagcctgttaaatacactgtatttcctggtgtggattagatttctagaatcttttgttttcacaaaaacatatttggtggtgaggttcttagtatgtccatgtctgcagtgtttttcttctcttaatttttataatttaatagtattataaaataccttttaaaggtatttagtttattttttctctcttctccctccgtctatccattcattcatccatacatccacccataaaaaatcaggtgcctgctctgtgccaggcataatgataagctgaaccatatagagaataagacctacaagtccttgcccgcatgcagcttacattgaggaagagggtgaatcagaagacctgata

SEQ ID NO: 42837 - DNA, 2076 bp, Homo sapiens
ggagccctggcgggcacttcctaccgtacgaggcgcaggtgggagacttccgccctcgcgggactggctagggcgtttgaccgccggcggtgaaggggaggcggtgggcgtcttggagaacagagcgagatggagaagcgaggccgaggcgtgaagtcgagccccatccagaccccgaaccagacccctcagcaggctccggtgacgcctaggaaagaaaggaggcctagcatgttcgagaaggaggcagtgagtgcggagactgctaggggcccgagacggctatgtccgaccgtttaagtgaaatcgctccccagtgggccccgctcccgtcaccacccccagagccaaggaggcagcatctcccttttgtgtttcttttttccccagatgcgaaattgaagcctgagactgagttgggcagtcccctttggacttgagtgctaaagttttcttgttttttaattagggccatagaaccctacataagtcgattggaagggtggttacaagatcttcttttcaaatttactcagcttgcggatttcctgagagtactctgagtattattgctttgtactaaaacacagtatgttagtgtatttagtgccattataagcagttttgctagcgaaaaatgagtgtgttgtattaaaaaaataatttgataaaccaggcagaatagtgccatgttttgggtttttaaaacatcagcagtctggatatttgaagaatgtacaggagaaaaaaacttaagttgaaaataccctgtccaaaacttactgatattgatggaaagggtcattattcagttttattggtggtataacaggtatttctatatgattaggctttgaaaaccgttaatgtattaaagactctatattttattgatactttaacagaaaattagtttgcccaaggatacaaagctgtaatgatagagctgggaccagaacctgtatgctagtactcggtccaattggcctatactggtttctcttcgtacttacttcgtggacctataataggatgaagatagagatgacaggcaaaacaattttttgaagaccctaaaacattttaagattactcttaaaaagagaattctcaaaataatggcgaaatttcaggttcttgtttccctggtgtctacattttacagaggaaagaacgaactaaataaaggaggaaaagcaaacaggccaagtttacacagctaagaaaaagagcagagcagggctagaaacctaaatcagttggacttaaaacttcacactcccaaacactatgctgtatttcttggcaatgagtctgagtaacaggtcaccaacagtaaagaaaaatttctatatattgaggcagacaagggtggcttttataaacttactgcctatctgaggtctgaagtggtctttaaaattcaatgagcctgaactcaaaatgaggagacacataggtgcacctggtatataggttaaaatctgggagtgaggggacatggaccaaagtaattattagtatttgatatggatgtgatcaattatagctatctttaaagttgattcttttagaggtgagaaatttgaatagaacaataattgggaagaaattgagaaaggactctacaaatgctcactaaatgtacctgaggaaactgttcacttagttatttctaatttaaggtagctgttaatttccctattttggagcataggaaaatttaagacatactgtttcatcaatatgaccatctcttgattttatctgtcttgcctccatttctttttttctagtggtagcacctcagttaacttttagagaattaactcatctgcaattgtatagagctttggtgagattgtcagctacttcccttaactttttaataaggatgagacccaaactaagctaattagatgaattctttgaaataatgcaaagaaaatgattgaggtttattcacattgaagatgagaagctaaagtgttccctgtgtctttctgaatctggttcatcagccttctctgctgttatgtaaactgtatctttccaataaattatactttggcttaa

SEQ ID NO: 42838 - DNA, 805 bp, Homo sapiens
caggaaaaaaataaaaagaaaaaagagaatgcagtcaactgtgtagaatcctacttagtgattaagatgcagtcatacagtgcataatgatattttagtcagtgactacatacacaatggttgtcttatcaatattgtaataccacatttttactgtaccttttctatgttttgacatatttagatacacaaatacttattgtgttatagttgtctactgtattcaatatagtcacatactctacaggtttgtagcctgggagcaatatgctatataccacatagtgcaggtatgttgtaggctctaatcatttaggtttgtataagtacgctctatgatgtgtgcacaatgatgacatagtctaatgatgcatttctcagaatatatccctgtcattaataggtggatgatatataaagaggaaatagctattgggtttggcatccaggttattggagaccttctgaaaaggagttttgatagagtaatcagtaatagcaatcctattagaatcagttaaggactgaaagtgggaaaacagcaactggagaaaactctttaaagaaatttgctgggaaaatttttatgtaaatatagacaagcttatcctagtatttatatgggaaggctagggtagctaaaacaatttgacaaagtaaaataagtgggaagaatcaatctatctggttgtaaagctttttatttaaccatagtaatctaggacagtatggtaatggaggaggcctagacacataggagattgcaacagaataaagaacccagacacagattgaactgtggtat

SEQ ID NO: 42839 - DNA, 966 bp, Homo sapiens
agcctgtataacggggtgctcaaacaccaatttttctcaggattactgaaaaacttaaatatacaggccaggtgtggtggctcactgcctgcaatcccaacattttgggaggctaaggcgggccgatttcttgagctcgagtttgagaacagactgtgcaacatgacggcttcatcggcgctttgccacttgtacccgagtttttgattctcaacatgtccgagactgctcctgccgctcccgctgccgcgcctcctgcggagaaggcccctgtaaagaagaaggcggccaaaaaggctgggggtacgcctcgtaaggcgtccggtcccccggtgtcagagctcatcaccaaggctgtggccgcctctaaagagcgtagcggagtttctctggctgctctgaaaaaagcgttggctgccgccggctatgatgtggagaaaaacaacagccgtatcaaacttggtctcaagagcctggtgagcaagggcactctggtgcaaacgaaaggcaccggtgcttctggctcctttaaactcaacaagaaggcagcctccggggaagccaagcccaaggttaaaaaggcgggcggaaccaaacctaagaagccagttggggcagccaagaagcccaagaaggcggctggcggcgcaactccgaagaagagcgctaagaaaacaccgaagaaagcgaagaaagccggccgcggccactgtaaccaagaaagtggctaagagcccaaagaaggccaaggttgcgaagcccaagaaagctgccaaaagtgctgctaaggctgtgaagcccaaggccgctaagcccaaggttgtcaagcctaagaaggcggcgcccaagaagaaataggcgaacgcctacttctaaaacccaaaaggctcttttcagagccaccactgatctcaataaaagagctggataatttctttactatctgccttttcttgttctgccctg

SEQ ID NO: 42840 - DNA, 1073 bp, Homo sapiens
agcctgtataacggggtgctcaaacaccaatttttctcaggattactgaaaaacttaaatatacaggccaggtgtggtggctcactgcctgcaatcccaacattttgggaggctaaggcgggccgatttcttgagctcgagtttgagaacagactgtgcaacatgacggcttcatcggcgctttgccacttgtacccgagtttttgattctcaacatgtccgagactgctcctgccgctcccgctgccgcgcctcctgcggagaaggcccctgtaaagaagaaggcggccaaaaaggctgggggtacgcctcgtaaggcgtccggtcccccggtgtcagagctcatcaccaaggctgtggccgcctctaaagagcgtagcggagtttctctggctgctctgaaaaaagcgttggctgccgccggctatgatgtggagaaaaacaacagccgtatcaaacttggtctcaagagcctggtgagcaagggcactctggtgcaaacgaaaggcaccggtgcttctggctcctttaaactcaacaagaaggcagcctccggggaagccaagcccaaggttaaaaaggcgggcggaaccaaacctaagaagccagttggggcagccaagaagcccaagaaggcggctggcggcgcaactccgaagaagagcgctaagaaaacaccgaagaaagcgaagaaagccggccgcggccactgtaaccaagaaagtggctaagagcccaaagaaggccaaggttgcgaagcccaagaaagctgccaaaagtgctgctaaggctgtgaagcccaaggccgctaagcccaaggttgtcaagcctaagaaggcggcgcccaagaagaaataggcgaacgcctacttctaaaacccaaaaggctcttttcagagccaccactgatctcataagagtgatattcttacaaaaaaaaagggggggttaaattcctgaggcagtaggttccgtttgtcagggctaaggggtaagagagggggttaagggggaaaggtggttggagaccttggggtatgacccgaaatcgggaaaagtaggagcgggaaggt

SEQ ID NO: 42841 - DNA, 977 bp, Homo sapiens
agcctgtataacggggtgctcaaacaccaatttttctcaggattactgaaaaacttaaatatacaggccaggtgtggtggctcactgcctgcaatcccaacattttgggaggctaaggcgggccgatttcttgagctcgagtttgagaacagactgtgcaacatgacggcttcatcggcgctttgccacttgtacccgagtttttgattctcaacatgtccgagactgctcctgccgctcccgctgccgcgcctcctgcggagaaggcccctgtaaagaagaaggcggccaaaaaggctgggggtacgcctcgtaaggcgtccggtcccccggtgtcagagctcatcaccaaggctgtggccgcctctaaagagcgtagcggagtttctctggctgctctgaaaaaagcgttggctgccgccggctatgatgtggagaaaaacaacagccgtatcaaacttggtctcaagagcctggtgagcaagggcactctggtgcaaacgaaaggcaccggtgcttctggctcctttaaactcaacaagaaggcagcctccggggaagccaagcccaaggttaaaaaggcgggcggaaccaaacctaagaagccagttggggcagccaagaagcccaagaaggcggctggcggcgcaactccgaagaagagcgctaagaaaacaccgaagaaagcgaagaaagccggccgcggccactgtaaccaagaaagtggctaagagcccaaagaaggccaaggttgcgaagcccaagaaagctgccaaaagtgctgctaaggctgtgaagcccaaggccgctaagcccaaggttgtcaagcctaagaaggcggcgcccaagaagaaataggcgaacgcctacttctaaaacccaaaaggctcttttcagagccaccactgatctcaataaaagagctggataatttctaaaaaaaacacaaaaacaaatacaacaaaaaacaaaaaaag

SEQ ID NO: 42842 - DNA, 277 bp, Homo sapiens
tggcaagcaatggttgtctctaagtaacacagaagaagtcctttttcaacaaagcctttaaaaagcctcccagctctcaggcattcgaaaaacacagttgtgtgtgtgtgtgtgtgtgtgtgtgtgtgtgtgtgtgtgtgtctttttctttttcctgcaagacttagctgtgaagtcaaggtcactattcctagggagctcagctgcacaagaagcctagagctgcattgctgggcctggagcctgccctgaccctctgtgctggactgtgctttcc

SEQ ID NO: 42843 - DNA, 400 bp, Homo sapiens
aattacatgattccactggggattttccccagaaaataacagcattacttattcccaaggaatttcctgaattttaatgatgacagctttattattgctattagtagttacattactacaaatattacatacaagctttaatatatgcagcaaactataagttatacataagaataacatttactaaatgcctctgatattctagataccttgctaagaactttagctacaaagtatgtcgtggcaaagaatgcaaacttagagactgacatccttggttctaatctaggttccacgactccttttttttttttttttttttttttctgagacggagtctcgctctgtcgcccaggatggagtgcagtggcatgatttcagctcactgcaagctccaagc

SEQ ID NO: 42844 - DNA, 391 bp, Homo sapiens
aaggatggacagtggatagcttgtggaggtaaaataaagtaagttggactgatgttggtttcagaacttaaatctcagtcataagtatagggctctcttgtgattcaatgccaagcttgtaaattaagctgctttaaaggagtgttggagataggagaagtgagttagaaatataaaaacagagctgggtgaggtggctcatacctgtaatctcagcactttgggaggccaaggagttcaagaacaacttgggcaacagggcaaaataccacctttacttaaaaaaattagccgggcatgatggtgtacatctgtagccctagctacttgggaggctgaggtaggaagattacttgagcacaggaagtcgaggctacaatgagctgtgatc

SEQ ID NO: 42845 - DNA, 463 bp, Homo sapiens
tggacagcacagaggaggtggacagcacagaggcgggcacagaggaggtggacagctggacagcacatggacagcacagaggaggtggacagcacatggacagcacagaggaggtggacagcacagaggaggtggacagcacagaggaggtggactgcccagtggtggcctttgacaggtaggaggatgcagtgctgcaggctattttgttttttgttacaaaactgtcttttcccttttcccctccacctgattcagcatgatccctgtgagctggttctcacaatctcctgggactgggctgaggcaggggcttcgctctattctccctaaccatactgtcttcctttcccccttgccacttagcagttatccccccagctatgccttctccctccctcccttgccctggcatatattgtgccttatttatgctgcaaatataacattaaactatcaagtg

SEQ ID NO: 42846 - DNA, 1701 bp, Homo sapiens
atgtaagtgctacaatatttatgaaaaatatgatttgcggatgggaaggaggttatggaaaaaggagaaaactggcgggcatagctgatatcagtgcgctagcacctttaaggagcctctcagttgtggagcaggggagccccagtcaaccacaggaattattttttttaaatttcataaccagcctgtttagattccagtcttcctagctatatcacatatgccttgttgatatgctctttctgctttctttagacttaatgtttgacgggggtgggggtgtctggaagaacaggaaaggtggggatcctaaggcagattaaaggactccctccaccccactacagcctcccataactctagtcatccctctcatagtacaggactgatttctctgtgtctgtttgtacacacaaatgtgcatacagacataaattcccccaccccataccaaggtggttacctagcaggaatgagcgtaggtggctgctggccaccattaccaccgtctgcatcagctgtgttgtctctctttggggtaaagtcctaccccagaatgagaaaaggctggggagagtagggcaggttaaaggagcttatgtcctctgtagatgtaggtttgtatcatagctactagggtttatttttttaatggggggctaatagcacagagttatctcaccagcagtagctactggtgagtgatgttttagctgtaagaagtggctatgagcaatagtttcactgactttaccttagggcagtgccacagtaatctgggaacttgttagaaatacacattctcaggccccatcccagacttattgaatcacagactctgggggcagggtttaaaagcactccaagtgattctaatgcacactaaaggttgagaaccatttcttagggataagctgggaaatttttacaggtgtggaggatatttcaaatacatcttttgcctttgcactaacatgctttcatttctttcagtctcttcctccattccctttaaagtcttccccatcatatcactgatctcaaaagctagatttgtcttcattttagtcgtatccctaaaaccatgcattggtctggacaggagttgtcccatattcccttgcagactggtcactccatgttctctgttacagtaaggaccagccaagcttcagctgtcccattcctccccctacaacacacacacctttcaggcagggaggagatgagcttccagccccaagagtggaggctgccacatcctaacatagtatctattgaaaaggaagcagtgtgtatctatgattatatctctgttcatctatatatttttgacatgtagcaacacctctccatcttatcaaggaactcaactcggtctgggtctccccagtgcccagtggtggcctttgacaggtaggaggatgcagtgctgcaggctattttgttttttgttacaaaactgtcttttcccttttcccctccacctgattcagcatgatccctgtgagctggttctcacaatctcctgggactgggctgaggcaggggcttcgctctattctccctaaccatactgtcttcctttcccccttgccacttagcagttatccccccagctatgccttctccctccctcccttgccctggcatatattgtgccttatttatgctgcaaatataacattaaactatcaagtg

SEQ ID NO: 42847 - DNA, 670 bp, Homo sapiens
ctactactactaaattcgcggccgcgtcgacttttagtcgtatccctaaaaccatgcattggtctggacaggagttgtcccatattcccttgcagactggtcactccatgttctctgttacagtaaggaccagccaagcttcagctgtcccattcctccccctacaacacacacacctttcaggcagggaggagatgagcttccagccccaagagtggaggctgccacatcctaacatagtatctattgaaaaggaagcagtgtgtatctatgattatatctctgttcatctatatatttttgacatgtagcaacacctctccatcttatcaaggaactcaactcggtctgggtctccccagtgcccagtggtggcctttgacaggtaggaggatgcagtgctgcaggctattttgttttttgttacaaaactgtcttttcccttttcccctccacctgattcagcatgatccctgtgagctggttctcacaatctcctgggactgggctgaggcaggggcttcgctctattctccctaaccatactgtcttcctttcccccttgccacttagcagttatccccccagctatgccttctccctccctcccttgccctggcatatattgtgccttatttatgctgcaaatataacattaaactatcaagtg

SEQ ID NO: 42848 - DNA, 690 bp, Homo sapiens
aacttcacttaagcctcccaacaacgctgcaagggtagaggctgctgttttccccacttatgaaaatatgagtttgcccacaatcatacagtaggaacagtttttcttactccagaaactgtgctttaaaaagtcaaagaaagaaataaccaagtttgttatggtaacattggtagaggacttgagtggtgcttccacctactgggcttccagagcagctagatacgataggtagattcatattaacctctggaggggatggggtgggaggaccaccctagagccaacaaaggaggtggggggccagactattattatcttcaccgaacaaacaagaaacagggaaggaggaaggcaagaaaagagaaaataactctgccgagatttctagcctaggagacttgcgggttggtggccaaactgacaaataggaaatagttgaaaaagagctgtcctgggaagcatttgtgaagttctgccttgcgtgtgtagaatgtgggttcatggtggaactttcaagtgtttacatcctgtgtgcaaatgaaaataaggcacaggtacagcttttactcttcaacaaatattttttaaaaacacaaggcgtcctgatactaaaaagtgatgtttccccatagttgacaggtaaaaaacactttctttctaaattaagtacaattaattgtgatctta

SEQ ID NO: 42849 - DNA, 720 bp, Homo sapiens
aggagctgaggccctgtccctgggctgacggcagatgcattggtttgttggaggtggctggtttggtggtttggtggttcggtttcctggcctgcacacgtcactaaaggtgtctcaggaacattctacagcagcctgtggggcccttgtgtgagcaggactggcactgtgggatgacagggcatcctaggtcctggtttatcttctctgctcccagtggctgctgtctgtgcccctcagcttccccagcgtgatgtttttgcctcagtttccccagcgtgactccccacttcagcttcctcagcatgatgtccttgtctcagtttccacagcatgacatccccacctcagcttccccagtgtgatgtccccgcctgccatcctgtcctgcagccaagagctcctctgggctcagccaggactgctgatttgcagtcacgtcctgtctcgggtgcagcctggagcttcaggggtgtgacgctttgggggtcatggccaccagcctcttggaaacaccctctggagccccgccttgggcagcactgcatggccttgctgtgtttcctgcccggggccatttcattaatactgtgtttgcgggagttctgtctctcgtctttggagcgccccctccctctatttctgtacaggggagctgcttctttctttcttcccccatctttcctgcctattaaattcctgctccttaaaactaaaaga

SEQ ID NO: 42850 - DNA, 533 bp, Homo sapiens
gaaagccaaaatcactaaggggactaaacattttaattctgtctaagagatctctgaagatgacatagttcagttgtctgctttagcctcccagtgctttagtttctcttataaaatagtcgttaaactgaagagaggggtactgggctgtaagcagcacaatcagcatatattagatgagccatcatatttaacattacatgctaacttttcactgtggtgttctgtctcaaaataaatgaattatcctaaaatatttttatgactatctttccattttatgtgaaaattagacaaatttgaagaaatttaaggcactgtattttgttctttgaaaccaatgagaacaaagacacaatgtaccagaatctttgagacacagctaaagcagcgtttagagggaaatttatagcactaaatacccacatgagaaactgggaaatatctaaaatcaacaccctaacatcacaattaaaagaactagagaagcaaaagcaaacaaattcaaaacctagcaaaagacaagaaataac

SEQ ID NO: 42851 - DNA, 412 bp, Homo sapiens
cgtttcttctataaaatttgcctttttggctgaaacaaaacacagatgggtcttgggaaaagagaaagaattattataaattttatcaagtggagattctaattgcagtattgctttagatttagggttggtttagttactggagaaaatcaacatatcccttggtatttgaaaagcagccatcaatctgttaaatacttttccctatgaatcttagtaatgacagtatactttctcaccacaggattatatcactctccaactctcagtcatagtctaatctgcaaggactttgatcatctcttcatttcacagaacatcaaattagcccacgtcaatgacatcataataattacaggaagcggtaataatcctaagcactgcaatatgatacatgcatgccagagggtgg

SEQ ID NO: 42852 - DNA, 491 bp, Homo sapiens
actcctgtctttcaaggagtccttgtacaattgtcccattacacagctcactgaggttctgttcatttttttgtctgagtgctatattttaaatcggttatactcctagtttttgaggttcacttatctttatttcagcaatatctcctctgctgttttgtccattcagtgcattattattattattattatcattattattattttttaagagacagggtcttactagttgcccctgttgggcttgaaattcctgagttcaagcgatccttccacctcaggctctgagtagctgggactagaggcatgtgccaccacaccaacctccatccagtgcttctagatattgttgtgttcatatatagtagcttgaattgtgtcttttcttttgttcataaattgtcttgaagtaacatgtactaacataaaatttccactttaatcatttttaagtgtgtcattcaggagcattaaatacatttacaatgtgt

SEQ ID NO: 42853 - DNA, 444 bp, Homo sapiens
accttccaggctttggaataccagaggctgttcttgatgttgacgttaaaaccactagtaccaacgatctgttttgggttttttattttgttttgagagggagtttcactcttgtcgcccacgctgaagcagagtggcgcaatcttggttcactacaacctccacctcccaggttcaagcgattcttctgcctcagccttcagagtagctgggatttacaggcgcccgccaccacacccagctaatttttgtatttttagtagagatggggtttcaccatgttagccaggctggtctcaaactcctgagctcaagtgatccacctgcctcggcctcccaaagtgctgggattacaggcctgagccaccgcacccggcctcaacgatctgttaaacataccacctcatcaactggatgatttctaaagaaaagtcctccccaatg

SEQ ID NO: 42854 - DNA, 160 bp, Homo sapiens
aatctgcctattaggatattgtgacaatgaagaaagagaataaaggtgaatatttctggtgaaaaagttaaactgattttaaaataattcaacaaatctgattagtggtcattaagcaatatgaaagataatgattaacaatatatcattcttaataagt

SEQ ID NO: 42855 - DNA, 263 bp, Homo sapiens
aaaagggtttctgagaacattctggtgcactacataatccttatgtaggaaagctaggatgccagatgtttatgtgttccatcctcattctcattaaaggttccatttttttttttttttttttttttttttaccaccaactttaattgcaaccaattcactaggctgccttaattataacattttagattaggaaaagacttagaaatcatctagtgtttgtcaaaccaaaatgatcatctgaatcacctacgatgctttaa

SEQ ID NO: 42856 - DNA, 512 bp, Homo sapiens
tctaggttgtgtgctccttgtgaaaatctaatgcccccctctccccgccccatctccacacatacccctggtccctggtgccaaaaaggttggggacctctcctgtaaagaaatccactcaggctgcttagggagtgctaagggcaggttgttgcaattttaaataagatgattcgaaaaagtgtcattgagtgacatctgagcaaacacctgaataagttgaaggagcaagccatggagatctctgagaagaaactgtccaagtagaggaaacagcaaatacaaatgcccccaaagtagaagcatttttgagaaagagcttagaggccagtttagctgaagtggagtaaatgaaggggaagaatagcaagtaagatcagacaggtaatgaaggccaaatcatgcagggcctcataggccacctatacaaactttgtttttattctaaataagatgggaagccactggactgttttacaaagaagagtgaaattatttgtcttcattttaag

SEQ ID NO: 42857 - DNA, 443 bp, Homo sapiens
aaattagccggacatggtggtgcgtgcctgtagtcccagctacttgggaggctgaggcaggggaatcgcttgaacccgggagatggaggttccagtgagccgagatctcgtcactgcactccagcctggtgacacagcaagactccatctcaaaaaacaacaaaaaaagttaccttataatccagcaattccatcactaggtatacagccaagagaaataaaaacgtgtttatacaaaaacctgtacacaaatattcactgcagcattattcacaacagtcaaaaagtagaaaataatccaagtgcccatcaactgatgaatggataaacaaaatatggtacatccatcaaactgagtattatccagccatgaaaaggagtattgatgcaagtcacaacgtggatgaactctgcactgtaatgctaagcatcagaagcagacc

SEQ ID NO: 42858 - DNA, 476 bp, Homo sapiens
cttcagaggcttcccattggctttccccaccatgataactcaagaccaaggaccctgagcttcttaccaatgtggagattgctccagctgcccaatatgtactcccaattatgcactcaggaactaagaaaatgactactggatgggtcagtgtattcctggacccactgtaagctggacattatccaggactctgcttattacctgatccccataagcccccacacttagagaggagccatgtgtattacatactttgggtaacacctgtgaaatgtctgggtattcctctttcctcaacataaaatcagtcaagaaaatgggccgtgggacacagaccaaagagtaattcattaatttacagtaaatattttgttttcagtatttgcagggtttcttctttatagggacccaacaacctcttaagtcaacagattctgtggtctcagtgtgaagataggctcaggtctgagact

SEQ ID NO: 42859 - DNA, 457 bp, Homo sapiens
cgcaggatggagctctaggggctggaaaccttggctgaaggtgcctttgagggcctctgcttcattgttttcaaactgttcttcagagatctaggcttcttctccttcctcaggggcctccactccaagctccgccagagtttatttattaataataactattagtagtagcatcatatgaaaagcccactaggggacagctatactttactgaatactgaccaggtaccaagcatggccacatgtagtctctcacttactcctcacagcaaccttacgggataagaactgttattcttcccattaattaaatgagaaaaactgaggagtatgttttatgagtagccaaaggtcctccaaacagtaggaagaggggccaggctccagtgctcacagccctcaccactgctccacactgccgccttcttagggaaaggaaaaagtgccactgcattta

SEQ ID NO: 42860 - DNA, 417 bp, Homo sapiens
aattttactttatgagtactttaaacaagagggctcattatcatgagacaagtactagagcctaccaatgactctagagcatctgatcaccatgccactgatcaattctatcaactttcgtctagtactgttccttaatctgttgcatgtatatggagttgggatgaggaatagggatgcagattacaaatgtagatttgtatgggatcctgatgaaagcaactgacctcagaaaattccatgtgtgcaacacacacacacacactcacatagagtggtaggaggtttcatgaggttcacagattcctgaggtttatccaagcaccctaaattcaaagcctatgtagatgcaccctcttgtcaaccagttaccttctagctatcagctatttcttgtgagcctactatgcaaaaaag

SEQ ID NO: 42861 - DNA, 181 bp, Homo sapiens
cccaggtcaggcctcacggtggcctctccaggatgagctcctgccctccgatggcatctccaggccccaaatggtctccggtcggtgggctcctccacgccaaggttgggcctcccggcgaccgccgcaggcccaagttgtcctgaagtcgggctctcccggccctgcctcccagcaagta

SEQ ID NO: 42862 - DNA, 452 bp, Homo sapiens
ggacagcagaaaaatattttcagttatacagacttagaaacatgtccacctacctttcctggaaaactgacttataagttacatttcacttacttgaaacatgaatgaagataaattctagaacagagaagttgtggcttccttactggcagcaagtgataaaacaatttaatctcagagttaagactaaataactagtggtaggtataaatatgaatgaaattgtaaaaaaataatacttttgtatttagaaccacctcctttcctactttgatctaaaaattccggaatgtatcaaatctggtaactgaaccagtgagggttgggtggtggggcaaagaacatacatagaaagtgaccaaagaggaaacatgagaggcacgaaaagtctagggaagcccctacgagaagcatctaatgtacttagatacaaataacccattaaaaaaaaa

SEQ ID NO: 42863 - DNA, 505 bp, Homo sapiens
cagaatctcactgttgcccaggctggagtacagtagcgcaatcacagctcactgcagcctctcactgtagcctcaaccctgctgggctcaagcgatctcccacattagcctcctgagtagcctggttaatttatttataatttgtagctgggattacaggtacacaccaccaggcctggcctttgccagcctgggcaacgtggcaagaagataacatgtagacaagcagtcaaacatgtattctttttttcccccttttatatgactgatagaattctctgcccactgatctaccatcttgtttttttcacttaactatgtgtctcagtggtttttaaaaatatttatggctgggtgcaatggctcatgcctgtaatcccagctacttgggaggctgaggcaggagaattgcttgaacccaggaagcagaggttgcagtgagctgagattgctccgctacactctaccctgggtgacagaggaagagtccatctcaaaaaaaaaa

SEQ ID NO: 42864 - DNA, 399 bp, Homo sapiens
cccatatcccctgctgagccacgtgtgtgtgtgtgtgtgtgtgtgtgtgtgtctgtgtgtgtgtgtctgtgtgtgtgtgtgtctgtctctctctcttctggatcgctgctgttgcctcctctctgatcaccctgctttcacccttggcccactgtagtctgttctcaacatagcagccctttgcaaacaaacaccactttgacactcctaggctctgaactccccaacagcttcttatcttgctcagagtaaaagccaatggccttggccctgtgtaattcccctgggtttcctgccagtgctcctccccacttccctgctccatccaccctgcagttcctccacagcacaggtgtctttgcacttccccagatacctgaacagctccctcccccacag

SEQ ID NO: 42865 - DNA, 299 bp, Homo sapiens
ggggggaaggacgatgaaaaattacttaatggctacaatgtacattattcaggtgatcgacttccgaaaagcccctaattgaccatagcacatgtaacaaaatcgtacttgcactccataaatttatatacataaaaaaagaaaagttaaatcaaagcataaaaaagaaatgaaaaggccgtcttacataaaccgcaagttcagaagtctttaattaagaatccaatttcaggccgggcagtggctcacacctgtaatcccagcacttcgggaggccacactgggcagatggcttaagg

SEQ ID NO: 42866 - DNA, 430 bp, Homo sapiens
atgggatttgataagatctgttcttttaggaagacctctctgatggctgtgttagtgatttggggttgtggatacagcataatatagcagtgatagcagagagaacaattgggaggcaacttggaattgtgtcaactctcatctttaatgatagctatttttaaatattttttcaataattaaaaatctcgaagtttttccaatcagatatcctcatcttcctgagttcttatttccagtcagggaaacacattttctcctcatttaatttggaactcagaggattaaaataccctgagttttttctaaaagttcattactcattctatccttgaggtgagtggcttataaaaatcattactttaaaataccaaaattttgaatgtcaagtgtactgtagcaaacactgtaagaaaaggcatggtctcac

SEQ ID NO: 42867 - DNA, 240 bp, Homo sapiens
ggttcagtattataaacttcaaaaatcagtggccaagaggagaaagaagattccagagctaagcataagatggaggtgtgcttgacttttaaccctccccacccctccaagcagtggctcagaactcacaaagtcagagaattcttctgaatacccacaaagtggggctaacagctatattcaatttcagacctaaggatgatgaaaatcattgcttggttggaaacacagaaagtgttt

SEQ ID NO: 42868 - DNA, 302 bp, Homo sapiens
ctcatgccatgttgtgattctgtggtggactgggctccgctgggcgactctccagcagctgcaagcagatggtggctggggctggagtcaactcagtgccggacaggactgggcagccatgcagatggcatcttcactcgagtctggggtagctggacagctgagggcttgctgagcattgctgtctctgctctcccttcctctatccctgtggcttcttcacacagggctcccttggacgcccttacagcgtgctggtctctgggaagccagaccccttccatggtgtgtggctttccctt

SEQ ID NO: 42869 - DNA, 616 bp, Homo sapiens
tgagatggagtttcgctcttgtagcccaggctggagtgcaatggcacgatctcagctcactgcaacctccgcctcccgggttcaagcaattctccaatgtcaaggaaatcttagaaagtttcaaggtaaatttggtctttcacaagcttgatgaacaaagagaagcaaccctcgagtaacacttgcgctatacttgaggaaatggcactcagttcttcaataaaacaactcatcattccgttgtaaataaccattaaaaagagaaatattgaattctatgcaaaaaaggattagaaggaaaaatatcttcaaagtgttcataagtatgttctgcaatgactgaaagtctcatgagacatacacagtaaagatactttatttttacttttttgtgtaactctcatcagggccaaacctatcttattcagcaaaaaatccctgttatcaacctgccaaaaataagattcaataaaatatctgcagctgggtgcagtggctcccacctgtaatcctagtactttgggaggcagaggtgggcggatcacaaggtcaggagatcaagaccatgctggctaacagagtgaaaccctgtctctacaaaaatacaaaaaaaaaa

SEQ ID NO: 42870 - DNA, 424 bp, Homo sapiens
aatgagaatacacacgttgcctgtgtagcatagtgcctagcatggaataagcagtgtttgtctacttctttaattatgaaataataatcagatctgcttttcatcacaggcagagggcagaattgatgataggccttcagaattgaccaactccctttcaggaagaatgtcatactgcagatgcagtagccttttagtagcctaaaaagccttcttatccattgtaaagcaggagaatccatgggctgatctatatttacatgctgtacatatcttccccactggaagtttacggaggaaggatggtggcaatagcataacaacagaggggagagactagtacaggtatcgtacaactacatacatgctcagagcatgcccaggacctcaggaggaccagagcagataacacaacaccttgcag

SEQ ID NO: 42871 - DNA, 224 bp, Homo sapiens
cttgctggaagtggggcctggagtagccttgggagctgccaccctaggcacaccaatggtgaccccagtgccactcatcactggcctatgtgggcctgctcctctgtggtggacttgaaccttactgctccagccatctcccctgcctgcctgtcaagcctcgctgttgactgtagtcatcttcatgccaaaggccagacatagcctgcgagacttggatggga

SEQ ID NO: 42872 - DNA, 424 bp, Homo sapiens
  misc_feature (418)..(418): n is a, c, g, or t
  misc_feature (420)..(424): n is a, c, g, or t
ccacctcctcctgccagtccagctgctgctgcccggcctcctgcgtgtccctcctctgccgccccgcaagctcccgcctggcctgctacagcctctgctcaggcaagaagtccagctgctgagtgctcaatccttgtctcctgctgactgtgtctttgctgccaagcaggattctccagtctcaggagcccctggagtcctcagaatccaccagctccatcagtagccacagagctgctgcctgaaggggattttgagcgcgtcacactttcctccccactgtctgggaagagacaacccacaaatccctcagcaggtggactgtggctttctggagcccccttctccaaatgtgttgcttatacccaatgtgacaaagaagaactgctctaatcaataaattcttgagtcaggaaanannnnn

SEQ ID NO: 42873 - DNA, 274 bp, Homo sapiens
cccctggtaaataaaatattggtaaattagttccactgattatgatagcagaggttaatatagccctatggtcaaagtcttggatatattcatatctggagcagattaaggaattttgctaactgacttcaacttcttagcaatcttaaaatgtaagcttaaatatcttgtaggtgtcagtgaaagaggagtatgttcatcttgtggccacaattcagcaattagtgcagataagaatgatcttgtttgaagagcagtggggaaaagctgggta

SEQ ID NO: 42874 - DNA, 357 bp, Homo sapiens
taggtgacagttcagttgtttgctgcagaagagcagcagttcaatattggaattaactttaattttatgtttttaatctgttactaattttttacagaataattgtagtttttataatctggttaattatatgtttgagctgcattactttgcaatgtaagtttttttttttggcatggtcaaataacaaaaattctggttaatgcttatttcatattacaggagaatccagatatttcattagggaaacatataagcagagtgtgatcaggctgtatgaattatttataagagatgtgagtgaaaagatctatttgtagcttaagagtaagtagagtcagatgcatgtagagtctt

SEQ ID NO: 42875 - DNA, 478 bp, Homo sapiens
gatagccaatgccacccatggctgctgcgacggacattgggagtgactgctgtgtggagactgctgtactgggaccatcagtatgaatactttcttctttcttcaagcgcacatttgtaataggcaggaccaagtccctttctacttggaattgccagcttgggctcattgtgggtgctcagcatgtgccattaccactggactcatgagaggtagaaaaaggcgtaaagggggcatagacacggccaatgcctcctgacaatgatcatacaagccacgggcagcaggtgtcccacagaagggctgccagccctaatcacaggagtctgaccagatcctccttgatagtgacaggaggaagccagccctcctcctcagccctggaggagttcacacagcaaatcaacaaatgctaaatgggagacttccggcagccgctcacgcctgccattgggcatcccagtctcctcgtggttcc

SEQ ID NO: 42876 - DNA, 168 bp, Homo sapiens
cccactctcctctttccgcccactctcctcgtttccgcccactctcctctttccgccagcaccacagtataaaatactacagcactctgtgttaaagactaactgtctacatctccatatgttgtagtgttgtagtattttatactgtggtgctgcgagagagagtgg

SEQ ID NO: 42877 - DNA, 2802 bp, Homo sapiens
tctacagaacaaactgcacagcttggtactgagctcttcattgtcaggcaacttcttcaaatagtgaagcagaaaaccaatcaaaattcagtggacactacattgaaatttactttgagtgcactttggaacctcacagatgaatctccaaccacttgtagacactttattgaaaaccaagggttagaactcttcatgagggttctagagtctttcccaactgagtcatccattcagcagaaagttctaggacttttgaacaatatagctgaagtacaagaattacattctgaattaatgtggaaagattttatagaccacatcagtagtctcctacacagtgtggaagtggaagtcagttactttgcagctggaattattgcccatttaatatccagaggtgaacaagcttggacattgagtcgtagccagaggaattctctgctggatgatttgcattcagctattttgaaatggccaactccagagtgtgagatggtagcatacaggtcctttaatccatttttcccattacttggctgtttcacaacaccaggagttcagctatgggcagtttgggccatgcaacatgtctgcagcaagaatccttcaaggtattgcagcatgctgattgaagaaggaggattgcagcatttatacaacatcaaagatcatgaacatactgatccccatgtccaacagattgctgtggccattctggatagcttagaaaaacacattgtgcgccatgggaggccacctccctgtaaaaaacagccccaagccagactaaattgatagccataagtattggatagttgaatcacaggaatcctttttgtgattggtccatttggaatatcttaccctccctgatgttttgggggtttctatgacaagagtcataaaatcagtttgggattgataatgtgtagtactgcccatgtgaacagtctctaatttgtcttgtgattttaaacttatgagtcaagaagggtctcttcctttatcattgccttttaggaaattttccacatctttcagtgtttgaacttacttgtgcttgagattctacagttttatggtaaagtttgcacgaacccttaggccagacttttctgatctcagagtcccttccaatcaatttgcagcttcacataagctgttgacctgatttctgacactgcttcagttgtaaattttatactgcttctgtataaaatgcctttcttctctatctgtgtatattttataagatgtccttcttagtgtgaaagaagggaaatgtggatcatcttgtggaagctaatcactggcaggagcctggatggctggcggaaagatatatgagaaagaaaaattatgaaggtagaacagagtgtaggaactgggaattggtttcatggtataggttttaaaatgagacaggctacccttcgggagtccacctctcttgaggcggtgagcagaagcttgtcctccatatttatacctagaagtgtggactgctggttcctgcacagactgccggttattcactaggaatatttccccaagcaccacagtataaaatactacagcactctgtgttaaagactaactgtctacatctccatatgttgtagtgttgtgaaaatgtgattttaaaaaattatcgccagttaaaactggctattcttttcctctatttcaaagtcatttttgttcagtggaatagagacagcaacatggtgttaacctctcaattaaaatacaattgacaccagtaaattttgccataaaaagttaaaatctcttgttcaaaatatgtgtatcttcttaatgtgttcatgttagagaaagtgtccccatctcactgccaaaaatgaaagaaaataattaaactctttaaatgattaaatgtaatgattctactcgcagtgcataacagcacatatttttgacagattattttttaggcaattacctttccttaaggtatctgatacagtatagtaaagaatcacttatatcagtaatagcacttgagagatagcaagtcaccaagaaacttaattttcatttaaaattttattttgtgaataaggtcaatctacaatcccagataactacattttttttcatagatggccagtgttttcaacagagatttaaaatggaatattaaaattatagtgattattcagaagcattttaatttagaaaggagctggtttgttagttcactgatgacattttttgacaaacattttataccattatcacaataatcagacttgaattttttttggagttccttcatgtgaatgaaaactgagttaaaagaaagtaggcatttaggtctggatgcagtggctcatgcttgtgatcccagcactttgggaagctgaagcaggaggattgcttgagcccagaagttcaagactagcctgggcaacatagtgagactcggtctctaccaaaaaaaaaaattttttttttttaaattagctgggtgtggtggcacctgggaaacagagcgagacgctgactcaaataaatatctaaatagatatttagaatcactgaaaaccatattaaatgctgggttaatgctgacttaattggcttaaggaatttttataggcgtaagataaattttcacagactaagtttatttcagacaaaatagagaattcttttaaaagttttttttttttttttcctttttcgaatgttaatgtctaagacaaagttcagaaaacgagatggcctgtggtagtttggaaattgctagatatgttgaccgtttccaggtctttt

SEQ ID NO: 42878 - DNA, 1767 bp, Homo sapiens
ctcgtcgcgtagggtatcctatgggggtgtgggtaggctaagcgtttggatgctgcatgctgcgtgcttgatgccagacttttctgatctcagagtcccttccaatcaatttgcagcttcacataagctgttgacctgatttctgacactgcttcagttgtaaattttatactgcttctgtataaaatgcctttcttctctatctgtgtatattttataagatgtccttcttagtgtgaaagaagggaaatgtggatcatcttgtggaagctaatcactggcaggagcctggatggctggcggaaagatatatgagaaagaaaaattatgaaggtagaacagagtgtaggaactgggaattggtttcatggtataggttttaaaatgagacaggctacccttcgggagtccacctctcttgaggcggtgagcagaagcttgtcctccatatttatacctagaagtgtggactgctggttcctgcacagactgccggttattcactaggaatatttccccaagcaccacagtataaaatactacagcactctgtgttaaagactaactgtctacatctccatatgttgtagtgttgtgaaaatgtgattttaaaaaattatcgccagttaaaactggctattcttttcctctatttcaaagtcatttttgttcagtggaatagagacagcaacatggtgttaacctctcaattaaaatacaattgacaccagtaaattttgccataaaaagttaaaatctcttgttcaaaatatgtgtatcttcttaatgtgttcatgttagagaaagtgtccccatctcactgccaaaaatgaaagaaaataattaaactctttaaatgattaaatgtaatgattctactcgcagtgcataacagcacatatttttgacagattattttttaggcaattacctttccttaaggtatctgatacagtatagtaaagaatcacttatatcagtaatagcacttgagagatagcaagtcaccaagaaacttaattttcatttaaaattttattttgtgaataaggtcaatctacaatcccagataactacattttttttcatagatggccagtgttttcaacagagatttaaaatggaatattaaaattatagtgattattcagaagcattttaatttagaaaggagctggtttgttagttcactgatgacattttttgacaaacattttataccattatcacaataatcagacttgaattttttttggagttccttcatgtgaatgaaaactgagttaaaagaaagtaggcatttaggtctggatgcagtggctcatgcttgtgatcccagcactttgggaagctgaagcaggaggattgcttgagcccagaagttcaagactagcctgggcaacatagtgagactcggtctctaccaaaaaaaaaaattttttttttttaaattagctgggtgtggtggcacctgggaaacagagcgagacgctgactcaaataaatatctaaatagatatttagaatcactgaaaaccatattaaatgctgggttaatgctgacttaattggcttaaggaatttttataggcgtaagataaattttcacagactaagtttatttcagacaaaatagagaattcttttaaaagttttttttttttttttcctttttcgaatgttaatgtctaagacaaagttcagaaaacgagatggcctgtggtagtttggaaattgctagatatgttgaccgtttccaggtctttt

SEQ ID NO: 42879 - DNA, 690 bp, Homo sapiens
  misc_feature (671)..(671): n is a, c, g, or t
actttccacagtagcagagtagcataccccaaccaccctctaatagctagcttgtttgtataggtagaatgattcatctctccattttaaatggctagatgtttcgtggaagatcttaaaattgcctgcctcttttgaacaatatagctgaagtacaagaattacattctgaattaatgtggaaagattttatagaccacatcagtagtctcctacacagtgtggaagtggaagtcagttactttgcagctggaattattgcccatttaatatccagaggtgaacaagcttggacattgagtcgtagccagaggaattctctgctggatgatttggtagggtcattccataccaacaaaagacattcatagtggttaaactatcaaagcctcataatgtagtaaataatgcagtgctaaataaatattgtaatcctttcttgtgtgtcttttgtcttccagcattcagctattttgaaatggccaactccagagtgtgagatggtagcatacaggtaattagtatcataattaacagtaaaccagcaacctagtctagagatcattcctaagagtcattcctactagatgcataatttttccctcaggcacctcaatattggttatttatttatttattttgagacagagtttcactccagcctgagcganccgagcaaggctccgtctc

SEQ ID NO: 42880 - DNA, 2891 bp, Homo sapiens
tctacagaacaaactgcacagcttggtactgagctcttcattgtcaggcaacttcttcaaatagtgaagcagaaaaccaatcaaaattcagtggacactacattgaaatttactttgagtgcactttggaacctcacagatgaatctccaaccacttgtagacactttattgaaaaccaagggttagaactcttcatgagggttctagagtctttcccaactgagtcatccattcagcagaaagttctaggacttttgtgtggatctgctgatgatgaattcttcagcttttgtctgactgaaaacatctttacttaacctttgtttttgaaagatacttttaccagaacaatatagctgaagtacaagaattacattctgaattaatgtggaaagattttatagaccacatcagtagtctcctacacagtgtggaagtggaagtcagttactttgcagctggaattattgcccatttaatatccagaggtgaacaagcttggacattgagtcgtagccagaggaattctctgctggatgatttgcattcagctattttgaaatggccaactccagagtgtgagatggtagcatacaggtcctttaatccatttttcccattacttggctgtttcacaacaccaggagttcagctatgggcagtttgggccatgcaacatgtctgcagcaagaatccttcaaggtattgcagcatgctgattgaagaaggaggattgcagcatttatacaacatcaaagatcatgaacatactgatccccatgtccaacagattgctgtggccattctggatagcttagaaaaacacattgtgcgccatgggaggccacctccctgtaaaaaacagccccaagccagactaaattgatagccataagtattggatagttgaatcacaggaatcctttttgtgattggtccatttggaatatcttaccctccctgatgttttgggggtttctatgacaagagtcataaaatcagtttgggattgataatgtgtagtactgcccatgtgaacagtctctaatttgtcttgtgattttaaacttatgagtcaagaagggtctcttcctttatcattgccttttaggaaattttccacatctttcagtgtttgaacttacttgtgcttgagattctacagttttatggtaaagtttgcacgaacccttaggccagacttttctgatctcagagtcccttccaatcaatttgcagcttcacataagctgttgacctgatttctgacactgcttcagttgtaaattttatactgcttctgtataaaatgcctttcttctctatctgtgtatattttataagatgtccttcttagtgtgaaagaagggaaatgtggatcatcttgtggaagctaatcactggcaggagcctggatggctggcggaaagatatatgagaaagaaaaattatgaaggtagaacagagtgtaggaactgggaattggtttcatggtataggttttaaaatgagacaggctacccttcgggagtccacctctcttgaggcggtgagcagaagcttgtcctccatatttatacctagaagtgtggactgctggttcctgcacagactgccggttattcactaggaatatttccccaagcaccacagtataaaatactacagcactctgtgttaaagactaactgtctacatctccatatgttgtagtgttgtgaaaatgtgattttaaaaaattatcgccagttaaaactggctattcttttcctctatttcaaagtcatttttgttcagtggaatagagacagcaacatggtgttaacctctcaattaaaatacaattgacaccagtaaattttgccataaaaagttaaaatctcttgttcaaaatatgtgtatcttcttaatgtgttcatgttagagaaagtgtccccatctcactgccaaaaatgaaagaaaataattaaactctttaaatgattaaatgtaatgattctactcgcagtgcataacagcacatatttttgacagattattttttaggcaattacctttccttaaggtatctgatacagtatagtaaagaatcacttatatcagtaatagcacttgagagatagcaagtcaccaagaaacttaattttcatttaaaattttattttgtgaataaggtcaatctacaatcccagataactacattttttttcatagatggccagtgttttcaacagagatttaaaatggaatattaaaattatagtgattattcagaagcattttaatttagaaaggagctggtttgttagttcactgatgacattttttgacaaacattttataccattatcacaataatcagacttgaattttttttggagttccttcatgtgaatgaaaactgagttaaaagaaagtaggcatttaggtctggatgcagtggctcatgcttgtgatcccagcactttgggaagctgaagcaggaggattgcttgagcccagaagttcaagactagcctgggcaacatagtgagactcggtctctaccaaaaaaaaaaattttttttttttaaattagctgggtgtggtggcacctgggaaacagagcgagacgctgactcaaataaatatctaaatagatatttagaatcactgaaaaccatattaaatgctgggttaatgctgacttaattggcttaaggaatttttataggcgtaagataaattttcacagactaagtttatttcagacaaaatagagaattcttttaaaagttttttttttttttttcctttttcgaatgttaatgtctaagacaaagttcagaaaacgagatggcctgtggtagtttggaaattgctagatatgttgaccgtttccaggtctttt

SEQ ID NO: 42881 - DNA, 2681 bp, Homo sapiens
actttccacagtagcagagtagcataccccaaccaccctctaatagctagcttgtttgtataggtagaatgattcatctctccattttaaatggctagatgtttcgtggaagatcttaaaattgcctgcctcttttgaacaatatagctgaagtacaagaattacattctgaattaatgtggaaagattttatagaccacatcagtagtctcctacacagtgtggaagtggaagtcagttactttgcagctggaattattgcccatttaatatccagaggtgaacaagcttggacattgagtcgtagccagaggaattctctgctggatgatttgcattcagctattttgaaatggccaactccagagtgtgagatggtagcatacaggtcctttaatccatttttcccattacttggctgtttcacaacaccaggagttcagctatgggcagtttgggccatgcaacatgtctgcagcaagaatccttcaaggtattgcagcatgctgattgaagaaggaggattgcagcatttatacaacatcaaagatcatgaacatactgatccccatgtccaacagattgctgtggccattctggatagcttagaaaaacacattgtgcgccatgggaggccacctccctgtaaaaaacagccccaagccagactaaattgatagccataagtattggatagttgaatcacaggaatcctttttgtgattggtccatttggaatatcttaccctccctgatgttttgggggtttctatgacaagagtcataaaatcagtttgggattgataatgtgtagtactgcccatgtgaacagtctctaatttgtcttgtgattttaaacttatgagtcaagaagggtctcttcctttatcattgccttttaggaaattttccacatctttcagtgtttgaacttacttgtgcttgagattctacagttttatggtaaagtttgcacgaacccttaggccagacttttctgatctcagagtcccttccaatcaatttgcagcttcacataagctgttgacctgatttctgacactgcttcagttgtaaattttatactgcttctgtataaaatgcctttcttctctatctgtgtatattttataagatgtccttcttagtgtgaaagaagggaaatgtggatcatcttgtggaagctaatcactggcaggagcctggatggctggcggaaagatatatgagaaagaaaaattatgaaggtagaacagagtgtaggaactgggaattggtttcatggtataggttttaaaatgagacaggctacccttcgggagtccacctctcttgaggcggtgagcagaagcttgtcctccatatttatacctagaagtgtggactgctggttcctgcacagactgccggttattcactaggaatatttccccaagcaccacagtataaaatactacagcactctgtgttaaagactaactgtctacatctccatatgttgtagtgttgtgaaaatgtgattttaaaaaattatcgccagttaaaactggctattcttttcctctatttcaaagtcatttttgttcagtggaatagagacagcaacatggtgttaacctctcaattaaaatacaattgacaccagtaaattttgccataaaaagttaaaatctcttgttcaaaatatgtgtatcttcttaatgtgttcatgttagagaaagtgtccccatctcactgccaaaaatgaaagaaaataattaaactctttaaatgattaaatgtaatgattctactcgcagtgcataacagcacatatttttgacagattattttttaggcaattacctttccttaaggtatctgatacagtatagtaaagaatcacttatatcagtaatagcacttgagagatagcaagtcaccaagaaacttaattttcatttaaaattttattttgtgaataaggtcaatctacaatcccagataactacattttttttcatagatggccagtgttttcaacagagatttaaaatggaatattaaaattatagtgattattcagaagcattttaatttagaaaggagctggtttgttagttcactgatgacattttttgacaaacattttataccattatcacaataatcagacttgaattttttttggagttccttcatgtgaatgaaaactgagttaaaagaaagtaggcatttaggtctggatgcagtggctcatgcttgtgatcccagcactttgggaagctgaagcaggaggattgcttgagcccagaagttcaagactagcctgggcaacatagtgagactcggtctctaccaaaaaaaaaaattttttttttttaaattagctgggtgtggtggcacctgggaaacagagcgagacgctgactcaaataaatatctaaatagatatttagaatcactgaaaaccatattaaatgctgggttaatgctgacttaattggcttaaggaatttttataggcgtaagataaattttcacagactaagtttatttcagacaaaatagagaattcttttaaaagttttttttttttttttcctttttcgaatgttaatgtctaagacaaagttcagaaaacgagatggcctgtggtagtttggaaattgctagatatgttgaccgtttccaggtctttt

SEQ ID NO: 42882 - DNA, 484 bp, Homo sapiens
tgagatagctctcgctctgtctcccaggtctgtcttccaggctggagtgcagtggtgcaatctcggctcactgcatcctcaacctccttagttcaaaccccttctgccttagcctcctgagcagctaacaggcacacaccactgcagctggccaatttttttttttttttttggtagagatggggtctcactatgttgccaaggctggtctcaaactcctgggctcaagtgatccatctgcctcggcctcccaaagtgctgggattttaggtgtgagccactgtgcttggtgtaatttaacttttatattccccctccttttttttttttttttaagatattcttaaagttcattgttatcctgatcaccaaatccagggacctttcacttcccttgcaactggcagtgaatcacttcttggtggatattgcctcttcttgttcatcgtggagctgaaatactctgcctttaacgtcctgattg

SEQ ID NO: 42883 - DNA, 148 bp, Homo sapiens
taccttgcaaggctgtcaatcaatcagcaactttattttcacgtttctggtacaatttctgagaagtgtgttgaaaattatccctccctcccccacaaaattcccctacctggaatatttgaattccttgtccacttagaaaaacttg

SEQ ID NO: 42884 - DNA, 324 bp, Homo sapiens
agagtggggtgatggataaagtactacacactgggttcagtgtacactgctctggcaacgagtgcaccaaaatctcggaaattactactaaagaagttactcatgtaaccaaacaccacctggtccccaaaactactgaaatttttttaaaaatgaaaaacccagctattcatttaataaaatcaaactttacagaattatctaagtaaaaataaaaagttttaccattttctttattttttcagaaattacttctgttgagtatttggtgacactttctagatcttttctatgtataagtacactcatagacacataaataaa

SEQ ID NO: 42885 - DNA, 453 bp, Homo sapiens
tgtgaagctgcccaggtggtgtgtaggaaattttggtagagaaagaaatagtttgaaagttggtttctgacaagaggaaagaaaaggctgcaacactaaaggaagactcaaagtgttaaaaggacgctcaaaatgtagtattgtggcaggtcgggcagagacggggttttactgtgttagccaggatggtctcggtctcctgacctcgtgatctacccgcctcagcctcccaaagtgttgggattacaggcatgagccaccgcgcccagccgtcttgtcaaaatactctaagacttcatctgtttagaatcaaaagtgcggaagacctgggaattatgtaataaggatagcagaataatcctcgtcactgacaggtggtgagctgtaaagtgttcttttgttgcagtggcagagatttcagcaatggagggaaatccagtggccaagatgctt

SEQ ID NO: 42886 - DNA, 627 bp, Homo sapiens
attttgacattcagtgaggcctttttagtgtttttaatgtgtgcattatagtacgtataagaacatactgaaattaccaatttaatcatatccttctccagattattagcattttgacggtagggactataatgattttatctctgtatacctagtatctaccactgtgaatatcacgtagtagattattttgttggatgaatggatgcttgctaaaataactgctgtgtacgcgtgtgtatatttgtacctgtatacacactgctatgggtttgaagggatcatgtctccttcaaaattcatgtcgaaaaataatccccctaattaaatagtattaagagggtgtggggttttggggaagtgtacccagagctgctgattgttctagaaccaccccactattccaagtttattaggctcagagccactgagagccttgagttctgggcacttctgtcacccatctccttttgcagcaccagacaaagaattttcctttttagcctcattgtttgcatgcctaggagtcggtcactgtgctcctcgtagtctttgggtctcagaaatagtgaacaggtacagcatccagggtggaatttttgcctttagtaccctcccttgaactct

SEQ ID NO: 42887 - DNA, 449 bp, Homo sapiens
cctaaacaaatggatgaaatctatgggtcagattttccccctaagaagctcaatcattatgcacatggaaaatgcaaggttttacatcccacatatatttcagacactttaatgctttgattcagccttaatggcagggcttgggattttgttcccactttagtacagccagctaggattttagtgtttatagaaataaagcataaaaaagtaatatttcccatgacaaacatcagggactgggtgctttacaagtttaagtttttaaacattttaaaaatatgataacagtttttgtaaaacagttttaacttttgaataatgaaaatcttactcagaaatgactggtacatttttaatgtacccacaacaaaaccttttttttgtagtcttgtaagtgaaagaaaaagccaattcttaatgtgtaagaagtgctgaatatgagacaa

SEQ ID NO: 42888 - DNA, 3831 bp, Homo sapiens
  misc_feature (1)..(1): n is a, c, g, or t
  misc_feature (3)..(3): n is a, c, g, or t
  misc_feature (8)..(8): n is a, c, g, or t
  misc_feature (13)..(13): n is a, c, g, or t
  misc_feature (15)..(15): n is a, c, g, or t
  misc_feature (18)..(18): n is a, c, g, or t
  misc_feature (130)..(130): n is a, c, g, or t
  misc_feature (1001)..(1001): n is a, c, g, or t
nanctttnttctntnaanagcctgtgacctgttgttacagccggacaatctagcttgtaaacccttctggaagcctcggaacctgaacatcagccagcatggctcggacatgcaggtgtccttcgaccangcaccgcacaacttcggcttccgtttcttctatcttcactacaagctcaagcacgaaggacctttcaagcgaaagacctgtaagcaggagcaaactacagagacgaccagctgcctccttcaaaatgtttctccaggggattatataattgagctggtggatgacactaacacaacaagaaaagtgatgcattatgccttaaagccagtgcactccccgtgggccgggcccatcagagccgtggccatcacagtgccactggtagtcatatcggcattcgcgacgctcttcactgtgatgtgccgcaagaagcaacaagaaaatatatattcacatttagatgaagagagctctgagtcttccacatacactgcagcactcccaagagagaggctccggccgcggccgaaggtctttctctgctattccagtaaagatggccagaatcacatgaatgtcgtccagtgtttcgcctacttcctccaggacttctgtggctgtgaggtggctctggacctgtgggaagacttcagcctctgtagagaagggcagagagaatgggtcatccagaagatccacgagtcccagttcatcattgtggtttgttccaaaggtatgaagtactttgtggacaagaagaactacaaacacaaaggaggtggccgaggctcggggaaaggagagctcttcctggtggcggtgtcagccattgccgaaaagctccgccaggccaagcagagttcgtccgcggcgctcagcaagtttatcgccgtctactttgattattcctgcgagggagacgtccccggtatcctagacctgagtaccaagtacagactcatggacaatcttcctcagctctgttcccacntgcactcccgagaccacggcctccaggagccggggcagcacacgcgacagggcagcagaaggaactacttccggagcaagtcaggccggtccctatacgtcgccatttgcaacatgcaccagtttattgacgaggagcccgactggttcgaaaagcagttcgttcccttccatcctcctccactgcgctaccgggagccagtcttggagaaatttgattcgggcttggttttaaatgatgtcatgtgcaaaccagggcctgagagtgacttctgcctaaaggtagaggcggctgttcttggggcaaccggaccagccgactcccagcacgagagtcagcatgggggcctggaccaagacggggaggcccggcctgcccttgacggtagcgccgccctgcaacccctgctgcacacggtgaaagccggcagcccctcggacatgccgcgggactcaggcatctatgactcgtctgtgccctcatccgagctgtctctgccactgatggaaggactctcgacggaccagacagaaacgtcttccctgacggagagcgtgtcctcctcttcaggcctgggtgaggaggaacctcctgcccttccttccaagctcctctcttctgggtcatgcaaagcagatcttggttgccgcagctacactgatgaactccacgcggtcgcccctttgtaacaaaacgaaagagtctaagcattgccactttagctgctgcctccctctgattccccagctcatctccctggttgcatggcccacttggagctgaggtctcatacaaggatatttggagtgaaatgctggccagtacttgttctcccttgccccaaccctttaccggatatcttgacaaactctccaattttctaaaatgatatggagctctgaaaggcatgtccataaggtctgacaacagcttgccaaatttggttagtccttggatcagagcctgttgtgggaggtagggaggaaatatgtaaagaaaaacaggaagatacctgcactaatcattcagacttcattgagctctgcaaactttgcctgtttgctattggctaccttgatttgaaatgctttgtgaaaaaaggcacttttaacatcatagccacagaaatcaagtgccagtctatctggaatccatgttgtattgcagataatgttctcatttatttttgatgtagaatttacattgccatgggtgttaaataagctttgagtcaaaagtcaagaaagtgactgaatatacagtcaccttttatgaaatgagtctctgtgttactgggtggcatgactgattgaggtgaagctcacggggccaggctgaccgtcttgaccgttccacttgagataggttggtcatcgtgcagaaggccccaggacctcagcacacacagcctcctcttggtctgagtaggcatcatgtgggggccagatctgcctgctgtttccatgggttacatttactgtgctgtatctcagatgttggtgtctggaagtttattcttaagagactgctacccagctggtctgtattattggaagttgcagttcgtgctttggttggccttctggtctaaagctgtgtcctgaatattagggatcacaattcactgaaatacagcagtgtgtggaggtgatggccagttaatctgctgaactggttttgactaatgacaaacctctttttaagatggtagaatggaggtgatagtcacaaaagtaaatgttccatttttatgaatgactttctacagagtttctatttctaaagaaaaaacaattgttcacatcccatctgatgattagcatgtgtgtaatgaatgctgtcttggtctcccctgtggaaacccttctccctgtgccttagagcaggtgtgtacatctctcactacctttctcatgggtgctgttagattttggcacccgttttctcagcattcagcccagggaatgtggttttcacttcttcgtcagataagaccaacatgaaggggtatgttgagaaacatcctgaggcaaggtgggaggtgggatggggcaggactttcccttccaagcacatgcatggcaggtggggaaaggggggcttgcacccctgctggaaagaaaaggtttgtgtatatttctgatgcaaatgtcatactcactgctctgtaaaggcagctggcagctttttgggaaaagaacgtgctcgtctgttctctggcatcaagtttcttgcagctgctctgagggagagacagtgagctgcaagactgcctccccataacaacaggcaactcagagaagagtcattttatgttgttcctatggaatctggaatgagtgcagagctcctacccacacatgactgccccgccatttcatcctaggcattctgtgaaggagattggttagtccaaacttgctaacatacgaaaattcacttggaacatgatgagagatttcttattgaggccaagagatgtttcctgtcccagaggaaccattaggagtcgcttttagggtattcagctttgttcatgaaataaggcatctctgagaaagtggccccagggagagaatggaggactgggaggagaagcattaactgagctccaagggtgtgtgggcagagagcttgctatgtgaactcactccttaagaaaatggaagagaaaaagagagtgctagttaaaaaatcgggatgttttagtttggatttagggttttgatacttatgttgaaatactaatgtttctgatcaataaaatcaaactcttaatataccgagtaatgaaaccatagtgtgattgcctcagaataaattgagaagt

SEQ ID NO: 42889 - DNA, 5597 bp, Homo sapiens
  misc_feature (1)..(1): n is a, c, g, or t
  misc_feature (3)..(3): n is a, c, g, or t
  misc_feature (8)..(8): n is a, c, g, or t
  misc_feature (13)..(13): n is a, c, g, or t
  misc_feature (15)..(15): n is a, c, g, or t
  misc_feature (18)..(18): n is a, c, g, or t
  misc_feature (130)..(130): n is a, c, g, or t
  misc_feature (1001)..(1001): n is a, c, g, or t
nanctttnttctntnaanagcctgtgacctgttgttacagccggacaatctagcttgtaaacccttctggaagcctcggaacctgaacatcagccagcatggctcggacatgcaggtgtccttcgaccangcaccgcacaacttcggcttccgtttcttctatcttcactacaagctcaagcacgaaggacctttcaagcgaaagacctgtaagcaggagcaaactacagagacgaccagctgcctccttcaaaatgtttctccaggggattatataattgagctggtggatgacactaacacaacaagaaaagtgatgcattatgccttaaagccagtgcactccccgtgggccgggcccatcagagccgtggccatcacagtgccactggtagtcatatcggcattcgcgacgctcttcactgtgatgtgccgcaagaagcaacaagaaaatatatattcacatttagatgaagagagctctgagtcttccacatacactgcagcactcccaagagagaggctccggccgcggccgaaggtctttctctgctattccagtaaagatggccagaatcacatgaatgtcgtccagtgtttcgcctacttcctccaggacttctgtggctgtgaggtggctctggacctgtgggaagacttcagcctctgtagagaagggcagagagaatgggtcatccagaagatccacgagtcccagttcatcattgtggtttgttccaaaggtatgaagtactttgtggacaagaagaactacaaacacaaaggaggtggccgaggctcggggaaaggagagctcttcctggtggcggtgtcagccattgccgaaaagctccgccaggccaagcagagttcgtccgcggcgctcagcaagtttatcgccgtctactttgattattcctgcgagggagacgtccccggtatcctagacctgagtaccaagtacagactcatggacaatcttcctcagctctgttcccacntgcactcccgagaccacggcctccaggagccggggcagcacacgcgacagggcagcagaaggaactacttccggagcaagtcaggccggtccctatacgtcgccatttgcaacatgcaccagtttattgacgaggagcccgactggttcgaaaagcagttcgttcccttccatcctcctccactgcgctaccgggagccagtcttggagaaatttgattcgggcttggttttaaatgatgtcatgtgcaaaccagggcctgagagtgacttctgcctaaaggtagaggcggctgttcttggggcaaccggaccagccgactcccagcacgagagtcagcatgggggcctggaccaagacggggaggcccggcctgcccttgacggtagcgccgccctgcaacccctgctgcacacggtgaaagccggcagcccctcggacatgccgcgggactcaggcatctatgactcgtctgtgccctcatccgagctgtctctgccactgatggaaggactctcgacggaccagacagaaacgtcttccctgacggagagcgtgtcctcctcttcaggcctgggtgaggaggaacctcctgcccttccttccaagctcctctcttctgggtcatgcaaagcagatcttggttgccgcagctacactgatgaactccacgcggtcgcccctttgtaacaaaacgaaagagtctaagcattgccactttagctgctgcctccctctgattccccagctcatctccctggttgcatggcccacttggagctgaggtctcatacaaggatatttggagtgaaatgctggccagtacttgttctcccttgccccaaccctttaccggatatcttgacaaactctccaattttctaaaatgatatggagctctgaaaggcatgtccataaggtctgacaacagcttgccaaatttggttagtccttggatcagagcctgttgtgggaggtagggaggaaatatgtaaagaaaaacaggaagatacctgcactaatcattcagacttcattgagctctgcaaactttgcctgtttgctattggctaccttgatttgaaatgctttgtgaaaaaaggcacttttaacatcatagccacagaaatcaagtgccagtctatctggaatccatgttgtattgcagataatgttctcatttatttttgatgtagaatttacattgccatgggtgttaaataagctttgagtcaaaagtcaagaaagtgactgaatatacagtcaccttttatgaaatgagtctctgtgttactgggtggcatgactgattgaggtgaagctcacggggccaggctgaccgtcttgaccgttccacttgagataggttggtcatcgtgcagaaggccccaggacctcagcacacacagcctcctcttggtctgagtaggcatcatgtgggggccagatctgcctgctgtttccatgggttacatttactgtgctgtatctcagatgttggtgtctggaagtttattcttaagagactgctacccagctggtctgtattattggaagttgcagttcgtgctttggttggccttctggtctaaagctgtgtcctgaatattagggatcacaattcactgaaatacagcagtgtgtggaggtgatggccagttaatctgctgaactggttttgactaatgacaaacctctttttaagatggtagaatggaggtgatagtcacaaaagtaaatgttccatttttatgaatgactttctacagagtttctatttctaaagaaaaaacaattgttcacatcccatctgatgattagcatgtgtgtaatgaatgctgtcttggtctcccctgtggaaacccttctccctgtgccttagagcaggtgtgtacatctctcactacctttctcatgggtgctgttagattttggcacccgttttctcagcattcagcccagggaatgtggttttcacttcttcgtcagataagaccaacatgaaggggtatgttgagaaacatcctgaggcaaggtgggaggtgggatggggcaggactttcccttccaagcacatgcatggcaggtggggaaaggggggcttgcacccctgctggaaagaaaaggtttgtgtatatttctgatgcaaatgtcatactcactgctctgtaaaggcagctggcagctttttgggaaaagaacgtgctcgtctgttctctggcatcaagtttcttgcagctgctctgagggagagacagtgagctgcaagactgcctccccataacaacaggcaactcagagaagagtcattttatgttgttcctatggaatctggaatgagtgcagagctcctacccacacatgactgccccgccatttcatcctaggcattctgtgaaggagattggttagtccaaacttgctaacatacgaaaattcacttggaacatgatgagagatttcttattgaggccaagagatgtttcctgtcccagaggaaccattaggagtcgcttttagggtattcagctttgttcatgaaataaggcatctctgagaaagtggccccagggagagaatggaggactgggaggagaagcattaactgagctccaagggtgtgtgggcagagagcttgctatgtgaactcactccttaagaaaatggaagagaaaaagagagtgctagttaaaaaatcgggatgttttagtttggatttagggttttgatacttatgttgaaatactaatgtttctgatcaataaaatcaaactcttaatataccgagtaatgaaaccatagtgtgattgcctcagaataaattgagaagtccaacttcctagttttgtttaattagtttcactttttctactctccccagtatgctagaaatgggaatcgttgccctgcagattacggcaaaacatctgttttaagcaaagctgcattttttgactcagaaattgtcccagacggtggatataagatgaaattcagaaaaacgttctgccaagtcacaggcttttagatattatggaaacaagaaatggaaaacaggatgatctccatgagaggccttgatcctgagagtaaaaggcttgtgtagataggttagacaacgtcctctagaaaagagaccagggataagtccaggtttccaggaaaaccaagaagcctgcgggtagctgaaggtagagtgctagttgttcatcttaacttaccaatgagctacagaaaggacttagcatctgatgtcatcagctttgccaggagagtgatcaaggaggttaaagctcaggtaaaggtgtgccttctcagagattggctacaagcaacagagaccacctcaacagagaccacctcaacagactcagcccagccatacaaggtgccaaagctcctccagagggctgtcttgggcctttgaggcaattgatctccagaaagagtcagaagtcattccagtccaggcccaggtattcagatggtgacccagccagataatagtatcttgagcaaataatagtatcttgagtgcaaataagcaggaagactgtccttcaaaaaatgtggggttacatgattttcagagcctttttttcagagttgagcatcttttcttttaaaagaaataaggggcaagaggaccaattttattccttgaggaaaaatgacacacccttctcccaaaagaaagaaaactctctggccccccaacttcaacactaatttggctccctgaagaagagagaaaatattatttctgtctttattgaagagaaatgggcaatgccaatgtgaaggttactagtcttttttattttctattggtgaagactactactgctcttatttagcagatcttataccttcagtggtcaccagtatagcaggtgaggtataaggaaaacagcagtgtgatgataaatggtaattaatatactttgtctgtgtcagcaatagggaatggtggggactgtggcaaactgaagcgcccctgttccacccacagtgggtaattttccagtcgactgtggccatgaagtacttcctgatcttcccatttttcaagaaaagctgacaatctggatttttatatgaaaaattctgattttaaaaaatattggcaacaagagcgaaactccgtctcaacaacaacaacaaaaagtttggtatgtttctctcaagaaaaaagcatggtgagtccagacagcagcaaaagcttttgtgaaaaccaattgtgttcatctagatagtaagtaactcctatttttactgttaattttttaaaagagaatttttccctgtggaaactccctgttagtacgtcctaggggagaaagcctgtggaatatggtggttattgatggcgttgcctttgtttcatctttgagtttgccctttgtgggatctagtgggataatgagcactgacagaactcttaacagcgtgctgtatttttgacattgaaaatgttaatgacttgatttgtacataactctgtaactaggtgaaagtagatcacagctgacatttacaaaatgtttttgtaccttagaatttctgcattaaataaaatgttttgttttaaaaaaaa

SEQ ID NO: 42890 - DNA, 747 bp, Homo sapiens
gcacgaggagaactagtctcgagttttttttttgcccttgcaccagagtatgaaatagcttccaggagctccagctataagcttggaagtgtctgtgtgattgtaatcacatggtgacaacactcagaatctaaattggacttctgttgtattctcaccactcaatttgttttttagcagtttaatgggtacattttagagtcttccattttgttggaattagatcctccccttcaaatgctgtaattaacaacacttaaaaaacttgaataaaatattgaaacctcaaaaaaaaaaaaaaaaaaaaactcgaaaaagtttggtatgtttctctcaagaaaaaagcatggtgagtccagacagcagcaaaagcttttgtgaaaaccaattgtgttcatctagatagtaagtaactcctatttttactgttaattttttaaaagagaatttttccctgtggaaactccctgttagtacgtcctaggggagaaagcctgtggaatatggtggttattgatggcgttgcctttgtttcatctttgagtttgccctttgtgggatctagtgggataatgagcactgacagaactcttaacagcgtgctgtatttttgacattgaaaatgttaatgacttgatttgtacataactctgtaactaggtgaaagtagatcacagctgacatttacaaaatgtttttgtaccttagaatttctgcattaaataaaatgttttgttttaaaaaaaa

SEQ ID NO: 42891 - DNA, 185 bp, Homo sapiens
tatgaaaaattctgattttaaaaaatattggcaactaagttaaaattcaagtgaatttagacccagcagaagacatggatggacctgatttggtccactgactaccagtttgttaacctgtgctttataagatttgaaggaaaggcattcatggtaattacagacggtgccaccagaaaatgctc

SEQ ID NO: 42892 - DNA, 2830 bp, Homo sapiens
tggcagtcggaagttgcctgagcagatcccagccggctggctcgagtggccttcgtcgtcccttggcgccctgggagagtcgctgacgggtggactgacggaccgcctgaggacggccggccagggcggtgaaagcgccagccctatggcgcgggtcgcgtgaggcggaaggccgaggacggccggcggcggcgcccgccccggcgatgcgggccccgcccgtcgcctcaggtgccatttggattgtactttagtggcacgatgtactctgagtggaggtcactgcatttggtgattcagaatgatcaaggccataccagtgtgctgcacagctatccagagagcgttggacgagaggtggcaaatgctgtagtccgtcctcttgggcaggtgttaggtaccccttcagtggctggtagtgagaatttgttaaaaactgacaaagaagtaaaatggaccatggaagtaatttgctatggactgacccttccattggatggagagactgtaaaatattgcgttgatgtatatacagactggattatggctttagtgttgccaaaagattctattccattgccagttattaaagagcctaatcaatatgttcaaactatactaaaacacctacagaatctttttgtaccaagacaggaacagggttccagtcagattcgactatgcttacaggtcctgagagccattcagaaactggcccgtgagtcatctctcatggcccgagaaacttgggaagtcttactgttgtttcttctgcagattaacgacatacttctggccccaccaactgttcaaggtggcattgctgagaatctagcagagaagttgattggtgttctctttgaggtgtggttactagcttgtactcggtgcttcccaacacctccttattggaaaacagccaaggagatggtggctaactggaggcatcacccagcagtggtggagcagtggagcaaggtcatttgtgcactcacttccagattgctacgctttacatatggtccttcatttcctgcatttaaagttcccgatgaagatgccagtctgatccctccagaaatggataatgagtgtgtgcacagacatggtttcgctttttacacatgttaagtaatcctgtggatttgagtaacccagctattataagctctactcccaaatttcaggaacagttcttgaatgtgagcggaatgccgcaagaattgaatcagtatccctgccttaaacatctgcctcaaatattttttcgtgccatgcgtggaatcagctgtctggtggatgcattcttaggtatttctagaccccgatcagacagtgctcccccaacacccgtgaatagattaagtatgcctcaaagtgctgctgtcagtaccacccccccacataaccggaggcaccgggctgttactgtgaataaggccaccatgaagacaagcacagttagtactgctcatgcctctaaagttcagcaccagacgtcctccacctctcctctgtcaagtccaaatcagactagttcagaaccccggccactgcctgcccctcggagaccaaaggttaacagcatcttgaatctctttggatcatggttatttgatgcagcatttgttcactgtaaacttcataatgggataaacagagacagcagcatgactgccattacaacacaagctagcatggagtttcgacggaaagggtcacaaatgtccacagacaccatggtttccaatcctatgtttgatgcaagtgaatttcctgataactatgaagcaggaagagctgaggcttgtgggacactgtgtaggattttttgtagcaagaagactggagaagagattctgccagcttatttatccaggtcttggaatttttgtttgttttttcatttatatagttttgatagtgaagccattgttggttggccgactgaaccgatgagtgatgttggtctgaaatacctacagatgtctgtaagtgatcgacatttgcctgaaatctttcattttacctgtctcatcagatttggtaaagacccttaagacccttttgttttagaagtgctatttatgtcatcttatttgaatctttttaatatggagagatttcgaaggaccacaattatttgttaacaaatttttagcacagtattcccatgtaggcagtccagaaataagtcagctgtaaatcctgcctccaaggagcttattttctgggcaaagccccaaacaaagccgtgtacacatgtaacaatgatccagcaggaattaggatattgatgggagaggcacagataatgtgctgtgggcattcaggggaagaagcagcgcacatttatttactgtaggggattcaggaaagagttttgggggattaaatgattatgctggacttataaaggatgagtagcatttagcctatgttagaaagttggttagggtcatcttctccaaatctatggcttcagccatctttgttaatgcctctgccatccattcagttgctcaggccagaaacgaagagtcattttagaatcctcttcttctgtatctttagttgatcaaccgatcaaccaactcttgccttcctgctacttaactctctttctgatctctcttttcactctatccccaccattatactttagactttgtcacttttctcctaaattaactcataatggcctcccgttcttcttgacactgttttgccttccttaactgatcattcacacaagtgcagaagtgaggttaatatcaacagagtatttagatatctgcatacttgctaggttctcaggagatagaattaa

SEQ ID NO: 42893 - DNA, 2351 bp, Homo sapiens
tggcagtcggaagttgcctgagcagatcccagccggctggctcgagtggccttcgtcgtcccttggcgccctgggagagtcgctgacgggtggactgacggaccgcctgaggacggccggccagggcggtgaaagcgccagccctatggcgcgggtcgcgtgaggcggaaggccgaggacggccggcggcggcgcccgccccggcgatgcgggccccgcccgtcgcctcaggtgccatttggattgtactttagtggcacgatgtactctgagtggaggtcactgcatttggtgattcagaatgatcaaggccataccagtgtgctgcacagctatccagagagcgttggacgagaggtggcaaatgctgtagtccgtcctcttgggcaggtgttaggtaccccttcagtggctggtagtgagaatttgttaaaaactgacaaagaagtaaaatggaccatggaagtaatttgctatggactgacccttccattggatggagagactgtaaaatattgcgttgatgtatatacagactggattatggctttagtgttgccaaaagattctattccattgccagttattaaagagcctaatcaatatgttcaaactatactaaaacacctacagaatctttttgtaccaagacaggaacagggttccagtcagattcgactatgcttacaggtcctgagagccattcagaaactggcccgtgagtcatctctcatggcccgagaaacttgggaagtcttactgttgtttcttctgcagattaacgacatacttctggccccaccaactgttcaaggtggcattgctgagaatctagcagagaagttgattggtgttctctttgaggtgtggttactagcttgtactcggtgcttcccaacacctccttattggaaaacagccaaggagatggtggctaactggaggcatcacccagcagtggtggagcagtggagcaaggtcatttgtgcactcacttccagattgctacgctttacatatggtccttcatttcctgcatttaaagttcccgatgaagatgccagtctgatccctccagaaatggataatgagtgtgtgcacagacatggtttcgctttttacacatgttaagtaatcctgtggatttgagtaacccagctattataagctctactcccaaatttcaggaacagttcttgaatgtgagcggaatgccgcaagaattgaatcagtatccctgccttaaacatctgcctcaaatattttttcgtgccatgcgtggaatcagctgtctggtggatgcattcttaggtatttctagaccccgatcagacagtgctcccccaacacccgtgaatagattaagtatgcctcaaagtgctgctgtcagtaccacccccccacataaccggaggcaccgggctgttactgtgaataaggccaccatgaagacaagcacagttagtactgctcatgcctctaaagttcagcaccagacgtcctccacctctcctctgtcaagtccaaatcagactagttcagaaccccggccactgcctgcccctcggagaccaaaggttaacagcatcttgaatctctttggatcatggttatttgatgcagcatttgttcactgtaaacttcataatgggataaacagagacagcagcatgactgccattacaacacaagctagcatggagtttcgacggaaagggtcacaaatgtccacagacaccatggtttccaatcctatgtttgatgcaagtgaatttcctgataactatgaagcaggaagagctgaggcttgtgggacactgtgtaggattttttgtagcaagaagactggagaagagattctgccagcttatttatccagattttacatgcttttaattcaaggtttgcagataaatgattatgtgtgccatcctgtcttggccagcgttattctaaactctcctcctttgttctgctgtgacttgaaagggattgatgttgtggttccttactttatttcagctcttgaaaccattttgcctgacagagaactctcaaaattcaaaagctatgtaaatccaacagaattgcgaagatcctccattaatatcctgctttctttgttgcccctccctcatcattttggcacagtcaaatctgaggtggtcctggaaggaaagtttagtaacgatgacagctcttcttatgataaaccaataacttttctgtccctgaagttgagacttgtgaatatattaataggtgccttgcaaactgaaacggaccccaacaacacccaaatgatattaggtttgtattcacacgttattttgtaagtgaaaccaaagtac

SEQ ID NO: 42894 - DNA, 1370 bp, Homo sapiens
tggcagtcggaagttgcctgagcagatcccagccggctggctcgagtggccttcgtcgtcccttggcgccctgggagagtcgctgacgggtggactgacggaccgcctgaggacggccggccagggcggtgaaagcgccagccctatggcgcgggtcgcgtgaggcggaaggccgaggacggccggcggcggcgcccgccccggcgatgcgggccccgcccgtcgcctcaggtgccatttggattgtactttagtggcacgatgtactctgagtggaggtcactgcatttggtgattcagaatgatcaaggccataccagtgtgctgcacagctatccagagagcgttggacgagaggtggcaaatgctgtagtccgtcctcttgggcaggtgttaggtaccccttcagtggctggtagtgagaatttgttaaaaactgacaaagaagtaaaatggaccatggaagtaatttgctatggactgacccttccattggatggagagactgtaaaatattgcgttgatgtatatacagactggattatggctttagtgttgccaaaagattctattccattgccagttattaaagagcctaatcaatatgttcaaactatactaaaacacctacagaatctttttgtaccaagacaggaacagggttccagtcagattcgactatgcttacaggtcctgagagccattcagaaactggcccgtgagtcatctctcatggcccgagaaacttgggaagtcttactgttgtttcttctgcagattaacgacatacttctggccccaccaactgttcaaggtggcattgctgagaatctagcagagaagttgattggtgttctctttgaggtgtggttactagcttgtactcggtgcttcccaacacctccttattggaaaacagccaaggagatggtggctaactggaggcatcacccagcagtggtggagcagtggagcaaggtcatttgtgcactcacttccaggtaggttattgtcattgccctgccttccttcacctgtctgaccttaggcagctttctggcattcatggaatacattataacaaaggctgggtctgttattactgtactttagatacagaattgagccactttttaaatatagatataacagtttggctagtgcctgtttaaaacatttcagaataatcaagtattcttgagaaacagataaattttataccctacttcccccacaaaaaattccactcttattttgatcattaaaatatgcatgatcattaaaatatgcctaatcattattttaaagaaacaaaccatagaaagatataatagaaaagttctcctgaaatcctaccatgtatatttata

SEQ ID NO: 42895 - DNA, 578 bp, Homo sapiens
aaatagtggcaaagaagaccccagtatgggcacttgtagtagtacaaatccttcataccctccagtagatttgtgtgtgtaaaaataccacagtggttttaatcccttgtcaatttctgttactatcagtttgtactattcagttggcacattctgctttatcaacatggtttttaatgattgacctttatttatgcttgtaaactgtgatgtaatcctcacttgattcattttcatttgactagggtggtggagaaaataacctgaagagtcatagtcgcaccaatagtggtattagttcagcaagtggtggaagcacggagcccacgactcccgatagtgagagacctgctcaagctctcttaagagattatggttagtcgtgtttcttttgaaattcaaagtttaatagaatgactttaatgcttacatttataaaacaaaaacattaaaaatgttaatgttcatgttttttatatacttaagtataatagagaggatgtcagtcttaagaagctaagaaaaaacaaatctttttgatttagctgtatagcttttgggtagtatattagatttgg

SEQ ID NO: 42896 - DNA, 410 bp, Homo sapiens
tggccttcgtcgtcccttggcgccctgggagagtcgctgacgggtggactgacggaccgcctgaggacggccggccagggcggtgaaagcgccagccctatggcgcgggtcgcgtgaggcggaaggccgaggacggccggcggcggcgcccgccccggcgatgcgggccccgcccgtcgcctcaggtaaccgggcagccggccccgccgcggccggaccctcccctctccttccctctcttccccacctggcggtcaagggacggctgaggcttgtttctcggctctgggtgctccaggggcccggcctttggaagctcatctgcaaatttttgggagacccacgggggcggggaaagcttggccctggagtgggcggctgctgtcgagtctgtgtaaacccggtctaat

SEQ ID NO: 42897 - DNA, 2560 bp, Homo sapiens
tggcagtcggaagttgcctgagcagatcccagccggctggctcgagtggccttcgtcgtcccttggcgccctgggagagtcgctgacgggtggactgacggaccgcctgaggacggccggccagggcggtgaaagcgccagccctatggcgcgggtcgcgtgaggcggaaggccgaggacggccggcggcggcgcccgccccggcgatgcgggccccgcccgtcgcctcaggtgccatttggattgtactttagtggcacgatgtactctgagtggaggtcactgcatttggtgattcagaatgatcaaggccataccagtgtgctgcacagctatccagagagcgttggacgagaggtggcaaatgctgtagtccgtcctcttgggcaggtgttaggtaccccttcagtggctggtagtgagaatttgttaaaaactgacaaagaagtaaaatggaccatggaagtaatttgctatggactgacccttccattggatggagagactgtaaaatattgcgttgatgtatatacagactggattatggctttagtgttgccaaaagattctattccattgccagttattaaagagcctaatcaatatgttcaaactatactaaaacacctacagaatctttttgtaccaagacaggaacagggttccagtcagattcgactatgcttacaggtcctgagagccattcagaaactggcccgtgagtcatctctcatggcccgagaaacttgggaagtcttactgttgtttcttctgcagattaacgacatacttctggccccaccaactgttcaaggtggcattgctgagaatctagcagagaagttgattggtgttctctttgaggtgtggttactagcttgtactcggtgcttcccaacacctccttattggaaaacagccaaggagatggtggctaactggaggcatcacccagcagtggtggagcagtggagcaaggtcatttgtgcactcacttccagattgctacgctttacatatggtccttcatttcctgcatttaaagttcccgatgaagatgccagtctgatccctccagaaatggataatgagtgtgtgcacagacatggtttcgctttttacacatgttaagtaatcctgtggatttgagtaacccagctattataagctctactcccaaatttcaggaacagttcttgaatgtgagcggaatgccgcaagaattgaatcagtatccctgccttaaacatctgcctcaaatattttttcgtgccatgcgtggaatcagctgtctggtggatgcattcttaggtatttctagaccccgatcagacagtgctcccccaacacccgtgaatagattaagtatgcctcaaagtgctgctgtcagtaccacccccccacataaccggaggcaccgggctgttactgtgaataaggccaccatgaagacaagcacagttagtactgctcatgcctctaaagttcagcaccagacgtcctccacctctcctctgtcaagtccaaatcagactagttcagaaccccggccactgcctgcccctcggagaccaaaggttaacagcatcttgaatctctttggatcatggttatttgatgcagcatttgttcactgtaaacttcataatgggataaacagagacagcagcatgactgccattacaacacaagctagcatggagtttcgacggaaagggtcacaaatgtccacagacaccatggtttccaatcctatgtttgatgcaagtgaatttcctgataactatgaagcaggaagagctgaggcttgtgggacactgtgtaggattttttgtagcaagaagactggagaagagattctgccagcttatttatccagattttacatgcttttaattcaaggtttgcagataaatgattatgtgtgccatcctgtcttggccagcgttattctaaactctcctcctttgttctgctgtgacttgaaagggattgatgttgtggttccttactttatttcagctcttgaaaccattttgcctgacagagaactctcaaaattcaaaagctatgtaaatccaacagaattgcgaagatcctccattaatatcctgctttctttgttgcccctccctcatcattttggcacagtcaaatctgaggtggtcctggaaggaaagtttagtaacgatgacagctcttcttatgataaaccaataacttttctgtccctgaagttgagacttgtgaatatattaataggtgccttgcaaactgaaacggaccccaacaacacccaaatgatattaggggcaatgttaaatattgttcaagattcagcacttttggaagccattggttgccagatggagatgggtggtggagaaaataacctgaagagtcatagtcgcaccaatagtggtattagttcagcaagtggtggaagcacggagcccacgactcccgatagtgagagacctgctcaagctctcttaagagattatgctcttaatacagattcagctgctgggctcctgattcgcagcattcatctcgtcac

SEQ ID NO: 42898 - DNA, 411 bp, Homo sapiens
  misc_feature (347)..(347): n is a, c, g, or t
  misc_feature (392)..(392): n is a, c, g, or t
atttcagacatctgagcaggagtgggctgctgtctacagtcaccctttccatgtcaaagggtgtctgactagtgtctgatggcgtgtgggtttgtggggattgacaagatgaacacccacacaaacacatgcaggctcatctttctcttttccctcctctgtgtgcaacatcattattctaactgcaattggaactcctacaggtatcaagacaaatgctctagtctgactgaattgaaatcaccgcgcccggccgaaagtagccttttttaaatgtgaatctctcccttgataatgttcacagagttggtgaaatctaccagaaagccaaggccaaggtcctcttntctcctttgaaatattcctgttcagaagtgagtttgctcttctgnaccacagttttattttcac

SEQ ID NO: 42899 - DNA, 426 bp, Homo sapiens
gcacaattaaaaaattttggagactctctaggagaaggtgagatggtacatcatggactctggttctgaagttgcctcttattcacagagattgctagaagtctggaggtagggtgggaacagggaccttcagtgactgccagcgggtgtggacccctccccacaccaagaagggatctttgcatgagaaattcacgggagtcaagaatcagccaatttcaggatctcctgggtcctcctgactgagcagcacacagtgctgagaggcattggggaggttcactcttcaaactgagatgcttgtctcctgcatgttaacggcagccatacctgaactcgtctcaataaatttttcatagcatcgtatcttcattaaaattttattctattagcattctgaatacaaaccactaagtatataattgc

SEQ ID NO: 42900 - DNA, 321 bp, Homo sapiens
catgtgccaccacacccgcctaatgttgtatttttggtagagacggggtttctccatgttggtcaggctggtctcaaactcccaacctcagatgatccgcccgccttggcctcccaaagtgctgggattataggcatgagccaccgcgcctggccgatcaccaccacttttgagtttactttttttcttatggccgctggtgaggggggatcttggaaacaagaaaatctgactattgtttagtatttttcctggtaggtgtctcttgccactgagtagaccttttgtaaaggggatggggtctttacaaacaatattgag

SEQ ID NO: 42901 - DNA, 221 bp, Homo sapiens
ccaatataaatctcctcacatataaacataaacacaaggagatttattacaggagttaattgaaattggctcacacaattatggtgattaagaagtcccatcggctgggtgcggtggctcacgcctgtaatcccagcaccttgggaggctgaggtgggtggatcacaaagtcaggagattgagaccatcatggctaacatggtgaaaccccgtctctacta

SEQ ID NO: 42902 - DNA, 403 bp, Homo sapiens
gggaattgctttaaaactccaagcctccaagcagatcatgtcgtctcttggttaaactcttcagtggcttccatgcgaacttctcaccctgggttctctgtgctttggtggggcctacctctgagcccagagcttacactccctcctctcaacacactccactcttggttccttgaatgaactaagttcatcccctccttagggcttccagaacattctgtcccatatcttcacatggtttcttcttaccattcaggtctcacctcaaaaatcacttcttccagctgggcgtggtggctcacacctataatcccagcactttgggaggctgaggcaggaagatcgcttgaggccaggagttggagaccaatctggtcaacatagtgagagcccacctctacaa

SEQ ID NO: 42903 - DNA, 471 bp, Homo sapiens
aaaccagcacaccctagtcactctgaccagcagcagcacagatccccaagtcccccttctgttcctgcagcctatgccttgtggcccagattagttcccagttgctgcctggggtgctctagcattgccttgtagggtgcacaggactgtggaaaggcgggaaagggacaattagagtcatctccacttcatgcttacagcactctcactagatttcaagtggaagcctagaaggtatgttagttacttggaacacccactctgtggaacgtgaagaggtatttctgcagctcactgatagggaaatgtgctaaacaaaactaaccagatctctgtaaagcaggaacttctcagagccccgatgcgttaatacagggaacttgtacgaggggctatattacatgaagcctttgctactgttacctttttttaaggaacagctcatggaaatagtgtaccttgagttcactt

SEQ ID NO: 42904 - DNA, 661 bp, Homo sapiens
gtctactgacatggttttttgcacccttgtgaaaaatcattgaatatatttgtgtaaatctgtttctgggttctcttctgttccgttgttttgagtatctgttgctctgtcagtatcacactgtcttgattactgtagctacatagtctgacttaatgccaggtggagtctattcaccttatttttcaacagttttagatgttctaaggcttgttcctttccatgttaatttttaaaagaagcttgtctataactacaaaaactgttctaggattttgagaggaattgatttaatgaattagacttttgaaattgcatatgtaatgttaataaagttaaaaatggtaattctgttaaggaaaacaatttagttccttccaaagtctaacgctagttcttattttctgaagaaatgtgtatttttatgattttgaaattattgaatgaatattaatcagcctgggcaacgtggcgaaagcccgtctctactaaaaacacaaaaagattagccaggcatggtggtatgcatctggtcccaggtactcgggaggccgaggtgataggatcacctgagcctgggggaggttcaggctgctgtaagctgtgattgcaccacggcactcagcctgagtgacagagggagactctgtctttaaaaaaa

SEQ ID NO: 42905 - DNA, 491 bp, Homo sapiens
tggtaagggcatataactattaatactttatgagaccatggtattttgcagccaatcttaaggataaatctacattgtgttcaggattctgtgttgggccagacttaacaatgaccattatgtgtagaaaatagcaaccattgttgctgaattaaactctctctggagatttaaacatttttttaaaaaattaagctaataggccaagcgtggtagctcacgcctgaatcccaacactttaggaggccgacgcgggcggatcacttgaggacaggagtttgagatcagcctgggcaacgtggcgaaagcccgtctctactaaaaacacaaaaagattagccaggcatggtggtatgcatctggtcccaggtactcgggaggccgaggtgataggatcacctgagcctgggggaggttcaggctgctgtaagctgtgattgcaccacggcactcagcctgagtgacagagggagactctgtctttaaaaaaa

SEQ ID NO: 42906 - DNA, 358 bp, Homo sapiens
cgctgtgtgaccttgggtaacgtggccgccctctctgtaactgagagcacaggattaggcaggctttgaggctctgaggtgaccctgctccccctcaccccgtcatgctctgtgccttccacggcctgcctcctggccctgctcgggccgtgtccttctggaatgcccttcttgctgccttgtgggcagtcagactgactcgaatccagcaggacttaactgaccttcccagggaatgtgggggctcttgcgggaatcgtgtctctccccacagttctgagtttcttgagggcaggattggggctgaaccgctcttggtcttccgccgctgacttccagtgcctggcccagagacaga

SEQ ID NO: 42907 - DNA, 367 bp, Homo sapiens
agggggaggggtgggaaatggagagttattacagtatttaatgggcctagagtttgagttgaagaagatcaagttctggagatgatggtggccatggttgcaatggtgctgtgaatgtattaatacttaatgctagtgaattgtatattaaaaatagctaaaatgataaattttatgttatgtatattttgccacaatttttaaaaaagcaacagattttcatgcattaatattatgccataaagaatacacataaagctgcttcttcataagactcctacagattttaaacacttaaaagatttctcttttttttaggtgcggtggcaaggagtagggagggggaaaggttttgaagcttttctgg

SEQ ID NO: 42908 - DNA, 331 bp, Homo sapiens
gcccccgcagcacccccaagtgccctggccccaaggccagtccagctcccagccacaactcgggcacccctgctccctatgcccaggctgtgccccaccagctcccagtgggcccagcacgacccagccccggccccccagcgtccagcctagcggaggcggaggcggcggcagcggaggcggagggagcagcagcagtagtaacagcagtgccggtggaggggctggcaagcagaatggcgccaccagttacagctcagttgtggcagacagcccggcagaggtggctttgagcagcagtgggggcaacaatgccagcagccaggccttg

SEQ ID NO: 42909 - DNA, 2899 bp, Homo sapiens
atggagttctgcatgacaggaacaatggtttttaagtggactaatcagagctattaatgcatatgcagtgaaggcaggaactttgctacatgcagggcttatcattttgctaataacaatgcctggcacagattagcgatgtgttgaaataaaacatattctgggagatataagatagagaaagagagcagcatgtagtagaaatagatgtcgaaagatgaattaagatgatgcattaagcttgaaacgtgaggcagagaaagctgtacataagttgaaggctttgagttaaaagactataggaattagatgagtgggggctatggagaacagagagaatttagagtgtggacaagtgttctatgagcagagactgggactagccaaaacgtgatgatgggcagctagcttggaaagaatgcttacaacgtgaaaattatatatttataaaaggccattacttctgttaaagaacaatagaccccagtgaaaagaaaggaaattgaaaaatagagaaaatgtggagaaaactagaatctctatagacagcgtcaatgcagcatcaattatatgaaccacttttgagcacaaagaactattgttttgaccttggaggcaatttggtcttcattaggtttagctgtaggatagttgatgttcattattccctataacacttgtgatggcaaaaccttcacaaatttatatgatctaggtatgttttcaatccttacaacccaaataaccgatcataactctcactatgtcatttgaaaaaaaaaatgatcatcagaagtgtaattcaattagcaagtatcagtagtggagtataaattattattggttaatactaagtatgattgaaaaatcgtagtagatggaaatatgggaatctttattttggatgaataaactttatgcctaaaacatatgtttataaaaaatactttgtgaataaacccattgtctaatatttaaaagagttgaagtatgctattataagatcttccttaattgatgaaatgatgcaaagccaataatattgctccacttactgaagtatagagatgaagagaaaactttttctttattccatgttctatataagtcaagaactagagctcaagattaagatttttgttttttgttttttttccatttccctgggaacagagcaacagtctttctgggtctaaaacatccttttttcagtacaccccacagcatcctatagaaatatgttgcaatcagttgccaagtcacatcctagcttaatgtcagcaattttctttctgaaccaattttgcactcagcattaagaggaaatattgaagggagacataccttttatgtttgtaaaatttatacttcttgagataaaaaagcaactatatccattgtcgtgggatcttgagaagaaataagaaaatgaaatattatagaaaatattatattatttaattgtcctgttctaaaacactttctaagcctgcctgtttttttgccaaattaaattaatatttggatgtagacagcttttcagagtggcagtatcatagtcaatgaagatgacctgaggcacagttattgctaattggacatagaaaccaccttcactcatatataaaaattattatgtgctacactagatatttcaggagaattgataaaagaaagactgttgtattcatatgcttgtcttcctggctagaggatctgttttaattaatcagctcatggagtttggaaaatatttatagtatacatagctgagtgttcatgtaaattttgaatacattcatacatcttttttttaaaaaaagattgaacttcaaaaccattttcttacatactcagtagaagttgttatgagccaacattttttgtgagctatactattttaaacatctaaagtaaattatttgacatataaaaagacttcttcatttaaaaatatatcttttaaaaataattttacaagtgatggcatctcattttagaagaagaggcatcaatgacagcagttacagtaactcgatgctgaatatgtttttaaatacaagatgctgtgttcagcattgtacatacattatcaaattttattctgataatatgctgcatgatgtattaggctgggttctctcagacagaacctacacgtatacttatatatatatacacatgcatatacatacacatacagagagagagaaagagagagagagagagatctctacatttattagaggaattggatcatgcgattatgggggctgagaagttccaggataggttgtctgcaagctggagaaccagggaagagagtagagtagctttctccaagtcctgaagcttcagaactagggaaactgatggtataactctcagtcagaggccaatggactgagaactcagacagccactttgcaactcctggaatcccaaggccagagagcctggagtttggatgtccaaaagcaccagaaggagggtgtcttaggtccaggagagagtgagctttcctatgcatttttgttttatccatacccctgaccaattggatggtgcccacccgcattgagggtgggtgtccctctattaaatattttaactataattttaactgtgatataggcactgaattcttgttgctaataatctggtaagatccatctgaactatgaagtgagtacctggaggaactcctacattttaggctttcaaaggttacaggcttttcgtgtgtgtgtgtgtgtgtgtgtgtgtgtgtgtgcgttttgagaaaaatggaattcaaacactgtgattagaatgtatgtttacttatatagaattaatgaatgtatataataataattactgtatataattttaaaatataataaagtctctttatcca

SEQ ID NO: 42910 - DNA, 680 bp, Homo sapiens
gcgcggcgggggcgggcggccaggctagtcgggcgggtgcgcggggcgctcggggcccggggccagagctggagccggagccgggcgggcgccatggagtgggctgcgtgcggggtgctgtcgcgctggaagcgctaccacatcaaggtgcacctggcggacgaggcgctgctgctacctgctgaccgtgcggccgcgggacacgctcagcgacctgcgcgcccagctggtgggccagggcgtgagctcctggaagcgcgccttctactacaacgcgcggcggctggacgaccaccagacggtgcgcgacgcgcgcctgcaggacggctcggtgctgctgctcgtcagcgaccccagcgaggcgcagcggctcacacccgcaatcccagcactttgggaggctgaggcaagcagatcacttgagtccaggagttcaagaccagcctggccaacatggtgaaaccccatctctactaaaactacaaaaattagccgggcatgatggcgcatgcctgtaatcccagctactggggaggctgaggcaagagaatcgcttgagtctgggaggcggaggttgcagtgagctgagatcgtgccattacactctagtctgggtgacagggtgaaactccgtctctaaagaaataaataataaaattttatttcacgccatccctgct

SEQ ID NO: 42911 - DNA, 1330 bp, Homo sapiens
acagtgggcagaatagggaagccttgaacgccaaggcaagggctatgttttttctgcaacctgtgtctttctgtctccctctttcaggtagtctgggttggaggaggcagagccatgaccaaggggacctgggtactggctgaaggaataggctggggtagagggcacttttggaaggcacttctcctgcctcctgggagcctagatctcactccagggtctgggctcccaggtggaccatgaaaccctggcctgaccagctgatgcacactgcttcagacactcctgctggagccccagtccctgacaaggacctaggacatttttgctcctgcccagcctatcgggagggagccttgagcctttcagctctgctgtgtgactttgaggttgttgctcccctcttggggccctgggtgccctgtcttcagtggaaagcactgtgccaccttggaaagctcccatgggcagccagagggcatcgcaagaagagaaagcacagaaggggcaggagagacactcagaggcacttccgctcttgcccaggacattctcccagccacacctttgcccaagccgtgccccctgcctggagcacttttcaacctcttctctgcagctccaatacacctgggattgcagtctcctccaggaagtcttctcagattccctccttcccagccagagagcacctagccttctttggggcccccacaggccctttgtgcagtgaacagccctggctgggggtgcagccagtcgtgtccgaactctccaatgactaagcggggagatgcggacatcctagctccttctcaggcctccaactgtgccccatttccacccccaaatacctccccaggaggcacctgtgcccaccccctgggctgtttcccccttccccttaaatccggatgcctcgtcttgcatagggtcttggggcagcggggaaggggttctgaagaactctggccaagaggacgaggatctgggggtggggaactgggcctagctgtgggaggtcatcgcggggcattgcagggagtgcgttgtgggaattccgggtggagaccctcagggcagtgtgccgggcctccgttgcacctctgacctgcagccacgtcatcgttgcgcagcccctggggagggtctttggggagggggtgccgaggctacgcatgtcctcgagggccgtgtacactctccaggcaccatgggcggaggcgccagaggctgggaagaaataatgttttagttaagagtcctgttggctgcaggactcagagcatggacaggtggatagtaaatcaccaccacggggacagccgtg

SEQ ID NO: 42912 - DNA, 413 bp, Homo sapiens
tcacgccatccctgctttctctctttccccatcacttgtcagcagccgacttctctacgttttacttatttttttcacctgtctcctgcagtagactgtaaactctgtgagggtactgccgtccatcttgttccctgctggattgccagttcagtgcctggcacatagtaggtgcttaataaatgttagtgagatgtattgtctcactaacataatcgtgagcagaggcaaggattgggctgctcagaatatttttctggagctctagcggtgcctggatgcaggggagggaatttctgggtcagaggtgagccctggcaggggcaggaagaggcaccagccagacagtgggcagaatagggaagccttgaacgccaaggcaagggctatgttttttctgcaacctgtgtctt

SEQ ID NO: 42913 - DNA, 185 bp, Homo sapiens
cctgcgcgcccagctggtgggccagggcgtgagctcctggaagcgcgccttctactacaacgcgcggcggctggacgaccaccagacggtgcgcgacgcgcgcctgcaggacggctcggtgctgctgctcgtcagcgaccccaggtggccgcggggctcggggtggggtggggcgggggcggcgg

SEQ ID NO: 42914 - DNA, 592 bp, Homo sapiens
gcgcggcgggggcgggcggccaggctagtcgggcgggtgcgcggggcgctcggggcccggggccagagctggagccggagccgggcgggcgccatggagtgggctgcgtgcggggtgctgtcgcgctggaagcgctaccacatcaaggtgcacctggcggacgaggcgctgctgctacctgctgaccgtgcggccgcgggacacgctcagcgacctgcgcgcccagctggtgggccagggcgtgagctcctggaagcgcgccttctactacaacgcgcggcggctggacgaccaccagacggtgcgcgacgcgcgcctgcaggacggctcggtgctgctgctcgtcagcgaccccaggtagtctgggttggaggaggcagagccatgaccaaggggacctgggtactggctgaaggaataggctggggtagagggcacttttggaaggcacttctcctgcctcctgggagcctagatctcactccaggtggcagaaaacagccaagttccaagagaatcgcttgaacccaggagtcagaggttacagtgagccgaaatcacgccattgcactccagcctggcgacagagcag

SEQ ID NO: 42915 - DNA, 1600 bp, Homo sapiens
gcgcggcgggggcgggcggccaggctagtcgggcgggtgcgcggggcgctcggggcccggggccagagctggagccggagccgggcgggcgccatggagtgggctgcgtgcggggtgctgtcgcgctggaagcgctaccacatcaaggtgcacctggcggacgaggcgctgctgctacctgctgaccgtgcggccgcgggacacgctcagcgacctgcgcgcccagctggtgggccagggcgtgagctcctggaagcgcgccttctactacaacgcgcggcggctggacgaccaccagacggtgcgcgacgcgcgcctgcaggacggctcggtgctgctgctcgtcagcgaccccaggtagtctgggttggaggaggcagagccatgaccaaggggacctgggtactggctgaaggaataggctggggtagagggcacttttggaaggcacttctcctgcctcctgggagcctagatctcactccagggtctgggctcccaggtggaccatgaaaccctggcctgaccagctgatgcacactgcttcagacactcctgctggagccccagtccctgacaaggacctaggacatttttgctcctgcccagcctatcgggagggagccttgagcctttcagctctgctgtgtgactttgaggttgttgctcccctcttggggccctgggtgccctgtcttcagtggaaagcactgtgccaccttggaaagctcccatgggcagccagagggcatcgcaagaagagaaagcacagaaggggcaggagagacactcagaggcacttccgctcttgcccaggacattctcccagccacacctttgcccaagccgtgccccctgcctggagcacttttcaacctcttctctgcagctccaatacacctgggattgcagtctcctccaggaagtcttctcagattccctccttcccagccagagagcacctagccttctttggggcccccacaggccctttgtgcagtgaacagccctggctgggggtgcagccagtcgtgtccgaactctccaatgactaagcggggagatgcggacatcctagctccttctcaggcctccaactgtgccccatttccacccccaaatacctccccaggaggcacctgtgcccaccccctgggctgtttcccccttccccttaaatccggatgcctcgtcttgcatagggtcttggggcagcggggaaggggttctgaagaactctggccaagaggacgaggatctgggggtggggaactgggcctagctgtgggaggtcatcgcggggcattgcagggagtgcgttgtgggaattccgggtggagaccctcagggcagtgtgccgggcctccgttgcacctctgacctgcagccacgtcatcgttgcgcagcccctggggagggtctttggggagggggtgccgaggctacgcatgtcctcgagggccgtgtacactctccaggcaccatgggcggaggcgccagaggctgggaagaaataatgttttagttaagagtcctgttggctgcaggactcagagcatggacaggtggatagtaaatcaccaccacggggacagccgtg

SEQ ID NO: 42916 - DNA, 326 bp, Homo sapiens
gcctctagggtagggacatggccttggtgtctcatttctttttggactaacacgtggaccagagccgtgttgcccctgacttgctgggtgaccttgggaaaattgcttctcctctctgggctctgttacctgtctccttacaataaaggattgagctttgatttggctttactgcactctttgcctgcaattcctgtgactgccatcaggtggcagaaaacagccaagttccaagagaatcgcttgaacccaggagtcagaggttacagtgagccgaaatcacgccattgcactccagcctggcgacagagcaggactctgtctca

SEQ ID NO: 42917 - DNA, 587 bp, Homo sapiens
ccctgtaatagagatagaaataagctccaaaaaccaaggacaataattcaaagggagttagaacttacgagagtagggacagtcagttgcatctagtgagcactgataatgcattcttcaggcagaatgtatttccctttgattgtaagttcatggtctttcctgagaaaattccaactgtgtctgatggggagtctggagaataccactgctggaattggtgtctttcagaggctggcagaggaaggagcaacagcatggattgtgtgcagcaggtgtttttattaacacatgcattatcacttttatttgtcacttcatggagtcaagtgacctttcccagggcacatgggcagacttttcccagtggctgttcctgggcttcagagtacacccaggggaaaattatctgttagttactttctccctcttcttgacaccttctgagttccaacgagtcagaagataatcataatcagaataacatctcaaaagagaagctaattgcagttttttcttagttgcaaaagaaatacatggtcactgtagaaatcatgaaacacacagcacaaagcaataaaaaaaaa

SEQ ID NO: 42918 - DNA, 476 bp, Homo sapiens
ctgtattactaaaatgtagcaagttaacaagagtacttgctaaaaaatctatgtgactactaaacaaattgccctaatatcatctactcaagtttcctaattcccctagtgggtaagtaagtaaaatctggatttttaaatactcaaaataaatatttactgtttttctagaaattgcctgcttcctactcactccatgcctgaaataattaagaatcagaagatagaaatcttaggcgagatggaagctacaaggttaataacgaagaagttctatcatttctatcgtagaagtattcttttagaaattttccttttaaaaaatagctgtgaaattagtggtagtagggattcatttatcttttttctctctttaggtgactcatttttataacaaagtttgttccttcatcaatctcctgaatgcttacaaagtagcaccaacacatcaatatattgaacagtcttgttgaaac

SEQ ID NO: 42919 - DNA, 389 bp, Homo sapiens
gcatgaacccaggaggcggagcttgcagtgagccgagatcgcgccactgcactccagcctgggcgacggagcgagactccatctcaaaaaaaaaaaaaaaaaaaaaaaatagttcccaggcccctgttagacttcatgctccctggctttccctctctcctacaaatattagaatttgttgctcgcctgctatatgttggggcctgcatgctgtgtgttgtgaggagggcaggcaaagctcattgcccttgggatttgttacctggcaagaaagcaaacactgaaccagtaatgataagtaatgactgattttgaaggaaccatacaggcacctaggaatacagaaagggatttccttcctgagttgggggatggaggaaggtttcttt

SEQ ID NO: 42920 - DNA, 416 bp, Homo sapiens
ccattcctcgtggaatgatgtgatgacatcagtgaatctagaccaacgctctggaatcttggaagcatttggtccctaacgcttggctacagccagtgctctttcacactgtcatgggctgcactctgggtaagtgtaagctccgcttcaagggcctggaactccagagagccatgaaggcactcactcagggtggctatcactcattcctgtactagaccaagtctcggatcctgaactatcttctcccaaggagtctcaggggatggggaagggaccacctgtgagtctccagatgaatgattggggatgcagcaggaataaaaacagtttttgaattttgggggaagacaggagaggagggaatgtgggcaaaagagagaaggaaggagggctgacaggagagccaactccca

SEQ ID NO: 42921 - DNA, 780 bp, Homo sapiens
ttttggataagataagggatattggtctttagttctttcttgcaatgtcagtaagctgcaaagtgttccctcttgcattttctgaaagaatctagatcactcctttcttaaatgtttgctaaaatttccagagaagcctgggaatttaatttctttagcagtgtgagaggaaaataaatcttcggaccccaaaatcactaagctaaagggaaaagtcaagctggaactgcttagggcaaaccagcctcccattctattcaaagtgatccctctgaggctcacctaagacaaatgcatatctgattgcttcctctcccctattgcttatgtgaaaatgcagattcattgagccagagtaaattgcgtattatttgtattaggtggaaggccatcaaagactcaaaaaatccaactttttgtcttacctacttctaacctggaagcccccacttgttgccttaccagaccaaaccaatgtacgacttacacatattgatgatgtgtcatgtctccctaaaatgtataaaagcaaactgtatcccgaccacactgggcacatgtctcaggacttcctgaggttgtatcacaggcacatccttaacccaggcaaaataaactttctaaatcaactgagacctgtctcagatattctggggtctcagtagacattagactattcagatttcctccatcagttttggaaacttgtgtctctctcttttttttttgagacagaatttcgctcttgttgcccaggttggagcgcaaaggctccatctt

SEQ ID NO: 42922 - DNA, 365 bp, Homo sapiens
tcctgggtccaagtgattctcttgcctcaacctcctgagtagctgggattacaggcgtatgtcaccgtgcctggctaagtttttgtatttttagtagagatggggtttcatcatgttggccaggctggtcttgaactcctgacctcaggtgatccacctgcctcagcctccaaaaaatgctgggattacaggcgtgagccaccatgcccagcctacatgtgtaattttaaaagtaaaatgaaatataattttacttaacagaaaaaaaatgaagtgaaacaattactaaacttcaaacatttcttttttttttttttttaatttgagacagggtctcactctgtcacccacgctggagtgcataa

SEQ ID NO: 42923 - DNA, 391 bp, Homo sapiens
ctctagaccctcggcacagggcagctgtcctggaaaggtggaaatgcaatggccagtgctgctggggcttccagtaacatggtggcccattaagatctagctaataatggctgggtgtggtggctcatgcctataatcccagtactttgggaggctgacacgggtggatcacctgaggtcaggagtttgaaaccagcctggccaacatggtgaaaccccatctctactaaaatacaaaaagaaaattagctgggcctggtggcaggcgcctaatcccagctatttgggaggctgagcaggagaatcacttgaacccgggaggcagaggttgcagtgggccaagatggcaccattgcactccagactggacgacaagggtgaaattccaact

SEQ ID NO: 42924 - DNA, 3682 bp, Homo sapiens
  misc_feature (1)..(2): n is a, c, g, or t
  misc_feature (5)..(5): n is a, c, g, or t
  misc_feature (7)..(8): n is a, c, g, or t
  misc_feature (10)..(12): n is a, c, g, or t
nngangnntnnngaagaaatggtaggcatggtcagcattcttaggcaatgtggatttcacatttcctaagcatgtctcagcatgtttgagacacccagagggaaggaacaaacatttgttccttcctctctacttttgttagagtcctggtttctgcactcttcatctgctgtctacctgtgcagagagcatagacacacacatgaacatatagatagaatcatgttgtgaatagcacttccagttttagaaatttgtgaatgtggtgataaaggtaaagcacctgagactgaaaggagtgattaaaatctcaggtagtttagacatgggcaagagatctagttaatgagtttgttccctctctcccttgctttttattctttattgcatagaaatgttggtgtaccaggcataaaggccagagaatattgtggttgttcttgttcactaaggtgttaatgacttactctagtttcagattttttttttctcttcagaaggctgtgcttaagagggcagactgtgaaatcatactgcttgggtataaatcgtaactctgccacttactacctgtgtgattctggacaagttatttaaatctagtgtacttcggtttagtcatctgtgaaatggggataatgatatctgtttcatgaagttgttgaggattaaatgaggcaatatatggaaattgcatagatcaatgtctgatatgtggtgagtgctatataagtgttggctttaaacctgtgtatctcaaaattcacccattagatctatatttaacaattacacaaatttaaacacatggatacatttgcaaatatgctgtattctaagtgtaataaatgagaattatttgccgactcagtcatgcttaatttaactacttttatttattttaaatgtatgaaggacataaataaaatcaatttcccctcttcaactgtttatttctttcttgggaaagcaacagtctcttcctgccaaacttggatataaaagttatcagtctctctagtataacaccttatacatgatgagtgctctatacatgtttgctgaatataatcaaattcgggaacaatcatcagatttactagattaactaggctgggaggttgaggaaggaaagaatcaaagttgatttaaggtgaagcttgaagtaggtggtggtggtattaatggtaataataagtgatttggaaacttgtactgtgtgaccatgggaaagttacttctatgtgtcttagttttctggtctctaaaattatgataattttacatgtattttgtagggttttggtgaagatgaaatgtgataataggtatgaagtatttcatttattgatataataagtgagaactgctattatattgttatttataataatttgaagtacattttcatggttatatttcttgatgtacaaattctgtttctagaatgtcgagttatatgagtttgtggaaatgtcaagaggccaggtcatcttggtttctctgcctttttaactgtgttagccaacctacgccaagctctggagtagagtattaaagtaccattgaggtttgcatcctggggtgggagtaggagagaggagtatattgatactcttttctaagatacagagttggtcattccttagtttaaaagatagaattgagttcactgataggaaaccactgataggaattacatttataggcatcatcagtgatcaagagttggcattttaatcatgaacatttttcagtttatatgtaatctattatggtagttatttttttaaaaaagaagcaatattaagttgagtagagtttgagtgctttttaaaaaaatgaattgctaaatgtccaccatggttttctcttctgtctgtattatggcttgcagaatgaaacagtcatttatctttttgctctttcttccctctgtgttttacagtatcatagaattttcaaaactgaaagatgcattggttatatatgttctgtctctttatttcctacatgaggaaactgaaacgacatgtttgagatttgaccaggtgtagatttgtgctgtatgtagagatttggctaggctatgtgactagttaatgacagcctctggcatgacagaactcagatattctgaatcttatgctagtgctttttaaccccttgactttagtacttcccaactcaaagaactttacgttttctgccatatactgaaggaatgggaaaagagagaggagaaaggtgaaaatagaagagggtctgcagctgataaaagaggacatgggacatgatatgatagaacagtttagcaagtatagtgtattgggtagaatagcatagaatttaagagcttgagcattaaaatcaagctgtcttgggttctatttctggcacttctgcctcattgctctgtgactctgagcaagttatgtgtttttactttaatctttttttcttttttcattgattaaaagggggtgggtactaataataacttcctcactaaagtttggggcttatacctgtcagtggaaaggggaaaaccagttgtgtggtgatgatttagctttaaaatacttgatttagctgctgtatatgattcagcacaagatgatatccgggattttttttttattaagggatagtaataggtatgttctgaggctttttgtttcaatacatgctatgatttctgatacctatagcaataaagggatatgaggattcagttcatttaaaaagcatcagcagtggtttttttcacagaccagttgttaaaaacaaaaacggaccatagacccaactaggttgaaaatgaaaatatgtgggtacaaggatttaagtatttctccagtcttctaaagttcatagacaaagccatagattggggccttgggataagggaaacaaaaataaataaaaactcagtgaaagtaaacataagctttcagattctatgggaaagtaaaatcagcctataagattatctggatgagattaatgtcatttttcttgcaaatcctggaccattcctgccagatatggctaaagggaactttaattttgtttagcgctctctccattcttaacaggagttcagtattttttcgttaatgtggaagagtttggctaagaacctctctatagtttgtaggtagtgagttagaaataggataatagaaccttggtttttctaatgtgctatctatacaaaaaacacaggtcattctgacctcagcagggtcatactggctggaggtgtagaaggaactggtgggtagttcatttacatttgacagcagatgccttaagagtgtatctatgggcagaggcaacctgtagtttccttcctccaacagagtccagtggcataagaacagtatagttggcctgcttttagggaggttggacttaccctgatcccccaattttaagatgttgagatttgtaaatgcattcagtttcttaaatgttaaaggtgaataaatgtgtatcttatagttcaggaaatatgcttagacatgtaagtcatatttgcctaaagagttactttttaggctgggcgtgatggctcacacctgtaaacccagtacgttgggaggctaaaatgggaggattgcttgagcccaagagtttgagaccagcctgggcaacaaaatgagaccccctctctaca

SEQ ID NO: 42925 - DNA, 747 bp, Homo sapiens
caggcgaggggttgggtggcggttgagacagcggcggtactgggatgggtaggtgaggatcccgagactgagtgagcttctgcgcgcggtgcttttgggaacgcgggactggcaacctgcggcgccaggagctgggccgaggcgcggcggcgcggctgcgggccgccgtctggatgggaagttacggcgaagtccacccagcgtttctcaggcaatctgaaggcaaatcctgtttagacccaggcgaaggttcctggtgacccaggctctcaccagccaattgtcccttgccgtcctcctgagggtatctggagcttcagtgctgtgtgctcttggcctccacactggggatgccactgactcccactgtccagggcttccagtggactctccgaggccctgatgtagaaacttccccattcggtgcaccaagagcagcctcacatggtgtgggccgacatcaagagctgcgagatccaacagctcccatcaaggaagatccagagacattctccttaccaagacgttaagaaatgcacaggtgaggagaacagcggcatgcgtgtaaaggtcctgtggcacccatcctctgcaggctggaggtcatggcgggagatgctgcatggatttgccctccccgctgtcagtgagaacaacagggttctggaagagtagaggacaggccatgggacttggccatctagagataaggcgggagggatttccttgagaggcagggatatgtgg

SEQ ID NO: 42926 - DNA, 1350 bp, Homo sapiens
caggcgaggggttgggtggcggttgagacagcggcggtactgggatgggtaggtgaggatcccgagactgagtgagcttctgcgcgcggtgcttttgggaacgcgggactggcaacctgcggcgccaggagctgggccgaggcgcggcggcgcggctgcgggccgccgtctggatgggaagttacggcgaagtccacccagcgtttctcaggcaatctgaaggcaaatcctgtttagacccaggcgaaggttcctggtgacccaggctctcaccagccaattgtcccttgccgtcctcctgagggtatctggagcttcagtgctgtgtgctcttggcctccacactggggatgccactgactcccactgtccagggcttccagtggactctccgaggccctgatgtagaaacttccccattcggtgcaccaagagcagcctcacatggtgtgggccgacatcaagagctgcgagatccaacagggagccttgggaggagcccgaatcactgatggaatcggacagtgcatggagatggttcagcaggacgaggtgtcattggaggacagcgtggagtgcagagagacatgctttgaaatgggattgatccagtcctccttccttcactaccacatgaatgctgggcagcccaggatcacactcactgcaccctcaactcagaccgttacctggcacactggcctcactcttgtcggagactgagctattggcagtgccttcagctctgagctcaggcacctcgaacattgtttttgtcgttaaggatcctaaagtgctgcggggactgatcacatttttctcaacatccctggccccacctcttctgccacaaacgtcagcatggtggtatctgccggcccttggtccggtgagaaggcagagatgaacattctagaaatcaacaagaaatcgcgcccccagctggcagagaacaaacagcagttcagaaacctcaaacagaaatgtcttgtaactcaagtggcctacttcctggccaaccggcaaaataattacgactatgaagactgcaaagacctcataaaatctatgctgagggatgagcggctgctcacagaagagaagcttgcagaggagctcgggcaagctgaggagctcaggcaatataaagtcctggttcactctcaggaacgagagctgacccagttaagggagaagttacaggaagggagagatgcctcccgctcattgaatcagcatctccaggcctcctcactccggatgagccggacaactcccagggacgggacctccgagaacagctggctgagggatgtaggctggcacagcacctcgtccaaaagctcagcc

SEQ ID NO: 42927 - DNA, 1007 bp, Homo sapiens
caggcgaggggttgggtggcggttgagacagcggcggtactgggatgggtaggtgaggatcccgagactgagtgagcttctgcgcgcggtgcttttgggaacgcgggactggcaacctgcggcgccaggagctgggccgaggcgcggcggcgcggctgcgggccgccgtctggatgggaagttacggcgaagtccacccagcgtttctcaggcaatctgaaggcaaatcctgtttagacccaggcgaaggttcctggtgacccaggctctcaccagccaattgtcccttgccgtcctcctgagggtatctggagcttcagtgctgtgtgctcttggcctccacactggggatgccactgactcccactgtccagggcttccagtggactctccgaggccctgatgtagaaacttccccattcggtgcaccaagagcagcctcacatggtgtgggccgacatcaagagctgcgagatccaacagtccctggccccacctcttctgccacaaacgtcagcatggtggtatctgccggcccttggtccggtgagaaggcagagatgaacattctagaaatcaacaagaaatcgcgcccccagctggcagagaacaaacagcagttcagaaacctcaaacagaaatgtcttgtaactcaagtggcctacttcctggccaaccggcaaaataattacgactatgaagactgcaaagacctcataaaatctatgctgagggatgagcggctgctcacagaagagaagcttgcagaggagctcgggcaagctgaggagctcaggcaatataaagtcctggttcactctcaggaacgagagctgacccagttaagggagaagttacaggaagggagagatgcctcccgctcattgaatcagcatctccaggcctcctcactccggatgagccggacaactcccagggacgggacctccgagaacagctggctgagggatgtaggctggcacagcacctcgtccaaaagctcagcc

SEQ ID NO: 42928 - DNA, 1491 bp, Homo sapiens
caggcgaggggttgggtggcggttgagacagcggcggtactgggatgggtaggtgaggatcccgagactgagtgagcttctgcgcgcggtgcttttgggaacgcgggactggcaacctgcggcgccaggagctgggccgaggcgcggcggcgcggctgcgggccgccgtctggatgggaagttacggcgaagtccacccagcgtttctcaggcaatctgaaggcaaatcctgtttagacccaggcgaaggttcctggtgacccaggctctcaccagccaattgtcccttgccgtcctcctgagggtatctggagcttcagtgctgtgtgctcttggcctccacactggggatgccactgactcccactgtccagggcttccagtggactctccgaggccctgatgtagaaacttccccattcggtgcaccaagagcagcctcacatggtgtgggccgacatcaagagctgcgagatccaacagctcccatcaaggaagatccagagacattctccttaccaagacgttaagaaatgcacaggaagatggccaatctttcctaagctgctgaccttacaagaaaaagaatcgtactgctaagaattcaaacttcagcagtcatggggagccttgggaggagcccgaatcactgatggaatcggacagtgcatggagatggttcagcaggacgaggtgtcattggaggacagcgtggagtgcagagagacatgctttgaaatgggattgatccagtcctccttccttcactaccacatgaatgctgggcagcccaggatcacactcactgcaccctcaactcagaccgttacctggcacactggcctcactcttgtcggagactgagctattggcagtgccttcagctctgagctcaggcacctcgaacattgtttttgtcgttaaggatcctaaagtgctgcggggactgatcacatttttctcaacatccctggccccacctcttctgccacaaacgtcagcatggtggtatctgccggcccttggtccggtgagaaggcagagatgaacattctagaaatcaacaagaaatcgcgcccccagctggcagagaacaaacagcagttcagaaacctcaaacagaaatgtcttgtaactcaagtggcctacttcctggccaaccggcaaaataattacgactatgaagactgcaaagacctcataaaatctatgctgagggatgagcggctgctcacagaagagaagcttgcagaggagctcgggcaagctgaggagctcaggcaatataaagtcctggttcactctcaggaacgagagctgacccagttaagggagaagttacaggaagggagagatgcctcccgctcattgaatcagcatctccaggcctcctcactccggatgagccggacaactcccagggacgggacctccgagaacagctggctgagggatgtaggctggcacagcacctcgtccaaaagctcagcc

SEQ ID NO: 42929 - DNA, 854 bp, Homo sapiens
caggcgaggggttgggtggcggttgagacagcggcggtactgggatgggtaggtgaggatcccgagactgagtgagcttctgcgcgcggtgcttttgggaacgcgggactggcaacctgcggcgccaggagctgggccgaggcgcggcggcgcggctgcgggccgccgtctggatgggaagttacggcgaagtccacccagcgtttctcaggcaatctgaaggcaaatcctgtttagacccaggcgaaggttcctggtgacccaggctctcaccagccaattgtcccttgccgtcctcctgagggtatctggagcttcagtgctgtgtgctcttggcctccacactggggatgccactgactcccactgtccagggcttccagtggactctccgaggccctgatgtagaaacttccccattcggtgcaccaagagcagcctcacatggtgtgggccgacatcaagagctgcgagatccaacagggagccttgggaggagcccgaatcactgatggaatcggacagtgcatggagatggttcagcaggacgaggtgtcattggaggacagcgtggagtgcagagagacatgctttgaaatgggattgatccagtcctccttccttcactaccacatgaatgctgggcagcccaggatcacactcactgcaccctcaactcaggcaagtccagcagccaatcttaggagacctgggctacagaacagtctcccaagttccaggctcacaaaacctaggtggggatgaaagctgagaaagtgaggaggtggttcaggggatcactctttcctactcattcctctcatctcaaactcaccctctactgcaacactgag

SEQ ID NO: 42930 - DNA, 389 bp, Homo sapiens
ttgacttcaataccctgtggttattccaagcaagtctacaattttgctatgacttctggctagattcatgatcttcctttctaatgttatttaccatggaactttcttgagaaaacatttcctatgccaggagctgtagcaatccacttcttagctaatggaaagccactctgaatagctaatgtacctatcacaaaatgggcaaaaatgctgctttgcatagtatatgcaccacaacatttgctgaacatcatctttagtacaaacttaaaggggggcaatatcccaaaagactaaaataacggcaacttccttaatgctgtcgattttagttacactttactttttaggtgaattataaagtacttcataacatatttgtttgatgg

SEQ ID NO: 42931 - DNA, 536 bp, Homo sapiens
ggcacgaggctgagggcagagctgtttgcctggcagaggaggagcaaacagccatgttgtaaatggcctctgaggaggactggcctctaggagttgaggacctcaagcctacatctgcaaggaattgaacgatgccaagaacccgaacaaactctgaagatgagaatgcggccctgttggttgaatccatggatgtggaacccatggatgtgaaggactgactgtactttgcactagtggttctcaaagtgtgggccctggaccagtggcagcagcatcacctgggaacttgtgagaaatgcacttttcagctcctgtttcagatggacctatcagaatctctgcagggaggctgtgaggatctagaggatacagctacggagaacatgctgggttccttgagctgctaagcactgaagtcccaccaatggtgacgaaggtctaaggagaacattgcaattgcacaaaatgatccttggaaattctttagaagggcaccatcttggagacccagaatcaataaaaccagcatggct

SEQ ID NO: 42932 - DNA, 888 bp, Homo sapiens
ggcacgaggctgagggcagagctgtttgcctggcagaggaggagcaaacagccatgttgtaaatggcctctgaggaggactggcctctaggagttgaggacctcaagcctacatctgcaaggaattgaacgatgccaagaacccgaacaaactctgaagatgagaatgcggccctgtgccaagactggctgccttcccctgtttctgtaccacactggttcctgaagctatttgagtttgagactgctggggtaacctgacccacttcaaggatctgaaagtattttacagttggttgaatccatggatgtggaacccatggatgtgaaggactgactgtactttgcactagtggttctcaaagtgtgggccctggaccagtggcagcagcatcacctgggaacttgtgagaaatgcacttttcagctcctgtttcagatggacctatcagaatctctgcaggaacattttgaagtcccctcatatacaatgaaatgatagatttgtcaacatagataaatctcaaaaacacaataagtgaagaaagtaagttgcagatggaaataatatgtgatggtcaaacaatctagatgtttctgtgaaggtgtttttggatgagactaacattgacattggtggactttgagtaaagcaggttgcctgcgtgccataatgtgggtattctcatccaatcagttgcgggatttaacagagcaaagactgaggtcccctgagaaaataggattccaccagcagacagccttcagccttgaactgcagcgtcacctcttccctgggcctcccaacctgctgacactttgatcttggacttctagcctccataactgtgtgagccaattccctaaaataaatctctctctgtacaca

SEQ ID NO: 42933 - DNA, 392 bp, Homo sapiens
ttagaaagatctgttagaatccaggtcttctgtttgctgtcttactattactgaggtttgtttgtttttttaaaattatagatgtgggaaaactgaagcagtggcataatcgttgaaatgcagagctgtagtgcgacctctttgtggttcagtctccagcccacattgcagtagaggagctgtgtcaggagaggagacaggttgcttgttttcagaattgtggttaacaacaaccattgttctttcctctttccccactctttatcagttctggaaatgtttttcttagactaggtagttactaggggtttgcttctaagaaacttttttttttttggtgacagtttcaggatgttttatgctttttgcctgggtctgtcttctttgaagga

SEQ ID NO: 42934 - DNA, 327 bp, Homo sapiens
gtaaaggaaatgagtttttgggaaactgaatgatgctaggtctggggcaggaaaacactagttggatctggggcacactattgcaccagaaagtgaggaagcaatcaaagactggtgtgattacattaaaagaccataggaattaagtagaagaagctcccactggccaaaaaatgggagaatttgagttcacaaagagaataatgactgcgattgatagaaatatatcaaatatctaaaaatcagtaagttcagaacaggacaagggtgtcactctttccatttccacattgtaccatagaacattctggctaggacagctaggca

SEQ ID NO: 42935 - DNA, 373 bp, Homo sapiens
  misc_feature (1)..(1): n is a, c, g, or t
nggtcggtccgctcacgcctcgtaatcccagcactttgggaagctgaggtgggctgatctcaagtgttccgcctgcctccacctcccaaagggctgggattacaggctaattttgtcttaaagtctataaaggcacttggtgggtagaacagttgcaagtctattgaacagcatttgagtttgttgagttatataagggagaggtctgacaattagttttaattactcaattagaatagaaagcattaagattatggaattagtagattcagaggcatgggattctcattaagcttttaggagtgcctgctctttctgtgggaatagtgtggggataggctggctatattttactgtttagatgtttactaga

SEQ ID NO: 42936 - DNA, 181 bp, Homo sapiens
taaacacacacaaactgaaggacattctacaaaatcattttcatcagttctcctcaaaagtgtcaaggccaagaaaggcaaggaaagactgaggaattgttatggcctggaaggcaatacttctctatggagaagtaacaactaaatgcaatatgggatcatccggaataggattctgaaa

SEQ ID NO: 42937 - DNA, 369 bp, Homo sapiens
gagcaggtacagaggacggaacttagaccttagcctggagcctttgtctctttgcttactggaagcttgagaccagccctgcccctccatgggcctcagtttcttcatctataaaatgagcaggttgatcccgacctctctgaagaaaactccagactgtctggagcagctgccagtggcaatggggacagctgaggcaggggctcctggtgggagcagaccctctagctgagcagttgcgcccatctccatcctattgaagctgggaggacctgagttttgtgagggtagctgaggcagtgaaggtgaggccgagcttccctgtgctcacacaaccaatgatcaacttgtttctcctccttctctaag

SEQ ID NO: 42938 - DNA, 407 bp, Homo sapiens
catgaatgttcatatttatagcagcattattcataactgaaatgtgcaaacaacccaacgtccattcactgataaatggacaaataaaatactgtataagcattcaacagaataatattcagccataaaagagaatgatgggcctggcgcagtggctcacacctgtaatcccagcactttggcaggccgagatgggcagatcacctgaggtcgggagttcaagaccagcctgaacaacatggagaaacctcgtctccattaaaaatacaaaattagccaggcatggtggcacaggcctgcaatcccagttacttgggaggctgaggcaggagaatcacttgaacccaggaggcagaggttgcagtgggccgagatcacaccactgcactccagcctgggtaacaaga

SEQ ID NO: 42939 - DNA, 274 bp, Homo sapiens
ctgttactaacatttaaacatcaaagatattctggtacttttatgttgtagagtatatataagaccatattttccctaaaggtatttactatccagggtgtgtttgtgtgtgtgtgtgtgtgtgtgtgtgtacgcacacgtgtgttttcttagctgttagccttttttagaagtcacctaactgatagcattttcctatcacaagatcactggcagtgcgtggaggaagaacttgagtgaggccatattaacagcagggagatgagttaggaga

SEQ ID NO: 42940 - DNA, 519 bp, Homo sapiens
tcttctgccaagtgtctgaccccatggggttgttctgtgtttgcatttaagcaagtgacttctgggaagtccccggccgcccggggttctatgatatttgtagtgccggggctcgcacactgctgcccccagcctgtagaggactttcttcagggcccgtagctgctgggcgtacccctggcaggcgggctgtgccgcgggcacatttgccttttgtgaaggccgaactcgagctgtatcctcataggaaacagtgatcaccccggacgggcgtccaggaccctgagggccatggccaaaaggctcctgagtgtgcctggtggtctggctggggctcacggtgggctgtctggggagggtgggtgcctccactatgatccttaaaggattcctctgtgtgggtggatgcgtgtgggcacgactttgtactcagaaattgaactctcagtcacgtggaagccacgggactgctccgaagccgccataataaaatctgattgttcagcccccaaaaaagtg

SEQ ID NO: 42941 - DNA, 244 bp, Homo sapiens
tgatatactgtttcttatgtgttgggagccctagagacaactgctctatatgaatagcaacacagagaaaatcaacattgcgcctcctatgcagttgatacagaaggcaactaaagaggtcccttctgccttctaaggagacagatttctttctccataagatgttacacacaggaaaagacactccagagtccacgaccacatttgtaatcaccactcacttcataggttaattactgctgac

SEQ ID NO: 42942 - DNA, 254 bp, Homo sapiens
  misc_feature (246)..(246): n is a, c, g, or t
  misc_feature (248)..(248): n is a, c, g, or t
actgtatggcagaaaaggttttcaaaatgcatgagagaattatagcaaagagaaataactcacactaaagtttttaaaatatctccggactatggctaggaactattactatggctaacaagtgtaatttcagcattttgggaggccaaggcaggcagatcccttaagtctaggagtttgagaccagcttgggcaatgtggtgaaacccccctctgcaaaaaatacaaaataattagcggggtgtngngtggtg

SEQ ID NO: 42943 - DNA, 313 bp, Homo sapiens
cactgctcccggctgtccttctttttgctagcactaccttctcctctccagcagaacctggagaagcaggtagcatggggctagctgcctaagtcttcaggtttggctaagaccctggatccagactgcctgcttacacagcctagcttttcacactctgtgcaatgatttccttctctttaaggcagggattaaatagcaactccttaatagaagtgaaaattaaataaattacaatgtgtagagccattagaagagtgtcttgatgtggtaagaactatgtgtttgctgtgactattgagttaggtgtttg

SEQ ID NO: 42944 - DNA, 144 bp, Homo sapiens
attttttaatcttcatccatttggtaagatgttgtgtatttgactaaaaccatagtgtttagaaaaaccaatatagttagtagtagaaaatatgtcacagcagaagcactgccgaggggagagtgtcgctgtcagtcacggctt

SEQ ID NO: 42945 - DNA, 458 bp, Homo sapiens
agaatggactaatggtcttttaaaaacacacctcaccaagctcagccaccaacttaaaaaggactggacaatacttttaccacttgcccttctcagaattcgggcctgtcttcggaatgcgacaggatacagcccatttgagctcctgtatagatgctcctttttattaggccccagtctcattccagacaccagaccaacttggactgcgcccccaaaaacttgtcatccctactatcttctgtctagtcatactcctattcaccattctcaactactcatacatgccctgctcttgtttacactgccggtttacactgtttctccaagccaccacagctgatatctcctggtgctatccccaaaccgccactctcaactcttaaagtaaataaatcatctttgctggcagggctatgctgaacctccttaggcactctctaattggatgtcctggg

SEQ ID NO: 42946 - DNA, 422 bp, Homo sapiens
tttttgaaaattgaccagacacttttataaagactatcttgtgtcatcgttatgataatcctatgtggaagttatcttcagcttcattttaccaatgagataaatgaaactgtggtagtataaataaataacttgtctaaagatactgagtagcagaggaagcattccatcccagacccattgaattctcgagatctaagatcctgccaggctgtttctggaatacagagcagaaaattccctcctgttcaagcgctaactagataagtccttcttcacaaatgccaagtaagcacagaaaaagagcaacagggaaaaagtttatgctccaaggaagaagtcaaccccagactgcagggatcgtggtgagattgtatcaggattggaccttggggaaagcttccttatatttgagactcata

SEQ ID NO: 42947 - DNA, 238 bp, Homo sapiens
tttattttgggaaaaacttgttcaagagttaaacagtttcataaagaaggtgcatttgtgttctctaatacaatcaggtaaaagaaaaaaggtaactagagataaaacagaaatcttgatagacagtatagaaagattttgggtgcaaaagaaagcataatattagacatctaaaattttttaaaaagtacatcaaaattatctcaatctggagaaagtcaacgaagaaaactaagaa

SEQ ID NO: 42948 - DNA, 409 bp, Homo sapiens
gctgcaggactacagcatgtgtggtgcgcagcatggactcaggatgtagtcggtaaatgaataaaatgttatcaaataagaaaaacacagggcgtggaactcataaggccagtgttgtagggagcttccctgtatgggttcacacaaacacacacacacacacacacacacacattctccaaaagccacacaaagaagtaaatacagaggggtatagacaatcattaggaacgcagcaatggaagttgccaaaattggatttttttcacagagaaaagaccacttgaatatccaactcagcctgagagaggaagtcaacaggacggacgccgcgcaaagaaagagctcccgctgattgtgcgctgcccgctgcaaagaactgaataacatggtctgcaacgctccagac

SEQ ID NO: 42949 - DNA, 254 bp, Homo sapiens
aaaaataaataaataaataaataacttgtctgccttcttcatagcagtgatgaggaatcataaaagtggcatttaacaaagctctaagataccatacacatataagtaactaagtatttttttaaaaataattcctttttttttttttaatagctgaaggctaaatctttaaattgctaggctttctcatccgagagtggaaaatctctgttctccctgcgtgggctccagggtccgtttgataagctgctttc

SEQ ID NO: 42950 - DNA, 276 bp, Homo sapiens
ggcctcccatagtgctgggattacaggcgtgagccaccgcactcagcctcctgtgcttttgtatcaaagaaaccatcaccagatcccttgtcatgaagatttttcccgttttttttttctaagagttttataattttagctcttacgtttaggtctttgattcattttgagttcatttttgtgcatgacgtaaagattcaacttcatgctgggcgcagtggctcacacctgtaattccagcagtttcagaggctgagacaggaggatcacttgagg

SEQ ID NO: 42951 - DNA, 265 bp, Homo sapiens
gtttgctgtacgtgaatagttcttcttctaaagtaatagattcatattgtttgctgtcctggctgtctcttttcttttctttcatatcttttgttgtgtttttaaagtgacttttatatatgaatacaaagcaactcacgaagtagggtgtgggttgggggcaagaagtgccctgcaggctttggactgtttgtccaccaggtataatcacactctgctttagaaaacttttaaagtcatcagcaaggctcaaacagactctttt

SEQ ID NO: 42952 - DNA, 391 bp, Homo sapiens
gagccactgagcccgcgagcagcacccctgaagtgactcagggacaggagtttctccagcccatgagattttactccccagaccctacttcactggcgtctggagggtggtctttgagaagatctatatgtgatccttttgttttgttttgtttttgtttttgccactctgtcgctccagcagcatcacatctggacatacctaccttaaaaagctgaacttcttttctttgagatggagtctgtgtctgtcatgcactccagcctgggcaacggaatgagactccgtctcaaaaaagaaaaaagaaggaaagtgcacacatcctaggtgtacaagtcgtcgcaaaacacatgcgtggcgagctgccacccaggagaaacagaacatggcc

SEQ ID NO: 42953 - DNA, 464 bp, Homo sapiens
ggggattatgggagctacaattcaagatgagatttggatggggaaacagccaagccatatcaggtgggaaaatgaaaacttagagagctgaagtaagttgcataattcacttagagttggttagtggcacacccagactggaaatccaggtctctcaaattgcaagtctttaagccaaaccatggggtaaacagctgaaaattctgctaagttgcaaattatgattcagcttatctgatacagggcctaaggttctgcttttctagtgagttgccacatgataaccatgtttgtggtctatgaaccaaattttgagcagcaaggatacagaagacctacatattcaactcttccttccaaaaaaggacctaaattttactcagagttctcttctctccctcactgcagcccatgtgactcaatggagtcggaccctatgtccatctccaacctgaatcttggtc

SEQ ID NO: 42954 - DNA, 440 bp, Homo sapiens
tttaagctggtgatttgccacaatgtgaggtgaggtggtcactttcgaacttggagtgaatggtcactaagcggggaccttgccaggcagcaagataaggaacctcccagggccacccatttgcctcaggccttgtgttttatttcatagcctgctcgaattcattatatggttacatttttcccaaacaaaatactcaccgcttaaatataatccagtcctttccaagttgaaataattttgggatttgccatttgaattacccacaagacatctttcctatatacccatgactgtttcttaaaagaatcccagctgggaaatgatttgctgccccaaggaaacaagcaggtttacatatccccatccccaccctgctttcactctctctctctctctctgtctctgatttcttcaacttttccactagggccaactga

SEQ ID NO: 42955 - DNA, 418 bp, Homo sapiens
gcgcgatctcaggtcactgcagcctccacctcccagattaaagtgattctcctgcctcagcctcccgagtagctgggattacaggagcgtgccaccacgcccggtaattttttgtatctttagtagagacgaggttccaccatgttggccaggcaggtctccaactcctgaccccgtgatctgccctcctcggcctcccaaagtgctgggattacaggtgtgagccaccatgcccagccttctggtttcttttattatcaattttttctcataccttagaaatgaaactgtcagaccctttgtgatttgttgtttacgtatgtattggctaattatggtaaatagcacagttgaaaatgttttgcaaaaattgagttttttgttttgttttgttttttgagacagtctcgctctgtca

SEQ ID NO: 42956 - DNA, 815 bp, Homo sapiens
tgggctcaagcagtcctcccatctcagcctcctgaatagctggaacaacaggtgcgcatcaccgtgcctggctaattttttaatttttagtagaggtagggtctcacaatgttgcccaggctgggctctaactcctggcctcaagcatttctcctgcctcagcctcccaaagagctgggattacaggcatgagccaccacacccgcacccagccttgttcatgtattttcaggctttttctgtgcttcattttggacggtttctatggctttgtcttcaagtttattaatctttaattccggcatttctgatatattcttagttctactcatatttttcctcttcatttatttttcatccgtcatgagatgaaaattttgatttatgtttgtttattgtccacatctctatttaatatattcaggcattcttctacttcttgaacatatagtttacagttgcaataactattttaatatctttgcttactaattccatcatctgtatcatttcctggcttgtttctattgctacatttttttcctcataatgggtcacattgttctgtttattacatgcctagtttttttcactggattccaggcatggtggattttaccttgtgttctggatatcattgtatttttagaaatattcttgagctttattctgggacacttaagttatttggagatagtgtaatcctttcaagtctttttatgcttagttgggtgggaacagaacaaacttaactaggggctaatgttgcccatctactgagtcaataatcttatgattattctactcgatgtctt

SEQ ID NO: 42957 - DNA, 340 bp, Homo sapiens
gatattttaaatatccccttgccccattttttaatgcaaatagaatggatcagggctagaaaaacattcttttggaccatatgaataacaggcttctaagaaaattaccttcattatagtaaatagggtggacagtttttttttttaaatttatccaaaatgtattggttacactaaagtagtatagtgctgtttatttttttttttttatagtcttagccttagcctaatttacattgtttcctatcttagtattcatagacttttggacctaggttagtttgccttattaaaatgacactgggttagtaggatacttaggcaagagagtggagtgtcc

SEQ ID NO: 42958 - DNA, 823 bp, Homo sapiens
ggtgcccagctcaccatgagcacggtcaattcacaaggtagtttttataaataaaggttttgggcaagctgaacgtggtccagagagatattaatgagagggcaagggggaagagttaatgaaaacatacttcctggtggaacataaactgctttttggaactggagaggctttaaaattattttcccaaaaccctgtggcgtttcttttctggaggcaatgagatggggagaaatgacaaatggcttcgttttattattttctcctctctcgttctccatatttttggtagggaaaattggacatttattttggccattttccttctattcgcagaatcaattacatttttggtgtattatgcgtggtaaatatactcaaggatcctctggcttaaaagcaatgagttgattattcgaacatcccttctttaaaggcagttaattgcatggaaaacataggcccccattgtctggtccctttaaacttttattctgagatttgttcccagggtctgggctgtgtagtgtagttgttgttctgcatcattggctgttgtatattccaagaaaaataattttaagcttttaaatcatacagtgattgaaatcttgcatttcagatggactgaaatctcaggccactagtgttcaaggatctacaacattttataacctatatcacttaaaggaggcttggctagctttgggagaatgctgccttctagagggttatgtaaatcaggaattgtggctaattttttcttttgtagattgctgcctgttctggaatttttttcttccactcaaaagtgtgatggtgc

SEQ ID NO: 42959 - DNA, 414 bp, Homo sapiens
cagggacaaaacctgcacagttatgatcagagagttttaaatcaagaagaggaaatagtaggatcgggcccctttctacaacccagctaagccaccagtcaactcatattttgattctgcatctaagctgactgcacatgagattcactcggggagcatttgaaaaccagtgccacccaggcccccaaccccaaaccaatcaacagaatctcttgggggtaaagctgggcactgacgggggaagatctgatttattatcccctaaagacaaaaatgaaattggaagatcacaacataacattctaatgatatcaccacactggctcaggtgctcatggtgaacctggaatttgattccagaccttctgcaggcattcaagtgcagcctggacgacatagcaaggaactatctca

SEQ ID NO: 42960 - DNA, 465 bp, Homo sapiens
gttaaccagatatttgtgtttgtaaagtccaagaactctattgtctgagaaagggagtcatcctagacttccccctctgtggtgggcatctgatgtttctttggctatctgaaattcaatcttcctccctaacatcaccctaacatttggggggtgaggattttctttactaaattttgaatattataaatcgagataccttgtccttgctctatgaaagctgatggggctctcagatgcaattatatcctccttccataagatctgtaactcttattgtcttgattatcaaaagccaaccatatggcttaaactcagctagctgggagtgccttttctgggacttctctttagttctcctattatcaaagcaattgacttcagcttcccagtgacctcttaagtctagacggcattttcctgttttctgccccaccaaactcaatattaaacttctttccttcc

SEQ ID NO: 42961 - DNA, 483 bp, Homo sapiens
aggaaaagacattagcaaaagacttgactaagaatttttacacaagagaatatccacacggtggctcacacctgtaatcccagcactttgggaggctgaggtgggcagataacctgaggtcaggagtttgagaccagcctggtcaacatggtaaaactccatctctactaaaaatacaaaaactaactgggcatggtggcaggcacctgtaatcccagctactcaggaggctgaggcaggagaatcacttgaacccgggaggcagaggttgcagtgagctgagattgtgccactgcactccagtctggatgacagagcaaaactccatctcaaaaagaaaaaaaaaaaagagatgatatacagatagcaaacagtatctgaaaaaattgcacaacatcatcttagtcaatgggaaaatgcaaattaaaactgcaaagagatactttgacaaacccactaaaatggccagaacttttcaatgga

SEQ ID NO: 42962 - DNA, 400 bp, Homo sapiens
tggaagataggagatattcctcaatctctgcagggatgttttcctcatttgtgggagaaaaaaactacatatataggcaagccacaatgatcagtaaattgcagcttattagttatactaagatctggtctcctcacacataaaagaggttacatcaactactggcactttctgtgatacctagcctgtcgtaaatgtgctgtttttattcctagcaaatgtttgaatccaagcaaaacctaattggaggtatggattttaccttccatctgaggactgaggctgccttccaaaaagttaggggagttttatttgaggcttcttggctgtggactctgtttcctacctaggtcacatgtaaaacaggaagattaaaactaaatcaaatcaacatttattg

SEQ ID NO: 42963 - DNA, 353 bp, Homo sapiens
catggaagaaggcaaagggtgagcaggcacatcacatggtgaaagcaagagagagagtggggaggtgccatacacttaatgaacagaagtcacacactattttgaggatagtaccaagaggatggtaataaaccattcaggagaaactcacccctgtgatccaatcacctcccaccaggccccacctccaacattggggattacaattcaacatgagatttgagtggggtcagcatccaaactatatcaacataatacctgataatgataataaatgagtatgttactgctttatgtatttattatgctatacttttaatcattattttacagtgtaccctgtctactttaaa

SEQ ID NO: 42964 - DNA, 1005 bp, Homo sapiens
tacttgttaaaatatctaactacgtaattgctacatgggggagctgctggtgttgttgaggtccttgggagcattccactggacttcaccatttctccaaaattatcagcccagtcagcttcatatacccagatatggacacttctacacgtgaaattcaaactgaagataaaactctgactttggagtataaacttttgccttgagtatgaaaccttgacattgctgaaagaaaagtggaaactgtaagggacaacaagtttcaccaaggcacagtcttctctgataggccagcagagcagctaaggagaagacagatcattcaagaacttaagtcgtttgttagctacagcatttccattgctgtgatacacattcagccattttggaggaaagctaagcaggttctgaccacccattttcatgtactttaaataacaaatattatttctcaaggtcttcattttatcattaaattcagctaattactacctgatttcaaaggcagctagtgtagaagactggtcacaagaatttttttttaaatagaaaaccctaaaatgcaaatcaagaaattcagttacaggctgcaagtgacctaaaattcccctactctagctcagcagccatcagtcagtatagcatcagccacaggtcactgctctgcatacagttccttttcaacccttacaagacctgcttcattgctttaaaaatgtagtgttgatacttgaactgaatttagtcattggtaacttaaatattcacaaaattgtcataaagcttctgaaacatctggcaatgccagatctgtaatcatcacttttaaattgaatttgcagaattaactctaaagttgcagcaaccatatttattagagaaatctttaagcatatacatatggttccctataagcattcattcagagatcatctgtgcctaaaagaaaatgataaaaatgtgtcataatatcaaaggggtctagatcaggggttggtaaactac

SEQ ID NO: 42965 - DNA, 455 bp, Homo sapiens
tccctcttcatctaaacatctcctaccctagtttagtgcctcataattctttgctaactactgtgttaactccagatggtttcccagttactagtctcatactgaccattgcttccagataatcttcctggcccaaaaattttccttgaaggcctggaataaatgtcactccttccatccaccaagccttggggatatactttaacctattgattaagaatatagatagatggagccaggcgcggtggctcacgcctgtaatcccagcactttgggaggccgaggcgggtggatcacgaggtcaagagatcaagaccatcctggccaacatggtgaaaccccgtctctactaaaaatacaaaaaattagccgggtgtggtagcgagcacctgtagtcccagctactcgggaggctgaggcaggagaatggtgtgaacctgggaggcggaccttgc

SEQ ID NO: 42966 - DNA, 779 bp, Homo sapiens
ctacaggcgcccgccaccatgcccggctaattttttgtatttttcatagagacatggtttcaccatgttagccatgatggtctcgatctcctgacctcgtgatccacatgccttggcctcccaaagtgctgggattacaggcgtgaccactggcgcccggctagttttctctttttgtcgtgtctaccttcctacttgcctcacaccagtcagttggctttctgtgtcaagcctgaggaatgaatctcatgaaagagcattgggagagcggagattttgggaaattgctttcagaacacaaaatcccacatgcgtgggcttgttccctgcaagcttaatcttgcctgatgtatatgtgtacatgtggaaggctgaaggaagtgctataaatgccccattcgtaagtattcagccatcgtgtgctgaaagcctgccgtctgccggacactgaaatgtggccttcacaggccgagggtctttaagaagcatggccgtgggggctgagagcagggtggggtgacaggacaggttactgagactgaattttgtctgaagagtagggagagctgtagtggttcccctttgctggttgttggtttttgtgtgcccccccacctcaaacccccccaccgtaagagaatcagaagggtcccatctgccttgcagggaagggtcatggttggtgactggtaacatctgggggaggggccacttcattatgccacccagaatatcaaagcagcttaggcgttggaacccagggaaggaagaagagatta

SEQ ID NO: 42967 - DNA, 261 bp, Homo sapiens
  misc_feature (14)..(14): n is a, c, g, or t
  misc_feature (22)..(22): n is a, c, g, or t
agggaatctcaggntacaaggnaaacaccaagaagtccccatgagtccctacagccacaataaattgaattctgccaaaaatcttaataagcttggaagaagaccttcagctcctgatgagaacccagccagaaacaagatgagaacccagaaacaagattttcatcttatttcaacctgagcagagaacccagaggagccctggccagatttttggtctacaggattgaggtaacaactgggggtataaattgaattctg

SEQ ID NO: 42968 - DNA, 1024 bp, Homo sapiens
gttggaaaaaccacactaggcaaaggacttgtgtcaaaatcaggactgaaatacattaatgtgggtgatttagctcaagaagtctgatcatcgtatatcatggagtctggcaagatggcttctcccaagagcatgccgaaagatgcacagatgatggcacaaatcctgaaggatctgggaattacagaatatgagccaagacttataaatcagatgttagagtttgccttccgttatgtgaccacaattctagatgatgcaaaaatttactccagccatgctaagaaagctaccgttgatgcagatgatgtgcagttggcaatccagttccacgctgaccagtcttttacctctcttcccccaagagatttttttattagatatcgcaaggcaaagaaatcaaaccccttttccattaatcaagccatattcaggtcctagattgccacctgatagatattgcttaacagctccaaattataggctgaaatctttacagaaaaaggcatcaacttccacgggaagagtaacagtcccgcagttaagtgttggttcagttgctagcagaccaagtactcccacactaggcacaccaaccccacagaccatgtctgtttcaactaaagtagggactcccgtgtccttcacagggcaaaggtttacagtacagatgcctacttcacagtctccagctgtaaaatcttcaattcctgcaacatcagcagttcagaatgttctgattaatccatcattaattgggtccaaaagcttcttattaccactaatacggtgttatcacaaaatactgccaatgaatcatcaaatgcattgaaaaagcgtgaagaagatgatgattatgataatttgtaatttagccttgctgcatgtaacatgtatacttggtcttgaattcattgtactgatactaaacatgcgtgctggatgttttcaagttgtattttagaaaactttcatatttaatgagtaaatacaattaccatacttttcaattgaaatgaaggtt

SEQ ID NO: 42969 - DNA, 479 bp, Homo sapiens
tgctggtattataggtgtgagccactgcacccatccaagagctttttttcttctagatttcaagaggcctcttttcctgtcctaaaagatggagctaaattctctaacgtgccccatgcagtgcccacaaaatcttccttttctttccttttctgggcgtccttggggccctgtacttgctgtcacctgtgtctggggttctcttctgcaggtctttccaggccttccctgcatcctctgccttccctcccccggccactccccgtcttagcaggagccactgcctggacttccctcgcgtacctgctgctggtttcatgtcaccttccctgcctgaatgtaagctccctaaggacaaggactccatcttgtgtcctgaatcctgccagacttcagccttttatcagtggctggtgtggagcggtctttggtcgcttgctggagggtccatcaaggctgtgtgagggaccttcttgtgg

SEQ ID NO: 42970 - DNA, 188 bp, Homo sapiens
ccaccagaaggagtaggctaatttgtatttttctccctgtaggaaatatcagggtcttcagccaaacagtggggaaagggtgttagagcgggtcagacacttcataccatccccctgatttcatggtgtcttaggtatttatcagtgtttcaaaatttataaattgctatgatgtcttttctcgctct

SEQ ID NO: 42971 - DNA, 197 bp, Homo sapiens
accccgtttctgctcaagcctcagagttggaaactccagtccttctggagcatccgggcaggccagagatctcaggcttttcttgcaggctgggaggtgagccctcaccaagtgacttctcagatgacgcgcttttctgggatccgaggcttatgaatctacagggaacattcagtgtccccatctggctctctagg

SEQ ID NO: 42972 - DNA, 485 bp, Homo sapiens
tctttttgtagaatataaaggaaagctcattgataaagtataataaagatgactgtaagacaaaatccaattctaaaagtatgatttttttctagtagaaaattgatgtaagaaatcatacattattcatacatttataggtcatctctttgagttttcagtgaactatagaaactatatggagttaaaaaacaaaacggcagccaatctcagtggctcacacctgtaatcccagcactttggaaggttgaggcaggcagatcacctgaggttgggagttcaagaccagtctgaccaacatggaggaatcccgtctctgctgaaaatacaaaattagccaggcatggtggcacatgcctgtaatcccagctgctcgggaggctgaggcatgagaatctcttgaacctggaaggcagaggttgcagtgagccgagatcacgccactgcactccagccttggggacagagcgagacactgtctccaa

SEQ ID NO: 42973 - DNA, 443 bp, Homo sapiens
tactcttaaattttagcagagttcagacctctcccataatcctaatgttgtggcctttcattagtcttacaaagtcaggtttccattcttgagcaaggagggacttagttttagggagggactattaccatccttgctttcaagttaaaccatgggcagggcatggtggctcatgcctgtaattccagcactttgggaggccgaggcaggcagatcacttgaggtcaggagttcaagaccagcctggccaacatggcgaaaccctgtctctactaaagatacaaaaaattagccaggtgtggtggtgtgcgcctgtagtccctactattcggtaaagtgagacaatagaattgcttgaacccaggaggcagaggtttcagtgagctgagattgcaccactgcactccagcctgggtgacaggacaagaccctgtctccaaaaa

SEQ ID NO: 42974 - DNA, 833 bp, Homo sapiens
aaaataaggatgataatacccacctctcatcatgccataaaacttacataagcaaatacctgtgaagtgcttcaaacaatgcctggcacatagcaattgtgctgctattttaactataataataatttaaggctttcaatatctttatggtcctccaaacactttgttctgacaacagagtgggttgtcataaaatttaaaacttgggaatgaccttactattgattaatctaacccaaccctctcccggtatcatcaataggcctcatcaatcgcccctcatggcttgcacattttctggaatgggggactcactgtctccctggtagcctctatccttgttgtggggctctgataatttgcttcaagtaagtgtccaacactgaagttgctgagtcagacggcatattcacttacaagcctttcaattctaattcccaatgtgtccttaagaaaggtgatattcatatacagtactactcataaagtgcccaattcaacacaacctgaagcaaggagagttggattaaaagccactttctaatttgatcaacagaacaataactattcttctttcctattttatattcattatagtactaatgaaactaagtattttttctcaaatatttactgccttactttttccattttgacttgcctgttaatgtcctttatctatttatttgatgcatttgcttttaccttgattaatttatagattccctgtcttaagcatactcgttctttgttaaaaagtttgaaaatagttttcccaacatgtcatttaaattttagttttgattttggtctaatgtgataaacagatattt

SEQ ID NO: 42975 - DNA, 850 bp, Homo sapiens
ccagggtctcatcgtcatgtctacaagcctggaagagattttcaattgcatctttgatgcccatgttcctccgctctggggaaaggcatacccctcacaaaagccattggctgcctggacccgggacttggccatgcgtgtggagcagtttgagctgtgggccagccgggcccggcctcctgtgatcttctggttgtctggtttcacctttcccactggcttcctcactgctgtgctgcagtcttcagctcgccaaaacaacgtttcagtggacagcctctcctgggagtttatcgtttccactgtggatgacagcaacctagtgtatccccccaaggatggtgtctgggtccggggcctgtacctggaaggtgctggctgggaccggaagaactcctgcttggtggaggcagagcccatgcagcttgtctgcctcatgcccacgatccacttccggcctgcagagagccgcaagaagagcgccaagggcatgtactcctgcccctgctattactatcccaaccgggcaggcagctcagaccgagcctcctttgtcatcggcattgacctgcggtctggggccatgacacctgatcattggatcaagaggggcactgctctactcatgagcctggacagctgagacctcctcctcttctccgcttgagagagagggtcagggactccaggagctaagacagatgttgcacctaggactgaggccggacctcactcagactttgaccttggccgaatttgtgtgatgtggccctggagatacctagttgtgttagccataaaagtgaaagagttgtattggagctcagtgctgtaaaacacccgcgacaac

SEQ ID NO: 42976 - DNA, 368 bp, Homo sapiens
tcaaggcaatccctatcgagttaccaatgtcatttttcacagaattaggggaataaatcataaaattaatatggaaccaaaaaagagcttaaatagtcaaagcaatcctaagcaaaaagaacaatgctggaggcattatattacctgacttcaaattatactactaagctatagtgactaaaacagaaggtactagtataaaaataaaaatagtcacatagatcaatggaacacaatggagaacccagaaatagagccacatacctacaaccaactgatctttgatgaagtcaacaaaaatatatgctcaggaaagaacattctattcaataaatgatgccgggaaagttggataaccatctgcagaa

SEQ ID NO: 42977 - DNA, 363 bp, Homo sapiens
caagggtcacttgaggccaaccatggtggagcttaaagcacacaactgggattggtgccacctggagggagatgggggtggtgcatgaggtgatgcatggtggatgacttcagtccagtggcttctcattaagatcaggccaacgcctccctggcaggccatttagatctttaaaaattgatatataataaactgcacatatttaaaatatgtggaatttgatatgttttgacatagatatatacctgggaaactgtcaccaccatcaagataatgaactcacctgtcacccaccaaagtttcactgttcccctttgttatctctccccccgctgctccgtactgccccactctctccccagg

SEQ ID NO: 42978 - DNA, 578 bp, Homo sapiens
  misc_feature (578)..(578): n is a, c, g, or t
cgttcctgtcagctggtcaccgttgcatgcatgtctgtgattaaccacccggcgccggccccggccctccagccacatcctcactaactgtgtttgtgcgtgcatggggctgtggcacacactggcagcagtacttccgttagccacgtcatgagtgggaaggaggatgagacacctgctcctcaccggctggagtgcatgtggtcattttgttccaggttcctcgggtcgggacacagctgccgctgtggggctgggcaccccagagaggggcagttcagcagccctcagctctgatcagcaaggtgcagcgctgaaacaccactgatgacccttagggactgactgttcaggggaccctctgtcatttgagctcttcgagtgaagattatgagtatagaccccaagtcatgtttgtcttctttgaagtctataaaagttttcttgttggccaggtatggtggctcacacctgtaatcccagcattttgggaggctgaagtgggagaatcacttaagcccaggagattaagaccagcttgggcaatataacgagatcccgtctctgcaaaaaaaaan

SEQ ID NO: 42979 - DNA, 626 bp, Homo sapiens
ttctcaagttctctgctctgttttggacctccctgcatctctccctgcgtcaccatccctgggcgctcagggctgctcctctgccctctgcagggcctccgtggtgtgctctgtccttccctcctgccgttcaaaggcatctgcatcctttgttgtagccagatttctcactctgtattgcttttcttcctaggcacttaaatatcctcatctatctccaagtgccttccttgacaccttgcatctccaatagaacgttctgtgacaatggccatgttcttatatttgcactgtccactatggtagccactagccacgtgtcgctgctgaagccttgaactgtggctagtgcgactgaggaatggaatttaacattgtatcttattgtagtggttaccatattgaatggcatagcttaagacctgtcctgtctccttcctcaacccagttagttagatgtctcttcaagggttgttattctagagctagggcccacctgtagtcccagctacttggagaggctgagtcaggggggttacttgagcctaggagttttgagactgcagtgagtgcctgtgaatagccactgcactccagctgggcaacagagtgagacctcatattta

SEQ ID NO: 42980 - DNA, 366 bp, Homo sapiens
gtgttggatgtggttttctatatcacatcaattgaaaagataatatgaaaattatataattcagagcaatacactttctcctagaacatgatctgtaggcctctatttgttttaagaaaacctcagtactttatgaattcaagtattagatataagttagaagcataaataactttgaacactgtatgccatcctcttgcttattagaatactatatccctttcaaagaacatctagaataccacctcttccaggaatgtttttgtgttcatcccatccattcaccaggcccctgatacctgccaggccctgaggttataatgatgaacagaaaatctcttcttcctttgcctttgtttctctctg

SEQ ID NO: 42981 - DNA, 590 bp, Homo sapiens
cacgagcttggcgtctactacctgcccgacgccgagggtgccttccgccgcggcccgggcctgaacttgaccagcggccagtacagggcgcccgtggctggcttctacgctctcgccgccacgctgcacgtggcgctcggggagccgccgaggagggggccgccgcgcccccgggaccacctgcgcctgctcatctgcatccagtcccggtgccagcgcaacgcgtgagtgtaccccggcccggaccccacacccgcattcgctcggcctccacaagctggaggtggttaaacaggcactggacggggcttccgcccgttcacaccccaccgtggcctaggtgaccccacaccttcttccaggtctcccggtctacttctgcccctatcaggccttcccttcacagcaactgggagctgttaaaaatgacctttccagctgggcgcggtggctcacgcctgtaatcgcagcactttgggaggccgaggcgggcggatcacgaggtcaggagatcgagaccatcctggctaacatggtgaaaccccgtctctactaaaaatacaaaaaattacccgggcgtggtgggtgcc

SEQ ID NO: 42982 - DNA, 377 bp, Homo sapiens
gaggacggaacttggcccatccccaagcctggggggcaccacctgcggctgctggtgcccctttcagtccctgctgccacatcctgtgaaccaggacagggtaaggcctcctctgagcactgcctagcctgggccagaggggcactggacaagggcctttgggggacagtaagtctgggcccagcttctagttctaatgtgtgcaagattaactcactttgtatccactgggcacagatattctagagaacttatctttcactcttgtaaaagccacatatccacatctctttcattttctcagtgtgttatgcagcaatttattaaagtatttattgtctaataaatactgccaagtggaatatatttatataact

SEQ ID NO: 42983 - DNA, 2115 bp, Homo sapiens
cacgagcttggcgtctactacctgcccgacgccgagggtgccttccgccgcggcccgggcctgaacttgaccagcggccagtacagggcgcccgtggctggcttctacgctctcgccgccacgctgcacgtggcgctcggggagccgccgaggagggggccgccgcgcccccgggaccacctgcgcctgctcatctgcatccagtcccggtgccagcgcaacgcctccctggaggccatcatgggcctggagagcagcagtgagctcttcaccatctctgtgaatggcgtcctgtacctgcaggttcagtgctgtcctcctgggcgtgtgagcggccaccacaggcccttcctctcaggggcaaatggagcacagatctagacaatgtgtggacagtgtcagagtagcagtggccacatggaggaggaggcccacccggaactctgcccacactggccactgcagttcagcccacagagccactgcaggcaggcctacggacgtgacacgcacgctggtggtcccggagccagggttgattcaggacaccatcttggactctttcctggcctgctcagcacctgcccagatggcctctgcgtctttcctgtgcccagccccaccttttccacctctcttcatgttctcatggagtgcaaagtgcaccagccagggcccctacctgggagagggtcagctgacgcagggctgagggggctgccacagggacgtacgctgtgtgttcttactgcttagaagggacggggtcactcaccactcccctggtctccatctgggctccttggtcttccctgcccctcccctaaccgtgttctacctgccagtggagctgagcactgcctagcctgggccagaggggcactggacaagggcctttgggggacagtaagtctgggcccagcttctagttctaatgtgtgcaagattaactcacaaattcacctcagaaggcctttccaaatgggagctccactcttcccctcctctgcaaatcttcacagccaaggccccttccaccctctccagaggtggatgagatcccttttcccctcccctctgaggtgctgactcactggtaggagccacccaccagaggaaagatctagaacgtctttacagattggagacagccgggcctgctgacccatcatccgaatagctgaagcagagtcttccaccaggggtgccagggcctggctgggtccagcggctctgggatgagcctcccaagcatctttcccacttgggtggccatgcggcgctgacattggacaggtggtggacgagagatggtcccgagaaagggtggtcttgggagggctggtcccaagcctgctgtgctcctgtggcagtgatggggcctggggatggggacggcagctctcatgaggacacacaggctgtgagcccgcagcctcctcaaatgtagcctcccacattttccccaaagtacaggactgtcccagagtaggtagtgaagaggacaaggccctcggcagcgacctccagggcctcctacctgctgaggaagagttaacccactgcctccccacacaacaggctacgaagaacctggtgcctcaggacctcctgggagccaagctggtctggcaagggcgctcaggcctgggagagaagggagcaatggccagtcaccttcaccttctaactaactagcctccggatgaggtggctgccaccaggcccgaatgatccccaggagcccagcttccaaaccccaacatcgaatcaaacatctccatccccaagtgcagtaacacacaaaaaccaaacactctgccctgggaaaggcctggtgcgattctcagtaggactcacacccaccctacctagaagtactgggctggcctgggtactgcatccgtgtgttttgataagggggtgatgtggccacgcccttatctagatttcactttgtatccactgggcacagatattctagagaacttatctttcactcttgtaaaagccacatatccacatctctttcattttctcagtgtgttatgcagcaatttattaaagtatttattgtctaataaatactgccaagtggaatatatttatataact

SEQ ID NO: 42984 - DNA, 545 bp, Homo sapiens
ggcgtgcctgggggcacctgctagtctccagctgcaggccgactctttcctggcctgctcagcacctgcccagatggcctctgcgtctttcctgtgcccagccccaccttttccacctctcttcatgttctcatggagtgcaaagtgcaccagccagggcccctacctgggagagggtcagctgacgcagggctgagggggctgccacagggacgtacgctgtgtgttcttactgcttagaagggacggggtcactcaccactcccctggtctccatctgggctccttggtcttccctgcccctcccctaaccgtgttctacctgccagtggagctgagcactgcctagcctgggccagaggggcactggacaagggcctttgggggacagtaagtctgggcccagcttctagttctaatgtgtgcaagattaactcacaaattcacctcagaaggcctttccaaatgggagctccactcttcccctcctctgcaaatcttcacagccaaggccccttccaccctctccagaggtggatgagatc

SEQ ID NO: 42985 - DNA, 531 bp, Homo sapiens
cccacacaacaggctacgaagaacctggtgcctcaggacctcctgggagccaagctggtctggcaagggcgctcaggcctgggagagaagggagcaatggccagtcaccttcaccttctaactaactagcctccggatgaggtggctgccaccaggcccgaatgatccccaggagcccagcttccaaaccccaacatcgaatcaaacatctccatccccaagtgcagtaacacacaaaaaccaaacactctgccctgggaaaggcctggtgcgattctcagtaggactcacacccaccctacctagaagtactgggctggcctgggtactgcatccgtgtgttttgataagggggtgatgtggccacgcccttatctagatttcactttgtatccactgggcacagatattctagagaacttatctttcactcttgtaaaagccacatatccacatctctttcattttctcagtgtgttatgcagcaatttattaaagtatttattgtctaataaatactgccaagtggaa

SEQ ID NO: 42986 - DNA, 2199 bp, Homo sapiens
ggcgggagccggggtgaccatccgtgcccctcgcagcccgacgccgagggtgccttccgccgcggcccgggcctgaacttgaccagcggccagtacagggcgcccgtggctggcttctacgctctcgccgccacgctgcacgtggcgctcggggagccgccgaggagggggccgccgcgcccccgggaccacctgcgcctgctcatctgcatccagtcccggtgccagcgcaacgcctccctggaggccatcatgggcctggagagcagcagtgagctcttcaccatctctgtgaatggcgtcctgtacctgcaggatggggcagtggacctccgtgttcttggacaacgccagcggctgctccctcacagtgcgcagtggctcccacttcagtgctgtcctcctgggcgtgtgagcggccaccacaggcccttcctctcaggggcaaatggagcacagatctagacaatgtgtggacagtgtcagagtagcagtggccacatggaggaggaggcccacccggaactctgcccacactggccactgcagttcagcccacagagccactgcaggcaggcctacggacgtgacacgcacgctggtggtcccggagccagggttgattcaggacaccatcttggactctttcctggcctgctcagcacctgcccagatggcctctgcgtctttcctgtgcccagccccaccttttccacctctcttcatgttctcatggagtgcaaagtgcaccagccagggcccctacctgggagagggtcagctgacgcagggctgagggggctgccacagggacgtacgctgtgtgttcttactgcttagaagggacggggtcactcaccactcccctggtctccatctgggctccttggtcttccctgcccctcccctaaccgtgttctacctgccagtggagctgagcactgcctagcctgggccagaggggcactggacaagggcctttgggggacagtaagtctgggcccagcttctagttctaatgtgtgcaagattaactcacaaattcacctcagaaggcctttccaaatgggagctccactcttcccctcctctgcaaatcttcacagccaaggccccttccaccctctccagaggtggatgagatcccttttcccctcccctctgaggtgctgactcactggtaggagccacccaccagaggaaagatctagaacgtctttacagattggagacagccgggcctgctgacccatcatccgaatagctgaagcagagtcttccaccaggggtgccagggcctggctgggtccagcggctctgggatgagcctcccaagcatctttcccacttgggtggccatgcggcgctgacattggacaggtggtggacgagagatggtcccgagaaagggtggtcttgggagggctggtcccaagcctgctgtgctcctgtggcagtgatggggcctggggatggggacggcagctctcatgaggacacacaggctgtgagcccgcagcctcctcaaatgtagcctcccacattttccccaaagtacaggactgtcccagagtaggtagtgaagaggacaaggccctcggcagcgacctccagggcctcctacctgctgaggaagagttaacccactgcctccccacacaacaggctacgaagaacctggtgcctcaggacctcctgggagccaagctggtctggcaagggcgctcaggcctgggagagaagggagcaatggccagtcaccttcaccttctaactaactagcctccggatgaggtggctgccaccaggcccgaatgatccccaggagcccagcttccaaaccccaacatcgaatcaaacatctccatccccaagtgcagtaacacacaaaaaccaaacactctgccctgggaaaggcctggtgcgattctcagtaggactcacacccaccctacctagaagtactgggctggcctgggtactgcatccgtgtgttttgataagggggtgatgtggccacgcccttatctagatttcactttgtatccactgggcacagatattctagagaacttatctttcactcttgtaaaagccacatatccacatctctttcattttctcagtgtgttatgcagcaatttattaaagtatttattgtctaataaatactgccaagtggaatatatttatataact

SEQ ID NO: 42987 - DNA, 219 bp, Homo sapiens
ggcgggtgagtccggccgggcgggagccggggtgaccatccgtgcccctcgcagcccgacgccgagggtgccttccgccgcggcccgggcctgaacttgaccagcggccagtacagggcgcccgtggctggcttctacgctctcgccgccacgctgcacgtgggtgaggcccggggcgtgggaggatcgcccgctctgtcgcccaccccgccgcccgcc

SEQ ID NO: 42988 - DNA, 239 bp, Homo sapiens
agtaagtcagtagctggctatcagggagactttagagacccagagagctttatgcctaaggggagaaaaagaacatttttcttgtcttgaggcaggtcacagaaaatgtacacatggtgctggggacaaaggtctaggagaaaagcaaaaggcagtcacccctgccagatatctaatagaatgccagagttagacatgaatgccataagaataatgaaaaactgagagccatgggcctt

SEQ ID NO: 42989 - DNA, 1041 bp, Homo sapiens
cacagatggaaatttccaggttctctaggtggtaggcagaggcctccctttttaagaaactccccactccacccctgccaatgaggacgttgcttagaggtatttctatcagtgttgagtagaagagatcatttcttggtgttgaatttcaggtaaggatgccagcttctgcatatcagggtgatgatgtttgggctgcgacaggtctagacagcagtctgaaagggggctcaaggaagtagctgtgaaaggcccctgggatgttttctgctcccctttctgcaaatcccctggagggagatcctgttagtcactacaggatgtgtgtgtgtgtgtgtgtgtgtgtgtgttcatcacttgttgcttgggggtgggaagagacaacaacaacctacagaatccagagttctcagttcatctcccatcctagtccaatcatggcctaacatccttagctaccgatcgcagaggagactgcgcatttgtgttcatgtggccttggatgttggcagattcagattggtgccccaggcatctgtgcctgtaactgcagtttcagcgggctcaggaccaggctaaagggcctccaagcttcctccagtttcctggtgcatgcatgtgcaatatgctcccctggcctgggtctttcctgctgcttcttgccagttgggtcagaactagcttattaaccagtttttcttctgagctttaatcgaactggctccaaccagttggaggcttgaaaagggctacgtgctagttatagatttttaaagatatattattattttagagtagttttgagtgtacagcaaaatggagtgcagagtccagagatctcatatgccctcaattcctgtatactctcgggtcactccaccaacaacctcctacaccagagccactttgaaacattagaaaatatatttgagcattcagaaatgtataaactaggcagccccagactgcaagcagctcagaggtcccacagagaggcttagggagggtgggggaagaattttatatggtgaatgtggaaga

SEQ ID NO: 42990 - DNA, 430 bp, Homo sapiens
aacagcctcacgggcttttgagaagggcagggaggatcaactcctgacctggtgacactgatggagcaaagctgcttccccactccacacctcagtttccccactccttccagtggagataatgacctctgtgtgctcagtgctactgtgagtcagggttaattagcattagtcatagacttgggaatcctcacaagaaaagggtcatctggtgggtctgggctgtgccctggctgtgatgagacaccactcatgcccctgtgagtgtgtcatcatgcttcattagtggcttgcctaactttgcaggtcggccctggggtggcccagccctgagtgcgggtgctgagatcagccaaaggatgacacctggggagggctgcatgtgtcccagggtggctgccaatggctcacagtcccctggatttccctt

SEQ ID NO: 42991 - DNA, 1302 bp, Homo sapiens
cagcattgtctacaagtccgaaaggtaggtgacaaatatctaagaatcagtattgaaatcagtgaatttcaggaatagaggaaaggactatgatcagatcttgattttatctactttaaattgtctatttatttgatcccaaccttttgtacttctgaagtgtaactgtcttttattcaacagaacatgaactaggaagagagattagaaaacagaatgtgaacatttttcttttaataattgtaacaaagatttgttgggagagaaatttccaaataatgagtagtgtatagtgtaaggaataattgacctggaattattggccccaaactctgattcttgctgaagcatctatgagaagtgtgattttagccaagtctgtgccgcattctttatatgtaggaattaagttttgatttaatgatttctgaattttctttcagctctactcaattaaggggtatcagtatgtgaaatggaatatagaaaagtaggcaattctttacttttctatattcagtttcataaattaataccccataattgcccattatataccaaagacaatatctcaagttatctcattgtagcagtgtctgtgagtcaaaacttcaattttagtagagtcacactttctttatatagaaaaattcatgtactcactactcatgtagttactgtatctttaccttcagtttgtaaaaatgactaaaagtagggaaaacaagtgttaaaacataatggataagaaaaggttggaaatcatatggcaaatcacatgttcctcagcctcaaggtgtgtttagttgtgaaagaaagaataaaattgtttaaatatttcactttttgggaatgacttctcccctactcccccagaaaatgcgatgtatacctttgcccattcaactttagtccatatttttaggaacacacaaatttactttaaggaattacctttaaagttgactatataatagcaaaagagaaagtattgagactgtcagtgttgataaagcttctagcaagattaggttgactagaagtgcatcacagttctttatacttttagaactaaaagccttataattttgaaaaatatccagttacagaaattgtaccttatcagttatactttttttctgagtaagaaaacaagctatagctttctggttaatttcttatttttcgttgtttggtttttgtctttttgagtggaacgttaaagtttattaccttcatgttaaggaatatccagcttcacagacaattaacttgcaataaatctctgaaataatcaaaaat

SEQ ID NO: 42992 - DNA, 263 bp, Homo sapiens
gaacacctctgattaattcttcagcttcttgatatacagaaagttattaatccaggcaggcaaggactcagaagcctcaattctactcagctcatctcaatgcttcagaattaagcaggacattgttccagctcagactccatggagagagctcagcattagcagtgtcttctaagaatctaaaaatgttctttaaaatgaaaattcataggtatttagtgatggactagatttcaatagttttgaaagcccatataaaaaca

SEQ ID NO: 42993 - DNA, 893 bp, Homo sapiens
ctggacacctttcttaacaaatcataactgcgtttaatagttacgtggtggtctgtgacttcgttgttcaacaaaatcgtttgtgtgcatttcagagacaacgtgtcctaattttgcctcccaaaagtggttctccacaatagataaaaccaatgggagccaaaaggcaagcattagaattattctgtgtttatcctcaagatgttgttattagcatcatcaagattcagacaaaattctacagattaaattattaaatctcctgcaacccatcttagacagcttcaaataaaggagacaatttcatcaggtcttatgggcatctgtaaatatagctaagagcattctcttgctcccaggctcttacgagataccaaaataatgttacctttcttttttgcattattcatttattggctccctttctgagagtaaagacttttcctcctttctcctgttgttagttttttacccagaccttgatccctgagttaggagaccatcagattcggcaagaggacttacctgtggagctgacagcaatgtgagactggccagtgcttttccccttcgtccattcccagtcacatgatgttgaggtggataactacaagtttataggactgtcttgtccacatgtgaggaaagatgaaaaaaaaacattaattccaagcttagataggtgaaaataaaaacagtccattccatcattcctcagacagttatatttagaggtattatcttcatgtcatgtttgcaactgatccgtcttcctgagcttgtaaatgtaatccatatccatgttctacatgatcagtcagagaaaaagaaaaatgttcagaaatatggaggaaattgttatcagttcctgtgttattactccacccctccct

SEQ ID NO: 42994 - DNA, 377 bp, Homo sapiens
ttaccaaccctttaagaatgtaaaactcatagctcacaggccatacaaaaacaggcaatgggacagatttaacccatcagccaccgtttgccaacccctcatataaggtaatcagggtggtttcatttcctttgccaaagattggttttagcatggacgtatagttaagtcctgacagatgtgatctgcagatgttccttagttcaaaaaagaggcctatgagaaggaacagtccttttattgccttggatatggctgtgtaatgcataatgcccggagctgctgcagccatcctgaggacatgcggtttctcacctttagcagagaatagcagaaaagagaaaggaatctgactgaatctccatgacattactgaa

SEQ ID NO: 42995 - DNA, 524 bp, Homo sapiens
cagggactgttatctgctttgttcagggctatatcctcaggacctggtacctagtaggccctcaatcagtatctgatagatgaatggatggatgaaattgcgactgtctgcagtgggcctggtacctagtaggccctcactcaatatctgatagatgaatggatggatgaaattgcgactgtctgcagtggacctggtgtcaaggcagatgccaccagggctcctcaggacatctctgggcccctcccactgagccctgcatttgccctcttaggtggtttcttcacttatctttccttggcctcccaagatatctttcctcccctcctcttccctcccctcccctcctgctgactccctccctgcagagccatctctcagccaggtgtgtgggctggtcacaggggatacatatgaaagtgtaaatctcctagaaaaaaatgggtcttcatcagcacaggactgcatgggctcctgccttctggtccagccttgggagctgtgagggtcatcctaattcagct

SEQ ID NO: 42996 - DNA, 426 bp, Homo sapiens
tggtgggcacctgtagtcccagctccttgggaggctgaggcaggagaatggcatgaacccaggaggcagagcttgcagtaagccgagatcgcgccactgcactccagcctaggcgagagagcgagactccgtctcaaaaaaaaaaaaaatgagctgagcgtggtggcatatgcctgtaatcccagctactctagaggccgaggcaggagaattgcttgagcccggaaggtggaggttacagtgagccaagattgtgccactgcactccagcctgggtgacaaagactctgtctcaaaaaaaaaaaaaatatatagtaagtgcaatggagaaaataattcacagaaagagctagagtgtcgaggtagaggtagcaattttaaatggagatgttagggaaatcctcactgagaaggtaacatttggtg

SEQ ID NO: 42997 - DNA, 496 bp, Homo sapiens
tactattaatattttcagttgcctctcagacatccgcagtttctcttagtaggaaaaaaaaaaaaaacccacgtgtcaaatgctccatcatttgacacagagcagtgtcctttgtcaaaaacccttccattgtacctctaaaacctgtcattctaacctttttgttgttcttattaacagttcatggacaggcacggtggctcaagcctgtaatcccagcactttgggaggctgaggcaggcaaatggcttgagcccagaagttttaagaccagcctgggtaacatggggaaatcccgactctacaaaaaaatacaaaaattagccaggcatggtgatgcacatctgtaattccaactactcaatttttttcatatatatatatatatatatatacacacacacacatatatatcatatgtatatgattttagtaactttgaaatcataaaaactaaagatgcctcagcaggaattaaatccatgttatttctcaa

SEQ ID NO: 42998 - DNA, 139 bp, Homo sapiens
tgaattacatttaatttacattttgatcctaaatattttcactgtaatatcaagttttgtttcctggtaccgtccccccagtagggttaaaaacttttaaaagtaatgtataatactgaggcaatgagagcagcagact

SEQ ID NO: 42999 - DNA, 340 bp, Homo sapiens
gagtaagaaacagatgagacagacagaaaccaaattgcaaaatccagctattcaagcaaatacattaagtatgaataatagctaaacactccaatcaaaaggtagagattgtcagactaatttaaaagaaaaaaaattgctatatggtatctacaagacacactttaaatacaaagacacaaaaaaagcctgaaattaaaaggatgaagatatattatggagacagtaaccataagaaagctgaaatggctgttttaagattagacaaagtagacttctctatgagtattactaaaaacacagcagaatgctttgttatgacgaaagggtcagttgtgtt

SEQ ID NO: 43000 - DNA, 494 bp, Homo sapiens
tgggcccagagacttctgcagacctcatcctcccatgtcgctaggactacctaaacatgccaccacatctggctaatttttaaattttctgtagaagatgtggtctcactatgttgcccaggctggtctcaaactccttgcctcaagcgatcctcctgccttccaaagtgcttggattacagacgtgaaccaccacacctggctgactgccttttggaatggcggcatccatagcagctatcctatgctgtcctccctatcgtaggttgcatgtggagagcagataaattgtatctttagctcgcaagtctttagattgagaagaagtagcctctggagctctgaaccactgtgtaagaagctgaggttgccctgcttgtgaggaaacagaaactaatcaggaagagagaccacaccaagagagagatgcctcacccatgcctgcatgcatcagcacaccgctgatcccacggcagccaccatcacactgcaac

SEQ ID NO: 43001 - DNA, 1358 bp, Homo sapiens
ggcaagggggttgcttaagcctaggaggttgaggctgcagtgagctatgatcaaaccactgcactctagcctgggcaaaagaccctgtcttataaaaacaaaacatttatacaaaatcttgcaaaataagtagagagagaaaaaacactgacctcactgtcatcccctatagcctgttagtatagctgtttgtagtcttttttctaaacaatgtattttcaaagaaaaaacagccaaaacaaaacaagccagacccaaacagagcaaaaacatggctttcatcccagcatgtacggctagaagaggtatctccagaccctctcaacctcatgtggtttgaaggcagagctacctctgcctttcccatgagtatgcccctgagtagttttctcaggttctcaggacgggctcttaactggcagaggaagactctaagacgcagcccatagcagctcctgtgagcccaccttccacctcgggctgcctaccaggcccttgagagcactctgttagcatagagaggcaacctcaaagcctttattcaggaacctggctcaggttcccagccactgggtattgagagagctttaaaaccacaaagtggagaatttgggaaatcaagttaaaggtgtgtgcacgtgcacactcgaatgcgtgtgctgaaagtcacctggcctgccctcctgaggcttaactcttgacaggttggtgcagaggccaaaagacatggcctgccgagccgctgctgccttagtggagcccctggaactctgaacagcccttcacagcacccatgggacaagtgcatgcgctttttcctttttctccctttccccctgaggttaaagatattttttttaccataaaagaaaaatgtacagagtgcataaaacaaaaaagagaagagaaaacactggaatagtacagaagatactaaagatgaaaaaatacaggtatcacttttgtagacgtgaatacttcatttctactatcctactgttaatggcctcttaattttcctctagaaattttctgtgcataggcaagcatgcatagcctacacatacacatgcaaagacagacctttaggaaacctgtaagtggggtcatgctggacatgtgttccctgcaccttccttttttctgttaatagtatgtctcagactttttttgtaacagctcacatagagagctgcctctcgtttggtggctgcatgatgtgtcatcgaatgggtatgctttggcttatctgcccagtctcctgttggtgagcattcagagtctttccattttggataatgcagtcagtgctgttaggagaatccttgtgcatgtaacctgccctgtggaaagtatcc

SEQ ID NO: 43002 - DNA, 207 bp, Homo sapiens
  misc_feature (15)..(15): n is a, c, g, or t
ggcagataagccaanagcataccattcgatgacacatcatgcagccaccaaacgagaggctgcatgatgtgtcatcgaatgggtatgctttggcttatctgcccagtctcctgttggtgagcattcagagtctttccattttggataatgcagtcagtgctgttaggagaatccttgtgcatgtaacctgccctgtggaaagtatcc

SEQ ID NO: 43003 - DNA, 1608 bp, Homo sapiens
cgcgcagaatcagttctgagcctcctcgcctcccggctctcccgcctgttgcgggtgtttatccggctgctgggcgacctttcccgggaaggaggctgtgccttcattcggtcacgccccggtctggggaggctcctccctggtgcgcagaaaccgcaggggcggggaggagccgggctctgcctgcgcccggggcagagcggggctggcaccgcgcaaggggccctgtttccggggagactgatttcggcctcctgacctcgggaccccttgactgtggagtgtcagacggaggaggacttagtgatcttgtccaaccccctccccgcttttcacaggttggggagatgggcgcctggagaatggaaatccagttatcaaaattgactccagaagagagaaactaacagaacaataacaatggaggaaattgagaacattatcaaaaagctatcatcctgccaaactccaggctcagattgtcttacaggttaaaaaaagttagtccttcatgaaaatgaaagaccttaagcaacacgatggattcagaagctcatgaaaagaggccaccaacactaacatcttcagaacaagatatatcacctcgtattacaaatgttggtgaaatgaagcattacttgtgtggctgctgcgcagccttcaacaacatcgcaatcacatatcccattcagacggtcctctttcgacaacagctgtatggcatcaaaacccgggatgcaatattttagttgagaagggatggatttcgaaacttgtatcctggaatccttcccccattgatgcagaagacagctacacttgcacttacgttcggtctctatgaggatttatcctgccttctccacaagcatgtcagtgctccagagtttgcaacctgttgcatggcggcagtgctcgcagggacaacagaagcaattttcactccaccggaaatagttcagacgttgattcaagaccacaagcatcatgacagatttaccaacacttatcaggccttcaaggcactgaaatgtcatggaattggagagtattatcgaggcttggtgcccattcttttccagaatggactcagtaatgtcttgttttgcgggctttgaggtcccattaaggagcatctgcctacagaaacgactcacagtgctcatttggtcaataattttatctgtggaggtccactgggtgccatgttgggattcttgtttttttccaattaatgtaaaaactcgcatacagtctcagattggtggggaatttcagtctttccccaaggttttccaaaaaatctggctggaacgggacagaaaactgataaatcttttcagaggtgcccatttgaattaccatcagtcccttatctcttagagcataatcaatgcaacttatgagtaaaggttatatgaaaaaaaccaacagtttagtgccatttatcaactgaatagaccttctaagaagaatgcagtttggcctctttcttagttggccaaatacaagttggtgtcataactccaggccacagtgagttatgggcaaagctgttttgcttaagcctcaataaaacagaataaaagattccaataggaaaataaa

SEQ ID NO: 43004 - DNA, 1361 bp, Homo sapiens
aaataaataaaatttaaaaacgcagaaggccactcccagagaggcctaggagtaccttggtcattttttcttgcctcaaatattataaacctccaacttgctcagaatcagggtgcttttattgtctgttttctggctctgaggcccttgccccaaatttaagtcagatacagactgaatttccattctgttctgtttataatatgaatgatattaatactcttgtttgcttaatgttatgttggaattttctgtttaatctgcagtagagcaagatggagagccatctggaattgacttccttctgtctttcttctgtgttcgcttactacttgggcccatgtgggaaaaaaactttaaaaggaaggaagtcttcttagggatccagttcaaagctatttgggggcatcaaactgaaactctcttctccactactcaagacttcgtgcctcagtccaagtaggtaagagcaaaagggaaatgcatctctacacaatggcccatggtcagggccaccagagcaagctgggcctagatctccacctgtcagtgactggccattctaagaggtgaaacagcagatcgttgaggctgtgagggaggatctttgaattcccatgagacatagcataagaagggtatcattaaagccctgggctctaaagttacagagcctggttttgagtcctggctccaccactgccaactgggtaaatttgagcaaatggtattctctttcttatctcagctcctgcgtttctaaaatgagggtctgcgttatgaatagttaggaggattaagtgagaggatgtataacccatgggttacttaaaagtatatttcctaccttccaaacatgagatttttctagttatagtttcttttctagcttgattgctttgtggtcagagaaaatgacccatatggtttccatccttcaaaatttgttgaaacttggttgttggcctagtatgagatcaatgttgtaaatgtgccatgtatgtttaaaaagactatatattctgaaaaaaaaaatggcttgctcttttactcaagaacacatcatagatttctgtcttttttttttgagatgcagtctcactctgtcacccagactggagtgcagtagcatgatctcggcttactgcaaccttcgcctcccagattcaagcaattctcctgtctcagccttctgagaagctgggactacaagtgcacgccaccacacccagctaatttttgtatttttttagtagagatggggtttcaccatattggtcaggctggtcgcaaactcctgacctcagatgatccacctgcctcggcctcccaaagggctgggattacaggcatgagccacc

SEQ ID NO: 43005 - DNA, 2548 bp, Homo sapiens
ccacgcgtccgcggacgcgtgggcgagaagtgcttccaagcgtccattttgagccttggaaactacgacgaccaaagggccacgggttcctgggtcgtttctcatttccgtcgagttaaacgtctggggctgcttctgaggaatcagcttggctggccagcaagttcagctccggcaagtcatttgattcacccggtgatgaaatgggggtcaaccagtctgtgggctttccacctgtcacaggaccccacctcgtaggctgtggggatgtgatggagggtcagaatctccaggggagcttctttcgactcttctacccctgccaaaaggcagaggagaccatggagcagcccctgtggattccccgctatgagtactgcactggcctggccgagtacctgcagtttaataagcgctgcgggggcttgctgttcaacctggcggtgggatcttgtcgcctgcctgttagctggaatggcccctttaagacaaaggactctggataccccttgatcatcttctcccatggcctaggagccttcaggactttgtattcagccttctgcatggagctggcctcacgtggctttgtggttgctgtgccagagcacagggaccggtcagcggcaaccacctatttctgcaagcaggccccagaagagaaccagcccaccaatgaatcgctgcaggaggaatggatccctttccgtcgagttgaggaaggggagaaggaatttcatgttcggaatccccaggtgcatcagcgggtaagcgagtgtttacgggtgttgaagatcctgcaagaggtcactgctgggcagactgtcttcaacatcttgcctggtggcttggatctgatgactttgaagggcaacattgacatgagccgtgtggctgtgatgggacattcatttggaggggccacagctattctggctttggccaaggagacccaatttcggtgtgcggtggctctggatgcttggatgtttcctctggaacgtgacttttaccccaaggcccgaggacctgtgttctttatcaatactgagaaattccagacaatggagagtgtcaatttgatgaagaagatatgtgcccagcatgaacagtctaggatcataaccgttcttggttctgttcatcggagtcaaactgactttgcttttgtgactggcaacttgattggtaaattcttctccactgaaacccgtgggagcctggacccctatgaagggcaggaggttatggtacgggccatgttggccttcctgcagaagcacctcgacctgaaagaagactataatcaatggaacaaccttattgaaggcattggaccgtcgctcaccccaggggccccccaccatctgtccagcctgtaggcacaactggccatttgtaaagtcacttcagccaagttttcatttgggagctacccaagggcacccatgagctcctatcaagaagtgatcaacgtgaccccttttcacagattgaaaggtgtaatcacactgctgcttggataactgggtactttgatcttagatttgatcttaaaatcactttgggactgggatcccttgctgattgacaaacagactttctgggaccttgatggagtggggaacaagcagtagagtgggactgggggagacccaggccccgggctgagcactgtgaggcctggatgtgaagactcagcccagcgaagctcattcccttacccccggccagtgctgctgcttcagtggaagagatgaagccaaaggacagaatgaaaatccctaccttcagagactctagcccagcccaacaccatctcttcctacctctcagccttctccctccccagggccacttgttgaagtctgagcactttatgtaaatttctaggtgtgagccgtgatcacattttctatttatttccaagtcttctcattgtatggaacatagtactacttatacttacagtagtaagttatacttgtgagcccacagagtggcagacagcatggctctcacagcacagggagaaaaactgaggtacacagaggtacctcagaagctctggatgtctttgggggttttgctaagtgtatcttgataggaaacaacaaaagcaggttgagatggggaagatgacagaacaacagtgttaaatggccatttgcacaggcctttgccacaacagagaagtagtttggtcagctaaaactcagctgcagcctggacagtagagcgagaccccatcttaaaaataaagaaggctgggcgtggtggctcatgcctgtaatcccaacactttgggaggccaaggcaggcagatcacttaaggccaggagttcaagaccacctggccaacatggtgaaaccccgtctctactaaaaatacaaaaaattagcctggcgtaatggcaggcgcctataatcccagctactcaggaggctgaagcagaagaatcacttgaacctaggaggcggaggttgcagtgagtcaagatcgcgccactgcactccagcctgggtgacagagcaagactctgtctta

SEQ ID NO: 43006 - DNA, 2467 bp, Homo sapiens
  misc_feature (1)..(1): n is a, c, g, or t
  misc_feature (4)..(4): n is a, c, g, or t
  misc_feature (10)..(10): n is a, c, g, or t
  misc_feature (12)..(13): n is a, c, g, or t
  misc_feature (15)..(15): n is a, c, g, or t
nganaacacntnncnggcaacaggaagccgagaggaaaccagcaagcggctgctgttctgtgttcccccatccagccagcaagttcagctccggcaagtcatttgattcacccggtgatgaaatgggggtcaaccagtctgtgggctttccacctgtcacaggaccccacctcgtaggctgtggggatgtgatggagggtcagaatctccaggggagcttctttcgactcttctacccctgccaaaaggcagaggagaccatggagcagcccctgtggattccccgctatgagtactgcactggcctggccgagtacctgcagtttaataagcgctgcgggggcttgctgttcaacctggcggtgggatcttgtcgcctgcctgttagctggaatggcccctttaagacaaaggactctggataccccttgatcatcttctcccatggcctaggagccttcaggactttgtattcagccttctgcatggagctggcctcacgtggctttgtggttgctgtgccagagcacagggaccggtcagcggcaaccacctatttctgcaagcaggccccagaagagaaccagcccaccaatgaatcgctgcaggaggaatggatccctttccgtcgagttgaggaaggggagaaggaatttcatgttcggaatccccaggtgcatcagcgggtaagcgagtgtttacgggtgttgaagatcctgcaagaggtcactgctgggcagactgtcttcaacatcttgcctggtggcttggatctgatgactttgaagggcaacattgacatgagccgtgtggctgtgatgggacattcatttggaggggccacagctattctggctttggccaaggagacccaatttcggtgtgcggtggctctggatgcttggatgtttcctctggaacgtgacttttaccccaaggcccgaggacctgtgttctttatcaatactgagaaattccagacaatggagagtgtcaatttgatgaagaagatatgtgcccagcatgaacagtctaggatcataaccgttcttggttctgttcatcggagtcaaactgactttgcttttgtgactggcaacttgattggtaaattcttctccactgaaacccgtgggagcctggacccctatgaagggcaggaggttatggtacgggccatgttggccttcctgcagaagcacctcgacctgaaagaagactataatcaatggaacaaccttattgaaggcattggaccgtcgctcaccccaggggccccccaccatctgtccagcctgtaggcacaactggccatttgtaaagtcacttcagccaagttttcatttgggagctacccaagggcacccatgagctcctatcaagaagtgatcaacgtgaccccttttcacagattgaaaggtgtaatcacactgctgcttggataactgggtactttgatcttagatttgatcttaaaatcactttgggactgggatcccttgctgattgacaaacagactttctgggaccttgatggagtggggaacaagcagtagagtgggactgggggagacccaggccccgggctgagcactgtgaggcctggatgtgaagactcagcccagcgaagctcattcccttacccccggccagtgctgctgcttcagtggaagagatgaagccaaaggacagaatgaaaatccctaccttcagagactctagcccagcccaacaccatctcttcctacctctcagccttctccctccccagggccacttgttgaagtctgagcactttatgtaaatttctaggtgtgagccgtgatcacattttctatttatttccaagtcttctcattgtatggaacatagtactacttatacttacagtagtaagttatacttgtgagcccacagagtggcagacagcatggctctcacagcacagggagaaaaactgaggtacacagaggtacctcagaagctctggatgtctttgggggttttgctaagtgtatcttgataggaaacaacaaaagcaggttgagatggggaagatgacagaacaacagtgttaaatggccatttgcacaggcctttgccacaacagagaagtagtttggtcagctaaaactcagctgcagcctggacagtagagcgagaccccatcttaaaaataaagaaggctgggcgtggtggctcatgcctgtaatcccaacactttgggaggccaaggcaggcagatcacttaaggccaggagttcaagaccacctggccaacatggtgaaaccccgtctctactaaaaatacaaaaaattagcctggcgtaatggcaggcgcctataatcccagctactcaggaggctgaagcagaagaatcacttgaacctaggaggcggaggttgcagtgagtcaagatcgcgccactgcactccagcctgggtgacagagcaagactctgtctta

SEQ ID NO: 43007 - DNA, 678 bp, Homo sapiens
gggcaggatcaggccggggtgaatcggccgaggtgatcacattttctatttatttccaagtcttctcattgtatggaacatagtactacttatacttacagtagtaagttatacttgtgagcccacagagtggcagacagcatggctctcacagcacagggagaaaaactgaggtacacagaggtacctcagaagctctggatgtctttgggggttttgctaagtgtatcttgataggaaacaacaaaagcaggttgagatggggaagatgacagaacaacagtgttaaatggccatttgcacaggcctttgccacaacagagaagtagtttggtcagctaaaactcagctgcagcctggacagtagagcgagaccccatcttaaaaataaagaaggctgggcgtggtggctcatgcctgtaatcccaacactttgggaggccaaggcaggcagatcacttaaggccaggagttcaagaccacctggccaacatggtgaaaccccgtctctactaaaaatacaaaaaattagcctggcgtaatggcaggcgcctataatcccagctactcaggaggctgaagcagaagaatcacttgaacctaggaggcggaggttgcagtgagtcaagatcgcgccactgcactccagcctgggtgacagagcaagactctgtctta

SEQ ID NO: 43008 - DNA, 2900 bp, Homo sapiens
ggcacgagcttctgaggaatcagcttgactggccagcaagttcagctccggcaagtcatttgattcacccggtgatgaaatgggggtcaaccagtctgtgggctttccacctgtcacaggaccccacctcgtaggctgtggggatgtgatggagggtcagaatctccaggggagcttctttcgactcttctacccctgccaaaaggcagaggagaccatggagcagcccctgtggattccccgctatgagtactgcactggcctggccgagtacctgcagtttaataagcgctgcgggggcttgctgttcaacctggcggtgggatcttgtcgcctgcctgttagctggaatggcccctttaagacaaaggactctggataccccttgatcatcttctcccatggcctaggagccttcaggactttgtattcagccttctgcatggagctggcctcacgtggctttgtggttgctgtgccagagcacagggaccggtcagcggcaaccacctatttctgcaagcaggccccagaagagaaccagcccaccaatgaatcgctgcaggaggaatggatccctttccgtcgagttgaggaaggggagaaggaatttcatgttcggaatccccaggtgcatcagcgggtaagcgagtgtttacgggtgttgaagatcctgcaagaggtcactgctgggcagactgtcttcaacatcttgcctggtggcttggatctgatgactttgaagggcaacattgacatgagccgtgtggctgtgatgggacattcatttggaggggccacagctattctggctttggccaaggagacccaatttcggtgtgcggtggctctggatgcttggatgtttcctctggaacgtgacttttaccccaaggcccgaggacctgtgttctttatcaatactgagaaattccagacaatggagagtgtcaatttgatgaagaagatatgtgcccagcatgaacagtctaggatcataaccgttcttggttctgttcatcggagtcaaactgactttgcttttgtgactggcaacttgattggtaaattcttctccactgaaacccgtgggagcctggacccctatgaagggcaggaggttatggtacgggccatgttggccttcctgcagaagcacctcgacctgaaagaagactataatcaatggaacaaccttattgaaggcattggaccgtcgctcaccccaggggccccccaccatctgtccagcctgtaggcacaactggccatttgtaaagtcacttcagccaagttttcatttgggagctacccaagggcacccatgagctcctatcaagaagtgatcaacgtgaccccttttcacagattgaaaggtgtaatcacactgctgcttggataactgggtactttgatcttagatttgatcttaaaatcactttgggactgggatcccttgctgattgacaaacagactttctgggaccttgatggagtggggaacaagcagtagagtgggactgggggagacccaggccccgggctgagcactgtgaggcctggatgtgaagactcagcccagcgaagctcattcccttacccccggccagtgctgctgcttcagtggaagagatgaagccaaaggacagaatgaaaatccctaccttcagagactctagcccagcccaacaccatctcttcctacctctcagccttctccctccccagggccacttgttgaagtctgagcactttatgtaaatttctaggtgtgagccgtgatcacattttctatttatttccaagtcttctcattgtatggaacatagtactacttatacttacagtagtaagttatacttgtgagcccacagagtggcagacagcatggctctcacagcacagggagaaaaactgaggtacacagaggtacctcagaagctctggatgtctttgggggttttgctaagtgtatcttgataggaaacaacaaaagcaggttgagatggggaagatgacagaacaacagtgttaaatggccatttgcacaggcctttgccacaacagagaagtagtttggtcagctaaaactcagctgcagcctggacagtagagcgagaccccatcttaaaaataaagaaggctgggcgtggtggctcatgcctgtaatcccaacactttgggaggccaaggcaggcagatcattacagagcctggttttgagtcctggctccaccactgccaactgggtaaatttgagcaaatggtattctctttcttatctcagctcctgcgtttctaaaatgagggtctgcgttatgaatagttaggaggattaagtgagaggatgtataacccatgggttacttaaaagtatatttcctaccttccaaacatgagatttttctagttatagtttcttttctagcttgattgctttgtggtcagagaaaatgacccatatggtttccatccttcaaaatttgttgaaacttggttgttggcctagtatgagatcaatgttgtaaatgtgccatgtatgtttaaaaagactatatattctgaaaaaaaaaatggcttgctcttttactcaagaacacatcatagatttctgtcttttttttttgagatgcagtctcactctgtcacccagactggagtgcagtagcatgatctcggcttactgcaaccttcgcctcccagattcaagcaattctcctgtctcagccttctgagaagctgggactacaagtgcacgccaccacacccagctaatttttgtatttttttagtagagatggggtttcaccatattggtcaggctggtcgcaaactcctgacctcagatgatccacctgcctcggcctcccaaagggctgggattacaggcatgagccacc

SEQ ID NO: 43009 - DNA, 2493 bp, Homo sapiens
ggcacgagcttctgaggaatcagcttgactggccagcaagttcagctccggcaagtcatttgattcacccggtgatgaaatgggggtcaaccagtctgtgggctttccacctgtcacaggaccccacctcgtaggctgtggggatgtgatggagggtcagaatctccaggggagcttctttcgactcttctacccctgccaaaaggcagaggagaccatggagcagcccctgtggattccccgctatgagtactgcactggcctggccgagtacctgcagtttaataagcgctgcgggggcttgctgttcaacctggcggtgggatcttgtcgcctgcctgttagctggaatggcccctttaagacaaaggactctggataccccttgatcatcttctcccatggcctaggagccttcaggactttgtattcagccttctgcatggagctggcctcacgtggctttgtggttgctgtgccagagcacagggaccggtcagcggcaaccacctatttctgcaagcaggccccagaagagaaccagcccaccaatgaatcgctgcaggaggaatggatccctttccgtcgagttgaggaaggggagaaggaatttcatgttcggaatccccaggtgcatcagcgggtaagcgagtgtttacgggtgttgaagatcctgcaagaggtcactgctgggcagactgtcttcaacatcttgcctggtggcttggatctgatgactttgaagggcaacattgacatgagccgtgtggctgtgatgggacattcatttggaggggccacagctattctggctttggccaaggagacccaatttcggtgtgcggtggctctggatgcttggatgtttcctctggaacgtgacttttaccccaaggcccgaggacctgtgttctttatcaatactgagaaattccagacaatggagagtgtcaatttgatgaagaagatatgtgcccagcatgaacagtctaggatcataaccgttcttggttctgttcatcggagtcaaactgactttgcttttgtgactggcaacttgattggtaaattcttctccactgaaacccgtgggagcctggacccctatgaagggcaggaggttatggtacgggccatgttggccttcctgcagaagcacctcgacctgaaagaagactataatcaatggaacaaccttattgaaggcattggaccgtcgctcaccccaggggccccccaccatctgtccagcctgtaggcacaactggccatttgtaaagtcacttcagccaagttttcatttgggagctacccaagggcacccatgagctcctatcaagaagtgatcaacgtgaccccttttcacagattgaaaggtgtaatcacactgctgcttggataactgggtactttgatcttagatttgatcttaaaatcactttgggactgggatcccttgctgattgacaaacagactttctgggaccttgatggagtggggaacaagcagtagagtgggactgggggagacccaggccccgggctgagcactgtgaggcctggatgtgaagactcagcccagcgaagctcattcccttacccccggccagtgctgctgcttcagtggaagagatgaagccaaaggacagaatgaaaatccctaccttcagagactctagcccagcccaacaccatctcttcctacctctcagccttctccctccccagggccacttgttgaagtctgagcactttatgtaaatttctaggtgtgagccgaaaaaaaaaaaaaaaaaaaaaaaaaaaaaaaaaaaaaaaaaaaaaaaaaaaaaaaaaaaaaaaaaaaaaaaaaaaaaaaaaaaaaaaaaaaaaaaaaaaaaaaaaaaaaaaagaaagaaacaaaagaagaaaagagcgaagagagacacaaggagcgacgacgactaagaagaccggcggaaagaacgacaacacagggccaacgagagaagacatcaggagaagagaaacagacaaaaggaggacgtgagaaacacaagcgaacgaagggaacgccgcgaagacgaaggaggcaggaagtgagagaccacgagagatgacagtgacagcagaagtggagagaaagaagagcgaacagagagagaaagcgaacgagacgaaagaagacaagcgacaaggagcgcaagaaaaagaagaagaaggagatagaggaaagaggtgtcagtgacgcgacagacgagacgagagggtaccatgacggagagggaagaagagtgagcagaagaaagcaaggagagagaaggagacagggagggaagaggaaaaagagaaaggagagggaaggagacagaacaagcaaggaaacgaaagaaggaaaggagaagacaagaaagagagagaaagagagagacagcgaaggagagagcgaagggaaagcagaaaggaagaagcgaagagaagacagagagaagaaaaaaagaacacgagcggaaa

SEQ ID NO: 43010 - DNA, 2696 bp, Homo sapiens
  misc_feature (1)..(1): n is a, c, g, or t
  misc_feature (4)..(4): n is a, c, g, or t
  misc_feature (10)..(10): n is a, c, g, or t
  misc_feature (12)..(13): n is a, c, g, or t
  misc_feature (15)..(15): n is a, c, g, or t
nganaacacntnncnggcaacaggaagccgagaggaaaccagcaagcggctgctgttctgtgttcccccatccagccagcaagttcagctccggcaagtcatttgattcacccggtgatgaaatgggggtcaaccagtctgtgggctttccacctgtcacaggaccccacctcgtaggctgtggggatgtgatggagggtcagaatctccaggggagcttctttcgactcttctacccctgccaaaaggcagaggagaccatggagcagcccctgtggattccccgctatgagtactgcactggcctggccgagtacctgcagtttaataagcgctgcgggggcttgctgttcaacctggcggtgggatcttgtcgcctgcctgttagctggaatggcccctttaagacaaaggactctggataccccttgatcatcttctcccatggcctaggagccttcaggactttgtattcagccttctgcatggagctggcctcacgtggctttgtggttgctgtgccagagcacagggaccggtcagcggcaaccacctatttctgcaagcaggccccagaagagaaccagcccaccaatgaatcgctgcaggaggaatggatccctttccgtcgagttgaggaaggggagaaggaatttcatgttcggaatccccaggtgcatcagcgggtaagcgagtgtttacgggtgttgaagatcctgcaagaggtcactgctgggcagactgtcttcaacatcttgcctggtggcttggatctgatgactttgaaggtgtgcggtggctctggatgcttggatgtttcctctggaacgtgacttttaccccaaggcccgaggacctgtgttctttatcaatactgagaaattccagacaatggagagtgtcaatttgatgaagaagatatgtgcccagcatgaacagtctaggatcataaccgttctacctgaaagaagactataatcaatggaacaaccttattgaaggcattggaccgtcgctcaccccaggggccccccaccatctgtccagcctgtaggcacaactggccatttgtaaagtcacttcagccaagttttcatttgggagctacccaagggcacccatgagctcctatcaagaagtgatcaacgtgaccccttttcacagattgaaaggtgtaatcacactgctgcttggataactgggtactttgatcttagatttgatcttaaaatcactttgggactgggatcccttgctgattgacaaacagactttctgggaccttgatggagtggggaacaagcagtagagtgggactgggggagacccaggccccgggctgagcactgtgaggcctggatgtgaagactcagcccagcgaagctcattcccttacccccggccagtgctgctgcttcagtggaagagatgaagccaaaggacagaatgaaaatccctaccttcagagactctagcccagcccaacaccatctcttcctacctctcagccttctccctccccagggccacttgttgaagtctgagcactttatgtaaatttctaggtgtgagccgtgatcacattttctatttatttccaagtcttctcattgtatggaacatagtactacttatacttacagtagtaagttatacttgtgagcccacagagtggcagacagcatggctctcacagcacagggagaaaaactgaggtacacagaggtacctcagaagctctggatgtctttgggggttttgctaagtgtatcttgataggaaacaacaaaagcaggttgagatggggaagatgacagaacaacagtgttaaatggccatttgcacaggcctttgccacaacagagaagtagtttggtcagctaaaactcagctgcagcctggacagtagagcgagaccccatcttaaaaataaagaaggctgggcgtggtggctcatgcctgtaatcccaacactttgggaggccaaggcaggcagatcattacagagcctggttttgagtcctggctccaccactgccaactgggtaaatttgagcaaatggtattctctttcttatctcagctcctgcgtttctaaaatgagggtctgcgttatgaatagttaggaggattaagtgagaggatgtataacccatgggttacttaaaagtatatttcctaccttccaaacatgagatttttctagttatagtttcttttctagcttgattgctttgtggtcagagaaaatgacccatatggtttccatccttcaaaatttgttgaaacttggttgttggcctagtatgagatcaatgttgtaaatgtgccatgtatgtttaaaaagactatatattctgaaaaaaaaaatggcttgctcttttactcaagaacacatcatagatttctgtcttttttttttgagatgcagtctcactctgtcacccagactggagtgcagtagcatgatctcggcttactgcaaccttcgcctcccagattcaagcaattctcctgtctcagccttctgagaagctgggactacaagtgcacgccaccacacccagctaatttttgtatttttttagtagagatggggtttcaccatattggtcaggctggtcgcaaactcctgacctcagatgatccacctgcctcggcctcccaaagggctgggattacaggcatgagccacc

SEQ ID NO: 43011 - DNA, 2242 bp, Homo sapiens
tgatgaatgactttctattttttctgatgagtgatagataatacaatctaaagtgactttagcaatgtgcttgacttttacttctctctctcaggggatggactatttgggttctcggcaatacgttcaccgggacttggcagcaagaaatgtccttgttgagagtgaacaccaagtgagtgtgcggtggctctggatgcttggatgtttcctctggaacgtgacttttaccccaaggcccgaggacctgtgttctttatcaatactgagaaattccagacaatggagagtgtcaatttgatgaagaagatatgtgcccagcatgaacagtctaggatcataaccgttcttggttctgttcatcggagtcaaactgactttgcttttgtgactggcaacttgattggtaaattcttctccactgaaacccgtgggagcctggacccctatgaagggcaggaggttatggtacgggccatgttggccttcctgcagaagcacctcgacctgaaagaagactataatcaatggaacaaccttattgaaggcattggaccgtcgctcaccccaggggccccccaccatctgtccagcctgtaggcacaactggccatttgtaaagtcacttcagccaagttttcatttgggagctacccaagggcacccatgagctcctatcaagaagtgatcaacgtgaccccttttcacagattgaaaggtgtaatcacactgctgcttggataactgggtactttgatcttagatttgatcttaaaatcactttgggactgggatcccttgctgattgacaaacagactttctgggaccttgatggagtggggaacaagcagtagagtgggactgggggagacccaggccccgggctgagcactgtgaggcctggatgtgaagactcagcccagcgaagctcattcccttacccccggccagtgctgctgcttcagtggaagagatgaagccaaaggacagaatgaaaatccctaccttcagagactctagcccagcccaacaccatctcttcctacctctcagccttctccctccccagggccacttgttgaagtctgagcactttatgtaaatttctaggtgtgagccgtgatcacattttctatttatttccaagtcttctcattgtatggaacatagtactacttatacttacagtagtaagttatacttgtgagcccacagagtggcagacagcatggctctcacagcacagggagaaaaactgaggtacacagaggtacctcagaagctctggatgtctttgggggttttgctaagtgtatcttgataggaaacaacaaaagcaggttgagatggggaagatgacagaacaacagtgttaaatggccatttgcacaggcctttgccacaacagagaagtagtttggtcagctaaaactcagctgcagcctggacagtagagcgagaccccatcttaaaaataaagaaggctgggcgtggtggctcatgcctgtaatcccaacactttgggaggccaaggcaggcagatcattacagagcctggttttgagtcctggctccaccactgccaactgggtaaatttgagcaaatggtattctctttcttatctcagctcctgcgtttctaaaatgagggtctgcgttatgaatagttaggaggattaagtgagaggatgtataacccatgggttacttaaaagtatatttcctaccttccaaacatgagatttttctagttatagtttcttttctagcttgattgctttgtggtcagagaaaatgacccatatggtttccatccttcaaaatttgttgaaacttggttgttggcctagtatgagatcaatgttgtaaatgtgccatgtatgtttaaaaagactatatattctgaaaaaaaaaatggcttgctcttttactcaagaacacatcatagatttctgtcttttttttttgagatgcagtctcactctgtcacccagactggagtgcagtagcatgatctcggcttactgcaaccttcgcctcccagattcaagcaattctcctgtctcagccttctgagaagctgggactacaagtgcacgccaccacacccagctaatttttgtatttttttagtagagatggggtttcaccatattggtcaggctggtcgcaaactcctgacctcagatgatccacctgcctcggcctcccaaagggctgggattacaggcatgagccacc

SEQ ID NO: 43012 - DNA, 1061 bp, Homo sapiens
agtagtggctttaaaaagactggatctcgaaaagatgtcacaagaacgcttccgaaacagacgttagagcttccaggggggagtatggttcaaagctatttgggggcatcaaactgaaactctcttctccactactcaagacttcgtgcctcagtccaagtaggtaagagcaaaagggaaatgcatctctacacaatggcccatggtcagggccaccagagcaagctgggcctagatctccacctgtcagtgactggccattctaagaggtgaaacagcagatcgttgaggctgtgagggaggatctttgaattcccatgagacatagcataagaagggtatcattaaagccctgggctctaaagttacagagcctggttttgagtcctggctccaccactgccaactgggtaaatttgagcaaatggtattctctttcttatctcagctcctgcgtttctaaaatgagggtctgcgttatgaatagttaggaggattaagtgagaggatgtataacccatgggttacttaaaagtatatttcctaccttccaaacatgagatttttctagttatagtttcttttctagcttgattgctttgtggtcagagaaaatgacccatatggtttccatccttcaaaatttgttgaaacttggttgttggcctagtatgagatcaatgttgtaaatgtgccatgtatgtttaaaaagactatatattctgaaaaaaaaaatggcttgctcttttactcaagaacacatcatagatttctgtcttttttttttgagatgcagtctcactctgtcacccagactggagtgcagtagcatgatctcggcttactgcaaccttcgcctcccagattcaagcaattctcctgtctcagccttctgagaagctgggactacaagtgcacgccaccacacccagctaatttttgtatttttttagtagagatggggtttcaccatattggtcaggctggtcgcaaactcctgacctcagatgatccacctgcctcggcctcccaaagggctgggattacaggcatgagccacc

SEQ ID NO: 43013 - DNA, 1837 bp, Homo sapiens
ctacctcgcgggtgccttctacctcgcgggtgcctggacccctatgaagggcaggaggttatggtacgggccatgttggccttcctgcagaagcacctcgacctgaaagaagactataatcaatggaacaaccttattgaaggcattggaccgtcgctcaccccaggggccccccaccatctgtccagcctgtaggcacaactggccatttgtaaagtcacttcagccaagttttcatttgggagctacccaagggcacccatgagctcctatcaagaagtgatcaacgtgaccccttttcacagattgaaaggtgtaatcacactgctgcttggataactgggtactttgatcttagatttgatcttaaaatcactttgggactgggatcccttgctgattgacaaacagactttctgggaccttgatggagtggggaacaagcagtagagtgggactgggggagacccaggccccgggctgagcactgtgaggcctggatgtgaagactcagcccagcgaagctcattcccttacccccggccagtgctgctgcttcagtggaagagatgaagccaaaggacagaatgaaaatccctaccttcagagactctagcccagcccaacaccatctcttcctacctctcagccttctccctccccagggccacttgttgaagtctgagcactttatgtaaatttctaggtgtgagccgtgatcacattttctatttatttccaagtcttctcattgtatggaacatagtactacttatacttacagtagtaagttatacttgtgagcccacagagtggcagacagcatggctctcacagcacagggagaaaaactgaggtacacagaggtacctcagaagctctggatgtctttgggggttttgctaagtgtatcttgataggaaacaacaaaagcaggttgagatggggaagatgacagaacaacagtgttaaatggccatttgcacaggcctttgccacaacagagaagtagtttggtcagctaaaactcagctgcagcctggacagtagagcgagaccccatcttaaaaataaagaaggctgggcgtggtggctcatgcctgtaatcccaacactttgggaggccaaggcaggcagatcattacagagcctggttttgagtcctggctccaccactgccaactgggtaaatttgagcaaatggtattctctttcttatctcagctcctgcgtttctaaaatgagggtctgcgttatgaatagttaggaggattaagtgagaggatgtataacccatgggttacttaaaagtatatttcctaccttccaaacatgagatttttctagttatagtttcttttctagcttgattgctttgtggtcagagaaaatgacccatatggtttccatccttcaaaatttgttgaaacttggttgttggcctagtatgagatcaatgttgtaaatgtgccatgtatgtttaaaaagactatatattctgaaaaaaaaaatggcttgctcttttactcaagaacacatcatagatttctgtcttttttttttgagatgcagtctcactctgtcacccagactggagtgcagtagcatgatctcggcttactgcaaccttcgcctcccagattcaagcaattctcctgtctcagccttctgagaagctgggactacaagtgcacgccaccacacccagctaatttttgtatttttttagtagagatggggtttcaccatattggtcaggctggtcgcaaactcctgacctcagatgatccacctgcctcggcctcccaaagggctgggattacaggcatgagccacc

SEQ ID NO: 43014 - DNA, 274 bp, Homo sapiens
acctgatctccctgtatcaattggaaattgggcaagttgtatttaacagaaaactcccaaataatagtgacttaaatatggtaatgtttatttctctctcaagtgaaaggaagccagaggtagacagttaaggttgatgtggtaattccacaagatggctgctagcagagcattgttggaatgagggtgaaggctgggctgttcttttgatcccttttccttgttcctttttgaatctccaggactttgtattcagccttctgcatggagctgg

SEQ ID NO: 43015 - DNA, 239 bp, Homo sapiens
gctgtgttcactcgagttgcctccacccctcccccaggagatggagccctggtagcaggaatccccattctcagacctcagatgccctctgcacctgggcactgagagcacagtcaaacagggctaagcagcttgtgccgcctggctttccccgggaacacctggcccactgtgtgccctagccctggacctgtctccgagtacatagacgtttcctgtgtgcctcctgccagggagta

SEQ ID NO: 43016 - DNA, 483 bp, Homo sapiens
gcaataggccacaccatatagcataggtgtgtagtaggctataccatgtaggttgggtaagtacactttgatgctcagaaaatggtgaaatcacctaaggatgcatttctcagaatgtatccttgttaagtgacacatgagtgtgcttatgtgtgtaaggtcaataaaaaatgtcacaggggctttatcaaaggcagcattattttatatggactatgggtcctattgaatatttttgtcctcttccttgcccaccacccacccccataaacattacccacattgcagccagggcaaacatttagaaattgaaatctgatttatgatcccttgttaagacatcccaataaaaggcttttcaggctgggattggtggctcatgcctgtaatcccagcactttgggagaatgaagcaggtgaattgcttgagcccagaagtttgagaccagcctgagcaacaaattgagacccccatcgctacca

SEQ ID NO: 43017 - DNA, 436 bp, Homo sapiens
catatgcatttgtacaggctgtttattctccctggaaagtacacagcccccgatacagctcgccctgcattttacccatcattgtaatgcgttcttagaagatacagtggaagttcactggtgtgacattattcatgaaccctgtcacctccagcctgggcaacaagaacaaaactccatctcaaaaaataaaaatcccaatcccaagtcgaaatcacctcttgttttaaacaagaatgaatcattactgtgtatgttagggtattaaaactgtttcaccagtacagtgaaagttgtttcaacattttaaacaaacagtggttatagactctttctttaaccattgtatattttcttccattcttgtcattggtcaataggggagggtagattagctgctccagaattcaataaagtgtaatatttctaacggtga

SEQ ID NO: 43018 - DNA, 575 bp, Homo sapiens
tggctgacacaatacctttttaaaaaataaaatagtgggatcttctggctatacttagtatttttatattccttgcatctgagtgagattaaatagtaatgccttaaggtaaggagtgatgtttcaacttttgctgtttctccttcaccagcctgggagctcccatcgaccatggcagtcctactttgacttgatcttggtggatgcacggaaaccactcttttttggagaaggcacagtactgcgtcaggtggatactaaaactggcaagctgaaaattggtacctacacagggcccctacagcatggtatcgtctactcaggaggtaagtcacagacttccctttatttaatgtctttgctcagacctcacagtgaaagctttggtaatctctcagcaaagtgccacatatactgtttagtagtctaagatgtcatctactgaaggtaaatagtttagtcacctcttaatgcaataggagtctgggtttgagcagttgttagtatatcctaatgaatctgattttcactaaaatgatcagttttttttttaaatcctattggaggctttttct

SEQ ID NO: 43019 - DNA, 526 bp, Homo sapiens
taattagccgtatctctcttttgaaattaagagttttggtcttaactgaaacagtcaaacaaacccactaattgaaaagagtaagtgccattcatttggctgtctggccaagtagcactggtggtggggggtgggatgggagggttgtggggtgaggggaggattgtgataggatgataaagtattacaaaatccatattcttcatacagaaaactggcaagctgaaaattggtacctacacagggcccctacagcatggtatcgtctactcaggaggtaagtcacagacttccctttatttaatgtctttgctcagacctcacagtgaaagctttggtaatctctcagcaaagtgccacatatactgtttagtagtctaagatgtcatctactgaaggtaaatagtttagtcacctcttaatgcaataggagtctgggtttgagcagttgttagtatatcctaatgaatctgattttcactaaaatgatcagttttttttttaaatcctattggaggctttttct

SEQ ID NO: 43020 - DNA, 613 bp, Homo sapiens
tgcggtggctcacgtctgtaatcccagcactttgggaggccaaggtgggcagatcacctgaggtcaagagtttgagaccagcctggccaacatggtgaaaccccatctctactaaaaatacaaaaattagctgagtgtggtggcacatgcctgtaatcccagctaattagggtggctgaggcaggagaatcgcttgaagctgggaggcagaggttgcagtgagccgcgatcacacccctgcactccagcctgagtgacagaatgagactgtcttaaagaataaaaaaaagctcttcccagagattttcactgagtttttcttttatctttaggcatcttgacagcagtagcaatgagcgtccagacatcagttccatccagagacgtattaagaaagtaactcatgacatggacatgtgctatgggatgatgggaagcctgtttcgcagtggctcccggcagaccctttttgccagtcaagtgatgcgttatgctgacctctatgcagcatctttcatcaacctgctgtattaccctttcagctacctcttcagggctgcccatgtcttgctcctgatccctcatgacatcaatcgttggaacacacacatcc

SEQ ID NO: 43021 - DNA, 4004 bp, Homo sapiens
gggcgcaggcagaatgccaagggatggagaccctcagaagggcaaagccggtgttccatcgtttgaagatctccagacccgcgggacagacagacgcagcgcggtcagggagcgtcggcttcgccgaactctgcggcggagctgggggacggaacagcgcgccggtccctggccgggcgcgagcagaggggcggcgcggggcggtgccgggcggcgggggcggggagggcgcgcgttgaggcggctgcggcagttgcgcgctgggattgttgcggtgcgctggagccgaatacaaaatacagttaaaataaaatgtcaacctcctggagtgatcggttacagaatgcagcagatatgcctgctaacatggataagcatgccctgaaaaagtatcgtcgagaagcctatcatcgggtgtttgtgaaccgaagtttagcaatggaaaagataaagtgttttggttttgatatggattatacccttgctgtgtacaagtccccagagtatgagtcccttggttttgagcttactgtggagagattagtttctattggctatccccaggagttgctcagctttgcttatgattctacattccctaccaggggacttgtctttgacacactgtatggaaatcttttgaaagtcgatgcctatggaaacctcttggtctgtgcacatggatttaactttataaggggaccagaaactagagaacagtatccaaataaatttatccagcgagatgatactgaaagattttacattctgaacacactattcaacctaccagagacctacctgttggcctgcctagtagatttttttactaattgtcccagatataccagttgtgaaacaggatttaaagatggggacctcttcatgtcctaccggagtatgttccaggatgtaagagatgctgttgactgggttcattacaagggctcccttaaggaaaagacagttgaaaatcttgagaagtatgtagtcaaagatggaaaactgcctttgcttctgagccggatgaaggaagtagggaaagtatttcttgctaccaacagtgactataaatatacagataaaattatgacttacctgtttgacttcccacatggccccaagcctgggagctcccatcgaccatggcagtcctactttgacttgatcttggtggatgcacggaaaccactcttttttggagaaggcacagtactgcgtcaggtggatactaaaactggcaagctgaaaattggtacctacacagggcccctacagcatggtatcgtctactcaggaggttcttctgatacgatctgtgacctgttgggagccaagggaaaagacattttgtatattggagatcacatttttggggacattttaaaatcaaagaaacggcaagggtggcgaacttttttggtgattcctgaactcgcacaggagctacatgtctggactgacaagagttcacttttcgaagaacttcagagcttggatattttcttggctgaactctacaagcatcttgacagcagtagcaatgagcgtccagacatcagttccatccagagacgtattaagaaagtaactcatgacatggacatgtgctatgggatgatgggaagcctgtttcgcagtggctcccggcagaccctttttgccagtcaagtgatgcgttatgctgacctctatgcagcatctttcatcaacctgctgtattaccctttcagctacctcttcagggctgcccatgtcttgatgcctcatgaatcaacggtggagcacacacacgtagatatcaatgagatggagtctcctcttgccacccggaaccgcacatcagtggatttcaaagacactgactacaagcggcaccagctgacacggtcaattagtgagattaaacctcccaacctcttcccactggccccccaggaaattacacactgccatgacgaagatgatgatgaagaggaggaggaggaggaagaataaggaggaaaaccaaaaccccaagcacccattaaacaagtcctggcaggactcacaggaacaaacgaggtccctgttagggttctactcgggggagggagggggctccatgaaaggtacgtctgaaaagtttctgaagattttattatcatagatacttgttttggttttgtgtatctgtactctctgcagatggtccaaaattgtaatggagtctgtattagaagaaaataagggtaaaatcaggctgaactgcatgtatatggctccactgtggcttgtgacacttttaaaatcatccgtatgtcagtgtatctggatacacgaggaaaaggaaagagtctcagagtggaacaaagagtgggaagaggtgatctgtaatgttacaaattgtgctattactccaaggtccaacttttccagtgcattacatggtattgtatatcagtggagaaatgtattatttccatgatcaaatgtagtctctgttaaggtcaagttttcttttataagcctttaattcatcctcagtgactctggcaaggctgcttctctatcactggctttgcacagaagtatgctctacttgcgttgctttagggcaggattctattttgagggaaaagacagtatccttattaccttttgtttgtttaatagcacaaatgcttatttgttatccaaaaacaacctccttcttatctgtgataaatctatagaaagaatttagctgcaagtggacaaaggaacaagcccccagaaaagaaagggaagaactgccttcttatactacagaacatgcattagtgtgggctatatagctgtggctcatgctacccaattccagatttctttgtcctctaagagttgattgctgtatattaaaattgaacatcagaggatgggaagagggctctgtaagccagaaccttactaaagtagagggcacaatcagtgtgaataaattcacttcagaatctcaagtcaaggccaggcacggcggctcacgcctgtaatcccagcactttgggaggccgagacaggcggatcacctgaggtcgggagttcgagaccagccttaccaacatggagaaaccccatctctactaaaaatacaaaattacctgggcgtggtggtgcatgcctgtaatcccatcatctactcaggaggctgaggcaggagaattgcttgaacccaggaggcggaggttgcagtgagccaggattgtgccattgcactccagcctgggcaacaagaacaaaactccatctcaaaaaataaaaatcccaatcccaagtcgaaatcacctcttgttttaaacaagaatgaatcattactgtgtatgttagggtattaaaactgtttcaccagtacagtgaaagttgtttcaacattttaaacaaacagtggttatagactctttctttaaccattgtatattttcttccattcttgtcattggtcaataggggagggtagattagctgctccagaattcaataaagtgtaatatttctaacggtgactttgacctattctgtagtacaactgtaatagctattggtcttcaagtgggtttagatttggtgacatcagtttgatattctcttaaaggaaataaatattcaagaactgattataaaaacaacaaaacaacaaaacaaaaaaaaaaaaaaaaaaaaaaaaagggggggggaaaaaaaaattccggggggggacaaatatacgcagcaccacaggttctttgaaaacacaaggcggccacccaataggaggagcgtattaaaaacagaaagacggagcgcgacattaaaacaacgaccgcagcagggaaactcttcgatgcgccatccggggagaagaccacaacctggggggggacacataggggccaccccacaagaacatacaccgcataggaccaaacaacaccgacgtatacggcgaagcaccgcacagcgctgcgggaacatccgtagcgataggtaaaattagggcgaaacaaagg

SEQ ID NO: 43022 - DNA, 4312 bp, Homo sapiens
gggcgcaggcagaatgccaagggatggagaccctcagaagggcaaagccggtgttccatcgtttgaagatctccagacccgcgggacagacagacgcagcgcggtcagggagcgtcggcttcgccgaactctgcggcggagctgggggacggaacagcgcgccggtccctggccgggcgcgagcagaggggcggcgcggggcggtgccgggcggcgggggcggggagggcgcgcgttgaggcggctgcggcagttgcgcgctgggattgttgcggtgcgctggagccgaatacaaaatacagttaaaataaaatgtcaacctcctggagtgatcggttacagaatgcagcagatatgcctgctaacatggataagcatgccctgaaaaagtatcgtcgagaagcctatcatcgggtgtttgtgaaccgaagtttagcaatggaaaagataaagtgttttggttttgatatggattatacccttgctgtgtacaagtccccagagtatgagtcccttggttttgagcttactgtggagagattagtttctattggctatccccaggagttgctcagctttgcttatgattctacattccctaccaggggacttgtctttgacacactgtatggaaatcttttgaaagtcgatgcctatggaaacctcttggtctgtgcacatggatttaactttataaggggaccagaaactagagaacagtatccaaataaatttatccagcgagatgatactgaaagattttacattctgaacacactattcaacctaccagagacctacctgttggcctgcctagtagatttttttactaattgtcccagatataccagttgtgaaacaggatttaaagatggggacctcttcatgtcctaccggagtatgttccaggatgtaagagatgctgttgactgggttcattacaagggctcccttaaggaaaagacagttgaaaatcttgagaagtatgtagtcaaagatggaaaactgcctttgcttctgagccggatgaaggaagtagggaaagtatttcttgctaccaacagtgactataaatatacagataaaattatgacttacctgtttgacttcccacatggccccaagcctgggagctcccatcgaccatggcagtcctactttgacttgatcttggtggatgcacggaaaccactcttttttggagaaggcacagtactgcgtcaggtggatactaaaactggcaagctgaaaattggtacctacacagggcccctacagcatggtatcgtctactcaggaggttcttctgatacgatctgtgacctgttgggagccaagggaaaagacattttgtatattggagatcacatttttggggacattttaaaatcaaagaaacggcaagggtggcgaacttttttggtgattcctgaactcgcacaggagctacatgtctggactgacaagagttcacttttcgaagaacttcagagcttggatattttcttggctgaactctacaagcatcttgacagcagtagcaatgagcgtccagacatcagttccatccagagacgtattaagaaagtaactcatgacatggacatgtgctatgggatgatgggaagcctgtttcgcagtggctcccggcagaccctttttgccagtcaagtgatgcgttatgctgacctctatgcagcatctttcatcaacctgctgtattaccctttcagctacctcttcagggctgcccatgtcttgatgcctcatgaatcaacggtggagcacacacacgtagatatcaatgagatggagtctcctcttgccacccggaaccgcacatcagtggatttcaaagacactgactacaagcggcaccagctgacacggtcaattagtgagattaaacctcccaacctcttcccactggccccccaggaaattacacactgccatgacgaagatgatgatgaagaggaggaggaggaggaagaataaggaggaaaaccaaaaccccaagcacccattaaacaagtcctggcaggactcacaggaacaaacgaggtccctgttagggttctactcgggggagggagggggctccatgaaaggtacgtctgaaaagtttctgaagattttattatcatagatacttgttttggttttgtgtatctgtactctctgcagatggtccaaaattgtaatggagtctgtattagaagaaaataagggtaaaatcaggctgaactgcatgtatatggctccactgtggcttgtgacacttttaaaatcatccgtatgtcagtgtatctggatacacgaggaaaaggaaagagtctcagagtggaacaaagagtgggaagaggtgatctgtaatgttacaaattgtgctattactccaaggtccaacttttccagtgcattacatggtattgtatatcagtggagaaatgtattatttccatgatcaaatgtagtctctgttaaggtcaagttttcttttataagcctttaattcatcctcagtgactctggcaaggctgcttctctatcactggctttgcacagaagtatgctctacttgcgttgctttagggcaggattctattttgagggaaaagacagtatccttattaccttttgtttgtttaatagcacaaatgcttatttgttatccaaaaacaacctccttcttatctgtgataaatctatagaaagaatttagctgcaagtggacaaaggaacaagcccccagaaaagaaagggaagaactgccttcttatactacagaacatgcattagtgtgggctatatagctgtggctcatgctacccaattccagatttctttgtcctctaagagttgattgctgtatattaaaattgaacatcagaggatgggaagagggctctgtaagccagaaccttactaaagtagagggcacaatcagtgtgaataaattcacttcagaatctcaagtcaaggccaggcacggcggctcacgcctgtaatcccagcactttgggaggccgagacaggcggatcacctgaggtcgggagttcgagaccagccttaccaacatggagaaaccccatctctactaaaaatacaaaattacctgggcgtggtggtgcatgcctgtaatcccatcatctactcaggaggctgaggcaggagaattgcttgaacccaggaggcggaggttgcagtgagccaggattgtgccattgcactccagcctgggcaacaagaacaaaactccatctcaaaaaataaaaatcccaatcccaagtcgaaatcacctcttgttttaaacaagaatgaatcattactgtgtatgttagggtattaaaactgtttcaccagtacagtgaaagttgtttcaacattttaaacaaacagtggttatagactctttctttaaccattgtatattttcttccattcttgtcattggtcaataggggagggtagattagctgctccagaattcaataaagtgtaatatttctaacggtgactttgacctattctgtagtacaactgtaatagctattggtcttcaagtgggtttagatttggtgacatcagtttgatattctcttaaaggaaataaatattcaagaactgattataaaaacaacaaaacaacaaaacaaaaaaaaaaaaaaaaaaaaaaaaggagaggagagaagagagagagaagcagaaacggcggggggcggcgctgctactactagacgatgtagaggggtcgggcgcggcgagctagtgatggggggagggcggcgggcgtaggagtgatgatggcccactacgcgagaggggggggggggagtagagcggagcgcggggcgggtgtctccaaacaagaaagagagacagagaggaagaacaggagaataagacgacagagagagagaactaaaagaagcaggatgggagcaatatgatagaggagggggaagaaggagggaggaccagtaacactagggaaggaaggaagagcaaaaggaggataatacaggaaagagacgacgggggagatagaagggaagcagagaggaggacggagggagtagaaggaggaagtaggaggagaaggggggagaccgaagaggggagcgaacgtgaagacggagggatgaagaggagaagaggagggcgaggaagggaggggggagaagaagaagagagaggggggcagagtcgaagaggggggagcagcaaagcgaacgaagcgagagaaagcagaggaaagcagcagagaggcacgaaaaggtaaaaaaagaaagaaaaaggaaaagaacg

SEQ ID NO: 43023 - DNA, 3665 bp, Homo sapiens
gggcgcaggcagaatgccaagggatggagaccctcagaagggcaaagccggtgttccatcgtttgaagatctccagacccgcgggacagacagacgcagcgcggtcagggagcgtcggcttcgccgaactctgcggcggagctgggggacggaacagcgcgccggtccctggccgggcgcgagcagaggggcggcgcggggcggtgccgggcggcgggggcggggagggcgcgcgttgaggcggctgcggcagttgcgcgctgggattgttgcggtgcgctggagccgagtttcgctctgctgcccaggctggagtacagtgatgtgatctcctgacgtcaagtgatccattcgcctcggcctcccaaagttctgggattacaagtgtgagccactgccactggctgaaaaagtcttattgtggcataattgaatacaaaatacagttaaaataaaatgtcaacctcctggagtgatcggttacagaatgcagcagatatgcctgctaacatggataagcatgccctgaaaaagtatcgtcgagaagcctatcatcgggtgtttgtgaaccgaagtttagcaatggaaaagataaagtgttttggttttgatatggattatacccttgctgtgtacaagtccccagagtatgagtcccttggttttgagcttactgtggagagattagtttctattggctatccccaggagttgctcagctttgcttatgattctacattccctaccaggggacttgtctttgacacactgtatggaaatcttttgaaagtcgatgcctatggaaacctcttggtctgtgcacatggatttaactttataaggggaccagaaactagagaacagtatccaaataaatttatccagcgagatgatactgaaagattttacattctgaacacactattcaacctaccagagacctacctgttggcctgcctagtagatttttttactaattgtcccagatataccagttgtgaaacaggatttaaagatggggacctcttcatgtcctaccggagtatgttccaggatgtaagagatgctgttgactgggttcattacaagggctcccttaaggaaaagacagttgaaaatcttgagaagtatgtagtcaaagatggaaaactgcctttgcttctgagccggatgaaggaagtagggaaagtatttcttgctaccaacagtgactataaatatacagataaaattatgacttacctgtttgacttcccacatggccccaagcctgggagctcccatcgaccatggcagtcctactttgacttgatcttggtggatgcacggaaaccactcttttttggagaaggcacagtactgcgtcaggtggatactaaaactggcaagctgaaaattggtacctacacagggcccctacagcatggtatcgtctactcaggaggttcttctgatacgatctgtgacctgttgggagccaagggaaaagacattttgtatattggagatcacatttttggggacattttaaaatcaaagaaacggcaagggtggcgaacttttttggtgattcctgaactcgcacaggagctacatgtctggactgacaagagttcacttttcgaagaacttcagagcttggatattttcttggctgaactctacaagcatcttgacagcagtagcaatgagcgtccagacatcagttccatccagagacgtattaagaaagtaactcatgacatggacatgtgctatgggatgatgggaagcctgtttcgcagtggctcccggcagaccctttttgccagtcaagtgatgcgttatgctgacctctatgcagcatctttcatcaacctgctgtattaccctttcagctacctcttcagggctgcccatgtcttgatgcctcatgaatcaacggtggagcacacacacgtagatatcaatgagatggagtctcctcttgccacccggaaccgcacatcagtggatttcaaagacactgactacaagcggcaccagctgacacggtcaattagtgagattaaacctcccaacctcttcccactggccccccaggaaattacacactgccatgacgaagatgatgatgaagaggaggaggaggaggaagaataaggaggaaaaccaaaaccccaagcacccattaaacaagtcctggcaggactcacaggaacaaacgaggtccctgttagggttctactcgggggagggagggggctccatgaaaggtacgtctgaaaagtttctgaagattttattatcatagatacttgttttggttttgtgtatctgtactctctgcagatggtccaaaattgtaatggagtctgtattagaagaaaataagggtaaaatcaggctgaactgcatgtatatggctccactgtggcttgtgacacttttaaaatcatccgtatgtcagtgtatctggatacacgaggaaaaggaaagagtctcagagtggaacaaagagtgggaagaggtgatctgtaatgttacaaattgtgctattactccaaggtccaacttttccagtgcattacatggtattgtatatcagtggagaaatgtattatttccatgatcaaatgtagtctctgttaaggtcaagttttcttttataagcctttaattcatcctcagtgactctggcaaggctgcttctctatcactggctttgcacagaagtatgctctacttgcgttgctttagggcaggattctattttgagggaaaagacagtatccttattaccttttgtttgtttaatagcacaaatgcttatttgttatccaaaaacaacctccttcttatctgtgataaatctatagaaagaatttagctgcaagtggacaaaggaacaagcccccagaaaagaaagggaagaactgccttcttatactacagaacatgcattagtgtgggctatatagctgtggctcatgctacccaattccagatttctttgtcctctaagagttgattgctgtatattaaaattgaacatcagaggatgggaagagggctctgtaagccagaaccttactaaagtagagggcacaatcagtgtgaataaattcacttcagaatctcaagtcaaggccaggcacggcggctcacgcctgtaatcccagcactttgggaggccgagacaggcggatcacctgaggtcgggagttcgagaccagccttaccaacatggagaaaccccatctctactaaaaatacaaaattacctgggcgtggtggtgcatgcctgtaatcccatcatctactcaggaggctgaggcaggagaattgcttgaacccaggaggcggaggttgcagtgagccaggattgtgccattgcactccagcctgggcaacaagaacaaaactccatctcaaaaaataaaaatcccaatcccaagtcgaaatcacctcttgttttaaacaagaatgaatcattactgtgtatgttagggtattaaaactgtttcaccagtacagtgaaagttgtttcaacattttaaacaaacagtggttatagactctttctttaaccattgtatattttcttccattcttgtcattggtcaataggggagggtagattagctgctccagaattcaataaagtgtaatatttctaacggtga

SEQ ID NO: 43024 - DNA, 3726 bp, Homo sapiens
gggcgcaggcagaatgccaagggatggagaccctcagaagggcaaagccggtgttccatcgtttgaagatctccagacccgcgggacagacagacgcagcgcggtcagggagcgtcggcttcgccgaactctgcggcggagctgggggacggaacagcgcgccggtccctggccgggcgcgagcagaggggcggcgcggggcggtgccgggcggcgggggcggggagggcgcgcgttgaggcggctgcggcagttgcgcgctgggattgttgcggtgcgctggagccgagtttcgctctgctgcccaggctggagtacagtgatgtgatctcctgacgtcaagtgatccattcgcctcggcctcccaaagttctgggattacaagtgtgagccactgccactggctgaaaaagtcttattgtggcataattgaatacaaaatacagttaaaataaaatgtcaacctcctggagtgatcggttacagaatgcagcagatatgcctgctaacatggataagcatgccctgaaaaagtatcgtcgagaagcctatcatcgggtgtttgtgaaccgaagtttagcaatggaaaagataaagtgttttggttttgatatggattatacccttgctggagagccagtgtaactccttcaagactggagtgacacacactgcatctgcatctgcctcattgtacaagtccccagagtatgagtcccttggttttgagcttactgtggagagattagtttctattggctatccccaggagttgctcagctttgcttatgattctacattccctaccaggggacttgtctttgacacactgtatggaaatcttttgaaagtcgatgcctatggaaacctcttggtctgtgcacatggatttaactttataaggggaccagaaactagagaacagtatccaaataaatttatccagcgagatgatactgaaagattttacattctgaacacactattcaacctaccagagacctacctgttggcctgcctagtagatttttttactaattgtcccagatataccagttgtgaaacaggatttaaagatggggacctcttcatgtcctaccggagtatgttccaggatgtaagagatgctgttgactgggttcattacaagggctcccttaaggaaaagacagttgaaaatcttgagaagtatgtagtcaaagatggaaaactgcctttgcttctgagccggatgaaggaagtagggaaagtatttcttgctaccaacagtgactataaatatacagataaaattatgacttacctgtttgacttcccacatggccccaagcctgggagctcccatcgaccatggcagtcctactttgacttgatcttggtggatgcacggaaaccactcttttttggagaaggcacagtactgcgtcaggtggatactaaaactggcaagctgaaaattggtacctacacagggcccctacagcatggtatcgtctactcaggaggttcttctgatacgatctgtgacctgttgggagccaagggaaaagacattttgtatattggagatcacatttttggggacattttaaaatcaaagaaacggcaagggtggcgaacttttttggtgattcctgaactcgcacaggagctacatgtctggactgacaagagttcacttttcgaagaacttcagagcttggatattttcttggctgaactctacaagcatcttgacagcagtagcaatgagcgtccagacatcagttccatccagagacgtattaagaaagtaactcatgacatggacatgtgctatgggatgatgggaagcctgtttcgcagtggctcccggcagaccctttttgccagtcaagtgatgcgttatgctgacctctatgcagcatctttcatcaacctgctgtattaccctttcagctacctcttcagggctgcccatgtcttgatgcctcatgaatcaacggtggagcacacacacgtagatatcaatgagatggagtctcctcttgccacccggaaccgcacatcagtggatttcaaagacactgactacaagcggcaccagctgacacggtcaattagtgagattaaacctcccaacctcttcccactggccccccaggaaattacacactgccatgacgaagatgatgatgaagaggaggaggaggaggaagaataaggaggaaaaccaaaaccccaagcacccattaaacaagtcctggcaggactcacaggaacaaacgaggtccctgttagggttctactcgggggagggagggggctccatgaaaggtacgtctgaaaagtttctgaagattttattatcatagatacttgttttggttttgtgtatctgtactctctgcagatggtccaaaattgtaatggagtctgtattagaagaaaataagggtaaaatcaggctgaactgcatgtatatggctccactgtggcttgtgacacttttaaaatcatccgtatgtcagtgtatctggatacacgaggaaaaggaaagagtctcagagtggaacaaagagtgggaagaggtgatctgtaatgttacaaattgtgctattactccaaggtccaacttttccagtgcattacatggtattgtatatcagtggagaaatgtattatttccatgatcaaatgtagtctctgttaaggtcaagttttcttttataagcctttaattcatcctcagtgactctggcaaggctgcttctctatcactggctttgcacagaagtatgctctacttgcgttgctttagggcaggattctattttgagggaaaagacagtatccttattaccttttgtttgtttaatagcacaaatgcttatttgttatccaaaaacaacctccttcttatctgtgataaatctatagaaagaatttagctgcaagtggacaaaggaacaagcccccagaaaagaaagggaagaactgccttcttatactacagaacatgcattagtgtgggctatatagctgtggctcatgctacccaattccagatttctttgtcctctaagagttgattgctgtatattaaaattgaacatcagaggatgggaagagggctctgtaagccagaaccttactaaagtagagggcacaatcagtgtgaataaattcacttcagaatctcaagtcaaggccaggcacggcggctcacgcctgtaatcccagcactttgggaggccgagacaggcggatcacctgaggtcgggagttcgagaccagccttaccaacatggagaaaccccatctctactaaaaatacaaaattacctgggcgtggtggtgcatgcctgtaatcccatcatctactcaggaggctgaggcaggagaattgcttgaacccaggaggcggaggttgcagtgagccaggattgtgccattgcactccagcctgggcaacaagaacaaaactccatctcaaaaaataaaaatcccaatcccaagtcgaaatcacctcttgttttaaacaagaatgaatcattactgtgtatgttagggtattaaaactgtttcaccagtacagtgaaagttgtttcaacattttaaacaaacagtggttatagactctttctttaaccattgtatattttcttccattcttgtcattggtcaataggggagggtagattagctgctccagaattcaataaagtgtaatatttctaacggtga

SEQ ID NO: 43025 - DNA, 3287 bp, Homo sapiens
tcggacgagggatgtgcgtgcgctggagccgagtttcgctctgctgcccaggctggagtacagtgatgtgatctcctgacgtcaagtgatccattcgcctcggcctcccaaagttctgggattacaagtaatacaaaatacagttaaaataaaatgtcaacctcctggagtgatcggttacagaatgcagcagatatgcctgctaacatggataagcatgccctgaaaaagtatcgtcgagaagcctatcatcgggtgtttgtgaaccgaagtttagcaatggaaaagataaagtgttttggttttgatatggattatacccttgctgtgtacaagtccccagagtatgagtcccttggttttgagcttactgtggagagattagtttctattggctatccccaggagttgctcagctttgcttatgattctacattccctaccaggggacttgtctttgacacactgtatggaaatcttttgaaagtcgatgcctatggaaacctcttggtctgtgcacatggatttaactttataaggggaccagaaactagagaacagtatccaaataaatttatccagcgagatgatactgaaagattttacattctgaacacactattcaacctaccagagacctacctgttggcctgcctagtagatttttttactaattgtcccagatataccagttgtgaaacaggatttaaagatggggacctcttcatgtcctaccggagtatgttccaggatgtaagagatgctgttgactgggttcattacaagggctcccttaaggaaaagacagttgaaaatcttgagaagtatgtagtcaaagatggaaaactgcctttgcttctgagccggatgaaggaagtagggaaagtatttcttgctaccaacagtgactataaatatacagattttgacttgatcttggtggatgcacggaaaccactcttttttggagaaggcacagtactgcgtcaggtggatactaaaactggcaagctgaaaattggtacctacacagggcccctacagcatggtatcgtctactcaggaggttcttctgatacgatctgtgacctgttgggagccaagggaaaagacattttgtatattggagatcacatttttggggacattttaaaatcaaagaaacggcaagggtggcgaacttttttggtgattcctgaactcgcacaggagctacatgtctggactgacaagagttcacttttcgaagaacttcagagcttggatattttcttggctgaactctacaagcatcttgacagcagtagcaatgagcgtccagacatcagttccatccagagacgtattaagaaagtaactcatgacatggacatgtgctatgggatgatgggaagcctgtttcgcagtggctcccggcagaccctttttgccagtcaagtgatgcgttatgctgacctctatgcagcatctttcatcaacctgctgtattaccctttcagctacctcttcagggctgcccatgtcttgatgcctcatgaatcaacggtggagcacacacacgtagatatcaatgagatggagtctcctcttgccacccggaaccgcacatcagtggatttcaaagacactgactacaagcggcaccagctgacacggtcaattagtgagattaaacctcccaacctcttcccactggccccccaggaaattacacactgccatgacgaagatgatgatgaagaggaggaggaggaggaagaataaggaggaaaaccaaaaccccaagcacccattaaacaagtcctggcaggactcacaggaacaaacgaggtccctgttagggttctactcgggggagggagggggctccatgaaaggtacgtctgaaaagtttctgaagattttattatcatagatacttgttttggttttgtgtatctgtactctctgcagatggtccaaaattgtaatggagtctgtattagaagaaaataagggtaaaatcaggctgaactgcatgtatatggctccactgtggcttgtgacacttttaaaatcatccgtatgtcagtgtatctggatacacgaggaaaaggaaagagtctcagagtggaacaaagagtgggaagaggtgatctgtaatgttacaaattgtgctattactccaaggtccaacttttccagtgcattacatggtattgtatatcagtggagaaatgtattatttccatgatcaaatgtagtctctgttaaggtcaagttttcttttataagcctttaattcatcctcagtgactctggcaaggctgcttctctatcactggctttgcacagaagtatgctctacttgcgttgctttagggcaggattctattttgagggaaaagacagtatccttattaccttttgtttgtttaatagcacaaatgcttatttgttatccaaaaacaacctccttcttatctgtgataaatctatagaaagaatttagctgcaagtggacaaaggaacaagcccccagaaaagaaagggaagaactgccttcttatactacagaacatgcattagtgtgggctatatagctgtggctcatgctacccaattccagatttctttgtcctctaagagttgattgctgtatattaaaattgaacatcagaggatgggaagagggctctgtaagccagaaccttactaaagtagagggcacaatcagtgtgaataaattcacttcagaatctcaagtcaaggccaggcacggcggctcacgcctgtaatcccagcactttgggaggccgagacaggcggatcacctgaggtcgggagttcgagaccagccttaccaacatggagaaaccccatctctactaaaaatacaaaattacctgggcgtggtggtgcatgcctgtaatcccatcatctactcaggaggctgaggcaggagaattgcttgaacccaggaggcggaggttgcagtgagccaggattgtgccattgcactccagcctgggcaacaagaacaaaactccatctcaaaaaataaaaatcccaatcccaagtcgaaatcacctcttgttttaaacaagaatgaatcattactgtgtatgttagggtattaaaactgtttcaccagtacagtgaaagttgtttcaacattttaaacaaacagtggttatagactctttctttaaccattgtatattttcttccattcttgtcattggtcaataggggagggtagattagctgctccagaattcaataaagtgtaatatttctaacggtga

SEQ ID NO: 43026 - DNA, 3545 bp, Homo sapiens
gggcgcaggcagaatgccaagggatggagaccctcagaagggcaaagccggtgttccatcgtttgaagatctccagacccgcgggacagacagacgcagcgcggtcagggagcgtcggcttcgccgaactctgcggcggagctgggggacggaacagcgcgccggtccctggccgggcgcgagcagaggggcggcgcggggcggtgccgggcggcgggggcggggagggcgcgcgttgaggcggctgcggcagttgcgcgctgggattgttgcggtgcgctggagccgaatacaaaatacagttaaaataaaatgtcaacctcctggagtgatcggttacagaatgcagcagatatgcctgctaacatggataagcatgccctgaaaaagtatcgtcgagaagcctatcatcgggtgtttgtgaaccgaagtttagcaatggaaaagataaagtgttttggttttgatatggattatacccttgctgtgtacaagtccccagagtatgagtcccttggttttgagcttactgtggagagattagtttctattggctatccccaggagttgctcagctttgcttatgattctacattccctaccaggggacttgtctttgacacactgtatggaaatcttttgaaagtcgatgcctatggaaacctcttggtctgtgcacatggatttaactttataaggggttctcaggtagctgttcagaagagaccagaaactagagaacagtatccaaataaatttatccagcgagatgatactgaaagattttacattctgaacacactattcaacctaccagagacctacctgttggcctgcctagtagatttttttactaattgtcccagatataccagttgtgaaacaggatttaaagatggggacctcttcatgtcctaccggagtatgttccaggatgtaagagatgctgttgactgggttcattacaagggctcccttaaggaaaagacagttgaaaatcttgagaagtatgtagtcaaagatggaaaactgcctttgcttctgagccggatgaaggaagtagggaaagtatttcttgctaccaacagtgactataaatatacagataaaattatgacttacctgtttgacttcccacatggccccaagcctgggagctcccatcgaccatggcagtcctactttgacttgatcttggtggatgcacggaaaccactcttttttggagaaggcacagtactgcgtcaggtggatactaaaactggcaagctgaaaattggtacctacacagggcccctacagcatggtatcgtctactcaggaggttcttctgatacgatctgtgacctgttgggagccaagggaaaagacattttgtatattggagatcacatttttggggacattttaaaatcaaagaaacggcaagggtggcgaacttttttggtgattcctgaactcgcacaggagctacatgtctggactgacaagagttcacttttcgaagaacttcagagcttggatattttcttggctgaactctacaagcatcttgacagcagtagcaatgagcgtccagacatcagttccatccagagacgtattaagaaagtaactcatgacatggacatgtgctatgggatgatgggaagcctgtttcgcagtggctcccggcagaccctttttgccagtcaagtgatgcgttatgctgacctctatgcagcatctttcatcaacctgctgtattaccctttcagctacctcttcagggctgcccatgtcttgatgcctcatgaatcaacggtggagcacacacacgtagatatcaatgagatggagtctcctcttgccacccggaaccgcacatcagtggatttcaaagacactgactacaagcggcaccagctgacacggtcaattagtgagattaaacctcccaacctcttcccactggccccccaggaaattacacactgccatgacgaagatgatgatgaagaggaggaggaggaggaagaataaggaggaaaaccaaaaccccaagcacccattaaacaagtcctggcaggactcacaggaacaaacgaggtccctgttagggttctactcgggggagggagggggctccatgaaaggtacgtctgaaaagtttctgaagattttattatcatagatacttgttttggttttgtgtatctgtactctctgcagatggtccaaaattgtaatggagtctgtattagaagaaaataagggtaaaatcaggctgaactgcatgtatatggctccactgtggcttgtgacacttttaaaatcatccgtatgtcagtgtatctggatacacgaggaaaaggaaagagtctcagagtggaacaaagagtgggaagaggtgatctgtaatgttacaaattgtgctattactccaaggtccaacttttccagtgcattacatggtattgtatatcagtggagaaatgtattatttccatgatcaaatgtagtctctgttaaggtcaagttttcttttataagcctttaattcatcctcagtgactctggcaaggctgcttctctatcactggctttgcacagaagtatgctctacttgcgttgctttagggcaggattctattttgagggaaaagacagtatccttattaccttttgtttgtttaatagcacaaatgcttatttgttatccaaaaacaacctccttcttatctgtgataaatctatagaaagaatttagctgcaagtggacaaaggaacaagcccccagaaaagaaagggaagaactgccttcttatactacagaacatgcattagtgtgggctatatagctgtggctcatgctacccaattccagatttctttgtcctctaagagttgattgctgtatattaaaattgaacatcagaggatgggaagagggctctgtaagccagaaccttactaaagtagagggcacaatcagtgtgaataaattcacttcagaatctcaagtcaaggccaggcacggcggctcacgcctgtaatcccagcactttgggaggccgagacaggcggatcacctgaggtcgggagttcgagaccagccttaccaacatggagaaaccccatctctactaaaaatacaaaattacctgggcgtggtggtgcatgcctgtaatcccatcatctactcaggaggctgaggcaggagaattgcttgaacccaggaggcggaggttgcagtgagccaggattgtgccattgcactccagcctgggcaacaagaacaaaactccatctcaaaaaataaaaatcccaatcccaagtcgaaatcacctcttgttttaaacaagaatgaatcattactgtgtatgttagggtattaaaactgtttcaccagtacagtgaaagttgtttcaacattttaaacaaacagtggttatagactctttctttaaccattgtatattttcttccattcttgtcattggtcaataggggagggtagattagctgctccagaattcaataaagtgtaatatttctaacggtga

SEQ ID NO: 43027 - DNA, 3056 bp, Homo sapiens
gcacgagggggctcattaggggtgtacaagtccccagagtatgagtcccttggttttgagcttactgtggagagattagtttctattggctatccccaggagttgctcagctttgcttatgattctacattccctaccaggggacttgtctttgacacactgtatggaaatcttttgaaagtcgatgcctatggaaacctcttggtctgtgcacatggatttaactttataaggggaccagaaactagagaacagtatccaaataaatttatccagcgagatgatactgaaagattttacattctgaacacactattcaacctaccagagacctacctgttggcctgcctagtagatttttttactaattgtcccagatataccagttgtgaaacaggatttaaagatggggacctcttcatgtcctaccggagtatgttccaggatgtaagagatgctgttgactgggttcattacaagggctcccttaaggaaaagacagttgaaaatcttgagaagtatgtagtcaaagatggaaaactgcctttgcttctgagccggatgaaggaagtagggaaagtatttcttgctaccaacagtgactataaatatacagataaaattatgacttacctgtttgacttcccacatggccccaagcctgggagctcccatcgaccatggcagtcctactttgacttgatcttggtggatgcacggaaaccactcttttttggagaaggcacagtactgcgtcaggtggatactaaaactggcaagctgaaaattggtacctacacagggcccctacagcatggtatcgtctactcaggaggttcttctgatacgatctgtgacctgttgggagccaagggaaaagacattttgtatattggagatcacatttttggggacattttaaaatcaaagaaacggcaagggtggcgaacttttttggtgattcctgaactcgcacaggagctacatgtctggactgacaagagttcacttttcgaagaacttcagagcttggatattttcttggctgaactctacaagcatcttgacagcagtagcaatgagcgtccagacatcagttccatccagagacgtattaagaaagtaactcatgacatggacatgtgctatgggatgatgggaagcctgtttcgcagtggctcccggcagaccctttttgccagtcaagtgatgcgttatgctgacctctatgcagcatctttcatcaacctgctgtattaccctttcagctacctcttcagggctgcccatgtcttgatgcctcatgaatcaacggtggagcacacacacgtagatatcaatgagatggagtctcctcttgccacccggaaccgcacatcagtggatttcaaagacactgactacaagcggcaccagctgacacggtcaattagtgagattaaacctcccaacctcttcccactggccccccaggaaattacacactgccatgacgaagatgatgatgaagaggaggaggaggaggaagaataaggaggaaaaccaaaaccccaagcacccattaaacaagtcctggcaggactcacaggaacaaacgaggtccctgttagggttctactcgggggagggagggggctccatgaaaggtacgtctgaaaagtttctgaagattttattatcatagatacttgttttggttttgtgtatctgtactctctgcagatggtccaaaattgtaatggagtctgtattagaagaaaataagggtaaaatcaggctgaactgcatgtatatggctccactgtggcttgtgacacttttaaaatcatccgtatgtcagtgtatctggatacacgaggaaaaggaaagagtctcagagtggaacaaagagtgggaagaggtgatctgtaatgttacaaattgtgctattactccaaggtccaacttttccagtgcattacatggtattgtatatcagtggagaaatgtattatttccatgatcaaatgtagtctctgttaaggtcaagttttcttttataagcctttaattcatcctcagtgactctggcaaggctgcttctctatcactggctttgcacagaagtatgctctacttgcgttgctttagggcaggattctattttgagggaaaagacagtatccttattaccttttgtttgtttaatagcacaaatgcttatttgttatccaaaaacaacctccttcttatctgtgataaatctatagaaagaatttagctgcaagtggacaaaggaacaagcccccagaaaagaaagggaagaactgccttcttatactacagaacatgcattagtgtgggctatatagctgtggctcatgctacccaattccagatttctttgtcctctaagagttgattgctgtatattaaaattgaacatcagaggatgggaagagggctctgtaagccagaaccttactaaagtagagggcacaatcagtgtgaataaattcacttcagaatctcaagtcaaggccaggcacggcggctcacgcctgtaatcccagcactttgggaggccgagacaggcggatcacctgaggtcgggagttcgagaccagccttaccaacatggagaaaccccatctctactaaaaatacaaaattacctgggcgtggtggtgcatgcctgtaatcccatcatctactcaggaggctgaggcaggagaattgcttgaacccaggaggcggaggttgcagtgagccaggattgtgccattgcactccagcctgggcaacaagaacaaaactccatctcaaaaaataaaaatcccaatcccaagtcgaaatcacctcttgttttaaacaagaatgaatcattactgtgtatgttagggtattaaaactgtttcaccagtacagtgaaagttgtttcaacattttaaacaaacagtggttatagactctttctttaaccattgtatattttcttccattcttgtcattggtcaataggggagggtagattagctgctccagaattcaataaagtgtaatatttctaacggtga

SEQ ID NO: 43028 - DNA, 3508 bp, Homo sapiens
gggcgcaggcagaatgccaagggatggagaccctcagaagggcaaagccggtgttccatcgtttgaagatctccagacccgcgggacagacagacgcagcgcggtcagggagcgtcggcttcgccgaactctgcggcggagctgggggacggaacagcgcgccggtccctggccgggcgcgagcagaggggcggcgcggggcggtgccgggcggcgggggcggggagggcgcgcgttgaggcggctgcggcagttgcgcgctgggattgttgcggtgcgctggagccgaatacaaaatacagttaaaataaaatgtcaacctcctggagtgatcggttacagaatgcagcagatatgcctgctaacatggataagcatgccctgaaaaagtatcgtcgagaagcctatcatcggagagccagtgtaactccttcaagactggagtgacacacactgcatctgcatctgcctcattgtacaagtccccagagtatgagtcccttggttttgagcttactgtggagagattagtttctattggctatccccaggagttgctcagctttgcttatgattctacattccctaccaggggacttgtctttgacacactgtatggaaatcttttgaaagtcgatgcctatggaaacctcttggtctgtgcacatggatttaactttataaggggaccagaaactagagaacagtatccaaataaatttatccagcgagatgatactgaaagattttacattctgaacacactattcaacctaccagagacctacctgttggcctgcctagtagatttttttactaattgtcccagatataccagttgtgaaacaggatttaaagatggggacctcttcatgtcctaccggagtatgttccaggatgtaagagatgctgttgactgggttcattacaagggctcccttaaggaaaagacagttgaaaatcttgagaagtatgtagtcaaagatggaaaactgcctttgcttctgagccggatgaaggaagtagggaaagtatttcttgctaccaacagtgactataaatatacagataaaattatgacttacctgtttgacttcccacatggccccaagcctgggagctcccatcgaccatggcagtcctactttgacttgatcttggtggatgcacggaaaccactcttttttggagaaggcacagtactgcgtcaggtggatactaaaactggcaagctgaaaattggtacctacacagggcccctacagcatggtatcgtctactcaggaggttcttctgatacgatctgtgacctgttgggagccaagggaaaagacattttgtatattggagatcacatttttggggacattttaaaatcaaagaaacggcaagggtggcgaacttttttggtgattcctgaactcgcacaggagctacatgtctggactgacaagagttcacttttcgaagaacttcagagcttggatattttcttggctgaactctacaagcatcttgacagcagtagcaatgagcgtccagacatcagttccatccagagacgtattaagaaagtaactcatgacatggacatgtgctatgggatgatgggaagcctgtttcgcagtggctcccggcagaccctttttgccagtcaagtgatgcgttatgctgacctctatgcagcatctttcatcaacctgctgtattaccctttcagctacctcttcagggctgcccatgtcttgatgcctcatgaatcaacggtggagcacacacacgtagatatcaatgagatggagtctcctcttgccacccggaaccgcacatcagtggatttcaaagacactgactacaagcggcaccagctgacacggtcaattagtgagattaaacctcccaacctcttcccactggccccccaggaaattacacactgccatgacgaagatgatgatgaagaggaggaggaggaggaagaataaggaggaaaaccaaaaccccaagcacccattaaacaagtcctggcaggactcacaggaacaaacgaggtccctgttagggttctactcgggggagggagggggctccatgaaaggtacgtctgaaaagtttctgaagattttattatcatagatacttgttttggttttgtgtatctgtactctctgcagatggtccaaaattgtaatggagtctgtattagaagaaaataagggtaaaatcaggctgaactgcatgtatatggctccactgtggcttgtgacacttttaaaatcatccgtatgtcagtgtatctggatacacgaggaaaaggaaagagtctcagagtggaacaaagagtgggaagaggtgatctgtaatgttacaaattgtgctattactccaaggtccaacttttccagtgcattacatggtattgtatatcagtggagaaatgtattatttccatgatcaaatgtagtctctgttaaggtcaagttttcttttataagcctttaattcatcctcagtgactctggcaaggctgcttctctatcactggctttgcacagaagtatgctctacttgcgttgctttagggcaggattctattttgagggaaaagacagtatccttattaccttttgtttgtttaatagcacaaatgcttatttgttatccaaaaacaacctccttcttatctgtgataaatctatagaaagaatttagctgcaagtggacaaaggaacaagcccccagaaaagaaagggaagaactgccttcttatactacagaacatgcattagtgtgggctatatagctgtggctcatgctacccaattccagatttctttgtcctctaagagttgattgctgtatattaaaattgaacatcagaggatgggaagagggctctgtaagccagaaccttactaaagtagagggcacaatcagtgtgaataaattcacttcagaatctcaagtcaaggccaggcacggcggctcacgcctgtaatcccagcactttgggaggccgagacaggcggatcacctgaggtcgggagttcgagaccagccttaccaacatggagaaaccccatctctactaaaaatacaaaattacctgggcgtggtggtgcatgcctgtaatcccatcatctactcaggaggctgaggcaggagaattgcttgaacccaggaggcggaggttgcagtgagccaggattgtgccattgcactccagcctgggcaacaagaacaaaactccatctcaaaaaataaaaatcccaatcccaagtcgaaatcacctcttgttttaaacaagaatgaatcattactgtgtatgttagggtattaaaactgtttcaccagtacagtgaaagttgtttcaacattttaaacaaacagtggttatagactctttctttaaccattgtatattttcttccattcttgtcattggtcaataggggagggtagattagctgctccagaattcaataaagtgtaatatttctaacggtga

SEQ ID NO: 43029 - DNA, 3392 bp, Homo sapiens
cacaactggtccacctagcctttaaggcccagctcatataccagcacgtgcatgaatccttcctagattttcctctccttagtcctcacatttgcttctctctacctcttaagttgaaatggtgttcccttctttggttttctcataaatgtttgcacctttcttgtagtagttgtgattttttaccttataattatatgtgtatgtgacccacctcgcccaccacactgacaactcttttaagagctggaacctaagctggacatcacacctgtaatcccagctacttgggaggctgaggtgggaagattgcttgagcaatcttcaggagtttgagtccagcctggacttaaaatagcaagactgtcttaaaaaaaaaaaaaattaaaattaaaaaaaataaagagctggaacctgaactcgttcatcttcatagctatccatgcgtaatattcggaattctgtcttgcacatagccatcaaaatatttgagttaatttttgaataatgctatttcccaattattataatgttattttaaaaatcagttaatttttaaatttttctttcagaccagaaactagagaacagtatccaaataaatttatccagcgagatgatactgaaagattttacattctgaacacactattcaacctaccagagacctacctgttggcctgcctagtagatttttttactaattgtcccagatataccagttgtgaaacaggatttaaagatggggacctcttcatgtcctaccggagtatgttccaggatgtaagagatgctgttgactgggttcattacaagggctcccttaaggaaaagacagttgaaaatcttgagaagtatgtagtcaaagatggaaaactgcctttgcttctgagccggatgaaggaagtagggaaagtatttcttgctaccaacagtgactataaatatacagataaaattatgacttacctgtttgacttcccacatggccccaagcctgggagctcccatcgaccatggcagtcctactttgacttgatcttggtggatgcacggaaaccactcttttttggagaaggcacagtactgcgtcaggtggatactaaaactggcaagctgaaaattggtacctacacagggcccctacagcatggtatcgtctactcaggaggttcttctgatacgatctgtgacctgttgggagccaagggaaaagacattttgtatattggagatcacatttttggggacattttaaaatcaaagaaacggcaagggtggcgaacttttttggtgattcctgaactcgcacaggagctacatgtctggactgacaagagttcacttttcgaagaacttcagagcttggatattttcttggctgaactctacaagcatcttgacagcagtagcaatgagcgtccagacatcagttccatccagagacgtattaagaaagtaactcatgacatggacatgtgctatgggatgatgggaagcctgtttcgcagtggctcccggcagaccctttttgccagtcaagtgatgcgttatgctgacctctatgcagcatctttcatcaacctgctgtattaccctttcagctacctcttcagggctgcccatgtcttgatgcctcatgaatcaacggtggagcacacacacgtagatatcaatgagatggagtctcctcttgccacccggaaccgcacatcagtggatttcaaagacactgactacaagcggcaccagctgacacggtcaattagtgagattaaacctcccaacctcttcccactggccccccaggaaattacacactgccatgacgaagatgatgatgaagaggaggaggaggaggaagaataaggaggaaaaccaaaaccccaagcacccattaaacaagtcctggcaggactcacaggaacaaacgaggtccctgttagggttctactcgggggagggagggggctccatgaaaggtacgtctgaaaagtttctgaagattttattatcatagatacttgttttggttttgtgtatctgtactctctgcagatggtccaaaattgtaatggagtctgtattagaagaaaataagggtaaaatcaggctgaactgcatgtatatggctccactgtggcttgtgacacttttaaaatcatccgtatgtcagtgtatctggatacacgaggaaaaggaaagagtctcagagtggaacaaagagtgggaagaggtgatctgtaatgttacaaattgtgctattactccaaggtccaacttttccagtgcattacatggtattgtatatcagtggagaaatgtattatttccatgatcaaatgtagtctctgttaaggtcaagttttcttttataagcctttaattcatcctcagtgactctggcaaggctgcttctctatcactggctttgcacagaagtatgctctacttgcgttgctttagggcaggattctattttgagggaaaagacagtatccttattaccttttgtttgtttaatagcacaaatgcttatttgttatccaaaaacaacctccttcttatctgtgataaatctatagaaagaatttagctgcaagtggacaaaggaacaagcccccagaaaagaaagggaagaactgccttcttatactacagaacatgcattagtgtgggctatatagctgtggctcatgctacccaattccagatttctttgtcctctaagagttgattgctgtatattaaaattgaacatcagaggatgggaagagggctctgtaagccagaaccttactaaagtagagggcacaatcagtgtgaataaattcacttcagaatctcaagtcaaggccaggcacggcggctcacgcctgtaatcccagcactttgggaggccgagacaggcggatcacctgaggtcgggagttcgagaccagccttaccaacatggagaaaccccatctctactaaaaatacaaaattacctgggcgtggtggtgcatgcctgtaatcccatcatctactcaggaggctgaggcaggagaattgcttgaacccaggaggcggaggttgcagtgagccaggattgtgccattgcactccagcctgggcaacaagaacaaaactccatctcaaaaaataaaaatcccaatcccaagtcgaaatcacctcttgttttaaacaagaatgaatcattactgtgtatgttagggtattaaaactgtttcaccagtacagtgaaagttgtttcaacattttaaacaaacagtggttatagactctttctttaaccattgtatattttcttccattcttgtcattggtcaataggggagggtagattagctgctccagaattcaataaagtgtaatatttctaacggtga

SEQ ID NO: 43030 - DNA, 2330 bp, Homo sapiens
  misc_feature (28)..(28): n is a, c, g, or t
ctgagctcgtaccattagcgcgttctgngtcaggtggatactaaaactggcaagctgaaaattggtacctacacagggcccctacagcatggtatcgtctactcaggaggttcttctgatacgatctgtgacctgttgggagccaagggaaaagacattttgtatattggagatcacatttttggggacattttaaaatcaaagaaacggcaagggtggcgaacttttttggtgattcctgaactcgcacaggagctacatgtctggactgacaagagttcacttttcgaagaacttcagagcttggatattttcttggctgaactctacaagcatcttgacagcagtagcaatgagcgtccagacatcagttccatccagagacgtattaagaaagtaactcatgacatggacatgtgctatgggatgatgggaagcctgtttcgcagtggctcccggcagaccctttttgccagtcaagtgatgcgttatgctgacctctatgcagcatctttcatcaacctgctgtattaccctttcagctacctcttcagggctgcccatgtcttgatgcctcatgaatcaacggtggagcacacacacgtagatatcaatgagatggagtctcctcttgccacccggaaccgcacatcagtggatttcaaagacactgactacaagcggcaccagctgacacggtcaattagtgagattaaacctcccaacctcttcccactggccccccaggaaattacacactgccatgacgaagatgatgatgaagaggaggaggaggaggaagaataaggaggaaaaccaaaaccccaagcacccattaaacaagtcctggcaggactcacaggaacaaacgaggtccctgttagggttctactcgggggagggagggggctccatgaaaggtacgtctgaaaagtttctgaagattttattatcatagatacttgttttggttttgtgtatctgtactctctgcagatggtccaaaattgtaatggagtctgtattagaagaaaataagggtaaaatcaggctgaactgcatgtatatggctccactgtggcttgtgacacttttaaaatcatccgtatgtcagtgtatctggatacacgaggaaaaggaaagagtctcagagtggaacaaagagtgggaagaggtgatctgtaatgttacaaattgtgctattactccaaggtccaacttttccagtgcattacatggtattgtatatcagtggagaaatgtattatttccatgatcaaatgtagtctctgttaaggtcaagttttcttttataagcctttaattcatcctcagtgactctggcaaggctgcttctctatcactggctttgcacagaagtatgctctacttgcgttgctttagggcaggattctattttgagggaaaagacagtatccttattaccttttgtttgtttaatagcacaaatgcttatttgttatccaaaaacaacctccttcttatctgtgataaatctatagaaagaatttagctgcaagtggacaaaggaacaagcccccagaaaagaaagggaagaactgccttcttatactacagaacatgcattagtgtgggctatatagctgtggctcatgctacccaattccagatttctttgtcctctaagagttgattgctgtatattaaaattgaacatcagaggatgggaagagggctctgtaagccagaaccttactaaagtagagggcacaatcagtgtgaataaattcacttcagaatctcaagtcaaggccaggcacggcggctcacgcctgtaatcccagcactttgggaggccgagacaggcggatcacctgaggtcgggagttcgagaccagccttaccaacatggagaaaccccatctctactaaaaatacaaaattacctgggcgtggtggtgcatgcctgtaatcccatcatctactcaggaggctgaggcaggagaattgcttgaacccaggaggcggaggttgcagtgagccaggattgtgccattgcactccagcctgggcaacaagaacaaaactccatctcaaaaaataaaaatcccaatcccaagtcgaaatcacctcttgttttaaacaagaatgaatcattactgtgtatgttagggtattaaaactgtttcaccagtacagtgaaagttgtttcaacattttaaacaaacagtggttatagactctttctttaaccattgtatattttcttccattcttgtcattggtcaataggggagggtagattagctgctccagaattcaataaagtgtaatatttctaacggtga

SEQ ID NO: 43031 - DNA, 2547 bp, Homo sapiens
tggctgacacaatacctttttaaaaaataaaatagtgggatcttctggctatacttagtatttttatattccttgcatctgagtgagattaaatagtaatgccttaaggtaaggagtgatgtttcaacttttgctgtttctccttcaccagcctgggagctcccatcgaccatggcagtcctactttgacttgatcttggtggatgcacggaaaccactcttttttggagaaggcacagtactgcgtcaggtggatactaaaactggcaagctgaaaattggtacctacacagggcccctacagcatggtatcgtctactcaggaggttcttctgatacgatctgtgacctgttgggagccaagggaaaagacattttgtatattggagatcacatttttggggacattttaaaatcaaagaaacggcaagggtggcgaacttttttggtgattcctgaactcgcacaggagctacatgtctggactgacaagagttcacttttcgaagaacttcagagcttggatattttcttggctgaactctacaagcatcttgacagcagtagcaatgagcgtccagacatcagttccatccagagacgtattaagaaagtaactcatgacatggacatgtgctatgggatgatgggaagcctgtttcgcagtggctcccggcagaccctttttgccagtcaagtgatgcgttatgctgacctctatgcagcatctttcatcaacctgctgtattaccctttcagctacctcttcagggctgcccatgtcttgatgcctcatgaatcaacggtggagcacacacacgtagatatcaatgagatggagtctcctcttgccacccggaaccgcacatcagtggatttcaaagacactgactacaagcggcaccagctgacacggtcaattagtgagattaaacctcccaacctcttcccactggccccccaggaaattacacactgccatgacgaagatgatgatgaagaggaggaggaggaggaagaataaggaggaaaaccaaaaccccaagcacccattaaacaagtcctggcaggactcacaggaacaaacgaggtccctgttagggttctactcgggggagggagggggctccatgaaaggtacgtctgaaaagtttctgaagattttattatcatagatacttgttttggttttgtgtatctgtactctctgcagatggtccaaaattgtaatggagtctgtattagaagaaaataagggtaaaatcaggctgaactgcatgtatatggctccactgtggcttgtgacacttttaaaatcatccgtatgtcagtgtatctggatacacgaggaaaaggaaagagtctcagagtggaacaaagagtgggaagaggtgatctgtaatgttacaaattgtgctattactccaaggtccaacttttccagtgcattacatggtattgtatatcagtggagaaatgtattatttccatgatcaaatgtagtctctgttaaggtcaagttttcttttataagcctttaattcatcctcagtgactctggcaaggctgcttctctatcactggctttgcacagaagtatgctctacttgcgttgctttagggcaggattctattttgagggaaaagacagtatccttattaccttttgtttgtttaatagcacaaatgcttatttgttatccaaaaacaacctccttcttatctgtgataaatctatagaaagaatttagctgcaagtggacaaaggaacaagcccccagaaaagaaagggaagaactgccttcttatactacagaacatgcattagtgtgggctatatagctgtggctcatgctacccaattccagatttctttgtcctctaagagttgattgctgtatattaaaattgaacatcagaggatgggaagagggctctgtaagccagaaccttactaaagtagagggcacaatcagtgtgaataaattcacttcagaatctcaagtcaaggccaggcacggcggctcacgcctgtaatcccagcactttgggaggccgagacaggcggatcacctgaggtcgggagttcgagaccagccttaccaacatggagaaaccccatctctactaaaaatacaaaattacctgggcgtggtggtgcatgcctgtaatcccatcatctactcaggaggctgaggcaggagaattgcttgaacccaggaggcggaggttgcagtgagccaggattgtgccattgcactccagcctgggcaacaagaacaaaactccatctcaaaaaataaaaatcccaatcccaagtcgaaatcacctcttgttttaaacaagaatgaatcattactgtgtatgttagggtattaaaactgtttcaccagtacagtgaaagttgtttcaacattttaaacaaacagtggttatagactctttctttaaccattgtatattttcttccattcttgtcattggtcaataggggagggtagattagctgctccagaattcaataaagtgtaatatttctaacggtga

SEQ ID NO: 43032 - DNA, 2345 bp, Homo sapiens
ggtactttacaagctcagaatgagcgtgcagctggaagggaaagttgtcatcatggtgtttaagcaggaggaaaggcagttaaagagaaggtgatggtgttcatctgttgtcagactccaagcaggtatcagtgagttatcctgaagaggggaagaggaggtaactgtacactcagcatgttagtcccaggttctactttccagtcacatctgcaaccttttagtttagcagcagttaagaactaggtgcttatttatttaaaatgtcttccttttccttccaaaccttaactagcacttttcgaagaacttcagagcttggatattttcttggctgaactctacaagcatcttgacagcagtagcaatgagcgtccagacatcagttccatccagagacgtattaagaaagtaactcatgacatggacatgtgctatgggatgatgggaagcctgtttcgcagtggctcccggcagaccctttttgccagtcaagtgatgcgttatgctgacctctatgcagcatctttcatcaacctgctgtattaccctttcagctacctcttcagggctgcccatgtcttgatgcctcatgaatcaacggtggagcacacacacgtagatatcaatgagatggagtctcctcttgccacccggaaccgcacatcagtggatttcaaagacactgactacaagcggcaccagctgacacggtcaattagtgagattaaacctcccaacctcttcccactggccccccaggaaattacacactgccatgacgaagatgatgatgaagaggaggaggaggaggaagaataaggaggaaaaccaaaaccccaagcacccattaaacaagtcctggcaggactcacaggaacaaacgaggtccctgttagggttctactcgggggagggagggggctccatgaaaggtacgtctgaaaagtttctgaagattttattatcatagatacttgttttggttttgtgtatctgtactctctgcagatggtccaaaattgtaatggagtctgtattagaagaaaataagggtaaaatcaggctgaactgcatgtatatggctccactgtggcttgtgacacttttaaaatcatccgtatgtcagtgtatctggatacacgaggaaaaggaaagagtctcagagtggaacaaagagtgggaagaggtgatctgtaatgttacaaattgtgctattactccaaggtccaacttttccagtgcattacatggtattgtatatcagtggagaaatgtattatttccatgatcaaatgtagtctctgttaaggtcaagttttcttttataagcctttaattcatcctcagtgactctggcaaggctgcttctctatcactggctttgcacagaagtatgctctacttgcgttgctttagggcaggattctattttgagggaaaagacagtatccttattaccttttgtttgtttaatagcacaaatgcttatttgttatccaaaaacaacctccttcttatctgtgataaatctatagaaagaatttagctgcaagtggacaaaggaacaagcccccagaaaagaaagggaagaactgccttcttatactacagaacatgcattagtgtgggctatatagctgtggctcatgctacccaattccagatttctttgtcctctaagagttgattgctgtatattaaaattgaacatcagaggatgggaagagggctctgtaagccagaaccttactaaagtagagggcacaatcagtgtgaataaattcacttcagaatctcaagtcaaggccaggcacggcggctcacgcctgtaatcccagcactttgggaggccgagacaggcggatcacctgaggtcgggagttcgagaccagccttaccaacatggagaaaccccatctctactaaaaatacaaaattacctgggcgtggtggtgcatgcctgtaatcccatcatctactcaggaggctgaggcaggagaattgcttgaacccaggaggcggaggttgcagtgagccaggattgtgccattgcactccagcctgggcaacaagaacaaaactccatctcaaaaaataaaaatcccaatcccaagtcgaaatcacctcttgttttaaacaagaatgaatcattactgtgtatgttagggtattaaaactgtttcaccagtacagtgaaagttgtttcaacattttaaacaaacagtggttatagactctttctttaaccattgtatattttcttccattcttgtcattggtcaataggggagggtagattagctgctccagaattcaataaagtgtaatatttctaacggtga

SEQ ID NO: 43033 - DNA, 1422 bp, Homo sapiens
acccactactggctgacccactactggcgacccactactggctatcatagatacttgttttggttttgtgtatctgtactctctgcagatggtccaaaattgtaatggagtctgtattagaagaaaataagggtaaaatcaggctgaactgcatgtatatggctccactgtggcttgtgacacttttaaaatcatccgtatgtcagtgtatctggatacacgaggaaaaggaaagagtctcagagtggaacaaagagtgggaagaggtgatctgtaatgttacaaattgtgctattactccaaggtccaacttttccagtgcattacatggtattgtatatcagtggagaaatgtattatttccatgatcaaatgtagtctctgttaaggtcaagttttcttttataagcctttaattcatcctcagtgactctggcaaggctgcttctctatcactggctttgcacagaagtatgctctacttgcgttgctttagggcaggattctattttgagggaaaagacagtatccttattaccttttgtttgtttaatagcacaaatgcttatttgttatccaaaaacaacctccttcttatctgtgataaatctatagaaagaatttagctgcaagtggacaaaggaacaagcccccagaaaagaaagggaagaactgccttcttatactacagaacatgcattagtgtgggctatatagctgtggctcatgctacccaattccagatttctttgtcctctaagagttgattgctgtatattaaaattgaacatcagaggatgggaagagggctctgtaagccagaaccttactaaagtagagggcacaatcagtgtgaataaattcacttcagaatctcaagtcaaggccaggcacggcggctcacgcctgtaatcccagcactttgggaggccgagacaggcggatcacctgaggtcgggagttcgagaccagccttaccaacatggagaaaccccatctctactaaaaatacaaaattacctgggcgtggtggtgcatgcctgtaatcccatcatctactcaggaggctgaggcaggagaattgcttgaacccaggaggcggaggttgcagtgagccaggattgtgccattgcactccagcctgggcaacaagaacaaaactccatctcaaaaaataaaaatcccaatcccaagtcgaaatcacctcttgttttaaacaagaatgaatcattactgtgtatgttagggtattaaaactgtttcaccagtacagtgaaagttgtttcaacattttaaacaaacagtggttatagactctttctttaaccattgtatattttcttccattcttgtcattggtcaataggggagggtagattagctgctccagaattcaataaagtgtaatatttctaacggtga

SEQ ID NO: 43034 - DNA, 1373 bp, Homo sapiens
  misc_feature (15)..(15): n is a, c, g, or t
  misc_feature (22)..(22): n is a, c, g, or t
  misc_feature (30)..(30): n is a, c, g, or t
tgcccgactaggganagcgtantgatccgnagaggggtgatggtccaaaattgtaatggagtctgtattagaagaaaataagggtaaaatcaggctgaactgcatgtatatggctccactgtggcttgtgacacttttaaaatcatccgtatgtcagtgtatctggatacacgaggaaaaggaaagagtctcagagtggaacaaagagtgggaagaggtgatctgtaatgttacaaattgtgctattactccaaggtccaacttttccagtgcattacatggtattgtatatcagtggagaaatgtattatttccatgatcaaatgtagtctctgttaaggtcaagttttcttttataagcctttaattcatcctcagtgactctggcaaggctgcttctctatcactggctttgcacagaagtatgctctacttgcgttgctttagggcaggattctattttgagggaaaagacagtatccttattaccttttgtttgtttaatagcacaaatgcttatttgttatccaaaaacaacctccttcttatctgtgataaatctatagaaagaatttagctgcaagtggacaaaggaacaagcccccagaaaagaaagggaagaactgccttcttatactacagaacatgcattagtgtgggctatatagctgtggctcatgctacccaattccagatttctttgtcctctaagagttgattgctgtatattaaaattgaacatcagaggatgggaagagggctctgtaagccagaaccttactaaagtagagggcacaatcagtgtgaataaattcacttcagaatctcaagtcaaggccaggcacggcggctcacgcctgtaatcccagcactttgggaggccgagacaggcggatcacctgaggtcgggagttcgagaccagccttaccaacatggagaaaccccatctctactaaaaatacaaaattacctgggcgtggtggtgcatgcctgtaatcccatcatctactcaggaggctgaggcaggagaattgcttgaacccaggaggcggaggttgcagtgagccaggattgtgccattgcactccagcctgggcaacaagaacaaaactccatctcaaaaaataaaaatcccaatcccaagtcgaaatcacctcttgttttaaacaagaatgaatcattactgtgtatgttagggtattaaaactgtttcaccagtacagtgaaagttgtttcaacattttaaacaaacagtggttatagactctttctttaaccattgtatattttcttccattcttgtcattggtcaataggggagggtagattagctgctccagaattcaataaagtgtaatatttctaacggtga

SEQ ID NO: 43035 - DNA, 1182 bp, Homo sapiens
gatccccaccaacatgcaacacagaggtgatctgtaatgttacaaattgtgctattactccaaggtccaacttttccagtgcattacatggtattgtatatcagtggagaaatgtattatttccatgatcaaatgtagtctctgttaaggtcaagttttcttttataagcctttaattcatcctcagtgactctggcaaggctgcttctctatcactggctttgcacagaagtatgctctacttgcgttgctttagggcaggattctattttgagggaaaagacagtatccttattaccttttgtttgtttaatagcacaaatgcttatttgttatccaaaaacaacctccttcttatctgtgataaatctatagaaagaatttagctgcaagtggacaaaggaacaagcccccagaaaagaaagggaagaactgccttcttatactacagaacatgcattagtgtgggctatatagctgtggctcatgctacccaattccagatttctttgtcctctaagagttgattgctgtatattaaaattgaacatcagaggatgggaagagggctctgtaagccagaaccttactaaagtagagggcacaatcagtgtgaataaattcacttcagaatctcaagtcaaggccaggcacggcggctcacgcctgtaatcccagcactttgggaggccgagacaggcggatcacctgaggtcgggagttcgagaccagccttaccaacatggagaaaccccatctctactaaaaatacaaaattacctgggcgtggtggtgcatgcctgtaatcccatcatctactcaggaggctgaggcaggagaattgcttgaacccaggaggcggaggttgcagtgagccaggattgtgccattgcactccagcctgggcaacaagaacaaaactccatctcaaaaaataaaaatcccaatcccaagtcgaaatcacctcttgttttaaacaagaatgaatcattactgtgtatgttagggtattaaaactgtttcaccagtacagtgaaagttgtttcaacattttaaacaaacagtggttatagactctttctttaaccattgtatattttcttccattcttgtcattggtcaataggggagggtagattagctgctccagaattcaataaagtgtaatatttctaacggtga

SEQ ID NO: 43036 - DNA, 2298 bp, Homo sapiens
tcggacgagggatgtgcgtgcgctggagccgagtttcgctctgctgcccaggctggagtacagtgatgtgatctcctgacgtcaagtgatccattcgcctcggcctcccaaagttctgggattacaagtaatacaaaatacagttaaaataaaatgtcaacctcctggagtgatcggttacagaatgcagcagatatgcctgctaacatggataagcatgccctgaaaaagtatcgtcgagaagcctatcatcgggtgtttgtgaaccgaagtttagcaatggaaaagataaagtgttttggttttgatatggattatacccttgctgtgtacaagtccccagagtatgagtcccttggttttgagcttactgtggagagattagtttctattggctatccccaggagttgctcagctttgcttatgattctacattccctaccaggggacttgtctttgacacactgtatggaaatcttttgaaagtcgatgcctatggaaacctcttggtctgtgcacatggatttaactttataaggggaccagaaactagagaacagtatccaaataaatttatccagcgagatgatactgaaagattttacattctgaacacactattcaacctaccagagacctacctgttggcctgcctagtagatttttttactaattgtcccagatataccagttgtgaaacaggatttaaagatggggacctcttcatgtcctaccggagtatgttccaggatgtaagagatgctgttgactgggttcattacaagggctcccttaaggaaaagacagttgaaaatcttgagaagtatgtagtcaaagatggaaaactgcctttgcttctgagccggatgaaggaagtagggaaagtatttcttgctaccaacagtgactataaatatacagataaaattatgacttacctgtttgacttcccacatggccccaagcctgggagctcccatcgaccatggcagtcctactttgacttgatcttggtggatgcacggaaaccactcttttttggagaaggcacagtactgcgtcaggtggatactaaaactggcaagctgaaaattggtacctacacagggcccctacagcatggtatcgtctactcaggaggttcttctgatacgatctgtgacctgttgggagccaagggaaaagacattttgtatattggagatcacatttttggggacattttaaaatcaaagaaacggcaagggtggcgaacttttttggtgattcctgaactcgcacaggagctacatgtctggactgacaagagttcacttttcgaagaacttcagagcttggatattttcttggctgaactctacaagcatcttgacagcagtagcaatgagcgtccagacatcagttccatccagagacgtattaagaaagtaactcatgacatggacatgtgctatgggatgatgggaagcctgtttcgcagtggctcccggcagaccctttttgccagtcaagtgatgcgttatgctgacctctatgcagcatctttcatcaacctgctgtattaccctttcagctacctcttcagggctgcccatgtcttgatgcctcatgaatcaacggtggagcacacacacgtagatatcaatgagatggagtctcctcttgccacccggaaccgcacatcagtggatttcaaagacactgactacaagcggcaccagctgacacggtcaattagtgagattaaacctcccaacctcttcccactggccccccaggaaattacacactgccatgacgaagatgatgatgaagaggaggaggaggaggaagaataaggaggaaaaccaaaaccccaagcacccattaaacaagtcctggcaggactcacaggaacaaacgaggtccctgttagggttctactcgggggagggagggggctccatgaaaggtacgtctgaaaagtttctgaagattttattatcatagatacttgttttggttttgtgtatctgtactctctgcagatggtccaaaattgtaatggagtctgtattagaagaaaataagggtaaaatcaggctgaactgcatgtatatggctccactgtggcttgtgacacttttaaaatcatccgtatgtcagtgtatctggatacacgaggaaaaggaaagagtctcagagtggaacaaagagtgggaagctggattccacgcaccgatcagtactgggaaaagatcttatctaccgtgggcctgtcgtgcagtcctgggcggtcgagatctggtgtagcagat

SEQ ID NO: 43037 - DNA, 1964 bp, Homo sapiens
gggcgcaggcagaatgccaagggatggagaccctcagaagggcaaagccggtgttccatcgtttgaagatctccagacccgcgggacagacagacgcagcgcggtcagggagcgtcggcttcgccgaactctgcggcggagctgggggacggaacagcgcgccggtccctggccgggcgcgagcagaggggcggcgcggggcggtgccgggcggcgggggcggggagggcgcgcgttgaggcggctgcggcagttgcgcgctgggattgttgcggtgcgctggagccgaatacaaaatacagttaaaataaaatgtcaacctcctggagtgatcggttacagaatgcagcagatatgcctgctaacatggataagcatgccctgaaaaagtatcgtcgagaagcctatcatcgggtgtttgtgaaccgaagtttagcaatggaaaagataaagtgttttggttttgatatggattatacccttgctgtgtacaagtccccagagtatgagtcccttggttttgagcttactgtggagagattagtttctattggctatccccaggagttgctcagctttgcttatgattctacattccctaccaggggacttgtctttgacacactgtatggaaatcttttgaaagtcgatgcctatggaaacctcttggtctgtgcacatggatttaactttataaggggttctcaggtagctgttcagaagagaccagaaactagagaacagtatccaaataaatttatccagcgagatgatactgaaagattttacattctgaacacactattcaacctaccagagacctacctgttggcctgcctagtagatttttttactaattgtcccagatataccagttgtgaaacaggatttaaagatggggacctcttcatgtcctaccggagtatgttccaggatgtaagagatgctgttgactgggttcattacaagggctcccttaaggaaaagacagttgaaaatcttgagaagtatgtagtcaaagatagtaaaagtagcagaatacagtattttctcaaagtactgtggtaaagatttcttgttttcagtttttgtgcttcctattttcacccacctcccttatttcaagaaagaacactgaatggggagggtccgggagaatttgagtgaaggaatctatttgctatgcgagaaggaaaagatatttttctttccaggcacatgaggggttagaatttcctcatttaagcgcacgtgggtgtgggtatttctaggtagcatctgcacatgtcatttcattctgcaaggtgttttataaaaccatagtgtacacactgaaagccatatctaataatctctatgtagagcatgtttaaatcagcttctgctgacctttaacacacctcacatacttcaagaaatctcaaggtaatttaaactctttcctgaggcagacatcatgaggaaggtagagatatgttgttaacagccatataacccctataaatatgtgtataattttacatgtaaatctattacatacactgtgtatactacatatgttaatactttattcatttatagtgataatgtgggcttttaagtgcaaaattctgaaatcagctaacccttaaaaggttcccccattcctgttgtggacagaaatccagtatttgacaatccagcctgggcaacaagaacaaaactccatctcaaaaaataaaaatcccaatcccaagtcgaaatcacctcttgttttaaacaagaatgaatcattactgtgtatgttagggtattaaaactgtttcaccagtacagtgaaagttgtttcaacattttaaacaaacagtggttatagactctttctttaaccattgtatattttcttccattcttgtcattggtcaataggggagggtagattagctgctccagaattcaataaagtgtaatatttctaacggtga

SEQ ID NO: 43038 - DNA, 1381 bp, Homo sapiens
tcggacgagggatgtgcgtgcgctggagccgagtttcgctctgctgcccaggctggagtacagtgatgtgatctcctgacgtcaagtgatccattcgcctcggcctcccaaagttctgggattacaagtaatacaaaatacagttaaaataaaatgtcaacctcctggagtgatcggttacagaatgcagcagatatgcctgctaacatggataagcatgccctgaaaaagtatcgtcgagaagcctatcatcgggtgtttgtgaaccgaagtttagcaatggaaaagataaagtgttttggttttgatatggattatacccttgctgtgtacaagtccccagagtatgagtcccttggttttgagcttactgtggagagattagtttctattggctatccccaggagttgctcagctttgcttatgattctacattccctaccaggggacttgtctttgacacactgtatggaaatcttttgaaagtcgatgcctatggaaacctcttggtctgtgcacatggatttaactttataaggggaccagaaactagagaacagtatccaaataaatttatccagcgagatgatactgaaagattttacattctgaacacactattcaacctaccagagacctacctgttggcctgcctagtagatttttttactaattgtcccagatataccagttgtgaaacaggatttaaagatggggacctcttcatgtcctaccggagtatgttccaggatgtaagagatgctgttgactgggttcattacaagggctcccttaaggaaaagacagttgaaaatcttgagaagtatgtagtcaaagatgtaagtaatataggggaaaatagatctgcataatagctcattttacctattagggaaattaataacaagctgatttataatgaaatggacaaaagaagagatttgtcttggcatagtatgtgtcgggtataatcaccaagaatattcagctagagcataggtcttagtagagtttttcctgtttcttgataggcaagaagactcagtatttcatttttcctgtttcttgataggcaagaagactcagtattgcatttgttcgcttagcttcaattataatagcagttagaggtttactgtatgcacatcatcaccatgctaagtgattacatgcattatgccatttaatcttctgtatgaccttgagttaggtattattgttgcctctgttttatagataaaaaacctgagaaatagagggattaaataacttgccagaggtcacacagttagtaagtagtaaagctaagtcacatgccaaatcataactactgcactcagatcatctcaaaaatgtgcatatatgttactgttatttaaa

SEQ ID NO: 43039 - DNA, 2034 bp, Homo sapiens
gggcgcaggcagaatgccaagggatggagaccctcagaagggcaaagccggtgttccatcgtttgaagatctccagacccgcgggacagacagacgcagcgcggtcagggagcgtcggcttcgccgaactctgcggcggagctgggggacggaacagcgcgccggtccctggccgggcgcgagcagaggggcggcgcggggcggtgccgggcggcgggggcggggagggcgcgcgttgaggcggctgcggcagttgcgcgctgggattgttgcggtgcgctggagccgagtttcgctctgctgcccaggctggagtacagtgatgtgatctcctgacgtcaagtgatccattcgcctcggcctcccaaagttctgggattacaagtgtgagccactgccactggctgaaaaagtcttattgtggcataattgaatacaaaatacagttaaaataaaatgtcaacctcctggagtgatcggttacagaatgcagcagatatgcctgctaacatggataagcatgccctgaaaaagtatcgtcgagaagcctatcatcgtgtacaagtccccagagtatgagtcccttggttttgagcttactgtggagagattagtttctattggctatccccaggagttgctcagctttgcttatgattctacattccctaccaggggacttgtctttgacacactgtatggaaatcttttgaaagtcgatgcctatggaaacctcttggtctgtgcacatggatttaactttataaggggttctcaggtagctgttcagaagagaccagaaactagagaacagtatccaaataaatttatccagcgagatgatactgaaagattttacattctgaacacactattcaacctaccagagacctacctgttggcctgcctagtagatttttttactaattgtcccagatataccagttgtgaaacaggatttaaagatggggacctcttcatgtcctaccggagtatgttccaggatgtaagagatgctgttgactgggttcattacaagggctcccttaaggaaaagacagttgaaaatcttgagaagtatgtagtcaaagatagtaaaagtagcagaatacagtattttctcaaagtactgtggtaaagatttcttgttttcagtttttgtgcttcctattttcacccacctcccttatttcaagaaagaacactgaatggggagggtccgggagaatttgagtgaaggaatctatttgctatgcgagaaggaaaagatatttttctttccaggcacatgaggggttagaatttcctcatttaagcgcacgtgggtgtgggtatttctaggtagcatctgcacatgtcatttcattctgcaaggtgttttataaaaccatagtgtacacactgaaagccatatctaataatctctatgtagagcatgtttaaatcagcttctgctgacctttaacacacctcacatacttcaagaaatctcaaggtaatttaaactctttcctgaggcagacatcatgaggaaggtagagatatgttgttaacagccatataacccctataaatatgtgtataattttacatgtaaatctattacatacactgtgtatactacatatgttaatactttattcatttatagtgataatgtgggcttttaagtgcaaaattctgaaatcagctaacccttaaaaggttcccccattcctgttgtggacagaaatccagtatttgacaatccagcctgggcaacaagaacaaaactccatctcaaaaaataaaaatcccaatcccaagtcgaaatcacctcttgttttaaacaagaatgaatcattactgtgtatgttagggtattaaaactgtttcaccagtacagtgaaagttgtttcaacattttaaacaaacagtggttatagactctttctttaaccattgtatattttcttccattcttgtcattggtcaataggggagggtagattagctgctccagaattcaataaagtgtaatatttctaacggtga

SEQ ID NO: 43040 - DNA, 997 bp, Homo sapiens
taaaaattaaacacacatagtgccccaagatgacatacttctttcttttcctacagagtaaaagtagcagaatacagtattttctcaaagtactgtggtaaagatttcttgttttcagtttttgtgcttcctattttcacccacctcccttatttcaagaaagaacactgaatggggagggtccgggagaatttgagtgaaggaatctatttgctatgcgagaaggaaaagatatttttctttccaggcacatgaggggttagaatttcctcatttaagcgcacgtgggtgtgggtatttctaggtagcatctgcacatgtcatttcattctgcaaggtgttttataaaaccatagtgtacacactgaaagccatatctaataatctctatgtagagcatgtttaaatcagcttctgctgacctttaacacacctcacatacttcaagaaatctcaaggtaatttaaactctttcctgaggcagacatcatgaggaaggtagagatatgttgttaacagccatataacccctataaatatgtgtataattttacatgtaaatctattacatacactgtgtatactacatatgttaatactttattcatttatagtgataatgtgggcttttaagtgcaaaattctgaaatcagctaacccttaaaaggttcccccattcctgttgtggacagaaatccagtatttgacaatccagcctgggcaacaagaacaaaactccatctcaaaaaataaaaatcccaatcccaagtcgaaatcacctcttgttttaaacaagaatgaatcattactgtgtatgttagggtattaaaactgtttcaccagtacagtgaaagttgtttcaacattttaaacaaacagtggttatagactctttctttaaccattgtatattttcttccattcttgtcattggtcaataggggagggtagattagctgctccagaattcaataaagtgtaatatttctaacggtga

SEQ ID NO: 43041 - DNA, 773 bp, Homo sapiens
tcggacgagggatgtgcgtgcgctggagccgagtttcgctctgctgcccaggctggagtacagtgatgtgatctcctgacgtcaagtgatccattcgcctcggcctcccaaagttctgggattacaagtaatacaaaatacagttaaaataaaatgtcaacctcctggagtgatcggttacagaatgcagcagatatgcctgctaacatggataagcatgccctgaaaaagtatcgtcgagaagcctatcatcgggtgtttgtgaaccgaagtttagcaatggaaaagataaagtgttttggttttgatatggattatacccttgctgtgtacaagtccccagagtatgagtcccttggttttgagcttactgtggagagattagtttctattggctatccccaggagttgctcagctttgcttatgattctacattccctaccaggggacttgtctttgacacactgtatggaaatcttttgaaagtcgatgcctatggaaacctcttggtctgtgcacatggatttaactttataaggggaccagaaactagagaacagtatccaaataaatttatccagcgagatgatactgaaagattttacattctgaacacactattcaacctaccagagacctacctgttggcctgcctagtagatttttttactaattgtcccagatataccagtgaatttagtgctagtgagagatgccacattgccaacctgagagatgggacagcaccagcagctccatgcaggctctcacc

SEQ ID NO: 43042 - DNA, 345 bp, Homo sapiens
ctccaaagtgtaaagataaaaatgttttcgtgtttcactcattatccaattacatttcagggaaaactgcctttgcttctgagccggatgaaggaagtagggaaagtatttcttgctaccaacagtgactataaatatacagatagtgcttcatgtgtatatttatttatgcagtggaattattttggcctaaagaactgtgaagacaatgaggaagatagaagtttattaagtgaaaatagtttcttgccttctcattttcaaagagtaaaaaggcaaaaatatacaggataacagtggttctcaaatttttctagaaatttattttaaccattttcactgatt

SEQ ID NO: 43043 - DNA, 567 bp, Homo sapiens
gaacctttagcctctttctaatgttaaagtcaaacaatgtgaagatgacatcatctccccagatgtaatatatttccctattacttttcatcattaaagagcaaattcccttacataaggttagttaacagttatttattaggcagttggaacccaaactgacatatagttagcaattacattttgtttaaattaagtgccttccaattatacagcatacaacaaaactaatcttaaaacttgcccagaagaactttagtagttttgacttatttgaaattctaagatttttattttcttctttctaatacagttctcaggtagctgttcagaagaggtatgtatataaaaatgctttgaaaaaattttaaactatagcaatttaaatgattaagagatttttaatagccaatacgttttttagattctaatgaatctaaactttgaatcctgacatttgattgtgtcattaaaaaaatgtaaacataaggttaaagtgaatatgtgctaataatattttaaacaaataagaataagctttattttcaaaataaaaatatttccact

SEQ ID NO: 43044 - DNA, 338 bp, Homo sapiens
caaccttttagtttagcagcagttaagaactaggtgcttatttatttaaaatgtcttccttttccttccaaaccttaactagcacttttcgaagaacttcagagcttggatattttcttggctgaactctacaagtaagttttctaaaaatttctttcccaaaaacttactcaggaatcacttagatataagaaatgttctttccaggccagtaatcccagctatttgggaggctgaggcaggagaatcgtttgaaccggggaaatggaggttgcagtgagctgagattgcaccattgcactccagcctgggcgacaagagtgaaactccgtctcaaa

SEQ ID NO: 43045 - DNA, 3362 bp, Homo sapiens
tcggacgagggatgtgcgtgcgctggagccgagtttcgctctgctgcccaggctggagtacagtgatgtgatctcctgacgtcaagtgatccattcgcctcggcctcccaaagttctgggattacaagtaatacaaaatacagttaaaataaaatgtcaacctcctggagtgatcggttacagaatgcagcagatatgcctgctaacatggataagcatgccctgaaaaagtatcgtcgagaagcctatcatcgggtgtttgtgaaccgaagtttagcaatggaaaagataaagtgttttggttttgatatggattatacccttgctgtgtacaagtccccagagtatgagtcccttggttttgagcttactgtggagagattagtttctattggctatccccaggagttgctcagctttgcttatgattctacattccctaccaggggacttgtctttgacacactgtatggaaatcttttgaaagtcgatgcctatggaaacctcttggtctgtgcacatggatttaactttataaggggaccagaaactagagaacagtatccaaataaatttatccagcgagatgatactgaaagattttacattctgaacacactattcaacctaccagagacctacctgttggcctgcctagtagatttttttactaattgtcccagatataccagttgtgaaacaggatttaaagatggggacctcttcatgtcctaccggagtatgttccaggatgtaagagatgctgttgactgggttcattacaagggctcccttaaggaaaagacagttgaaaatcttgagaagtatgtagtcaaagatggaaaactgcctttgcttctgagccggatgaaggaagtagggaaagtatttcttgctaccaacagtgactataaatatacagataaaattatgacttacctgtttgacttcccacatggccccaagcctgggagctcccatcgaccatggcagtcctactttgacttgatcttggtggatgcacggaaaccactcttttttggagaaggcacagtactgcgtcaggtggatactaaaactggcaagctgaaaattggtacctacacagggcccctacagcatggtatcgtctactcaggaggttcttctgatacgatctgtgacctgttgggagccaagggaaaagacattttgtatattggagatcacatttttggggacattttaaaatcaaagaaacggcaagggtggcgaacttttttggtgattcctgaactcgcacaggagctacatgtctggactgacaagagttcacttttcgaagaacttcagagcttggatattttcttggctgaactctacaagcatcttgacagcagtagcaatgagcgtccagacatcagttccatccagagacgtattaagaaagtaactcatgacatggacatgtgctatgggatgatgggaagcctgtttcgcagtggctcccggcagaccctttttgccagtcaagtgatgcgttatgctgacctctatgcagcatctttcatcaacctgctgtattaccctttcagctacctcttcagggctgcccatgtcttgatgcctcatgaatcaacggtggagcacacacacgtagatatcaatgagatggagtctcctcttgccacccggaaccgcacatcagtggatttcaaagacactgactacaagcggcaccagctgacacggtcaattagtgagattaaacctcccaacctcttcccactggccccccaggaaattacacactgccatgacgaagatgatgatgaagaggaggaggaggaggaagaataaggaggaaaaccaaaaccccaagcacccattaaacaagtcctggcaggactcacaggaacaaacgaggtccctgttagggttctactcgggggagggagggggctccatgaaaggtacgtctgaaaagtttctgaagattttattatcatagatacttgttttggttttgtgtatctgtactctctgcagatggtccaaaattgtaatggagtctgtattagaagaaaataagggtaaaatcaggctgaactgcatgtatatggctccactgtggcttgtgacacttttaaaatcatccgtatgtcagtgtatctggatacacgaggaaaaggaaagagtctcagagtggaacaaagagtgggaagaggtgatctgtaatgttacaaattgtgctattactccaaggtccaacttttccagtgcattacatggtattgtatatcagtggagaaatgtattatttccatgatcaaatgtagtctctgttaaggtcaagttttcttttataagcctttaattcatcctcagtgactctggcaaggctgcttctctatcactggctttgcacagaagtatgctctacttgcgttgctttagggcaggattctattttgagggaaaagacagtatccttattaccttttgtttgtttaatagcacaaatgcttatttgttatccaaaaacaacctccttcttatctgtgataaatctatagaaagaatttagctgcaagtggacaaaggaacaagcccccagaaaagaaagggaagaactgccttcttatactacagaacatgcattagtgtgggctatatagctgtggctcatgctacccaattccagatttctttgtcctctaagagttgattgctgtatattaaaattgaacatcagaggatgggaagagggctctgtaagccagaaccttactaaagtagagggcacaatcagtgtgaataaattcacttcagaatctcaagtcaaggccaggcacggcggctcacgcctgtaatcccagcactttgggaggccgagacaggcggatcacctgaggtcgggagttcgagaccagccttaccaacatggagaaaccccatctctactaaaaatacaaaattacctgggcgtggtggtgcatgcctgtaatcccatcatctactcaggaggctgaggcaggagaattgcttgaacccaggaggcggaggttgcagtgagccaggattgtgccattgcactccagcctgggcaacaagaacaaaactccatctcaaaaaataaaaatcccaatcccaagtcgaaatcacctcttgttttaaacaagaatgaatcattactgtgtatgttagggtattaaaactgtttcaccagtacagtgaaagttgtttcaacattttaaacaaacagtggttatagactctttctttaaccattgtatattttcttccattcttgtcattggtcaataggggagggtagattagctgctccagaattcaataaagtgtaatatttctaacggtga

SEQ ID NO: 43046 - DNA, 3521 bp, Homo sapiens
gggcgcaggcagaatgccaagggatggagaccctcagaagggcaaagccggtgttccatcgtttgaagatctccagacccgcgggacagacagacgcagcgcggtcagggagcgtcggcttcgccgaactctgcggcggagctgggggacggaacagcgcgccggtccctggccgggcgcgagcagaggggcggcgcggggcggtgccgggcggcgggggcggggagggcgcgcgttgaggcggctgcggcagttgcgcgctgggattgttgcggtgcgctggagccgaatacaaaatacagttaaaataaaatgtcaacctcctggagtgatcggttacagaatgcagcagatatgcctgctaacatggataagcatgccctgaaaaagtatcgtcgagaagcctatcatcgggtgtttgtgaaccgaagtttagcaatggaaaagataaagtgttttggttttgatatggattatacccttgctgtgtacaagtccccagagtatgagtcccttggttttgagcttactgtggagagattagtttctattggctatccccaggagttgctcagctttgcttatgattctacattccctaccaggggacttgtctttgacacactgtatggaaatcttttgaaagtcgatgcctatggaaacctcttggtctgtgcacatggatttaactttataaggggaccagaaactagagaacagtatccaaataaatttatccagcgagatgatactgaaagattttacattctgaacacactattcaacctaccagagacctacctgttggcctgcctagtagatttttttactaattgtcccagatataccagttgtgaaacaggatttaaagatggggacctcttcatgtcctaccggagtatgttccaggatgtaagagatgctgttgactgggttcattacaagggctcccttaaggaaaagacagttgaaaatcttgagaagtatgtagtcaaagatggaaaactgcctttgcttctgagccggatgaaggaagtagggaaagtatttcttgctaccaacagtgactataaatatacagataaaattatgacttacctgtttgacttcccacatggccccaagcctgggagctcccatcgaccatggcagtcctactttgacttgatcttggtggatgcacggaaaccactcttttttggagaaggcacagtactgcgtcaggtggatactaaaactggcaagctgaaaattggtacctacacagggcccctacagcatggtatcgtctactcaggaggttcttctgatacgatctgtgacctgttgggagccaagggaaaagacattttgtatattggagatcacatttttggggacattttaaaatcaaagaaacggcaagggtggcgaacttttttggtgattcctgaactcgcacaggagctacatgtctggactgacaagagttcacttttcgaagaacttcagagcttggatattttcttggctgaactctacaagcatcttgacagcagtagcaatgagcgtccagacatcagttccatccagagacgtattaagaaagtaactcatgacatggacatgtgctatgggatgatgggaagcctgtttcgcagtggctcccggcagaccctttttgccagtcaagtgatgcgttatgctgacctctatgcagcatctttcatcaacctgctgtattaccctttcagctacctcttcagggctgcccatgtcttgatgcctcatgaatcaacggtggagcacacacacgtagatatcaatgagatggagtctcctcttgccacccggaaccgcacatcagtggatttcaaagacactgactacaagcggcaccagctgacacggtcaattagtgagattaaacctcccaacctcttcccactggccccccaggaaattacacactgccatgacgaagatgatgatgaagaggaggaggaggaggaagaataaggaggaaaaccaaaaccccaagcacccattaaacaagtcctggcaggactcacaggaacaaacgaggtccctgttagggttctactcgggggagggagggggctccatgaaaggtacgtctgaaaagtttctgaagattttattatcatagatacttgttttggttttgtgtatctgtactctctgcagatggtccaaaattgtaatggagtctgtattagaagaaaataagggtaaaatcaggctgaactgcatgtatatggctccactgtggcttgtgacacttttaaaatcatccgtatgtcagtgtatctggatacacgaggaaaaggaaagagtctcagagtggaacaaagagtgggaagaggtgatctgtaatgttacaaattgtgctattactccaaggtccaacttttccagtgcattacatggtattgtatatcagtggagaaatgtattatttccatgatcaaatgtagtctctgttaaggtcaagttttcttttataagcctttaattcatcctcagtgactctggcaaggctgcttctctatcactggctttgcacagaagtatgctctacttgcgttgctttagggcaggattctattttgagggaaaagacagtatccttattaccttttgtttgtttaatagcacaaatgcttatttgttatccaaaaacaacctccttcttatctgtgataaatctatagaaagaatttagctgcaagtggacaaaggaacaagcccccagaaaagaaagggaagaactgccttcttatactacagaacatgcattagtgtgggctatatagctgtggctcatgctacccaattccagatttctttgtcctctaagagttgattgctgtatattaaaattgaacatcagaggatgggaagagggctctgtaagccagaaccttactaaagtagagggcacaatcagtgtgaataaattcacttcagaatctcaagtcaaggccaggcacggcggctcacgcctgtaatcccagcactttgggaggccgagacaggcggatcacctgaggtcgggagttcgagaccagccttaccaacatggagaaaccccatctctactaaaaatacaaaattacctgggcgtggtggtgcatgcctgtaatcccatcatctactcaggaggctgaggcaggagaattgcttgaacccaggaggcggaggttgcagtgagccaggattgtgccattgcactccagcctgggcaacaagaacaaaactccatctcaaaaaataaaaatcccaatcccaagtcgaaatcacctcttgttttaaacaagaatgaatcattactgtgtatgttagggtattaaaactgtttcaccagtacagtgaaagttgtttcaacattttaaacaaacagtggttatagactctttctttaaccattgtatattttcttccattcttgtcattggtcaataggggagggtagattagctgctccagaattcaataaagtgtaatatttctaacggtga

SEQ ID NO: 43047 - DNA, 4403 bp, Homo sapiens
gggcgcaggcagaatgccaagggatggagaccctcagaagggcaaagccggtgttccatcgtttgaagatctccagacccgcgggacagacagacgcagcgcggtcagggagcgtcggcttcgccgaactctgcggcggagctgggggacggaacagcgcgccggtccctggccgggcgcgagcagaggggcggcgcggggcggtgccgggcggcgggggcggggagggcgcgcgttgaggcggctgcggcagttgcgcgctgggattgttgcggtgcgctggagccgaatacaaaatacagttaaaataaaatgtcaacctcctggagtgatcggttacagaatgcagcagatatgcctgctaacatggataagcatgccctgaaaaagtatcgtcgagaagcctatcatcgggtgtttgtgaaccgaagtttagcaatggaaaagataaagtgttttggttttgatatggattatacccttgctgtgtacaagtccccagagtatgagtcccttggttttgagcttactgtggagagattagtttctattggctatccccaggagttgctcagctttgcttatgattctacattccctaccaggggacttgtctttgacacactgtatggaaatcttttgaaagtcgatgcctatggaaacctcttggtctgtgcacatggatttaactttataaggggaccagaaactagagaacagtatccaaataaatttatccagcgagatgatactgaaagattttacattctgaacacactattcaacctaccagagacctacctgttggcctgcctagtagatttttttactaattgtcccagatataccagttgtgaaacaggatttaaagatggggacctcttcatgtcctaccggagtatgttccaggatgtaagagatgctgttgactgggttcattacaagggctcccttaaggaaaagacagttgaaaatcttgagaagtatgtagtcaaagatggaaaactgcctttgcttctgagccggatgaaggaagtagggaaagtatttcttgctaccaacagtgactataaatatacagataaaattatgacttacctgtttgacttcccacatggccccaagcctgggagctcccatcgaccatggcagtcctactttgacttgatcttggtggatgcacggaaaccactcttttttggagaaggcacagtactgcgtcaggtggatactaaaactggcaagctgaaaattggtacctacacagggcccctacagcatggtatcgtctactcaggaggttcttctgatacgatctgtgacctgttgggagccaagggaaaagacattttgtatattggagatcacatttttggggacattttaaaatcaaagaaacggcaagggtggcgaacttttttggtgattcctgaactcgcacaggagctacatgtctggactgacaagagttcacttttcgaagaacttcagagcttggatattttcttggctgaactctacaagcatcttgacagcagtagcaatgagcgtccagacatcagttccatccagagacgtattaagaaagtaactcatgacatggacatgtgctatgggatgatgggaagcctgtttcgcagtggctcccggcagaccctttttgccagtcaagtgatgcgttatgctgacctctatgcagcatctttcatcaacctgctgtattaccctttcagctacctcttcagggctgcccatgtcttgatgcctcatgaatcaacggtggagcacacacacgtagatatcaatgagatggagtctcctcttgccacccggaaccgcacatcagtggatttcaaagacactgactacaagcggcaccagctgacacggtcaattagtgagattaaacctcccaacctcttcccactggccccccaggaaattacacactgccatgacgaagatgatgatgaagaggaggaggaggaggaagaataaggaggaaaaccaaaaccccaagcacccattaaacaagtcctggcaggactcacaggaacaaacgaggtccctgttagggttctactcgggggagggagggggctccatgaaaggtacgtctgaaaagtttctgaagattttattatcatagatacttgttttggttttgtgtatctgtactctctgcagatggtccaaaattgtaatggagtctgtattagaagaaaataagggtaaaatcaggctgaactgcatgtatatggctccactgtggcttgtgacacttttaaaatcatccgtatgtcagtgtatctggatacacgaggaaaaggaaagagtctcagagtggaacaaagagtgggaagaggtgatctgtaatgttacaaattgtgctattactccaaggtccaacttttccagtgcattacatggtattgtatatcagtggagaaatgtattatttccatgatcaaatgtagtctctgttaaggtcaagttttcttttataagcctttaattcatcctcagtgactctggcaaggctgcttctctatcactggctttgcacagaagtatgctctacttgcgttgctttagggcaggattctattttgagggaaaagacagtatccttattaccttttgtttgtttaatagcacaaatgcttatttgttatccaaaaacaacctccttcttatctgtgataaatctatagaaagaatttagctgcaagtggacaaaggaacaagcccccagaaaagaaagggaagaactgccttcttatactacagaacatgcattagtgtgggctatatagctgtggctcatgctacccaattccagatttctttgtcctctaagagttgattgctgtatattaaaattgaacatcagaggatgggaagagggctctgtaagccagaaccttactaaagtagagggcacaatcagtgtgaataaattcacttcagaatctcaagtcaaggccaggcacggcggctcacgcctgtaatcccagcactttgggaggccgagacaggcggatcacctgaggtcgggagttcgagaccagccttaccaacatggagaaaccccatctctactaaaaatacaaaattacctgggcgtggtggtgcatgcctgtaatcccatcatctactcaggaggctgaggcaggagaattgcttgaacccaggaggcggaggttgcagtgagccaggattgtgccattgcactccagcctgggcaacaagaacaaaactccatctcaaaaaataaaaatcccaatcccaagtcgaaatcacctcttgttttaaacaagaatgaatcattactgtgtatgttagggtattaaaactgtttcaccagtacagtgaaagttgtttcaacattttaaacaaacagtggttatagactctttctttaaccattgtatattttcttccattcttgtcattggtcaataggggagggtagattagctgctccagaattcaataaagtgtaatatttctaacggtgactttgacctattctgtagtacaactgtaatagctattggtcttcaagtgggtttagatttggtgacatcagtttgatattctcttaaaggaaataaatattcaagaactgattatcatgcaacaaacacaaaaaacaaaaaacaaaaaaaacacaaaacaaaaaaacacaaacaacaacaaaaaaaaacacacacacaaaaaacaaaaaaacaacaaaacaacaaaacaaaaaaaaaaaaaaaaaaaaaaaaggagaggagagaagagagagagaagcagaaacggcggggggcggcgctgctactactagacgatgtagaggggtcgggcgcggcgagctagtgatggggggagggcggcgggcgtaggagtgatgatggcccactacgcgagaggggggggggggagtagagcggagcgcggggcgggtgtctccaaacaagaaagagagacagagaggaagaacaggagaataagacgacagagagagagaactaaaagaagcaggatgggagcaatatgatagaggagggggaagaaggagggaggaccagtaacactagggaaggaaggaagagcaaaaggaggataatacaggaaagagacgacgggggagatagaagggaagcagagaggaggacggagggagtagaaggaggaagtaggaggagaaggggggagaccgaagaggggagcgaacgtgaagacggagggatgaagaggagaagaggagggcgaggaagggaggggggagaagaagaagagagaggggggcagagtcgaagaggggggagcagcaaagcgaacgaagcgagagaaagcagaggaaagcagcagagaggcacgaaaaggtaaaaaaagaaagaaaaaggaaaagaacg

SEQ ID NO: 43048 - DNA, 3619 bp, Homo sapiens
gggcgcaggcagaatgccaagggatggagaccctcagaagggcaaagccggtgttccatcgtttgaagatctccagacccgcgggacagacagacgcagcgcggtcagggagcgtcggcttcgccgaactctgcggcggagctgggggacggaacagcgcgccggtccctggccgggcgcgagcagaggggcggcgcggggcggtgccgggcggcgggggcggggagggcgcgcgttgaggcggctgcggcagttgcgcgctgggattgttgcggtgcgctggagccgagtttcgctctgctgcccaggctggagtacagtgatgtgatctcctgacgtcaagtgatccattcgcctcggcctcccaaagttctgggattacaagtaatacaaaatacagttaaaataaaatgtcaacctcctggagtgatcggttacagaatgcagcagatatgcctgctaacatggataagcatgccctgaaaaagtatcgtcgagaagcctatcatcgggtgtttgtgaaccgaagtttagcaatggaaaagataaagtgttttggttttgatatggattatacccttgctgtgtacaagtccccagagtatgagtcccttggttttgagcttactgtggagagattagtttctattggctatccccaggagttgctcagctttgcttatgattctacattccctaccaggggacttgtctttgacacactgtatggaaatcttttgaaagtcgatgcctatggaaacctcttggtctgtgcacatggatttaactttataaggggaccagaaactagagaacagtatccaaataaatttatccagcgagatgatactgaaagattttacattctgaacacactattcaacctaccagagacctacctgttggcctgcctagtagatttttttactaattgtcccagatataccagttgtgaaacaggatttaaagatggggacctcttcatgtcctaccggagtatgttccaggatgtaagagatgctgttgactgggttcattacaagggctcccttaaggaaaagacagttgaaaatcttgagaagtatgtagtcaaagatggaaaactgcctttgcttctgagccggatgaaggaagtagggaaagtatttcttgctaccaacagtgactataaatatacagataaaattatgacttacctgtttgacttcccacatggccccaagcctgggagctcccatcgaccatggcagtcctactttgacttgatcttggtggatgcacggaaaccactcttttttggagaaggcacagtactgcgtcaggtggatactaaaactggcaagctgaaaattggtacctacacagggcccctacagcatggtatcgtctactcaggaggttcttctgatacgatctgtgacctgttgggagccaagggaaaagacattttgtatattggagatcacatttttggggacattttaaaatcaaagaaacggcaagggtggcgaacttttttggtgattcctgaactcgcacaggagctacatgtctggactgacaagagttcacttttcgaagaacttcagagcttggatattttcttggctgaactctacaagcatcttgacagcagtagcaatgagcgtccagacatcagttccatccagagacgtattaagaaagtaactcatgacatggacatgtgctatgggatgatgggaagcctgtttcgcagtggctcccggcagaccctttttgccagtcaagtgatgcgttatgctgacctctatgcagcatctttcatcaacctgctgtattaccctttcagctacctcttcagggctgcccatgtcttgatgcctcatgaatcaacggtggagcacacacacgtagatatcaatgagatggagtctcctcttgccacccggaaccgcacatcagtggatttcaaagacactgactacaagcggcaccagctgacacggtcaattagtgagattaaacctcccaacctcttcccactggccccccaggaaattacacactgccatgacgaagatgatgatgaagaggaggaggaggaggaagaataaggaggaaaaccaaaaccccaagcacccattaaacaagtcctggcaggactcacaggaacaaacgaggtccctgttagggttctactcgggggagggagggggctccatgaaaggtacgtctgaaaagtttctgaagattttattatcatagatacttgttttggttttgtgtatctgtactctctgcagatggtccaaaattgtaatggagtctgtattagaagaaaataagggtaaaatcaggctgaactgcatgtatatggctccactgtggcttgtgacacttttaaaatcatccgtatgtcagtgtatctggatacacgaggaaaaggaaagagtctcagagtggaacaaagagtgggaagaggtgatctgtaatgttacaaattgtgctattactccaaggtccaacttttccagtgcattacatggtattgtatatcagtggagaaatgtattatttccatgatcaaatgtagtctctgttaaggtcaagttttcttttataagcctttaattcatcctcagtgactctggcaaggctgcttctctatcactggctttgcacagaagtatgctctacttgcgttgctttagggcaggattctattttgagggaaaagacagtatccttattaccttttgtttgtttaatagcacaaatgcttatttgttatccaaaaacaacctccttcttatctgtgataaatctatagaaagaatttagctgcaagtggacaaaggaacaagcccccagaaaagaaagggaagaactgccttcttatactacagaacatgcattagtgtgggctatatagctgtggctcatgctacccaattccagatttctttgtcctctaagagttgattgctgtatattaaaattgaacatcagaggatgggaagagggctctgtaagccagaaccttactaaagtagagggcacaatcagtgtgaataaattcacttcagaatctcaagtcaaggccaggcacggcggctcacgcctgtaatcccagcactttgggaggccgagacaggcggatcacctgaggtcgggagttcgagaccagccttaccaacatggagaaaccccatctctactaaaaatacaaaattacctgggcgtggtggtgcatgcctgtaatcccatcatctactcaggaggctgaggcaggagaattgcttgaacccaggaggcggaggttgcagtgagccaggattgtgccattgcactccagcctgggcaacaagaacaaaactccatctcaaaaaataaaaatcccaatcccaagtcgaaatcacctcttgttttaaacaagaatgaatcattactgtgtatgttagggtattaaaactgtttcaccagtacagtgaaagttgtttcaacattttaaacaaacagtggttatagactctttctttaaccattgtatattttcttccattcttgtcattggtcaataggggagggtagattagctgctccagaattcaataaagtgtaatatttctaacggtga

SEQ ID NO: 43049 - DNA, 3306 bp, Homo sapiens
tcggacgagggatgtgcgtgcgctggagccgagtttcgctctgctgcccaggctggagtacagtgatgtgatctcctgacgtcaagtgatccattcgcctcggcctcccaaagttctgggattacaagtaatacaaaatacagttaaaataaaatgtcaacctcctggagtgatcggttacagaatgcagcagatatgcctgctaacatggataagcatgccctgaaaaagtatcgtcgagaagcctatcatcgggtgtttgtgaaccgaagtttagcaatggaaaagataaagtgttttggttttgatatggattatacccttgctgtgtacaagtccccagagtatgagtcccttggttttgagcttactgtggagagattagtttctattggctatccccaggagttgctcagctttgcttatgattctacattccctaccaggggacttgtctttgacacactgtatggaaatcttttgaaagtcgatgcctatggaaacctcttggtctgtgcacatggatttaactttataaggggaccagaaactagagaacagtatccaaataaatttatccagcgagatgatactgaaagattttacattctgaacacactattcaacctaccagagacctacctgttggcctgcctagtagatttttttactaattgtcccagatataccagttgtgaaacaggatttaaagatggggacctcttcatgtcctaccggagtatgttccaggatgtaagagatgctgttgactgggttcattacaagggctcccttaaggaaaagacagttgaaaatcttgagaagtatgtagtcaaagatggaaaactgcctttgcttctgagccggatgaaggaagtagggaaagtatttcttgctaccaacagtgactataaatatacagataaaattatgacttacctgtttgacttcccacatggccccaagcctgggagctcccatcgaccatggcagtcctactttgacttgatcttggtggatgcacggaaaccactcttttttggagaaggcacagtactgcgtcaggtggatactaaaactggcaagctgaaaattggtacctacacagggcccctacagcatggtatcgtctactcaggaggttcttctgatacgatctgtgacctgttgggagccaagggaaaagacattttgtatattggagatcacatttttggggacattttaaaatcaaagaaacggcaagggtggcgaacttttttggtgattcctgaactcgcacaggagctacatgtctggactgacaagagttcacttttcgaagaacttcagagcttggatattttcttggctgaactctacaagcatcttgacagcagtagcaatgagcgtccagacatcagttccatccagagacgtattaagaaagtaactcatgacatggacatgtgctatgggatgatgggaagcctgtttcgcagtggctcccggcagaccctttttgccagtcaagtgatgcgttatgctgacctctatgcagcatctttcatcaacctgctgtattaccctttcagctacctcttcagggctgcccatgtcttgatgcctcatgaatcaacggtggagcacacacacgtagatatcaatgagatggagtctcctcttgccacccggaaccgcacatcagtggatttcaaagacactgactacaagcggcaccagctgacacggtcaattagtgagattaaacctcccaacctcttcccactggccccccaggaaattacacactgccatgacgaagatgatgatgaagaggaggaggaggaggaagaataaggaggaaaaccaaaaccccaagcacccattaaacaagtcctggcaggactcacaggaacaaacgaggtccctgttagggttctactcgggggagggagggggctccatgaaaggtacgtctgaaaagtttctgaagattttattatcatagatacttgttttggttttgtgtatctgtactctctgcagatggtccaaaattgtaatggagtctgtattagaagaaaataagggtaaaatcaggctgaactgcatgtatatggctccactgtggcttgtgacacttttaaaatcatccgtatgtcagtgtatctggatacacgaggaaaaggaaagagtctcagagtggaacaaagagtgggaagaggtgatctgtaatgttacaaattgtgctattactccaaggtccaacttttccagtgcattacatggtattgtatatcagtggagaaatgtattatttccatgatcaaatgtagtctctgttaaggtcaagttttcttttataagcctttaattcatcctcagtgactctggcaaggctgcttctctatcactggctttgcacagaagtatgctctacttgcgttgctttagggcaggattctattttgagggaaaagacagtatccttattaccttttgtttgtttaatagcacaaatgcttatttgttatccaaaaacaacctccttcttatctgtgataaatctatagaaagaatttagctgcaagtggacaaaggaacaagcccccagaaaagaaagggaagaactgccttcttatactacagaacatgcattagtgtgggctatatagctgtggctcatgctacccaattccagatttctttgtcctctaagagttgattgctgtatatttagagggcacaatcagtgtgaataaattcacttcagaatctcaagtcaaggccaggcacggcggctcacgcctgtaatcccagcactttgggaggccgagacaggcggatcacctgaggtcgggagttcgagaccagccttaccaacatggagaaaccccatctctactaaaaatacaaaattacctgggcgtggtggtgcatgcctgtaatcccatcatctactcaggaggctgaggcaggagaattgcttgaacccaggaggcggaggttgcagtgagccaggattgtgccattgcactccagcctgggcaacaagaacaaaactccatctcaaaaaataaaaatcccaatcccaagtcgaaatcacctcttgttttaaacaagaatgaatcattactgtgtatgttagggtattaaaactgtttcaccagtacagtgaaagttgtttcaacattttaaacaaacagtggttatagactctttctttaaccattgtatattttcttccattcttgtcattggtcaataggggagggtagattagctgctccagaattcaataaagtgtaatatttctaacggtga

SEQ ID NO: 43050 - DNA, 3447 bp, Homo sapiens
gggcgcaggcagaatgccaagggatggagaccctcagaagggcaaagccggtgttccatcgtttgaagatctccagacccgcgggacagacagacgcagcgcggtcagggagcgtcggcttcgccgaactctgcggcggagctgggggacggaacagcgcgccggtccctggccgggcgcgagcagaggggcggcgcggggcggtgccgggcggcgggggcggggagggcgcgcgttgaggcggctgcggcagttgcgcgctgggattgttgcggtgcgctggagccgaatacaaaatacagttaaaataaaatgtcaacctcctggagtgatcggttacagaatgcagcagatatgcctgctaacatggataagcatgccctgaaaaagtatcgtcgagaagcctatcatcgtgtacaagtccccagagtatgagtcccttggttttgagcttactgtggagagattagtttctattggctatccccaggagttgctcagctttgcttatgattctacattccctaccaggggacttgtctttgacacactgtatggaaatcttttgaaagtcgatgcctatggaaacctcttggtctgtgcacatggatttaactttataaggggaccagaaactagagaacagtatccaaataaatttatccagcgagatgatactgaaagattttacattctgaacacactattcaacctaccagagacctacctgttggcctgcctagtagatttttttactaattgtcccagatataccagttgtgaaacaggatttaaagatggggacctcttcatgtcctaccggagtatgttccaggatgtaagagatgctgttgactgggttcattacaagggctcccttaaggaaaagacagttgaaaatcttgagaagtatgtagtcaaagatggaaaactgcctttgcttctgagccggatgaaggaagtagggaaagtatttcttgctaccaacagtgactataaatatacagataaaattatgacttacctgtttgacttcccacatggccccaagcctgggagctcccatcgaccatggcagtcctactttgacttgatcttggtggatgcacggaaaccactcttttttggagaaggcacagtactgcgtcaggtggatactaaaactggcaagctgaaaattggtacctacacagggcccctacagcatggtatcgtctactcaggaggttcttctgatacgatctgtgacctgttgggagccaagggaaaagacattttgtatattggagatcacatttttggggacattttaaaatcaaagaaacggcaagggtggcgaacttttttggtgattcctgaactcgcacaggagctacatgtctggactgacaagagttcacttttcgaagaacttcagagcttggatattttcttggctgaactctacaagcatcttgacagcagtagcaatgagcgtccagacatcagttccatccagagacgtattaagaaagtaactcatgacatggacatgtgctatgggatgatgggaagcctgtttcgcagtggctcccggcagaccctttttgccagtcaagtgatgcgttatgctgacctctatgcagcatctttcatcaacctgctgtattaccctttcagctacctcttcagggctgcccatgtcttgatgcctcatgaatcaacggtggagcacacacacgtagatatcaatgagatggagtctcctcttgccacccggaaccgcacatcagtggatttcaaagacactgactacaagcggcaccagctgacacggtcaattagtgagattaaacctcccaacctcttcccactggccccccaggaaattacacactgccatgacgaagatgatgatgaagaggaggaggaggaggaagaataaggaggaaaaccaaaaccccaagcacccattaaacaagtcctggcaggactcacaggaacaaacgaggtccctgttagggttctactcgggggagggagggggctccatgaaaggtacgtctgaaaagtttctgaagattttattatcatagatacttgttttggttttgtgtatctgtactctctgcagatggtccaaaattgtaatggagtctgtattagaagaaaataagggtaaaatcaggctgaactgcatgtatatggctccactgtggcttgtgacacttttaaaatcatccgtatgtcagtgtatctggatacacgaggaaaaggaaagagtctcagagtggaacaaagagtgggaagaggtgatctgtaatgttacaaattgtgctattactccaaggtccaacttttccagtgcattacatggtattgtatatcagtggagaaatgtattatttccatgatcaaatgtagtctctgttaaggtcaagttttcttttataagcctttaattcatcctcagtgactctggcaaggctgcttctctatcactggctttgcacagaagtatgctctacttgcgttgctttagggcaggattctattttgagggaaaagacagtatccttattaccttttgtttgtttaatagcacaaatgcttatttgttatccaaaaacaacctccttcttatctgtgataaatctatagaaagaatttagctgcaagtggacaaaggaacaagcccccagaaaagaaagggaagaactgccttcttatactacagaacatgcattagtgtgggctatatagctgtggctcatgctacccaattccagatttctttgtcctctaagagttgattgctgtatattaaaattgaacatcagaggatgggaagagggctctgtaagccagaaccttactaaagtagagggcacaatcagtgtgaataaattcacttcagaatctcaagtcaaggccaggcacggcggctcacgcctgtaatcccagcactttgggaggccgagacaggcggatcacctgaggtcgggagttcgagaccagccttaccaacatggagaaaccccatctctactaaaaatacaaaattacctgggcgtggtggtgcatgcctgtaatcccatcatctactcaggaggctgaggcaggagaattgcttgaacccaggaggcggaggttgcagtgagccaggattgtgccattgcactccagcctgggcaacaagaacaaaactccatctcaaaaaataaaaatcccaatcccaagtcgaaatcacctcttgttttaaacaagaatgaatcattactgtgtatgttagggtattaaaactgtttcaccagtacagtgaaagttgtttcaacattttaaacaaacagtggttatagactctttctttaaccattgtatattttcttccattcttgtcattggtcaataggggagggtagattagctgctccagaattcaataaagtgtaatatttctaacggtga

SEQ ID NO: 43051 - DNA, 3253 bp, Homo sapiens
atgcctgtaatcccaggactttgagaggccgagataggagggttgcttgagcccaggagttcaagatgagccagagcaacatagggtgtttgtgaaccgaagtttagcaatggaaaagataaagtgttttggttttgatatggattatacccttgctggagagccagtgtaactccttcaagactggagtgacacacactgcatctgcatctgcctcattgtacaagtccccagagtatgagtcccttggttttgagcttactgtggagagattagtttctattggctatccccaggagttgctcagctttgcttatgattctacattccctaccaggggacttgtctttgacacactgtatggaaatcttttgaaagtcgatgcctatggaaacctcttggtctgtgcacatggatttaactttataaggggaccagaaactagagaacagtatccaaataaatttatccagcgagatgatactgaaagattttacattctgaacacactattcaacctaccagagacctacctgttggcctgcctagtagatttttttactaattgtcccagatataccagttgtgaaacaggatttaaagatggggacctcttcatgtcctaccggagtatgttccaggatgtaagagatgctgttgactgggttcattacaagggctcccttaaggaaaagacagttgaaaatcttgagaagtatgtagtcaaagatggaaaactgcctttgcttctgagccggatgaaggaagtagggaaagtatttcttgctaccaacagtgactataaatatacagataaaattatgacttacctgtttgacttcccacatggccccaagcctgggagctcccatcgaccatggcagtcctactttgacttgatcttggtggatgcacggaaaccactcttttttggagaaggcacagtactgcgtcaggtggatactaaaactggcaagctgaaaattggtacctacacagggcccctacagcatggtatcgtctactcaggaggttcttctgatacgatctgtgacctgttgggagccaagggaaaagacattttgtatattggagatcacatttttggggacattttaaaatcaaagaaacggcaagggtggcgaacttttttggtgattcctgaactcgcacaggagctacatgtctggactgacaagagttcacttttcgaagaacttcagagcttggatattttcttggctgaactctacaagcatcttgacagcagtagcaatgagcgtccagacatcagttccatccagagacgtattaagaaagtaactcatgacatggacatgtgctatgggatgatgggaagcctgtttcgcagtggctcccggcagaccctttttgccagtcaagtgatgcgttatgctgacctctatgcagcatctttcatcaacctgctgtattaccctttcagctacctcttcagggctgcccatgtcttgatgcctcatgaatcaacggtggagcacacacacgtagatatcaatgagatggagtctcctcttgccacccggaaccgcacatcagtggatttcaaagacactgactacaagcggcaccagctgacacggtcaattagtgagattaaacctcccaacctcttcccactggccccccaggaaattacacactgccatgacgaagatgatgatgaagaggaggaggaggaggaagaataaggaggaaaaccaaaaccccaagcacccattaaacaagtcctggcaggactcacaggaacaaacgaggtccctgttagggttctactcgggggagggagggggctccatgaaaggtacgtctgaaaagtttctgaagattttattatcatagatacttgttttggttttgtgtatctgtactctctgcagatggtccaaaattgtaatggagtctgtattagaagaaaataagggtaaaatcaggctgaactgcatgtatatggctccactgtggcttgtgacacttttaaaatcatccgtatgtcagtgtatctggatacacgaggaaaaggaaagagtctcagagtggaacaaagagtgggaagaggtgatctgtaatgttacaaattgtgctattactccaaggtccaacttttccagtgcattacatggtattgtatatcagtggagaaatgtattatttccatgatcaaatgtagtctctgttaaggtcaagttttcttttataagcctttaattcatcctcagtgactctggcaaggctgcttctctatcactggctttgcacagaagtatgctctacttgcgttgctttagggcaggattctattttgagggaaaagacagtatccttattaccttttgtttgtttaatagcacaaatgcttatttgttatccaaaaacaacctccttcttatctgtgataaatctatagaaagaatttagctgcaagtggacaaaggaacaagcccccagaaaagaaagggaagaactgccttcttatactacagaacatgcattagtgtgggctatatagctgtggctcatgctacccaattccagatttctttgtcctctaagagttgattgctgtatattaaaattgaacatcagaggatgggaagagggctctgtaagccagaaccttactaaagtagagggcacaatcagtgtgaataaattcacttcagaatctcaagtcaaggccaggcacggcggctcacgcctgtaatcccagcactttgggaggccgagacaggcggatcacctgaggtcgggagttcgagaccagccttaccaacatggagaaaccccatctctactaaaaatacaaaattacctgggcgtggtggtgcatgcctgtaatcccatcatctactcaggaggctgaggcaggagaattgcttgaacccaggaggcggaggttgcagtgagccaggattgtgccattgcactccagcctgggcaacaagaacaaaactccatctcaaaaaataaaaatcccaatcccaagtcgaaatcacctcttgttttaaacaagaatgaatcattactgtgtatgttagggtattaaaactgtttcaccagtacagtgaaagttgtttcaacattttaaacaaacagtggttatagactctttctttaaccattgtatattttcttccattcttgtcattggtcaataggggagggtagattagctgctccagaattcaataaagtgtaatatttctaacggtga

SEQ ID NO: 43052 - DNA, 3185 bp, Homo sapiens
tcggacgagggatgtgcgtgcgctggagccgagtttcgctctgctgcccaggctggagtacagtgatgtgatctcctgacgtcaagtgatccattcgcctcggcctcccaaagttctgggattacaagtaatacaaaatacagttaaaataaaatgtcaacctcctggagtgatcggttacagaatgcagcagatatgcctgctaacatggataagcatgccctgaaaaagtatcgtcgagaagcctatcatcgggtgtttgtgaaccgaagtttagcaatggaaaagataaagtgttttggttttgatatggattatacccttgctgtgtacaagtccccagagtatgagtcccttggttttgagcttactgtggagagattagtttctattggctatccccaggagttgctcagctttgcttatgattctacattccctaccaggggacttgtctttgacacactgtatggaaatcttttgaaagtcgatgcctatggaaacctcttggtctgtgcacatggatttaactttataaggggaccagaaactagagaacagtatccaaataaatttatccagcgagatgatactgaaagattttacattctgaacacactattcaacctaccagagacctacctgttggcctgcctagtagatttttttactaattgtcccagatataccagttgtgaaacaggatttaaagatggggacctcttcatgtcctaccggagtatgttccaggatgtaagagatgctgttgactgggttcattacaagggctcccttaaggaaaagacagttgaaaatcttgagaagtatgtagtcaaagatggaaaactgcctttgcttctgagccggatgaaggaagtagggaaagtatttcttgctaccaacagtgactataaatatacagataaaattatgacttacctgtttgacttcccacatggccccaagcctgggagctcccatcgaccatggcagtcctactttgacttgatcttggtggatgcacggaaaccactcttttttggagaaggcacagtactgcgtcaggtggatactaaaactggcaagctgaaaattggtacctacacagggcccctacagcatggtatcgtctactcaggaggttcttctgatacgatctgtgacctgttgggagccaagggaaaagacattttgtatattggagatcacatttttggggacattttaaaatcaaagaaacggcaagggtggcgaacttttttggtgattcctgaactcgcacaggagctacatgtctggactgacaagagttcacttttcgaagaacttcagagcttggatattttcttggctgaactctacaagcatcttgacagcagtagcaatgagcgtccagacatcagttccatccagagacgtattaagatgcctcatgaatcaacggtggagcacacacacgtagatatcaatgagatggagtctcctcttgccacccggaaccgcacatcagtggatttcaaagacactgactacaagcggcaccagctgacacggtcaattagtgagattaaacctcccaacctcttcccactggccccccaggaaattacacactgccatgacgaagatgatgatgaagaggaggaggaggaggaagaataaggaggaaaaccaaaaccccaagcacccattaaacaagtcctggcaggactcacaggaacaaacgaggtccctgttagggttctactcgggggagggagggggctccatgaaaggtacgtctgaaaagtttctgaagattttattatcatagatacttgttttggttttgtgtatctgtactctctgcagatggtccaaaattgtaatggagtctgtattagaagaaaataagggtaaaatcaggctgaactgcatgtatatggctccactgtggcttgtgacacttttaaaatcatccgtatgtcagtgtatctggatacacgaggaaaaggaaagagtctcagagtggaacaaagagtgggaagaggtgatctgtaatgttacaaattgtgctattactccaaggtccaacttttccagtgcattacatggtattgtatatcagtggagaaatgtattatttccatgatcaaatgtagtctctgttaaggtcaagttttcttttataagcctttaattcatcctcagtgactctggcaaggctgcttctctatcactggctttgcacagaagtatgctctacttgcgttgctttagggcaggattctattttgagggaaaagacagtatccttattaccttttgtttgtttaatagcacaaatgcttatttgttatccaaaaacaacctccttcttatctgtgataaatctatagaaagaatttagctgcaagtggacaaaggaacaagcccccagaaaagaaagggaagaactgccttcttatactacagaacatgcattagtgtgggctatatagctgtggctcatgctacccaattccagatttctttgtcctctaagagttgattgctgtatattaaaattgaacatcagaggatgggaagagggctctgtaagccagaaccttactaaagtagagggcacaatcagtgtgaataaattcacttcagaatctcaagtcaaggccaggcacggcggctcacgcctgtaatcccagcactttgggaggccgagacaggcggatcacctgaggtcgggagttcgagaccagccttaccaacatggagaaaccccatctctactaaaaatacaaaattacctgggcgtggtggtgcatgcctgtaatcccatcatctactcaggaggctgaggcaggagaattgcttgaacccaggaggcggaggttgcagtgagccaggattgtgccattgcactccagcctgggcaacaagaacaaaactccatctcaaaaaataaaaatcccaatcccaagtcgaaatcacctcttgttttaaacaagaatgaatcattactgtgtatgttagggtattaaaactgtttcaccagtacagtgaaagttgtttcaacattttaaacaaacagtggttatagactctttctttaaccattgtatattttcttccattcttgtcattggtcaataggggagggtagattagctgctccagaattcaataaagtgtaatatttctaacggtga

SEQ ID NO: 43053 - DNA, 2498 bp, Homo sapiens
taattagccgtatctctcttttgaaattaagagttttggtcttaactgaaacagtcaaacaaacccactaattgaaaagagtaagtgccattcatttggctgtctggccaagtagcactggtggtggggggtgggatgggagggttgtggggtgaggggaggattgtgataggatgataaagtattacaaaatccatattcttcatacagaaaactggcaagctgaaaattggtacctacacagggcccctacagcatggtatcgtctactcaggaggttcttctgatacgatctgtgacctgttgggagccaagggaaaagacattttgtatattggagatcacatttttggggacattttaaaatcaaagaaacggcaagggtggcgaacttttttggtgattcctgaactcgcacaggagctacatgtctggactgacaagagttcacttttcgaagaacttcagagcttggatattttcttggctgaactctacaagcatcttgacagcagtagcaatgagcgtccagacatcagttccatccagagacgtattaagaaagtaactcatgacatggacatgtgctatgggatgatgggaagcctgtttcgcagtggctcccggcagaccctttttgccagtcaagtgatgcgttatgctgacctctatgcagcatctttcatcaacctgctgtattaccctttcagctacctcttcagggctgcccatgtcttgatgcctcatgaatcaacggtggagcacacacacgtagatatcaatgagatggagtctcctcttgccacccggaaccgcacatcagtggatttcaaagacactgactacaagcggcaccagctgacacggtcaattagtgagattaaacctcccaacctcttcccactggccccccaggaaattacacactgccatgacgaagatgatgatgaagaggaggaggaggaggaagaataaggaggaaaaccaaaaccccaagcacccattaaacaagtcctggcaggactcacaggaacaaacgaggtccctgttagggttctactcgggggagggagggggctccatgaaaggtacgtctgaaaagtttctgaagattttattatcatagatacttgttttggttttgtgtatctgtactctctgcagatggtccaaaattgtaatggagtctgtattagaagaaaataagggtaaaatcaggctgaactgcatgtatatggctccactgtggcttgtgacacttttaaaatcatccgtatgtcagtgtatctggatacacgaggaaaaggaaagagtctcagagtggaacaaagagtgggaagaggtgatctgtaatgttacaaattgtgctattactccaaggtccaacttttccagtgcattacatggtattgtatatcagtggagaaatgtattatttccatgatcaaatgtagtctctgttaaggtcaagttttcttttataagcctttaattcatcctcagtgactctggcaaggctgcttctctatcactggctttgcacagaagtatgctctacttgcgttgctttagggcaggattctattttgagggaaaagacagtatccttattaccttttgtttgtttaatagcacaaatgcttatttgttatccaaaaacaacctccttcttatctgtgataaatctatagaaagaatttagctgcaagtggacaaaggaacaagcccccagaaaagaaagggaagaactgccttcttatactacagaacatgcattagtgtgggctatatagctgtggctcatgctacccaattccagatttctttgtcctctaagagttgattgctgtatattaaaattgaacatcagaggatgggaagagggctctgtaagccagaaccttactaaagtagagggcacaatcagtgtgaataaattcacttcagaatctcaagtcaaggccaggcacggcggctcacgcctgtaatcccagcactttgggaggccgagacaggcggatcacctgaggtcgggagttcgagaccagccttaccaacatggagaaaccccatctctactaaaaatacaaaattacctgggcgtggtggtgcatgcctgtaatcccatcatctactcaggaggctgaggcaggagaattgcttgaacccaggaggcggaggttgcagtgagccaggattgtgccattgcactccagcctgggcaacaagaacaaaactccatctcaaaaaataaaaatcccaatcccaagtcgaaatcacctcttgttttaaacaagaatgaatcattactgtgtatgttagggtattaaaactgtttcaccagtacagtgaaagttgtttcaacattttaaacaaacagtggttatagactctttctttaaccattgtatattttcttccattcttgtcattggtcaataggggagggtagattagctgctccagaattcaataaagtgtaatatttctaacggtga

SEQ ID NO: 43054 - DNA, 1812 bp, Homo sapiens
  misc_feature (40)..(40): n is a, c, g, or t
aggtgatctagaggatctcctgctgctccctcttcagggnctgccatgtttgatgcctcatgaatcaacggtggagcacacacacgtagatatcaatgagatggagtctcctcttgccacccggaaccgcacatcagtggatttcaaagacactgactacaagcggcaccagctgacacggtcaattagtgagattaaacctcccaacctcttcccactggccccccaggaaattacacactgccatgacgaagatgatgatgaagaggaggaggaggaggaagaataaggaggaaaaccaaaaccccaagcacccattaaacaagtcctggcaggactcacaggaacaaacgaggtccctgttagggttctactcgggggagggagggggctccatgaaaggtacgtctgaaaagtttctgaagattttattatcatagatacttgttttggttttgtgtatctgtactctctgcagatggtccaaaattgtaatggagtctgtattagaagaaaataagggtaaaatcaggctgaactgcatgtatatggctccactgtggcttgtgacacttttaaaatcatccgtatgtcagtgtatctggatacacgaggaaaaggaaagagtctcagagtggaacaaagagtgggaagaggtgatctgtaatgttacaaattgtgctattactccaaggtccaacttttccagtgcattacatggtattgtatatcagtggagaaatgtattatttccatgatcaaatgtagtctctgttaaggtcaagttttcttttataagcctttaattcatcctcagtgactctggcaaggctgcttctctatcactggctttgcacagaagtatgctctacttgcgttgctttagggcaggattctattttgagggaaaagacagtatccttattaccttttgtttgtttaatagcacaaatgcttatttgttatccaaaaacaacctccttcttatctgtgataaatctatagaaagaatttagctgcaagtggacaaaggaacaagcccccagaaaagaaagggaagaactgccttcttatactacagaacatgcattagtgtgggctatatagctgtggctcatgctacccaattccagatttctttgtcctctaagagttgattgctgtatattaaaattgaacatcagaggatgggaagagggctctgtaagccagaaccttactaaagtagagggcacaatcagtgtgaataaattcacttcagaatctcaagtcaaggccaggcacggcggctcacgcctgtaatcccagcactttgggaggccgagacaggcggatcacctgaggtcgggagttcgagaccagccttaccaacatggagaaaccccatctctactaaaaatacaaaattacctgggcgtggtggtgcatgcctgtaatcccatcatctactcaggaggctgaggcaggagaattgcttgaacccaggaggcggaggttgcagtgagccaggattgtgccattgcactccagcctgggcaacaagaacaaaactccatctcaaaaaataaaaatcccaatcccaagtcgaaatcacctcttgttttaaacaagaatgaatcattactgtgtatgttagggtattaaaactgtttcaccagtacagtgaaagttgtttcaacattttaaacaaacagtggttatagactctttctttaaccattgtatattttcttccattcttgtcattggtcaataggggagggtagattagctgctccagaattcaataaagtgtaatatttctaacggtga

SEQ ID NO: 43055 - DNA, 1781 bp, Homo sapiens
tcggacgagggatgtgcgtgcgctggagccgagtttcgctctgctgcccaggctggagtacagtgatgtgatctcctgacgtcaagtgatccattcgcctcggcctcccaaagttctgggattacaagtaatacaaaatacagttaaaataaaatgtcaacctcctggagtgatcggttacagaatgcagcagatatgcctgctaacatggataagcatgccctgaaaaagtatcgtcgagaagcctatcatcgggtgtttgtgaaccgaagtttagcaatggaaaagataaagtgttttggttttgatatggattatacccttgctgtgtacaagtccccagagtatgagtcccttggttttgagcttactgtggagagattagtttctattggctatccccaggagttgctcagctttgcttatgattctacattccctaccaggggacttgtctttgacacactgtatggaaatcttttgaaagtcgatgcctatggaaacctcttggtctgtgcacatggatttaactttataaggggaccagaaactagagaacagtatccaaataaatttatccagcgagatgatactgaaagattttacattctgaacacactattcaacctaccagagacctacctgttggcctgcctagtagatttttttactaattgtcccagatataccagttgtgaaacaggatttaaagatggggacctcttcatgtcctaccggagtatgttccaggatgtaagagatgctgttgactgggttcattacaagggctcccttaaggaaaagacagttgaaaatcttgagaagtatgtagtcaaagatagtaaaagtagcagaatacagtattttctcaaagtactgtggtaaagatttcttgttttcagtttttgtgcttcctattttcacccacctcccttatttcaagaaagaacactgaatggggagggtccgggagaatttgagtgaaggaatctatttgctatgcgagaaggaaaagatatttttctttccaggcacatgaggggttagaatttcctcatttaagcgcacgtgggtgtgggtatttctaggtagcatctgcacatgtcatttcattctgcaaggtgttttataaaaccatagtgtacacactgaaagccatatctaataatctctatgtagagcatgtttaaatcagcttctgctgacctttaacacacctcacatacttcaagaaatctcaaggtaatttaaactctttcctgaggcagacatcatgaggaaggtagagatatgttgttaacagccatataacccctataaatatgtgtataattttacatgtaaatctattacatacactgtgtatactacatatgttaatactttattcatttatagtgataatgtgggcttttaagtgcaaaattctgaaatcagctaacccttaaaaggttcccccattcctgttgtggacagaaatccagtatttgacaatccagcctgggcaacaagaacaaaactccatctcaaaaaataaaaatcccaatcccaagtcgaaatcacctcttgttttaaacaagaatgaatcattactgtgtatgttagggtattaaaactgtttcaccagtacagtgaaagttgtttcaacattttaaacaaacagtggttatagactctttctttaaccattgtatattttcttccattcttgtcattggtcaataggggagggtagattagctgctccagaattcaataaagtgtaatatttctaacggtga

SEQ ID NO: 43056 - DNA, 1162 bp, Homo sapiens
tcggacgagggatgtgcgtgcgctggagccgagtttcgctctgctgcccaggctggagtacagtgatgtgatctcctgacgtcaagtgatccattcgcctcggcctcccaaagttctgggattacaagtaatacaaaatacagttaaaataaaatgtcaacctcctggagtgatcggttacagaatgcagcagatatgcctgctaacatggataagcatgccctgaaaaagtatcgtcgagaagcctatcatcgggtgtttgtgaaccgaagtttagcaatggaaaagataaagtgttttggttttgatatggattatacccttgctgtgtacaagtccccagagtatgagtcccttggttttgagcttactgtggagagattagtttctattggctatccccaggagttgctcagctttgcttatgattctacattccctaccaggggacttgtctttgacacactgtatggaaatcttttgaaagtcgatgcctatggaaacctcttggtctgtgcacatggatttaactttataaggggaccagaaactagagaacagtatccaaataaatttatccagcgagatgatactgaaagattttacattctgaacacactattcaacctaccagagacctacctgttggcctgcctagtagatttttttactaattgtcccagatataccagttgtgaaacaggatttaaagatggggacctcttcatgtcctaccggagtatgttccaggatgtaagagatgctgttgactgggttcattacaagggctcccttaaggaaaagacagttgaaaatcttgagaagtatgtagtcaaagatggaaaactgcctttgcttctgagccggatgaaggaagtagggaaagtatttcttgctaccaacagtgactataaatatacagataacaatttcatgacgttacctgtttggatttcccacatgggcccaagcctgggagctcccattcgaaccatgggcagtccttacttgacttgatcttggtggatgcagggaaaccactctttattgggagagggaagcagcgtcaggggtcactaaatggcagtggatgggcctacacgaggcctacggtggaggcacccgaggcctagaagacgaactgtggagcggaaaatgggag

SEQ ID NO: 43057 - DNA, 1445 bp, Homo sapiens
cgtacgttgtaatccgaagctcacatgtgtcaaactataccagacatcacggttctcccagcccgtcagcatccctgtagcccacgagaagacgtctttcccccagaggttacaccatgaaattcaatctaacctcattttcctttaaaaacctattctggctgggcgtggtggtgcatgcctgtaatcccatcatctactcaggaggctgaggcaggagaattgcttgaacccaggaggcggaggttgcagtgagccaggattgtgccattgcactccagcctgggcaacaagaacaaaactccatctcaaaaaataaaaatcccaatcccaagtcgaaatcacctcttgttttaaacaagaatgaatcattactgtgtatgttagggtattaaaactgtttcaccagtacagtgaaagttgtttcaacattttaaacaaacagtggttatagactctttctttaaccattgtatattttcttccattcttgtcattggtcaataggggagggtagattagctgctccagaattcaataaagtgtaatatttctaacggtgactttgacctattctgtagtacaactgtaatagctattggtcttcaagtgggtttagatttggtgacatcagtttgatattctcttaaaggaaataaatattcaagaactgattatcatgcaacaaacacaaaaaacaaaaaacaaaaaaaacacaaaacaaaaaaacacaaacaacaacaaaaaaaaacacacacacaaaaaacaaaaaaacaacaaaacaacaaaacaaaaaaaaaaaaaaaaaaaaaaaaggagaggagagaagagagagagaagcagaaacggcggggggcggcgctgctactactagacgatgtagaggggtcgggcgcggcgagctagtgatggggggagggcggcgggcgtaggagtgatgatggcccactacgcgagaggggggggggggagtagagcggagcgcggggcgggtgtctccaaacaagaaagagagacagagaggaagaacaggagaataagacgacagagagagagaactaaaagaagcaggatgggagcaatatgatagaggagggggaagaaggagggaggaccagtaacactagggaaggaaggaagagcaaaaggaggataatacaggaaagagacgacgggggagatagaagggaagcagagaggaggacggagggagtagaaggaggaagtaggaggagaaggggggagaccgaagaggggagcgaacgtgaagacggagggatgaagaggagaagaggagggcgaggaagggaggggggagaagaagaagagagaggggggcagagtcgaagaggggggagcagcaaagcgaacgaagcgagagaaagcagaggaaagcagcagagaggcacgaaaaggtaaaaaaagaaagaaaaaggaaaagaacg

SEQ ID NO: 43058 - DNA, 726 bp, Homo sapiens
gggcgcaggcagaatgccaagggatggagaccctcagaagggcaaagccggtgttccatcgtttgaagatctccagacccgcgggacagacagacgcagcgcggtcagggagcgtcggcttcgccgaactctgcggcggagctgggggacggaacagcgcgccggtccctggccgggcgcgagcagaggggcggcgcggggcggtgccgggcggcgggggcggggagggcgcgcgttgaggcggctgcggcagttgcgcgctgggattgttgcggtgcgctggagccgagtttcgctctgctgcccaggctggagtacagtgatgtgatctcctgacgtcaagtgatccattcgcctcggcctcccaaagttctgggattacaagtgtgagccactgccactggctgaaaaagtcttattgtggcataattgaatacaaaatacagttaaaataaaatgtcaacctcctggagtgatcggttacagaatgcagcagatatgcctgctaacatggataagcatgccctgaaaaagtatcgtcgagaagcctatcatcgagacaaagtcttgctgtgttacccaggttgatcttgaactcttgttctcaagtgatcctcctgccttgtccttccaaagtgctgggattacaagtgtgagccaccatgccccgtgtttaaaataaagtatatgtgtgcttttagaacaataaaaacattatatatatat

SEQ ID NO: 43059 - DNA, 599 bp, Homo sapiens
tcagcagagaatagatctttattagccacaaattcttctacagaaatcaaatggtcagatcataaaaatcaaattgccagttattgctgccactaatgggaaataacttatcagctgcaaaagaacaaaaaaaaacccataaaattagtagagaagaaaactaaaaatagaaaaacatcatcagcaaatttatattgctgctttggatttacttctggaagccaagacatgctgggcttaaactacccatgagatgcacttctctggtgacagtttacctggtgatatggtttggctgtatccccacccaaatctgctcttgaattgtaatccccataatcccttcatgtctagggagagacctggtgggaggtgactggcacatgggggcagttcccccatgctgttcttgtgatagcaagtgagttctcacaagacctgatggtttttataaggggctctttccccttcgctcctctctctctcacctgctgccatgtaagatgtgccttttcctgttccaccatgattgtaagtttcatgaggcctctccagccattcagaactgtgagtcaattaaacctttcctttataaatta

SEQ ID NO: 43060 - DNA, 1731 bp, Homo sapiens
gagcagagcctactccagcctcccccgtccaatgtatgaaagccccagctgatctgtaagcctgggagcgtgataaatgcttagtagtgcatgccatggagttccagggtggtttattacacggcaatatctagctaaatacatttaacttgctgcagctctctggatccagcctggttaccaggaagacaaaaactgggctccaccaggaaccagtcttctgccttcccaaccatcacctctggctgcatcagcgatctctcccagcgaaatagctgcttggtcttgtgtgaatcctgtactttaacacagtggaccaagtgtcagtcattgaaaatgaccatgagtaaccctgtggactctctgcagcttggttcctttgccccttaacaggtgggtatgaatcgtgtcttcagtgccagggctgaatgagaaagggcattcctttttgaaggaatctgatactaaacacaaagcatgagaaaaatcaggacttgttggagttatatttttaaaatatatattttaacagttatatatattagatataatatataatagtatatataaataatactatattgcccaggctggtctcgaactccttagctcaagtgatcctcctgccttggcttcccaaagtgctaggattacaggtgtgagccactgcgcccggcctgttggagttctttacatttattttataatcaatgctgttttattaaatgcggattttattttggattacaggatgtagaatgccatatttttcttagatcatagggcctttcacatttgtaatttggccttgtatgagttaccctgcaatccctttgttttccccataacccttccaaaggaaggccgcaatagaaatacaaagagaaacaaaataattagaatattttttaacttctaaagttcaaggttttggcataagtctggtttagaagcacatttgcctagccctttccttcccaccaagggggaaagtcttcctctagacaagaggcagagggctcctcagagtcagatcctggtgtgggctctcacgtgctgctgctgaatcccagggaaggagggaggaagggcagttgacacccaaaataagggtggggaactgtcagcagaggaggtctgtgtcatgtttttcagcgctggggttggggggagcccaggagagcaggaagatccagagatccctcgccccagctcggccatgtgtgtctgggacagagcctgaggtggcctgagcttcctgtggctccagagtaacattatagagaagctgaattctcctgtttttctgaaaagggcatgggagttagctgagaagcagacctggtgggcctgagagtctcaatcgtcaggtaaggacagtcagtgggaagtggacgggccgcacaaccaaggttctcatgaggacaaccatgtcttcgggggtgcccttgtgcacagacagctccatagtcctgcctccaatgtcccaacactgcattgtctccctgcacttagcagccctgcagggtgagacttggggaggatcctgaaatgattgtatttaacaagacatgctgtccttgtttacctggaacctagcaatgttgttttctgccacaacttgaatagatacttgaagcagagatgatgttgagttaaaaaaaatatatacataaaaatatgggttcttttcaacctgaatagatggcctaaaaattcaaaaatgcctca

SEQ ID NO: 43061 - DNA, 398 bp, Homo sapiens
cttggatggggcaccaaagaaggaggagggtttagtcttgaggtgggaaggaggaggaggcttttcaggagggagaccaggaacagcgtagggagggaaagcctctacctcagcaggcctggtgcctgtggatctgtgggattgataagggtccccatgctccataacattgatgcaggagtctgaggatcatgctttgggaaaaaaatatcagatctgaaaaggagttgcacgtatgtgttaggaatttaatccacttgtgctgtattcatctgccctctaaacattcactgaagctgactgctgggctaggcctgggggttggggtggggatggaagaggatgagtacaatgatgaatggcagagttgctgccctcaagcaactcacatgagacca

SEQ ID NO: 43062 - DNA, 345 bp, Homo sapiens
aaactgagaatatgttttgtgagagaatacagggaagcaaaaattctgtcacctaaatataagcacactttttaaatgtgttcaaaattgtatggctgtttttgaagtttctttaagcttctggattataaattttgaaataaattcttttggaactatatgggtgaaaattgatgatgtgtaagtgtggaagtcttcaggggtgcctagagcagctagacagatagttaagcttctcaccggaagttgcacctaccagcagctgaaacactgtcagcaaaatacttgtactgtgtgatggatgagcttggggatagcaggattacatgtgatactatccagttt

SEQ ID NO: 43063 - DNA, 399 bp, Homo sapiens
gctagtcttccatttttttctggtgtccaagcaccacccccagagtggagtcctgcctccagagttgagtctggccttctatctcaggagggctttcccctagagcttccagagggagtacggccatgctgacacctaaagtatggacttctggcctccagaactatcagagaataaatttctgttgtttgaaccactcagtctgtggtcatttcctgaagcaaccatagaaaactcaaacaagtcttaactgcagattcttaggagagaatctgattggtttaggctgactcaaatgcaacagatcccttggtccaattatcttctgccagagagatgagtctcatgagattaatatgactgccagggcccagtcctatgtggaggatgggtgtcatt

SEQ ID NO: 43064 - DNA, 500 bp, Homo sapiens
acctacacaaatccattatattttaagagatgctcaatttgcatcctttaagtttctcatgcttccccttctccacttcttaaattcttaaaaagctataaactgcataagttcgaggaacttaggtcgtccataatattgctaatgaccagccttaaactagacaaccactgaagaacctggcctatgagctgagaaacttgggttcttttatggctggccattaacgacaagtggggctgtaccactgtgctggtcacttgaagttctctgagtcacctgaaaatgagggagtaattggagccaaaagaggtctgtcgtcataggcagccaatctagaattctagaatcctccaaatttagtttaatatcacatactatactgggttactcaaaacagtgtcattctggctgggggttggttggctcacgcctgtaatcccaacactttggaaggccgaggcaggtggatcacttgaggtcaggagttccagaccagc

SEQ ID NO: 43065 - DNA, 504 bp, Homo sapiens
aggactaatgagtatattttagtattgattgaggattctgtttttgctgggtaggtgcagtagaaaatatagcagtctaagggaattgaggatgcagtgagagaataataaattgtgatggtgagtgctgaatagggaaagacaagaagccagaaaaagactgagcttcttaggaaaacattaatggatcacaaacttggagggctgtatggtttttcatttaagaaagtaattgtcgtgcaataaagttattaagccttgtttaagaatatttttattttgtacatcaagtggagttggaaatagttggtttcataatgatatatttcaaaagtatcttgaagtcatctggttcatttcactacccagggcacacattcctcctgtaacatcccaagtggttattaagcaaaacagatttattttatttagaaaaaattagtatgactgatttgctattgattttgtacttctataataaatgtgatacatgctatattcact

SEQ ID NO: 43066 - DNA, 1554 bp, Homo sapiens
  misc_feature (1364)..(1364): n is a, c, g, or t
  misc_feature (1462)..(1462): n is a, c, g, or t
aggcttgctgggggatgtcggctgatgcgagctggagagcgcgtgtggcggccgcggcgccagtgtttgtgtgtatgtgagaaagcaaggggcgagcgcgagtgcgagtgaggcaaagatagagcgcatgtctcatccctgcgagcagccactagacgctccaccaccatcttttgcatgtgcaacatttgcagccggacagaaaacctctcccagggctatggagactgcgggaaaaatctggcggctcgcgatggattgctaaggagaactagtcataatcttaaaccaccgaaacctctttccttttttttctttcttttctttcttttctttttttttttttttttggttgattttaattttagcgccatcgtcttcaatgcttctctgaacagcctttaggaagagtgcgagagaaagagagagagcgcgcgccagggagaggagaaaagaagatgaggattatttccagacagattgtcttgttattttctggattttggggactcgccatgggagcctttccgagcagcgtgcaaataggtggtctcttcatccgaaacacagatcaggaatacactgcttttcgattagcaatttttcttcataacaccagccccaatgcgtcggaagctccttttaatttggtacctcatgtggacaacattgagacagccaacagttttgctgtaacaaacgccttctgttcccagtattctagaggagtatttgccatttttggactctatgataagaggtcggtacataccttgacctcattctgcagcgccttacatatctccctcatcacaccaagtttccctactgagggggagagccagtttgtgctgcaactaagaccttcgttacgaggagcactcttgagtttgctggatcactacgaatggaactgttttgtcttcctgtatgacacagacaggggatactcgatactccaagctattatggaaaaagcaggacaaaatggttggcatgtcagcgctatatgtgtggaaaattttaatgatgtcagctataggcaacttctagaagaacttgacagaagacaagagaagaagtttgtaatagactgtgagatagagagacttcaaaacatattagaacaggtaagtcctagattttatatttttaacctagaccctatacagaaaaatttaacctttgattgacttgtccccatcaacatcttctcccagcttttaatttggagtgtgaggtttgagagttttcattccatgactatcttcaggaccaaatcacaatcttttatcaccaaggacctttttggttcttaagtctcaatgtatttagaaagctatttctcacatattcttaagacntgaatgagtgaaagactctgtgtgaatcttgaagagctcttggcctccagttttcgaaaatattaatgttgaagattaatcccatctaaaaatagtanaaaaattctaaatttgtgggtgcaccatttttagaggcacacttactttagagaagtgctacatgagaaacagcaacataaattactaaagc

SEQ ID NO: 43067 - DNA, 1157 bp, Homo sapiens
agtggcagaagagggctaggctgagagggaagccaggactgtaggagagggaggcagcccgtcctcctcacgaacctgcaaggatgcggcaggggcctgggggcatggggaggtactaaccccccggagcccccgattggggcttgcagacctggcccgtgggcggattttctgcctagcgcagccgagaagcagaggtgccaggaaaaccaagagaggggcgctgggggtgcccatccccagagtcggtccctctgcgaaccgaggaagaaaagaggagggagtcagcgagtggtcagaagggaaaacctgacaccagactggctccggagcgtccgggagactggggcgctccgcgccatcgtcttcaatgcttctctgaacagcctttaggaagagtgcgagagaaagagagagagcgcgcgccagggagaggagaaaagaagatgaggattatttccagacagattgtcttgttattttctggattttggggactcgccatgggagcctttccgagcagcgtgcaaataggtggtctcttcatccgaaacacagatcaggaatacactgcttttcgattagcaatttttcttcataacaccagccccaatgcgtcggaagctccttttaatttggtacctcatgtggacaacattgagacagccaacagttttgctgtaacaaacgcctgtaagtaaaacataagctatgaaaaattagaagagaactgaaaccaagcaatggagtcctcttcctctttgttatttaatttttttagaaagaatttcaagattcccacagttgcctggtttcaggacaaatcagagttaaaaacaagacttcgtttcagggatatttagttgttttttttttcttttccttaatttatttttcttttctttcttctcctccctctctttgcttcttcctgactttctcttttattcattatctgtctagatcattcaagttaaattttcctttaacattttagtgttattcctatcatccgaatgtcaatttagtgaaaattgtactcaagctagttttttattcttttcctttggtttttcttatttgcttttcacttgagtaagcataggtcttgcttttaaagaagaaacatgaagactatggaaggcttgctaatagtg

SEQ ID NO: 43068 - DNA, 3155 bp, Homo sapiens
agtggcagaagagggctaggctgagagggaagccaggactgtaggagagggaggcagcccgtcctcctcacgaacctgcaaggatgcggcaggggcctgggggcatggggaggtactaaccccccggagcccccgattggggcttgcagacctggcccgtgggcggattttctgcctagcgcagccgagaagcagaggtgccaggaaaaccaagagaggggcgctgggggtgcccatccccagagtcggtccctctgcgaaccgaggaagaaaagaggagggagtcagcgagtggtcagaagggaaaacctgacaccagactggctccggagcgtccgggagactggggcgctccgcgccatcgtcttcaatgcttctctgaacagcctttaggaagagtgcgagagaaagagagagagcgcgcgccagggagaggagaaaagaagatgaggattatttccagacagattgtcttgttattttctggattttggggactcgccatgggagcctttccgagcagcgtgcaaataggtggtctcttcatccgaaacacagatcaggaatacactgcttttcgattagcaatttttcttcataacaccagccccaatgcgtcggaagctccttttaatttggtacctcatgtggacaacattgagacagccaacagttttgctgtaacaaacgccttctgttcccagtattctagaggagtatttgccatttttggactctatgataagaggtcggtacataccttgacctcattctgcagcgccttacatatctccctcatcacaccaagtttccctactgagggggagagccagtttgtgctgcaactaagaccttcgttacgaggagcactcttgagtttgctggatcactacgaatggaactgttttgtcttcctgtatgacacagacaggggatactcgatactccaagctattatggaaaaagcaggacaaaatggttggcatgtcagcgctatatgtgtggaaaattttaatgatgtcagctataggcaacttctagaagaacttgacagaagacaagagaagaagtttgtaatagactgtgagatagagagacttcaaaacatattagaacagattgtaagtgttggaaagcatgttaaaggctaccattatatcattgcaaacttgggattcaaggatatttctcttgagaggtttatacatggtggagccaatgttactggattccagttggtggattttaatacacctatggtaatcaaactaatggatcgctggaagaaactagatcagagagagtatccaggatctgagactcctccaaagtacacctctgctctgacttatgatggagtccttgtgatggctgaaactttccgaagtcttaggaggcagaaaattgatatctcaaggagaggaaagtctggggattgtctggcaaatcctgctgctccatggggccagggaattgacatggagaggacactcaaacaggttcgaattcaagggctgacagggaatgttcagtttgaccactatggacgtagagtcaattacacaatggatgtgtttgagctgaaaagcacaggacctagaaaggttggttactggaatgatatggataagttagtcttgattcaagatgtaccaactcttggcaatgacacagctgctattgagaacagaacagtggttgtaaccacaattatggaatccccatatgttatgtacaagaaaaatcatgaaatgtttgaaggaaatgacaagtatgaaggatactgtgtagatttggcatctgaaattgcaaaacatattggtatcaagtataaaattgccattgtccctgatggaaaatatggagcaagggatgcagacacaaaaatctggaatgggatggtaggagaacttgtttatgggaaagcagagattgctattgcccctctgacaatcactttggtacgagaggaggtcattgacttttctaagcccttcatgagtttgggcatatctatcatgatcaaaaagcctcagaaatccaaaccaggagtgttttccttcttggatcctctggcctatgagatttggatgtgcatagtctttgcctacattggtgtcagcgtggtcttattcctagttagtagatttagtccatatgagtggcacacagaagagccagaggacggaaaggaaggacccagcgaccagcctcccaatgagtttggcatctttaacagcctctggttttccctgggtgcttttatgcagcaaggatgtgacatttcacccagatccctctcaggtcgaattgttggaggtgtttggtggttctttacactcatcattatatcatcttatactgctaacctggctgctttcctgacggttgagcgaatggtctctcccatagaaagtgcagaagacctggccaaacaaacagaaattgcctatggaacactggattcaggatcaacaaaagaattcttcagaagatcaaaaatagcagtgtatgaaaagatgtggacctacatgcgatcagcagagccatcagtattcactaggactacagctgagggagtagctcgtgtccgcaaatccaagggcaaatttgcctttctcctggagtccactatgaatgataacattgagcagcgaaagccatgtgacacgatgaaagtgggaggaaatctggattccaaaggctatggagtagcaacgcccaagggttcctcattaagaactcctgtaaaccttgccgttttgaaactcagtgaggcaggcgtcttagacaagctgaaaaacaaatggtggtacgataaaggtgaatgtggacccaaagactctggaagcaaggacaagacgagtgccttgagcctgagcaatgtagcaggcgtcttctacattctggttggcggcttgggcttggcaatgctggtggctttgatagagttctgttacaagtccagggcagaagcgaagagaatgaagctgaccttttctgaagccataagaaacaaagccagattatccatcactgggagtgtgggagagaatggccgcgtcttgacgcctgactgcccaaaggctgtacacactggaactgcaatcagacaaagttcaggattggctgtcattgcatcggacctaccataa

SEQ ID NO: 43069 - DNA, 3167 bp, Homo sapiens
aggcttgctgggggatgtcggctgatgcgagctggagagcgcgtgtggcggccgcggcgccagtgtttgtgtgtatgtgagaaagcaaggggcgagcgcgagtgcgagtgaggcaaagatagagcgcatgtctcatccctgcgagcagccactagacgctccaccaccatcttttgcatgtgcaacatttgcagccggacagaaaacctctcccagggctatggagactgcgggaaaaatctggcggctcgcgatggattgctaaggagaactagtcataatcttaaaccaccgaaacctctttccttttttttctttcttttctttcttttctttttttttttttttttggttgattttaattttagcgccatcgtcttcaatgcttctctgaacagcctttaggaagagtgcgagagaaagagagagagcgcgcgccagggagaggagaaaagaagatgaggattatttccagacagattgtcttgttattttctggattttggggactcgccatgggagcctttccgagcagcgtgcaaataggtggtctcttcatccgaaacacagatcaggaatacactgcttttcgattagcaatttttcttcataacaccagccccaatgcgtcggaagctccttttaatttggtacctcatgtggacaacattgagacagccaacagttttgctgtaacaaacgccttctgttcccagtattctagaggagtatttgccatttttggactctatgataagaggtcggtacataccttgacctcattctgcagcgccttacatatctccctcatcacaccaagtttccctactgagggggagagccagtttgtgctgcaactaagaccttcgttacgaggagcactcttgagtttgctggatcactacgaatggaactgttttgtcttcctgtatgacacagacaggggatactcgatactccaagctattatggaaaaagcaggacaaaatggttggcatgtcagcgctatatgtgtggaaaattttaatgatgtcagctataggcaacttctagaagaacttgacagaagacaagagaagaagtttgtaatagactgtgagatagagagacttcaaaacatattagaacagattgtaagtgttggaaagcatgttaaaggctaccattatatcattgcaaacttgggattcaaggatatttctcttgagaggtttatacatggtggagccaatgttactggattccagttggtggattttaatacacctatggtaatcaaactaatggatcgctggaagaaactagatcagagagagtatccaggatctgagactcctccaaagtacacctctgctctgacttatgatggagtccttgtgatggctgaaactttccgaagtcttaggaggcagaaaattgatatctcaaggagaggaaagtctggggattgtctggcaaatcctgctgctccatggggccagggaattgacatggagaggacactcaaacaggttcgaattcaagggctgacagggaatgttcagtttgaccactatggacgtagagtcaattacacaatggatgtgtttgagctgaaaagcacaggacctagaaaggttggttactggaatgatatggataagttagtcttgattcaagatgtaccaactcttggcaatgacacagctgctattgagaacagaacagtggttgtaaccacaattatggaatccccatatgttatgtacaagaaaaatcatgaaatgtttgaaggaaatgacaagtatgaaggatactgtgtagatttggcatctgaaattgcaaaacatattggtatcaagtataaaattgccattgtccctgatggaaaatatggagcaagggatgcagacacaaaaatctggaatgggatggtaggagaacttgtttatgggaaagcagagattgctattgcccctctgacaatcactttggtacgagaggaggtcattgacttttctaagcccttcatgagtttgggcatatctatcatgatcaaaaagcctcagaaatccaaaccaggagtgttttccttcttggatcctctggcctatgagatttggatgtgcatagtctttgcctacattggtgtcagcgtggtcttattcctagttagtagatttagtccatatgagtggcacacagaagagccagaggacggaaaggaaggacccagcgaccagcctcccaatgagtttggcatctttaacagcctctggttttccctgggtgcttttatgcagcaaggatgtgacatttcacccagatccctctcaggtcgaattgttggaggtgtttggtggttctttacactcatcattatatcatcttatactgctaacctggctgctttcctgacggttgagcgaatggtctctcccatagaaagtgcagaagacctggccaaacaaacagaaattgcctatggaacactggattcaggatcaacaaaagaattcttcagaagatcaaaaatagcagtgtatgaaaagatgtggacctacatgcgatcagcagagccatcagtattcactaggactacagctgagggagtagctcgtgtccgcaaatccaagggcaaatttgcctttctcctggagtccactatgaatgataacattgagcagcgaaagccatgtgacacgatgaaagtgggaggaaatctggattccaaaggctatggagtagcaacgcccaagggttcctcattaagaactcctgtaaaccttgccgttttgaaactcagtgaggcaggcgtcttagacaagctgaaaaacaaatggtggtacgataaaggtgaatgtggacccaaagactctggaagcaaggacaagacgagtgccttgagcctgagcaatgtagcaggcgtcttctacattctggttggcggcttgggcttggcaatgctggtggctttgatagagttctgttacaagtccagggcagaagcgaagagaatgaagctgaccttttctgaagccataagaaacaaagccagattatccatcactgggagtgtgggagagaatggccgcgtcttgacgcctgactgcccaaaggctgtacacactggaactgcaatcagacaaagttcaggattggctgtcattgcatcggacctaccataa

SEQ ID NO: 43070 - DNA, 2405 bp, Homo sapiens
  misc_feature (19)..(19): n is a, c, g, or t
gatgtccttgctcttctgncatgattgtgaggcctctccagccatgtggaactgaaagtgaagtttcaggtctgctgaggctgagatcaaccaattggtgaaggactcaagaattcttactgcatatctgttcctggaagaatatgatgctaagagaaaaagaaccaaatttttgaatgacctgatactcgatactccaagctattatggaaaaagcaggacaaaatggttggcatgtcagcgctatatgtgtggaaaattttaatgatgtcagctataggcaacttctagaagaacttgacagaagacaagagaagaagtttgtaatagactgtgagatagagagacttcaaaacatattagaacagattgtaagtgttggaaagcatgttaaaggctaccattatatcattgcaaacttgggattcaaggatatttctcttgagaggtttatacatggtggagccaatgttactggattccagttggtggattttaatacacctatggtaatcaaactaatggatcgctggaagaaactagatcagagagagtatccaggatctgagactcctccaaagtacacctctgctctgacttatgatggagtccttgtgatggctgaaactttccgaagtcttaggaggcagaaaattgatatctcaaggagaggaaagtctggggattgtctggcaaatcctgctgctccatggggccagggaattgacatggagaggacactcaaacaggttcgaattcaagggctgacagggaatgttcagtttgaccactatggacgtagagtcaattacacaatggatgtgtttgagctgaaaagcacaggacctagaaaggttggttactggaatgatatggataagttagtcttgattcaagatgtaccaactcttggcaatgacacagctgctattgagaacagaacagtggttgtaaccacaattatggaatccccatatgttatgtacaagaaaaatcatgaaatgtttgaaggaaatgacaagtatgaaggatactgtgtagatttggcatctgaaattgcaaaacatattggtatcaagtataaaattgccattgtccctgatggaaaatatggagcaagggatgcagacacaaaaatctggaatgggatggtaggagaacttgtttatgggaaagcagagattgctattgcccctctgacaatcactttggtacgagaggaggtcattgacttttctaagcccttcatgagtttgggcatatctatcatgatcaaaaagcctcagaaatccaaaccaggagtgttttccttcttggatcctctggcctatgagatttggatgtgcatagtctttgcctacattggtgtcagcgtggtcttattcctagttagtagatttagtccatatgagtggcacacagaagagccagaggacggaaaggaaggacccagcgaccagcctcccaatgagtttggcatctttaacagcctctggttttccctgggtgcttttatgcagcaaggatgtgacatttcacccagatccctctcaggtcgaattgttggaggtgtttggtggttctttacactcatcattatatcatcttatactgctaacctggctgctttcctgacggttgagcgaatggtctctcccatagaaagtgcagaagacctggccaaacaaacagaaattgcctatggaacactggattcaggatcaacaaaagaattcttcagaagatcaaaaatagcagtgtatgaaaagatgtggacctacatgcgatcagcagagccatcagtattcactaggactacagctgagggagtagctcgtgtccgcaaatccaagggcaaatttgcctttctcctggagtccactatgaatgataacattgagcagcgaaagccatgtgacacgatgaaagtgggaggaaatctggattccaaaggctatggagtagcaacgcccaagggttcctcattaagaactcctgtaaaccttgccgttttgaaactcagtgaggcaggcgtcttagacaagctgaaaaacaaatggtggtacgataaaggtgaatgtggacccaaagactctggaagcaaggacaagacgagtgccttgagcctgagcaatgtagcaggcgtcttctacattctggttggcggcttgggcttggcaatgctggtggctttgatagagttctgttacaagtccagggcagaagcgaagagaatgaagctgaccttttctgaagccataagaaacaaagccagattatccatcactgggagtgtgggagagaatggccgcgtcttgacgcctgactgcccaaaggctgtacacactggaactgcaatcagacaaagttcaggattggctgtcattgcatcggacctaccataa

SEQ ID NO: 43071 - DNA, 538 bp, Homo sapiens
actgtaaagacatttcatgacaaggaaatactatttaaagaatgttgtcaaacataaaagagcttttaagctcatccagaagtactaagatatacagtgcagcaagttaaaagatgtttcctgcccagatttactaacagtagttaaatattataattttagaattagtttttccacaagtaggaccacaaactctagacagattcattcttcggtgtagttaagctttcctttccctggataagcagttttcatatgaccaaaagaacatggaaaaaatgcagatgtctaattatttatatttcggtgtttgttgtggaacatattgttgaagaaacagaaatatggtaacactccgcgttctttctgcttcctttccatgcaacccagctgaccttttctgaagccataagaaacaaagccagattatccatcactgggagtgtgggagagaatggccgcgtcttgacgcctgactgcccaaaggctgtacacactggaactgcaatcagacaaagttcaggattggctgtcattg

SEQ ID NO: 43072 - DNA, 410 bp, Homo sapiens
cgccatcgtcttcaatgcttctctgaacagcctttaggaagagtgcgagagaaagagagagagcgcgcgccagggagaggagaaaagaagatgaggattatttccagacagattgtcttgttattttctggattttggggactcgccatgggagcctttccgagcagcgtgcaaataggtaaggtgtgctccgatggggtgtgcatgtggctggttgtagcagatatccgaaagtgagttaaatgagttgctgataagcaattcagggaaaccttcagcagttcccttcccctctgtttccctcctcttcctttctctcctttgcaaaaagacttcctctttagtgcaggttccgttggaatacacccagggcagcccacccatgcgttctcagcccatagccctatttc

SEQ ID NO: 43073 - DNA, 213 bp, Homo sapiens
aaaaaccatcctctgtgttcaaccctcaatctaactttctatccagaatttatccaggtcaccagataaactgacaaccactgaggtgttataaccagaaataaaaactgtgctggtggaaaggaaactacaatgaagaaagatgctaagccaatagttacactgtcttgtaatgtcagggtttgtggagctgagtacaactttccttttgag

SEQ ID NO: 43074 - DNA, 320 bp, Homo sapiens
atcacactctgttgcccaggctggagtgcaatggcatgatcatatcttactgtagcctcaaactccggggctcaagggatcctcccacctcagcctaagtagccagggctacaggcatgtggtagccaccatgcctggctaattttttaaagttttttttgtagagacagagtcttcctatgttatccagactattctcaaactcctggcctcaagcagtccccctgcctcgacctcccaagcgcaatcaattatatctttattttgggtgctgttcacaactctgtaatccccaacatctttgtagcaagcagcacact

SEQ ID NO: 43075 - DNA, 269 bp, Homo sapiens
aaagtcccacgttgatgctaccatgtttgtaataccttctagcacgctacaaagagaaagcaggccctaggctcatcacctcaaccacaccaagctgcatttcagtgatagggctggagcttcttcagtttcactgaagtggtgtttgtgatcaccttctatttatggcaaaggatacagattttccatttctagaggagatacgaagttttctttctacacaaatttgtggaagtaaaaatataaaagagatgatttaaagaaaatgt

SEQ ID NO: 43076 - DNA, 392 bp, Homo sapiens
tgacctcgtgatccgcctgccttggtctcccaaagtgctgggattataggcgtgagccaccgtgcccagccccttcttctgttaatctcactgggctcctgcccaggtacagaaaaccactgaaatagaggattggaaagatcgctgtcctctggccacatgttccttcaattgctatgtgaatctgagagcctcaggctgccctctccaatcagttgtgaggaccagtaacaggcagtttaagatagacaccaagaactgaaaacaggccgggcatggtggctcacgcctgtaatcccagcactttgtgaggccgaggccggtggatcacctcaagtcaggagttgaagaccagctgggctaacatggtgaacccgtctctactaaaaata

SEQ ID NO: 43077 - DNA, 123 bp, Homo sapiens
ccccagccattgagcctgcctctactgggggtcatgggcctcactcagggtcttccttcttgggggtatatctttgaaaacaagagagagagaattttctgggaacctgggtgaatgctccaa

SEQ ID NO: 43078 - DNA, 649 bp, Homo sapiens
tattgactacacttttgctgtaattagaggtaaaaaggtatgtgtgagcactaagaaagaaccaaggcccagatactagagaatcagtttgagtttttctctgaaatgacctgtggtcacctgtatgctcagccctctccagggtggaacaggctggacagaagagagtgaaggatctttaagcctgctctctgcctgggtgatctgctgagcaatgagatgcatgtggcaggacaggatgtttgatttcaggagacgatacaggattaaatctaaggggcacatctcacactgaagagcaaaacacatcaataccaatctcctgagcattatgttcattgtggagattttttcatgaccagtgtttctcgaagtatgctcctacgctaggtaagtcttgaatttattaattactttgccagttagcaaaaataatgggtaacctctacactggaagccgagagaagatggcagatgatttagtttacaattatatatttaaagcttaacggattgcttttttcattttggtgtgcttggaacacagccctcctacccctatccctgccgcttgttttccatcctgagcaagtttgagagctgcagagggaggtatgggcactcttgcatcaggatgtgagttttctaa

SEQ ID NO: 43079 - DNA, 584 bp, Homo sapiens
taataattgtatgaaactttactatggagaattttgaacacaggcaaaagtaaattgaaaagcgtaatgaacttggcacacatccgtcacctctttcaacaattaattcatggccaattgcttttaatttataaccccattaacttaccacttctgtattattttaagcaaattccattctgccatttcatctgtaagtatgtaatatttctaaaagataacttttgttctaatataatcacaaaatcattgtcagaccaaaatggaacaaacaaaaacagtaattctctaataatatcatcgtatttgattactgttcaagctccccattgtcttgtggatatcacgatggctttttcctagtgcaattgtttgaatcagtatccaattagagtccacatattgtgattggatggtctgtttcttaactctcttagattccaggtttatacttcatctcttttttcgcttgcaatatattgaagataggggattgtcttagggagttcctacaacatagattatgctgatgatgtcagcacatatgattgttcaacattgttcacataagctgttcaacatta

SEQ ID NO: 43080 - DNA, 455 bp, Homo sapiens
tacacggtaactgatagttagacaacagtcacgttgccccttgtgtttctggaaaccctgggaataaaggtgatctggctcagctcatatccttgggagctttagcacacaagcagacccagagatacaggcttggatctgaatctaggaggcccagcaggaatggacgggaaaacattcatttctctcggaacgtctcatgaaagctctatttctagggccatgttcactgtgtattcagggaactctgcctgttgttttcatgtccatttctgtaactgtcagaactatgatcccattttaaaatttgcctgagtgcttcctcaaatgcaatggataatttccttaactatactattagcataaatttgcatatttatttcataattaaaatgagtaagaataaaaggctaattacaccaaaattgcatgagtcaccataattaaaactgtag

SEQ ID NO: 43081 - DNA, 364 bp, Homo sapiens
tgagtaataaagtcccttttccctcttttagaagtctcatatgttctgtcagcagccaccaagctgtgtcaggctaaattgctgtcttgcaagtagaataaaatcccagaccctttgcaatctttttcataaaaaaaattttaaataccatatatttaccgcatacagttcagaattatttattaatagtatattcacagagttgtgcaaccaccaccacaatccaattttagatcatttcaacaactcaaaaagaaaccttgtacacgttaagtgtcattcctgtacccactccctgaaaatctgcttgctctagctgtgttggattgatgtcagaacacaggagggaagggcaaatgcaagg

SEQ ID NO: 43082 - DNA, 581 bp, Homo sapiens
aaactactaaaataaaacattagggaaactctctaggacattggacggagcaaaggtttcttgagtaatgtcccataagcatgggcaacaaaagcaaaaatggacaaatgggatcccatcaagttagaaggcttctgcacagcaaatgaaacaatcaacaaagtgaagagacaactgacagaatgggagaaaatatttgcaaactatccatctgacaggggctgataaccagaatgtataagaagcttaaacaactctataagaaacaatctaagttaaatcaggcgtgatttaactcacgtctgtaatcccagcagtttgggaggccgaaacaggtggatcacctgaggtcaggagttcgagaccagccagacccacatggtgaaaccctgtctctactaaaaatacaaaaatcagctgggtgtcatggcaggtgcctgtaatcccagctacttgggaggctgaggcaggagaatcacttgaacctaggaggcagaggttgcagtaagctgagattgtgccattgcactgcagcctgggtgaaagagtgagactccaactcaaaacaacaaaacaaacaa

SEQ ID NO: 43083 - DNA, 315 bp, Homo sapiens
cgtcggccaccacactggctaatttttgtatttttagtagagacagggtttcactgtgttggtcaggctggtctcaaactcctgatctcaaatgatccccacgcctcgacctcccaaagtgtgagccactgcacctggcctgaaggtgacatttgaacagagccttgaagaatgctgtgtagaaagtttgacaggtggccaggcatagtgactcctgcgtgtaatcccagcactttgggagtccgaggtgagaggatagtttgaggccttgagtttgagaccagcctgggcagcacagtgagactccatctctta

SEQ ID NO: 43084 - DNA, 1640 bp, Homo sapiens
atagccaagggagctctcactggaggaacagagctatctatacttccgtgtacaacaaatgctctgggaaatggagaaccagttgccagcccatatgtggttacctcacaccaatcaaaagtgactgtggagagcacccccaatttggaaaaccaaatgaaaatggagtatctctgttcagaatgaaaattttgaagaaattataaatttacccattggatcgaaaccatccagattagatgtcactaacagtaagagcccagaaattcctttgaatccagttttggcctttgatgatgaagggacgcttgggcccctggctcaggtagatggtgttcaaacacaacagactgcagaagttaaatgcgtattttttctgaagaaccaacgtcaaaatttaacgagaatttctataattaatggaattcctttcatgctataaaagagcatcccctcttccagttttctaaagatttcttgaccatcattttgaaaagatttatttaaactagctaaagacaacagacaggatagctttcctaataattttcatcagtagaaaaaaaatactcctcattcttcagtactttcaaatggctttttccagtgtgctccttcttagcaaattagtatttttctgcgttatttaaaagacaagaggatttggctataaaatgattgactaggattgactaggcatgattttttttcacatagtttggtcttaaagcttaacagcttaaaattggcaaaaaaaacttgtgccttttaccatgtaatacttgaaaagtaagtacctctttgctacaagtagaatgaatagggaaaagtttaagcctgtttttttaaaaatattattttaaagagctctatttgtagaggcaaattataggcagattaccagtttcttataaatacaaacttgtacatggacattctgcaaacccagctgtcatattcttgcaactacttttgcaaaagcatactaaaaggttttaaaatgtgaaaaaacattattttttcagagcaagaaaataatttactgttgtcttcaataatgtgtaaagtttttccagataaactaatcaaataaattagaacaatgtgacaacattgcaaatttgtcattagatgcattccttctaacgttaccaggggaggatgttactgatgattcaaggctgtttctgaagtctgtgtgttgctactgtccccagtgatggtgggacttacctctgtcctacttgatcacaaattatgttagggggaaataaagatttaatatttcattaaataaaaaagaaatttggttttgctcatttaagagcaacaagaaaatggtggtgtgttgactgtgtttggccgcagggcacagacctttatggaagtcctcgctctgcatggcatccaccagcttttcacctttcattcttattcttcacttttgctgctgagcctagctgtacaaatttgcactttcatttgctaatgtaaattcaatttattttaccattttagagactactaatgattaaatgtaagagaggacacatgtttttatgtggagtgttaaaaaagataaatttataccactgtaatgtgctggatttattaaaagagattggttaaactgctcggtt

SEQ ID NO: 43085 - DNA, 122 bp, Homo sapiens
agcctctctgagccccaatttcctcacctgtaaagtgagggaataacatctacctcgcaaggttgttgtgaggacgaaatgagagaacatgggcaaacatgaatgttcttgaattcaccacc

SEQ ID NO: 43086 - DNA, 432 bp, Homo sapiens
tcacctgctaggatatcactgctaagtgagttagcatttgccagccattctgctgattaatggtgtgtaaagtggctgtctcatggtggctgggtcaccgtgactcaagcttgggaaacgctgcagtaacagcagagagctcatctcatgggcagaggtgggactctgagagggttaaatctcagttgctactgtttggggcatccatgaactcttcgcagcaggatgtccattgcccggtctcccctctctgcttcctccagtgtcccctatgaaggacacctttgaaatgagggatgagatgtaatgaagctagatacaaaattaatcaaatatgacacgagaattgatgtggaatgcaatcccgtcagcagatgattcacctccttggagtggagttgcttgtttactgtttgcagcatttctgaagga

SEQ ID NO: 43087 - DNA, 406 bp, Homo sapiens
cagaaaacagaatatttgccctcgagtgtttacagaagaggtgtgctgatacttgctctggggttggtaagtctggaaagagagtgtgtggagggtcctttgggagtgatgctgcacatcacttcctcccacactccattggtcacagatggtcacatgaccccagcaggctacaaggaggctgggaaatgtagtcttcctggatgctcaggaggaaaatgaagtaggtcccacagacacatagctttgtctgtccatttacatcgtaaatagctacttaggccgatcgtggtggctcacgcctgtaatcccaacactgtgggaggctgaggcaggcagatcacttgagtccaggagtttgagaccagcctgggcaacatggcaaaaccccatctctacgaaaata

SEQ ID NO: 43088 - DNA, 349 bp, Homo sapiens
acatttcctagtttggtaattctaactatatcgtttagaattatgaaatgatgctttgaatgataggatttacttcttcacattaagacatatttttaggaacatagaccattttgacaagtgaatttcacagtttaagttccttaaataaaatgttaatacatattccacactctttgtttggatcctcttttgctggttttctgtaaccagtttctgctttgcctgatctagtagctgtccacatattcaggtaatctattcctaagtagctttcaagcagtcagaaacaggattgcattgcttgtacttttttgggcgggtgtaggttatggagaaaggaaattgg

SEQ ID NO: 43089 - DNA, 712 bp, Homo sapiens
  misc_feature (1)..(1): n is a, c, g, or t
  misc_feature (6)..(7): n is a, c, g, or t
  misc_feature (9)..(9): n is a, c, g, or t
  misc_feature (489)..(489): n is a, c, g, or t
ntggcnnangaactttgttagaaatgccctcaattggcctttcccgttgtagctgctggagactgactgtgtctgaaaggagggtctcttgatgctgacagggaaaagctgatcagcacctctgtgtcctagaaggggaacttccagaaagggggcatagaagaaggtattattagtatttattgaatgctttcatggggccaggtactgtgctgggggctagcaccttcccttgctagtaggtaaaaacccagctgtaattttaaaggaattgctatgctgagatacacttttattgaagaccttgcatagttcaaataacgtgaaaagtattgatggtcaaaaatattttgtgtaggaatcaatgccaccaaaatgttagtgataaccgtacaaacaaattgaaacaaaactgagacaggattcagataattctgacaaataaagaaaaagcagccacaacactgaccccccaacatgttcttaatnccctttggggctgtttctagaaaaggcatatttcaccctgaatgctaaatttagttctctactctgttagtttagacctgccttccatcaaaatattgttgtcaaagatttatgtaacttgtgatttgagccttgtatgaaattctttcaagttttgattactaaacagttatgtgtcattaatctctccattgaaaattaaaatggcacaagaagcaaaaaa

SEQ ID NO: 43090 - DNA, 410 bp, Homo sapiens
ttggtggctcctgtgttagcttctcttggctctgacttttggtggggggctggatgctctccctcccactcttggcctggctaatgtcttctcatccttcagaactcagggctccaggagaccttcccatacccaagtgaggtgaggactccaggcttgtgatcttggagctccctgtgcttatcctcagtccttgccccaggggtgaggtgcttgttggggtgatcagtaactcaatgtctgtctctcccagcaagctccctgaggccaggaaccatgtctttcggtcactgctgtatctccagtgcccaccataatgtctggctcatagtacatgctcaataaatgttcacaggataaatgagcccttctcctaggctgtggctgatatcctagaagagttccttctg

SEQ ID NO: 43091 - DNA, 352 bp, Homo sapiens
ggcacgagggtaggaaaagtcaactggtcttattttgagcaacaccgtcctggtcactagggttgtatgagagtttcagggtcgtctatagcctggaacagctatgaaaggggtctgtaatcagccatccgtgctgttcaccatctgtatggtcctatgaaggcaaacaattcacctgcttccatatgaagcgtagcctcacgggactttgtagagataggaagccttggacctggaagtcggtcttattgggtatccattcaaagctgtattccagcaggatgctgaaccactgtcactccaggaccacacaggcctccaccctctggaaggggattccttaaagctgtct

SEQ ID NO: 43092 - DNA, 194 bp, Homo sapiens
catataatattttttccttttttataaaatatttttaaaatataaaagtgtcttatacgttatttatagtataagttgatttatagtacaggcttatttatagtagtgacattcatattgcaatgtttaaactattatatatagaaacatacaaatttatatgtatttccttatatgaaaataaacatttatat

SEQ ID NO: 43093 - DNA, 326 bp, Homo sapiens
ccagagctacatttgcataatgatgttctgttaaatctaattgctttaaaatacccattctttgcacctgtctgatgagaatctgccccagtagttcctaaaatctagataacttaagagcttcattcaacagattgcatataattcaacagattgtctatcaagcacctgctgtgtcaggtatttggctggggctatccaggaatatagtgactagtgtgactcctgacctcttggagtttacattctaccactgaataagcaaactaataaaagtggttagagtgttaaagaaagcaggctctggtctaagaatgctgaaggcc

SEQ ID NO: 43094 - DNA, 604 bp, Homo sapiens
cagaggcagaaatggattactcaaattgggaacctgatgccccctcttctcactttaatggagttgtagtagttgagcttcaaagaaaggagcgtcctccagtgaggttcctgccccttcctgggcctctctaccacagcaagagccagggccagctggcagttttcaccaccctgctcatgtttttctggagacaccagcttaaccacagccaccacagatcggagggtgctggccccagcctgctgcctgctggttcttctccttcctccctcccttcctcactcattcctcccaggagctggaatgggccagagtttcaatgacactgaaggaaaacagtcttctgcagccccactctgagctggggtgccatgttgctgcggtctccctggagtccaccttcctgctggctcagctcactgaattttgggggactggggcatccagggagctgtcaggacgtcagcaggttagctgggccatggcaggaacgctaccattgtttgggcctaatgccagtgtagaggaagaaaaacagtttttcttccaactctcctaagctcttagttggaacagacccctgtaacacattaacaggaga

SEQ ID NO: 43095 - DNA, 494 bp, Homo sapiens
attccagtgttttgggaggccaaggcaggaagatcacttgaggccaggagctcaaggtcagcctgggcaacatagtgagacccccatctctacagaaaacgaaaacaaattagccaggcatggtggtgtgcacctgtaatctcggctactcaggaggctgaggtggggggatcacttgagctcaggagttccaggctgcagtgaattatgatcgtgccattcattgcactcctgcctggacaacaaagagaccttatcacaaaacaacaacaacaaaaagtctatcagccaatcacctagggatagccacttgacattacggataattagcctttcatattttttctggtatttgataaccaagatgaaatgcagaagaaatttgaatacatattctctagcatttcctgtaatgcttcttcctccaggatttcaaatgtgggaagccatcacccaaaaatatggtttcgaccatgttagtactggagttggga

SEQ ID NO: 43096 - DNA, 410 bp, Homo sapiens
accttttttcatgattccctgttagcggtacctgtgcctgttaacatgtcaaggctttccccatctctcttcattcatgtgttttctataataactgcatctgttttctgtctgcagagctactgaagtaacaacctatcgcttttgggtgatagcctgctatgtgatcgcccctgtactcgatattttacttcttttaatgttaatcttaaccacatctgtgagacagtgacatcctcattttacaaaggaagaatctaaggttctttagaggttaagtaactttcttagagccagtcagctggaaagtagcaggtccaggtttcaagtaggtataactccagtgtccaggctcctaaccgtggctatccttaccaaaagatttttgttgttgtggtaaaaaaaaaaaa

SEQ ID NO: 43097 - DNA, 337 bp, Homo sapiens
aactccaagcctgatatttctgcccaggctcccttttttatactttatttaaatcgcctcacccgagtggaacagggacgtgagccatgtcagtgtctgtaaatagaggcagttgcaggttcacgtatcttgggaagttattggtggagagcactggtgttcctggctaatgtggggtctgtgattcagtgttctcccaggtcagtgctgcttccgttgtaaataaaccattagctgggggcctcacctcaggaagcaatttaaggcccaagagaggtggccaaagaagtcagcttgcagcctctaggaggagacgcttggctttgcccacagccct

SEQ ID NO: 43098 - DNA, 1412 bp, Homo sapiens
accatcgtcggcaaagcctgagtcctgtcctttctctctccccggacagcatgagcttcaccactcgctccaccttctccaccaactaccggtccctgggctctgtccaggcgcccagctacggcgcccggccggtcagcagcgcggccagcgtctatgcaggcgctgggggctctggttcccggatctccgtgtcccgctccaccagcttcaggggcggcatggggtccgggggcctggccaccgggatagccgggggtctggcaggaatgggaggcatccagaacgagaaggagaccatgcaaagcctgaacgaccgcctggcctcttacctggacagagtgaggagcctggagaccgagaaccggaggctggagagcaaaatccgggagcacttggagaagaagggaccccaggtcagagactggagccattacttcaagatcatcgaggacctgagggctcagatcttcgcaaatactgtggacaatgcccgcatcgttctgcagattgacaatgcccgtcttgctgctgatgactttagagtcaagtatgagacagagctggccatgcgccagtctgtggagaacgacatccatgggctccgcaaggtcattgatgacaccaatatcacacgactgcagctggagacagagatcgaggctctcaaggaggagctgctcttcatgaagaagaaccacgaagaggaagtaaaaggcctacaagcccagattgccagctctgggttgaccgtggaggtagatgcccccaaatctcaggacctcgccaagatcatggcagacatccgggcccaatatgacgagctggctcggaagaaccgagaggagctagacaagtactggtctcagcagattgaggagagcaccacagtggtcaccacacagtctgctgaggttggagctgctgagacgacgctcacagagctgagacgtacagtccagtccttggagatcgacctggactccatgagaaatctgaaggccagcttggagaacagcctgagggaggtggaggcccgctacgccctacagatggagcagctcaacgggatcctgctgcaccttgagtcagagctggcacagacccgggcagagggacagcgccaggcccaggagtatgaggccctgctgaacatcaaggtcaagctggaggctgagatcgccacctaccgccgcctgctggaagatggcgaggactttaatcttggtgatgccttggacagcagcaactccatgcaaaccatccaaaagaccaccacccgccggatagtggatggcaaagtggtgtctgagaccaatgacaccaaagttctgaggcattaagccagcagaagcagggtaccctttggggagcaggaggccaataaaaagttcagagttcattggaaaaga

SEQ ID NO: 43099 - DNA, 1184 bp, Homo sapiens
accatcgtcggcaaagcctgagtcctgtcctttctctctccccggacagcatgagcttcaccactcgctccaccttctccaccaactaccggtccctgggctctgtccaggcgcccagctacggcgcccggccggtcagcagcgcggccagcgtctatgcaggcgctgggggctctggttcccggatctccgtgtcccgctccaccagcttcaggggcggcatggggtccgggggcctggccaccgggatagccgggggtctggcaggaatgggaggcatccagaacgagaaggagaccatgcaaagcctgaacgaccgcctggcctcttacctggacagagtgaggagcctggagaccgagaaccggaggctggagagcaaaatccgggagcacttggagaagaagggaccccaggtcagagactggagccattacttcaaggaggagctgctcttcatgaagaagaaccacgaagaggaagtaaaaggcctacaagcccagattgccagctctgggttgaccgtggaggtagatgcccccaaatctcaggacctcgccaagatcatggcagacatccgggcccaatatgacgagctggctcggaagaaccgagaggagctagacaagtactggtctcagcagattgaggagagcaccacagtggtcaccacacagtctgctgaggttggagctgctgagacgacgctcacagagctgagacgtacagtccagtccttggagatcgacctggactccatgagaaatctgaaggccagcttggagaacagcctgagggaggtggaggcccgctacgccctacagatggagcagctcaacgggatcctgctgcaccttgagtcagagctggcacagacccgggcagagggacagcgccaggcccaggagtatgaggccctgctgaacatcaaggtcaagctggaggctgagatcgccacctaccgccgcctgctggaagatggcgaggactttaatcttggtgatgccttggacagcagcaactccatgcaaaccatccaaaagaccaccacccgccggatagtggatggcaaagtggtgtctgagaccaatgacaccaaagttctgaggcattaagccagcagaagcagggtaccctttggggagcaggaggccaataaaaagttcagagttcattggaaaaga

SEQ ID NO: 43100 - DNA, 706 bp, Homo sapiens
ctgtgctgcttgcagcagattactgtatgcttgttcctgggcccatttcctgtttctattctagtcgctggtggctcagctctgcttcctgcctgtgtgtctcacacagattcctcttgctggaaccttttgtttccttcggaacagcctcaatctttgaaaagcaactgagccttaactctagtatgatggctcttgagtcacttagtcctacagaggtctggctggaagtacctcttccccattaagcacaccgtttgaattttaccttgtttttcagtttgtcgtcagccctgctgtagaagttaagttgggccaaacttgtcctcacttattagtacacagagctatcgggactggtatgtcctgattcttttgtacctggagcttttaaatgtatttcctactactcaagaagacacttggtatcctctctggcccaagcttccctgaagcccaggtgatacttattttgagttgggcaggttatgccatcctcagcagaataacaggctgcagaaaacatagggatggaaaagaaagcgtgtgctgactcaaccctccatcctgtgtgagcaattcaaaccccccacccaccccctcagagcttagggtgagagagagaaagtacagtgaggttgtaaaaagggaagaagtgaaggaggttgtcctggacaaatgtatttaaaggcctaaggctcccccc

SEQ ID NO: 43101 - DNA, 679 bp, Homo sapiens
gcacctgtagtcctacctacttggggtggctgaggtggtagggtcgtttgagcccaggggttcaaggtttgtgtgagccatgattgagtcaccacactgcagcctgggtgacaaagcaagatcctttctctaaaaaaagaagaggcgaattttggatgatcttgcctgcgtctgagtactgactcctccactcactgaaagtcactttggccaagtgacttcgtgtttttgtgtctctgctcccacaccagtaaaatgggaataataataagatatcttgatggactgttgtgataaatgagaaaatcagtgtaaagtgcttggagatgtgcctagtgcagagtgggcacttgctgaatgttaattatttgtataacttgctggtgtgggaagcctgactcttctccggctggaatcccacaggcctgcacaacagtaaatggccccgctgctaacccccaagatctatagtgaatacacagggaggatggtgagttatatccttctgaaagtggctcaactgtgccacagaactgatgtttatgatttctttggaataaacgtcgaaattaactctcctagtcttgaaattcgagaaagttatatttgtcttatctgagttcctttctcaggaaaccaaccatcaggcatctccaatagtatcaaaaagccagcagtg

SEQ ID NO: 43102 - DNA, 250 bp, Homo sapiens
atgatacttagcacagagtgaacacttggtaaatagttattgttagctaaaaggcgtagtttccttgatgcccaaatggaagattccatttcagttccacagctcttgaacacttccctgtgcagggcattgtaagggatagatacacaagtaggacataattgctagattataatttgggaataaactaaatacagaaatgtctacaatacaagagggaatagggagtttgttagggaagatgaagggc

SEQ ID NO: 43103 - DNA, 147 bp, Homo sapiens
caactcttgcaaacatctgttgaagaaggaaagaaaaacaatgtcaacagggttaagactgttatatgtctgatttttttgcgggggggggcactaagtgattgtttcaataaggcctcataggaatgggtctcctaagagttatat

SEQ ID NO: 43104 - DNA, 686 bp, Homo sapiens
catgtctagtgcatcatccgtgcctctcttgttaggagatcatctgaagaactagggttacggtgctgccagctgactaatgactgtttttcagttttgtcaggaaacagaattaccactcaccttaattttgtagcttgtacccaagtttgtgatgtcaattgccaagactaaggaatgaaacatcttcatacgaggtcatcccggagccaactcattgcctgctttttttctgtgtatgttggtggtgtggcggggacaggattgataagcactgtcatcacagctgtatgaacatgatattttagaaacatgttttagttgatgagattggcatatcatgacttactaactctttttcaaagacatgcaaggtagttctcatgatttatatacactttcaactcaaatcattatgaaaagaaagttacaattatatctaaactgaacctgatgagaaaatattacactcaagttgcacagtatgataatttattaatgaaaggtttttactaacttttcaagatgtgtagccctataattgttagattaatttaggtaaatctaagtatgacattgaatttaaaaaaggaagcgttaaaatataaaccattttgatttttcccctataatagtgaataatattttgagcccattttacgagataatcatttccagatgctgga

SEQ ID NO: 43105 - DNA, 238 bp, Homo sapiens
aataaaattcctgggaattttcctgtaagtgccctcctttgtgcccaatagaagtcctagggatgggtcctcaggctgaaagactgctttcctacccattcaggaatgaagcttgcaggactggaggttgctttcaggccccttaaggcctttgtccgttgtcgtcaggactaggtaggtctcgcccaatggcgacagagtggtcacccgggaaccggatctgcgcggctccgtggcc

SEQ ID NO: 43106 - DNA, 542 bp, Homo sapiens
cggaataactgtctactgtttactagcatataaaataagtatgatcattattattgaactctatcagctatgaagctaaattttaaagtcaactgctcttcctactgactcaaatagtttattttttaaaaatacttatataatacatgcagagacaagatacacaatgattataagtattaatctccataagagaaaatatttatgaactatatttctcattgcactctgtaataaaaagcagttagttgttacttacctaagagttaccacttccgtagcctataacatcaaaacgtagtttttgcatgttttcaattttataaatatatattttatcagacatcatgaattattttgtgtcttgcttatttcactcaattttttaagatctgtacattattgcatgtggcagtagtgtattttcattttgcatactattccattttaagaatatattgctgtttatcctattgatggatatttgtattttttatacttttgtgtaataataaaaatactgctgtaaatattcttgttta

SEQ ID NO: 43107 - DNA, 209 bp, Homo sapiens
gaggagggaagagggaagaaggaagaaggaagaaggagaagataaagctaggtgcagtgacatgtacctgtaatcccagatacacgggaagctgaagtagtaggatcacttgagtccaggagttcaaggctgtagtaagctatgattgtgcctgtgaatagccgctgcactccatcctgagcaacaagaaagaccctgcctctatttaa

SEQ ID NO: 43108 - DNA, 322 bp, Homo sapiens
tttcaaaaacccactttgtaactgacaaaatgaggaacttatatttcctggcataacatgaactgggagtgtcattcacgttcgattagttaagcactaaaaaaattaggcttatgtttttagcctctttttcttactttaaaaggaatttttctaacaaatacagtttaagtgtaaatacaactcttaattgtccacaacaacagggaatggaaaattgggatctacagataattcaaaattttactttaaagagcacattcaacctttgttcccaatgagctcttaacattgcttagagctaagaattaatttgtgtgga

SEQ ID NO: 43109 - DNA, 249 bp, Homo sapiens
tgattccatttatgtgaaattccagaaaatgtaaacgaatctatagtgacagaaagcagaccagtagttgtctagggttgagggatatatttaaaagggcataagctaacctttgggggatggaaattcattatcttggttatgtcaatggttttataggtgtgtacatatgtcaaaacctatcaaattgtacactttaaatatgtgctgtttgtggcatgtaaattatatctcaataaagctatttgt

SEQ ID NO: 43110 - DNA, 433 bp, Homo sapiens
ccaggcattatgctaaatgttttgtgtgcattatcccatttcatcaccacaactgcactatgaggtaacacaattattatacccatttaaaatataaagaaactgaagtacaagtggttacataaatcacccaatgtcaccagccaggcagggctgaagtttgaacctcagtctgtctgactcagaaccagagctcttaaacactggctaaactgtatgagtaatggctctttggccacaatgatcaacaactcacaaagtgggtgagactagtatgggggggaggggtggctgcaatggagccaaaagcccattgatcccagagcaccttcagccttcagaagtctttaaaactagagatgtattcttttagagtaaggcattgtgtcttcaaccttttacttccagaattggcagcacagaatgattatta

SEQ ID NO: 43111 - DNA, 311 bp, Homo sapiens
ggaattctaatcaccaatttcacatctcctattggatgtccagtaggcatctctaacttggtatgtccaaaactgtgctgttgatattctgcctacaccttctctgttgtctgtcaagacctgttaaaagtctgaaattttaccctactaagtctccttccccgggggaagacttattacccattaaagattctgattctctaaactcagggttgttttcatgtaatgcaacccactgcatatgaaggtatcacctggcccttttccataaccctgtagttccagctatttgggaggctgaggtgggagga

SEQ ID NO: 43112 - DNA, 436 bp, Homo sapiens
ttggctttgaggattggctgaactgaggctggactggaatgttctgcctggctctcatccctcctcagcctaggttagggcttcccatgccatgtgataccacatgaggcactcctggcctgggctcccactgggccaagtccctctcctgtggccttggtgatgctgctggtctcagcatcagtgtggaaaccagcacacctgagcagggacatcacaggtacagtcaccttggaccaggggcctgagtctcagtcttcctacctagtgacacagagacaacttactcaaaaaggatgaggcctggaaggagtccccaggtgtgctgagggctctccctacccctccgtgcctttcctgggatggttgccatggtgatgtgtctgcagcgcccagtgaaggaggagaaacagccaaggaggagcagctgccgtgg

SEQ ID NO: 43113 - DNA, 404 bp, Homo sapiens
ccataggggttgaactaatttgcattcccaccaacagagtataagtgttcccttttctctgcatccttgccaacgtctattattttatgactttcataataatagccattctgactggtatgagatggtatctcattgtagttttaatttgcatttctctgatgactagtgatgtggagcttttttttttaaagtttgctgggcacttttgtgtcttcccaaagcatttttaaatctctagaatgatctcacgtaattgcagtgctatattatttggagtagaaatttctaaaggcgaataatgctccttggacttaaagaatgtttgctctaaattagacagtatataaaaccgaaaatgctttcctgttcaaaagcatgaaacactataatctccatgcacc

SEQ ID NO: 43114 - DNA, 435 bp, Homo sapiens
ccccatatgtttaaatttacttttgaatttttatttcatttcttatggacaaacctttttaaaaatattactagtgttttttccagttaaaaaatttatacgtttattgaaaaatttagaaaatataggaaagtgtaaatatgaaatccttcataatcctcctacctactgttaacattttggtgaatttcctttgtctttttttctgttttaaataaaatcaaaggtaggttttatatatctatagctttatcctgcttttttaaacttaatattactacttttgaaatttatagtattctttgaaaatatggtttttaactcttacataatactccattgtttcttgttttatttactcattccccaattcatagacattcagaatcttttttatatctattttaaaaattataaatagtggccaggcatggt

SEQ ID NO: 43115 - DNA, 416 bp, Homo sapiens
gtttcaccttgttagccaggatggtttgatctcctgacctcgtgatccgcccttctcggcctcccaaagtgctgggattacaggcatgagccactgcgcccagcctaatttaaaaaatttaaaaaggaatgaaaaccaaaatttaaaacttttgtggttcaatactatcaagaaagtgaaaagacagctcagagtgcaaggaaaatttttgcaaatctgggtaagagacatatctaggaatatattaaaggtactcctacactttcaacggattaaaaggacaaccaacttaaaaatggggggcaagggttgttaatggggttaaagggttttaccaattggccccttaaatacggtggaaagggtggctccattttccttttaccgggggttccgccaattccaaaccccctggg

SEQ ID NO: 43116 - DNA, 186 bp, Homo sapiens
gaagcgccccttgtctggtggacacgtgactcgcgtgactttacctatcattggagacgactcacactccttaccctgccctcttgccttgtatacaataaataacggcgcagccaggtattcggagccactacaggtctccatatcttgatggttccctgggcccagctgtcttttcttccgtct

SEQ ID NO: 43117 - DNA, 738 bp, Homo sapiens
aaaattctatagatattctctgccagactccagcctatttgtgtgagacatctggggaggctcccctttttttcaccatttgaggactgaaagtaaatttagcttcctcagcagaaagaaaagaagctgttttggaggttgggaagagctttagaaaatgcggcatcacgtctgttgccccatttgaagaaagcagctctggaaaaggcctaggacattagttgctacaaagttctagatcattctgtgtggtaaagaagtgcctttcacctcccactgtgattctgaggcctccccagccatgtggaactgggtcaagcaatggaatggaaatgtgtcatgtcctttcaaggtcatctgtggagcaatgtttaacagcctgcccaagaaatatttaattacctagaggaaatcatccatcccactgatgcaaaaagaaggtggtttccattttcactctggatctatctaattgactatttaattgatgtggactttagtagaggcagtgattgcttccagttggtgggcccaggaagactgtgaaaaaggagtcacagaaggcctggaatggctgcgatggagataaaggatgaagggtagtcccctcagggtgttatccaaaaagtcaccttggaagaggaagaaactcctaccaatatcagaagagcaacaaacatttttttttctagaagataagtggctaatttcaaaataattattttatcaactgccaaa

SEQ ID NO: 43118 - DNA, 482 bp, Homo sapiens
gtgtgaaagctacacaggattacagaggcatctatattatcacttttgctctttgactaatcctatgctgtttttgttatagagagaaacaaggacatggatgaagtgattttttttttaaataaaaggacaaatttgccacacaacagaacaatctgagtatgatctgtcctcagggtatctttatatcctttccatgtgaaagagatataaagaattctgacagcaaaactactttaaaaatcaaatcaaatcaaatccacaagcacactcccattcctcccctgccgcaatggttcttgctctcaatgtttagtagagaaattaagagccacattcaaagatggaaaataagatttgtcattagaagcttgccaaggtaacagattgtacaacttgagatgaattcatgttgtttaagaagttcagaaaggttggaagatgggtttataaataaagaagtggagtccattgaaaaactg

SEQ ID NO: 43119 - DNA, 535 bp, Homo sapiens
tggacttggacttaactcttcatcaagggcactgcttttcacacaaccaggctttatgacgaaaacgtagaaattaattgctttctggtcttgtttcattttttttctctagattaaacctcatgcatttttaaatcctctattttggagttggtgacaaacacagacaagctgacatctgtttttcatggtaaatcctttccctgttaactaatagaacaataagtcattcatttatagatttactaaatttgtaagtttctcatatgtatcaggttatacaaaccacacctaagtggtctgctaacttctgaagcactcccagccactttaagaaacattttatgcaagtcaatgtgttgatcgtagatgatgcttacctgcacatttagtcacttggagtcaactattagcaatttttttcaactgaaatatctgtactaaaaaaatgcgtttggcctgagatctaagttagtgtacggcacaaggggggaactcaatacatatttgttgattgaaagaatacataaaagaa

SEQ ID NO: 43120 - DNA, 366 bp, Homo sapiens
gttttgttctttcggtattaaaaatcatcactatgagttttactgaaatgcaaaatatgtcacagcactgcttaaaaatcttcaaagactggctgggcgcagtggctgacgcctgtaatcccagcactttgggaggccaaggcaggcagatcacctgaggtcgggagttcgagaccagcctgaccaacgtggagaaaccccatctctactaaaaatacaaaattagccgggcatggtggtgcatgcctgtagtcccagctactagggaggctgaggcaggagaactgcttgaacccgggacgtggaggttgcagtgagccaagattgtgccaccgcactccagcctgggcaacaagagtgaaactc

SEQ ID NO: 43121 - DNA, 434 bp, Homo sapiens
aataaacaaatcctttgcctattcacaattaatactaaaaaaagatgtttcttgagggaagaggaagtccattttattaaaaatataactttttctaaaaactgtaacatgttttcttttctgttatataatctcttaattgtgatctatcacaaatggcattttctatcctactgatggccacttgaagcctgtaattgattcaaaagtatgttgcacataggaaatggacagttatctattttgctcaatgtaacacccaagtccacactaaagcacaaatgctatgacacctatgacagtgtccttcaccagaaaatgttttttagaaagagtagatatggcttgaacctgggaggcgaaggctgcagttagccaagattgtgtcactgcactccagcctgggcagcagagcaacagcccgtctcaaaaaa

SEQ ID NO: 43122 - DNA, 506 bp, Homo sapiens
atggtgtctccgtctttcctcactgactcaaaagccgctgtaccttagggcaacctgaaggataagtgagtgacccttgaccggtgattctctggggacaagtatatacagtctccagtgtctactgtcttttcttatcccacaggtggattgtacacataatgagcatcattgctacccaccatgtttaaacattcttggctcactacatcgtatcattaaacaatttatttcttgagaaattgcacaaaagctgtataatacctttgatcactccattttctcttaaaaagtttttggtgtgttaccattaaaaatgtcttttttcatatataacattttaattgccaaagttgtaatcccatcttttataaaatgtacagttaaacctaaaagtgtacttacagaattcttccacgtatcgagaagtttcatcatcatcatctaattattttcttttaaaaacctgccctcaggacaaataaaaacactattttatctgtcag

SEQ ID NO: 43123 - DNA, 400 bp, Homo sapiens
tacacaaaagtaagcatatttatcacactgttctgtaccttgtttcacacagtagtatatgttggatcttttcttgtaagtacaaagagagcttcctcattctttcctgcatttgcaagtaatgcatagtgtgtatgaaccccaacttattaactagtcccccattgatgggcacttagttgtttctagtcttttgctcttataaacattaatgcagggaatgaccttatcataagtcactttgcatgtgtgcaagtatatctgtgggataaatttcctagaagaaggctactcaaccaaggataatttgataattttgtaatgtttaacattttttttttgcattttaacaatttattcttagttacatttaattttaatttttaacagttgtaatttt

SEQ ID NO: 43124 - DNA, 312 bp, Homo sapiens
ctttctcttgtctattaaacctccactcctaaactcctcgtgagtgtctgtgtcctaattttcctggggcgagaagacaaactccaggtatttaccccagacaatgtagccacttcactttgatgtgtctgttttctgatgagactttaatgtactttaagttagcacaaggtcccatcttcaatggtaatgcaaccatcattccagtttctttcgagtgtatctttccagatattgtattcatatagaagtttattggtatatatattctctcccctccttttactaaatggtagcacactctaccttatc

SEQ ID NO: 43125 - DNA, 1187 bp, Homo sapiens
acaattgaaataattcttcacatggtgtgtaccattatgcatgtaggtctaatcatggacttgaatgaagggagaaaatttacaatgtgccagatatgtattttagtacttggaatagaaagacataacttccttaatgtatttgcatcttcattttaagctttgtatcttttttaaaaaacaaactctgtgtgagtttttattctcatttcagtttatggctctatcaaaatttataaattagccttgattccttacttttcccacttcccctttacagtcttatcagcaaatctataatctaccttcaaaaaattttcaaaatctcaccttttattaatcatttcccccattaacaccctaatccaagccaccataaacaacccttatcatctgtgtagcctattgttgatctccttcattccatctgttcttgttcctctttagtcaagttctttttccacacagcagccaggctaattttaaagtttaagtgatactaaattaagtcactgttcccttgcttaaaactgtttagtgctttccatttcattgagaataaaattgaagctcttttcatggtctctaatattctacatagacttacccctgtatacctcttgatggtcttttttaatgtctgttgattacagccacactggccctgatattacttgaacaagccagtcattctggtgtttgctattccttctgcctggactgtttttcctccaggtgttagtacagccagcttcatttcattaaggtacttgtcccagtgccttctaatcaatctaagtattgtctctttgccttttctaatttctttatggtgctcatggctctaattgtataaaattatgtttttattatttgtctcctcctcctgcaaaatataaattgtatgaggctagaaactttgtcttcattgctttatttgtagtgcctggaacattgcctaatctaaatatctctgaaggctttaaaacttttatgacgtattcctcctggtactgagtgttatagtgaaattagaagtaacatattgagaactatagttctttcccaatttttgaagcattctataagctgatggtggtatctccttaatagaattacgtttgaaaagagaaaatattattctagtgttctgttttcaataaaatctctagttaaaagttctcatg

SEQ ID NO: 43126 - DNA, 735 bp, Homo sapiens
ggagagatggccgagtcagcccctgcccaggcctcagtctctccgggaccctcccagtcagggctgagcctgggggcacacggctgatggtaggggctctgggaagaaagctttgctgggagctggagggagctctggacccagaggtgaggtgtggatggagggaatggacacagacctccctcttttccaccacgtgggcccggaggtctgtctgtgtgcagttcctgacttctccctctccttttctccccttctgtctgcctgaggacacaggccccagggacgccccaggagagaaggggaacagagagcggggtgcttctatctcctacgagacagagctgttcattaggcttggcccagttcccctctgactgggggccgcccctaggtggggagcagtccctctgagcctctggtcccaggtagagagtggtctctgtgtgcctctggccccaggtggggagtggcccttctgagcccctggcccccagtggggagtggtctctctgagtctctggccccaggtggtgagtggcccctctgagtctctggccccaggtggggagtggcctctctgtgtctctggccccaggtgggcagtggtccctctgctctctgtgcttgtcttggggagcaccttgccagtcatcagcccctctgaccactgctctggggcccagagaagagctgaacaccagttctgcctccccagacctcacaggtattggt

SEQ ID NO: 43127 - DNA, 393 bp, Homo sapiens
cccctggttcctgtgaacaggactgaacaaataaataatgaatttgaaaagtaagcggaaaagcaaaatttatattcctgtcgccaaggcagtatcttataattcagggatatttctgggctagatagagttgtatgggtgcctggtccggttctgtcactttccaaaagccagttggaaccttatttttctccgctgtaaaatgaaagaatttacctaaaatgaggttctttaaattctttctcagcttgagaatcctccaatacagttaaagaaatacttacaaagaaaagtttactaggcagtacagcaaatcacagagaatccttataggacagtataagcaattcattgtttaggaagtcaagaataaaaactgtttcaggcttcatc

SEQ ID NO: 43128 - DNA, 400 bp, Homo sapiens
gcagttgcatctcccagcacaacatctgatgtggtgccctacccctagggatccagaggctccattgactcacatagctgtgctttctagagccaagaatatgtgttgcctcacatcccaggaaatagaagcttgacttagtggtgccactccagtcatcaggccaaatggccccagcaccccacctacctggaacttgactagctccccatagtctgagctgctgaggcaccttgcctctctggggagtggagtcattgctgtgctgttccccacccgctggagcccaagtcacagtggcatcttgccattcctgggtccttgctgcttctgcatctgcctcacagagcctaggctactgccacgtcccaccattccagggtccagattcctcactgtt

SEQ ID NO: 43129 - DNA, 550 bp, Homo sapiens
agtttatcattaagccctaacaagactgcaaagttgcttagcaacagaatcaggcacccttaacaggaacatgcatgggaacaatggtgaaacataattgagccttaaaaaggcaaattctttgaattaaatcgtgaaaagacaatgtgtcatgggaagaatgagtattttaacctaagacttgttctctaagcattattttatagctagacctaagtgtctttccatagaataaataatgatacttttagtctttatataatttaaggcacttaaaaaagattgtttatccaagttagctcaacaatgcataatatctctattttgacccattaattatcttcaacattgtagagatacataaagaaaggaaggctcttacaaaaataaacactacaaaatatttgatgactgcaagggtttaattttgatgttatgtataatttaaactatcagaaactcaaaaactgtacttttattttttaaatttgaatatacatttacatatacacacataacgtatctaattcccatttgcaggaaaaaaaaa

SEQ ID NO: 43130 - DNA, 417 bp, Homo sapiens
gcgtcgacctctcatgtaatatattttccaatgaaaagaggcaggaggcagaaaagaaattatcacaatgtaagtgctagaaagaattaagccgggcaagagagagtgatgggtaaaggcaggggactttattttatctggggtggttcaacaaagcctttctggttaggtgacatttggcaggatgtggaggaatcgatggagtgagacactgggtagcgcagggaagaggatcagagtcattggaagggtcttgggggcagggctgtgttgggaggtctggaggaataagaaagaggcagtgtggttggagcagagggacagtgaagatgctggaggtaggagatgaggaacctgcagggccattgtaaagagtgtgagcttttattccgagtcccatgggaagccattgaacag

SEQ ID NO: 43131 - DNA, 604 bp, Homo sapiens
ggctgatataaactgtgcatgtatgtgggagcctataagtgcctggagaaaagcaacaactagaaagctaaaagagctgaacagatacattagatgaagaggagacaaagttaggagtttgagtttacaaagttagaagggtttggtaaatgtctcaggctttatgaatcccagaaggatcaaaccttagaaatatagatgatagctaagaactaagaaattaattatagaaagagagacaaacctgaagcattgaaagtttctgtcaaataataaaaccagtcctcttcaaatcaaagtggtcgactagtaatttaataacctgctagaagaaaaatgcattgcattagagaaagataaccaaacccagagtttgtataaatatcatgcacaatgttcaactgtaattcaaaaattaccagtgatggatacagaaaaatgtgacatgtaatttttttttaaagtccatggaaatagattcctcgatgattcagaagttgtagacaaggactttaaagcagaaattataaatatattcaggattttaaaaaaatatgttttcaggcccggtgcggtagctcacgcctataatccaccagatgtg

SEQ ID NO: 43132 - DNA, 585 bp, Homo sapiens
gtgtggttgcctgtttcggccatgtatccactgcgaagtggtcatttagggtcacatgtataagtagcagtctatgtgattgttagtaacccctgaagctgtgcagtgcctgaagttaaattccattactcctaatgcaggattctggaagcctgagagcagggaggaaagaaagctgaaaacttgctttctcagagcctcctccccctatcattgtgagagtgtgatgtaatgcttctcggtctggtgggctgaaaggattgtagtttgtgatgtggcgggtaaattgcccccacccctgggtaaattactccacccccctgagcacatccctggctctgagaggccttgttttcttttctctttttttcctaatttgtatcctcctgatttatgctgtggcatattggcatgagaaagagactgttcttctaaatctgttacaaagtatagtttagaaaaggcatttaaaatatgcaaatgggttgaattgtcatatccccatcattaaatatgtagacgtggattaaagctaattaagcataaatggaataattttgatcagaagggagcagtgttttttgt

SEQ ID NO: 43133 - DNA, 609 bp, Homo sapiens
cagaatatgtattttgtgtttattcagctcctgtcaagtggttctgcttggtttgccataatcctcatggttgttacatgtctatttcttgatatcataaagaaggtctttgacgagcacctccaccctacaagtactgaaaaggcacagatgtactccaacacagttgctttaagtgacgagttcatcgcactgcagccattgtcgagggcaaggaatcagctgagcaaacttagcttactgaaacaaatgcaggtatcaagtgcttggactccatgtgctgtttcccggaaggagaagcagcgtgtgcatctgttggaagaatgctggaacgagttataggaagatgtagtccaacccacatcagcaggtgtgaaatctctctaagtagcctttgctgcagatgagtatcctatctggaacaggatgaacctgccgctctagatacctaataaatcagcagctggttttaccaactgaagcaggaagtctgctatttattagcactctttggtggtagatttcactttgtggctttggggtaagggctttttcactcacaaaggaagagaaagcacctttgaagagacttcatctaatgaacaaaaa

SEQ ID NO: 43134 - DNA, 6150 bp, Homo sapiens
agcactatcttgaagtatacatggcaagctgaagaaaaatgggatgaaccttggtataaccaaaaaacagaacatcaaagaaatagcagtaagattctgagatttatttcagacttccttgcttttttggttctctacaatttcatcattccaatttcattatatgtgacagtcgaaatgcagaaatttcttggatcattttttattggctgggatcttgatctgtatcatgaagaatcagatcagaaagctcaagtcaatacttccgatctgaatgaagagcttggacaggtagagtacgtgtttacagataaaactggtacactgacagaaaatgagatgcagtttcgggaatgttcaattaatggcatgaaataccaagaaattaatggtagacttgtacccgaaggaccaacaccagactcttcagaaggaaacttatcttatcttagtagtttatcccatcttaacaacttatcccatcttacaaccagttcctctttcagaaccagtcctgaaaatgaaactgaactaattaaagaacatgatctcttctttaaagcagtcagtctctgtcacactgtacagattagcaatgttcaaactgactgcactggtgatggtccctggcaatccaacctggcaccatcgcagttggagtactatgcatcttcaccagatgaaaaggctctagtagaagctgctgcaaggattggtattgtgtttattggcaattctgaagaaactatggaggttaaaactcttggaaaactggaacggtacaaactgcttcatattctggaatttgattcagatcgtaggagaatgagtgtaattgttcaggcaccttcaggtgagaagttattatttgctaaaggagctgagtcatcaattctccctaaatgtataggtggagaaatagaaaaaaccagaattcatgtagatgaatttgctttgaaagggctaagaactctgtgtatagcatatagaaaatttacatcaaaagagtatgaggaaatagataaacgcatatttgaagccaggactgccttgcagcagcgggaagagaaattggcagctgttttccagttcatagagaaagacctgatattacttggagccacagcagtagaagacagactacaagataaagttcgagaaactattgaagcattgagaatggctggtatcaaagtatgggtacttactggggataaacatgaaacagctgttagtgtgagtttatcatgtggccattttcatagaaccatgaacatccttgaacttataaaccagaaatcagacagcgagtgtgctgaacaattgaggcagcttgccagaagaattacagaggatcatgtgattcagcatgggctggtagtggatgggaccagcctatctcttgcactcagggagcatgaaaaactatttatggaagtttgcagaaattgttcagctgtattatgctgtcgtatggctccactgcagaaagcaaaagtaataagactaataaaaatatcacctgagaaacctataacattggctgttggtgatggtgctaatgacgtaagcatgatacaagaagcccatgttggcataggaatcatgggtaaagaaggaagacaggctgcaagaaacagtgactatgcaatagccagatttaagttcctctccaaattgctttttgttcatggtcatttttattatattagaatagctacccttgtacagtattttttttataagaatgtgtgctttatcacaccccagtttttatatcagttctactgtttgttttctcagcaaacattgtatgacagcgtgtacctgactttatacaatatttgttttacttccctacctattctgatatatagtcttttggaacagcatgtagaccctcatgtgttacaaaataagcccaccctttatcgagacattagtaaaaaccgcctcttaagtattaaaacatttctttattggaccatcctgggcttcagtcatgcctttattttcttttttggatcctatttactaatagggaaagatacatctctgcttggaaatggccagatgtttggaaactggacatttggcactttggtcttcacagtcatggttattacagtcacagtaaagatggctctggaaactcatttttggacttggatcaaccatctcgttacctggggatctattatattttattttgtattttccttgttttatggagggattctctggccatttttgggctcccagaatatgtattttgtgtttattcagctcctgtcaagtggttctgcttggtttgccataatcctcatggttgttacatgtctatttcttgatatcataaagaaggtctttgaccgacacctccaccctacaagtactgaaaaggcacagcttactgaaacaaatgcaggtatcaagtgcttggactccatgtgctgtttcccggaaggagaagcagcgtgtgcatctgttggaagaatgctggaacgagttataggaagatgtagtccaacccacatcagcagatcatggagtgcatcggatcctttctataccaacgacaggagcatcttgactctctccacaatggactcatctacttgttaaaggggcagtagtactttgtgggagccagttcacctcctttcctaaaattcagtgtgatcaccctgttaatggccacactagctctgaaattaatttccaaaatctttgtagtagttcatacccactcagagttataatggcaaacaaacagaaagcattagtacaagcccctcccaacacccttaatttgaatctgaacatgttaaaatttgagaataaagagacatttttcatctctttgtctggtttgtcccttgtgcttatgggactcctaatggcatttcagtctgttgctgaggccattatattttaatataaatgtagaaaaaagagagaaatcttagtaaagagtattttttagtattagcttgattattgactcttctatttaaatctgcttctgtaaattatgctgaaagtttgccttgagaactctatttttttattagagttatatttaaagcttttcatgggaaaagttaatgtgaatactgaggaattttggtccctcagtgacctgtgttgttaattcattaatgcattctgagttcacagagcaaattaggagaatcatttccaaccattatttactgcagtatggggagtaaatttataccaattcctctaactgtactgtaacacagcctgtaaagttagccatataaatgcaagggtatatcatatatacaaatcaggaatcaggtccgttcaccgaacttcaaattgatgtttactaatatttttgtgacagagtataaagaccctatagtgggtaaattagatactattagcatattattaatttaatgtctttatcattggatcttttgcatgctttaatctggttaacatatttaaatttgctttttttctctttacctgaaggctctgtgtatagtatttcatgacatcgttgtacagtttaactatatcaataaaaagtttggacagtatttaaatattgcaaatatgtttaattatacaaatcagaatagtatgggtaattaaatgaatacaaaaagaagagcctctttctgcagccgacttagacatgctcttccctttctataagctagattttagaataaagggtttcagttaataatcttattttcaggttatgtcatctaacttatagcaaactaccacaatacagtgagttctgccagtgtcccagtacaaggcatatttcaggtgtggctgtggaatgtaaaaatgctcaacttgtatcaggtaatgttagcaataaattaaatgctaagaatgattaatcgggtacatgttactgtaattaactcattgcacttcaaaacctaacttccatcctgaatttatcaagtagttcagtattgtcatttgtttttgttttattgaaaagtaatgttgtcttaagatttagaagtgattattagcttgagaactattacccagctctaagcaaataatgattgtatacatattaagataatggttaaatgcggttttaccaagttttcccttgaaaatgtaattcctttatggagatttattgtgcagccctaagcttccttcccatttcatgaatataaggcttctagaattggactggcaggggaaagaatggtagagacagaaattaagactttatccttgtttgcttgtaaactattattttcttgctaatgtaacatttgtctgttccagtgatgtaaggatattaagttattaagctaaatattaattttcaaaaatagtccttctttaacttagatatttcatagctggatttaggaagatctgttattctggaagtactaaaaagaataatacaacgtacaatgtctgcattcactaattcatgttccagaagaggaaataatgaagatatactcagtagagtactaggtgggaggatatggaaatttgctcataaaatctcttataaaacgtgcatataacaaaatgacacccagtaggcctgcattacatttacatgaccgtgtttatttgccatcaaataaactgagtactgacaccagacaaagactccaaagtcataaaatagcctatgaccaactgcagcaagacaggaggtcagctcgcctataatggtgcttaaagtgtgattgatgtaattttctgtactcaccatttgaagttagttaaggagaactttatttttttaaaaaaagtaaatggcaaccactagtgtgctcatcctgaactgttactccaaatccactccgtttttaaagcaaaattatcttgtgattttaagaaaagagttttctatttatttaagaaagtaacaatgcagtctgcaagctttcagtagttttctagtgctatattcatcctgtaaaactcttactacgtaaccagtaatcacaaggaaagtgtcccctttgcatatttctttaaaattctttctttggaaagtatgatgttgataattaacttacccttatctgccaaaaccagagcaaaatgctaaatacgttattgctaatcagtggtctcaaatcgatttgcctccctttgcctcgtctgagggctgtaagcctgaagatagtggcaagcaccaagtcagtttccaaaattgcccctcagctgctttaagtgactcagcaccctgcctcagcttcagcaggcgtaggctcaccctgggcggagcaaagtatgggccagggagaactacagctacgaagacctgctgtcgagttgagaaaaggggagaatttatggtctgaattttctaactgtcctctttcttgggtctaaagctcataatacacaaaggcttccagacctgagccacacccaggccctatcctgaacaggagactaaacagaggcaaatcaaccctaggaaatacttgcattctgccctacggttagtaccaggactgaggtcatttctactggaaaagattgtgagattgaacttatctgatcgcttgagactcctaataggcaggagtcaaggccactagaaaattgacagttaagagccaaaagtttttaaaatatgctactctgaaaaatctcgtgaaggctgtaggaaaagggagaatcttccatgttggtgtttttcctgtaaagatcagtttggggtatgatataagcaggtattaataaaaataacacaccaaagagttacgtaaaacatgttttattaattttggtccccacgtacagacattttatttctattttgaaatgagttatctattttcataaaagtaaaacactattaaagtgctgttttatgtgaaataacttgaatgttgttcctataaaaaatagatcataactcatgatatgtttgtaatcatggtaatttagatttttatgaggaatgagtatctggaaatattgtagcaatacttggtttaaaattttggacctgagacactgtggctgtctaatgtaatcctttaaaaattctctgcattgtcagtaaatgtagtatattattgtacagctactcataattttttaaagtttatgaagttatatttatcaaataaaaactttcctatataa

SEQ ID NO: 43135 - DNA, 6570 bp, Homo sapiens
agcactatcttgaagtatacatggcaagctgaagaaaaatgggatgaaccttggtataaccaaaaaacagaacatcaaagaaatagcagtaagattctgagatttatttcagacttccttgcttttttggttctctacaatttcatcattccaatttcattatatgtgacagtcgaaatgcagaaatttcttggatcattttttattggctgggatcttgatctgtatcatgaagaatcagatcagaaagctcaagtcaatacttccgatctgaatgaagagcttggacaggtagagtacgtgtttacagataaaactggtacactgacagaaaatgagatgcagtttcgggaatgttcaattaatggcatgaaataccaagaaattaatggtagacttgtacccgaaggaccaacaccagactcttcagaaggaaacttatcttatcttagtagtttatcccatcttaacaacttatcccatcttacaaccagttcctctttcagaaccagtcctgaaaatgaaactgaactaattaaagaacatgatctcttctttaaagcagtcagtctctgtcacactgtacagattagcaatgttcaaactgactgcactggtgatggtccctggcaatccaacctggcaccatcgcagttggagtactatgcatcttcaccagatgaaaaggctctagtagaagctgctgcaaggattggtattgtgtttattggcaattctgaagaaactatggaggttaaaactcttggaaaactggaacggtacaaactgcttcatattctggaatttgattcagatcgtaggagaatgagtgtaattgttcaggcaccttcaggtgagaagttattatttgctaaaggagctgagtcatcaattctccctaaatgtataggtggagaaatagaaaaaaccagaattcatgtagatgaatttgctttgaaagggctaagaactctgtgtatagcatatagaaaatttacatcaaaagagtatgaggaaatagataaacgcatatttgaagccaggactgccttgcagcagcgggaagagaaattggcagctgttttccagttcatagagaaagacctgatattacttggagccacagcagtagaagacagactacaagataaagttcgagaaactattgaagcattgagaatggctggtatcaaagtatgggtacttactggggataaacatgaaacagctgttagtgtgagtttatcatgtggccattttcatagaaccatgaacatccttgaacttataaaccagaaatcagacagcgagtgtgctgaacaattgaggcagcttgccagaagaattacagaggatcatgtgattcagcatgggctggtagtggatgggaccagcctatctcttgcactcagggagcatgaaaaactatttatggaagtttgcagaaattgttcagctgtattatgctgtcgtatggctccactgcagaaagcaaaagtaataagactaataaaaatatcacctgagaaacctataacattggctgttggtgatggtgctaatgacgtaagcatgatacaagaagcccatgttggcataggaatcatgggtaaagaaggaagacaggctgcaagaaacagtgactatgcaatagccagatttaagttcctctccaaattgctttttgttcatggtcatttttattatattagaatagctacccttgtacagtattttttttataagaatgtgtgctttatcacaccccagtttttatatcagttctactgtttgttttctcagcaaacattgtatgacagcgtgtacctgactttatacaatatttgttttacttccctacctattctgatatatagtcttttggaacagcatgtagaccctcatgtgttacaaaataagcccaccctttatcgagacattagtaaaaaccgcctcttaagtattaaaacatttctttattggaccatcctgggcttcagtcatgcctttattttcttttttggatcctatttactaatagggaaagatacatctctgcttggaaatggccagatgtttggaaactggacatttggcactttggtcttcacagtcatggttattacagtcacagtaaagatggctctggaaactcatttttggacttggatcaaccatctcgttacctggggatctattatattttattttgtattttccttgttttatggagggattctctggccatttttgggctcccagaatatgtattttgtgtttattcagctcctgtcaagtggttctgcttggtttgccataatcctcatggttgttacatgtctatttcttgatatcataaagaaggtctttgaccgacacctccaccctacaagtactgaaaaggcacagcttactgaaacaaatgcaggtatcaagtgcttggactccatgtgctgtttcccggaaggagaagcagcgtgtgcatctgttggaagaatgctggaacgagttataggaagatgtagtccaacccacatcagcagatcatggagtgcatcggatcctttctataccaacgacaggagcatcttgactctctccacaatggactcatctacttgttaaaggggcagtagtactttgtgggagccagttcacctcctttcctaaaattcagtgtgatcaccctgttaatggccacactagctctgaaattaatttccaaaatctttgtagtagttcatacccactcagagttataatggcaaacaaacagaaagcattagtacaagcccctcccaacacccttaatttgaatctgaacatgttaaaatttgagaataaagagacatttttcatctctttgtctggtttgtcccttgtgcttatgggactcctaatggcatttcagtctgttgctgaggccattatattttaatataaatgtagaaaaaagagagaaatcttagtaaagagtattttttagtattagcttgattattgactcttctatttaaatctgcttctgtaaattatgctgaaagtttgccttgagaactctatttttttattagagttatatttaaagcttttcatgggaaaagttaatgtgaatactgaggaattttggtccctcagtgacctgtgttgttaattcattaatgcattctgagttcacagagcaaattaggagaatcatttccaaccattatttactgcagtatggggagtaaatttataccaattcctctaactgtactgtaacacagcctgtaaagttagccatataaatgcaagggtatatcatatatacaaatcaggaatcaggtccgttcaccgaacttcaaattgatgtttactaatatttttgtgacagagtataaagaccctatagtgggtaaattagatactattagcatattattaatttaatgtctttatcattggatcttttgcatgctttaatctggttaacatatttaaatttgctttttttctctttacctgaaggctctgtgtatagtatttcatgacatcgttgtacagtttaactatatcaataaaaagtttggacagtatttaaatattgcaaatatgtttaattatacaaatcagaatagtatgggtaattaaatgaatacaaaaagaagagcctctttctgcagccgacttagacatgctcttccctttctataagctagattttagaataaagggtttcagttaataatcttattttcaggttatgtcatctaacttatagcaaactaccacaatacagtgagttctgccagtgtcccagtacaaggcatatttcaggtgtggctgtggaatgtaaaaatgctcaacttgtatcaggtaatgttagcaataaattaaatgctaagaatgattaatcgggtacatgttactgtaattaactcattgcacttcaaaacctaacttccatcctgaatttatcaagtagttcagtattgtcatttgtttttgttttattgaaaagtaatgttgtcttaagatttagaagtgattattagcttgagaactattacccagctctaagcaaataatgattgtatacatattaagataatggttaaatgcggttttaccaagttttcccttgaaaatgtaattcctttatggagatttattgtgcagccctaagcttccttcccatttcatgaatataaggcttctagaattggactggcaggggaaagaatggtagagacagaaattaagactttatccttgtttgcttgtaaactattattttcttgctaatgtaacatttgtctgttccagtgatgtaaggatattaagttattaagctaaatattaattttcaaaaatagtccttctttaacttagatatttcatagctggatttaggaagatctgttattctggaagtactaaaaagaataatacaacgtacaatgtctgcattcactaattcatgttccagaagaggaaataatgaagatatactcagtagagtactaggtgggaggatatggaaatttgctcataaaatctcttataaaacgtgcatataacaaaatgacacccagtaggcctgcattacatttacatgaccgtgtttatttgccatcaaataaactgagtactgacaccagacaaagactccaaagtcataaaatagcctatgaccaactgcagcaagacaggaggtcagctcgcctataatggtgcttaaagtgtgattgatgtaattttctgtactcaccatttgaagttagttaaggagaactttatttttttaaaaaaagtaaatggcaaccactagtgtgctcatcctgaactgttactccaaatccactccgtttttaaagcaaaattatcttgtgattttaagaaaagagttttctatttatttaagaaagtaacaatgcagtctgcaagctttcagtagttttctagtgctatattcatcctgtaaaactcttactacgtaaccagtaatcacaaggaaagtgtcccctttgcatatttctttaaaattctttctttggaaagtatgatgttgataattaacttacccttatctgccaaaaccagagcaaaatgctaaatacgttattgctaatcagtggtctcaaatcgatttgcctccctttgcctcgtctgagggctgtaagcctgaagatagtggcaagcaccaagtcagtttccaaaattgcccctcagctgctttaagtgactcagcaccctgcctcagcttcagcaggcgtaggctcaccctgggcggagcaaagtatgggccagggagaactacagctacgaagacctgctgtcgagttgagaaaaggggagaatttatggtctgaattttctaactgtcctctttcttgggtctaaagctcataatacacaaaggcttccagacctgagccacacccaggccctatcctgaacaggagactaaacagaggcaaatcaaccctaggaaatacttgcattctgccctacggttagtaccaggactgaggtcatttctactggaaaagattgtgagattgaacttatctgatcgcttgagactcctaataggcaggagtcaaggccactagaaaattgacagttaagagccaaaagtttttaaaatatgctactctgaaaaatctcgtgaaggctgtaggaaaagggagaatcttccatgttggtgtttttcctgtaaagatcagtttggggtatgatataagcaggtattaataaaaataacacaccaaagagttacgtaaaacatgttttattaattttggtccccacgtacagacattttatttctattttgaaatgagttatctattttcataaaagtaaaacactattaaagtgctgttttatgtgaaataacttgaatgttgttcctataaaaaatagatcataactcatgatatgtttgtaatcatggtaatttagatttttatgaggaatgagtatctggaaatattgtagcaatacttggtttaaaattttggacctgagacactgtggctgtctaatgtaatcctttaaaaattctctgcattgtcagtaaatgtagtatattattgtacagctactcataattttttaaagtttatgaagttatatttatcaaataaaaactttcctatataaaaaaaaaaaaaaaacaaaaaaaaaaaaaacaaaaaaaacacaaaaaaaaaaaaaaaacaacaaaaaataaaaacaaacaaaaaaaacaaaataacaaaacagaaaatccctacccaaacaactcaccacccgcgcagttgtcccaattttaatatatactaacgcagcagagacgacaatcagacacgcatcagacctagcttgttactataacaaaaaggcgcacatacaatgaatattgactatatatagaaccaaagccgacagtaactaatcaactaatagagtcaaatacattactcgtgcttatcacttgagaaaaacacacttatagtgggtgcgatataacgtgacacacactcaaaatataagcaaaaataaaaatatgtgagtggtgcaaaacacaccttgtgagggaga

SEQ ID NO: 43136 - DNA, 6363 bp, Homo sapiens
agcactatcttgaagtatacatggcaagctgaagaaaaatgggatgaaccttggtataaccaaaaaacagaacatcaaagaaatagcagtaagattctgagatttatttcagacttccttgcttttttggttctctacaatttcatcattccaatttcattatatgtgacagtcgaaatgcagaaatttcttggatcattttttattggctgggatcttgatctgtatcatgaagaatcagatcagaaagctcaagtcaatacttccgatctgaatgaagagcttggacaggtagagtacgtgtttacagataaaactggtacactgacagaaaatgagatgcagtttcgggaatgttcaattaatggcatgaaataccaagaaattaatggtagacttgtacccgaaggaccaacaccagactcttcagaaggaaacttatcttatcttagtagtttatcccatcttaacaacttatcccatcttacaaccagttcctctttcagaaccagtcctgaaaatgaaactgaactaattaaagaacatgatctcttctttaaagcagtcagtctctgtcacactgtacagattagcaatgttcaaactgactgcactggtgatggtccctggcaatccaacctggcaccatcgcagttggagtactatgcatcttcaccagatgaaaaggctctagtagaagctgctgcaaggattggtattgtgtttattggcaattctgaagaaactatggaggttaaaactcttggaaaactggaacggtacaaactgcttcatattctggaatttgattcagatcgtaggagaatgagtgtaattgttcaggcaccttcaggtgagaagttattatttgctaaaggagctgagtcatcaattctccctaaatgtataggtggagaaatagaaaaaaccagaattcatgtagatgaatttgctttgaaagggctaagaactctgtgtatagcatatagaaaatttacatcaaaagagtatgaggaaatagataaacgcatatttgaagccaggactgccttgcagcagcgggaagagaaattggcagctgttttccagttcatagagaaagacctgatattacttggagccacagcagtagaagacagactacaagataaagttcgagaaactattgaagcattgagaatggctggtatcaaagtatgggtacttactggggataaacatgaaacagctgttagtgtgagtttatcatgtggccattttcatagaaccatgaacatccttgaacttataaaccagaaatcagacagcgagtgtgctgaacaattgaggcagcttgccagaagaattacagaggatcatgtgattcagcatgggctggtagtggatgggaccagcctatctcttgcactcagggagcatgaaaaactatttatggaagtttgcagaaattgttcagctgtattatgctgtcgtatggctccactgcagaaagcaaaagtaataagactaataaaaatatcacctgagaaacctataacattggctgttggtgatggtgctaatgacgtaagcatgatacaagaagcccatgttggcataggaatcatgggtaaagaaggaagacaggctgcaagaaacagtgactatgcaatagccagatttaagttcctctccaaattgctttttgttcatggtcatttttattatattagaatagctacccttgtacagtattttttttataagaatgtgtgctttatcacaccccagtttttatatcagttctactgtttgttttctcagcaaacattgtatgacagcgtgtacctgactttatacaatatttgttttacttccctacctattctgatatatagtcttttggaacagcatgtagaccctcatgtgttacaaaataagcccaccctttatcgagacattagtaaaaaccgcctcttaagtattaaaacatttctttattggaccatcctgggcttcagtcatgcctttattttcttttttggatcctatttactaatagggaaagatacatctctgcttggaaatggccagatgtttggaaactggacatttggcactttggtcttcacagtcatggttattacagtcacagtaaagatggctctggaaactcatttttggacttggatcaaccatctcgttacctggggatctattatattttattttgtattttccttgttttatggagggattctctggccatttttgggctcccagaatatgtattttgtgtttattcagctcctgtcaagtggttctgcttggtttgccataatcctcatggttgttacatgtctatttcttgatatcataaagaaggtctttgaccgacacctccaccctacaagtactgaaaaggcacagcttactgaaacaaatgcaggtatcaagtgcttggactccatgtgctgtttcccggaaggagaagcagcgtgtgcatctgttggaagaatgctggaacgagttataggaagatgtagtccaacccacatcagcagatcatggagtgcatcggatcctttctataccaacgacaggagcatcttgactctctccacaatggactcatctacttgttaaaggggcagtagtactttgtgggagccagttcacctcctttcctaaaattcagtgtgatcaccctgttaatggccacactagctctgaaattaatttccaaaatctttgtagtagttcatacccactcagagttataatggcaaacaaacagaaagcattagtacaagcccctcccaacacccttaatttgaatctgaacatgttaaaatttgagaataaagagacatttttcatctctttgtctggtttgtcccttgtgcttatgggactcctaatggcatttcagtctgttgctgaggccattatattttaatataaatgtagaaaaaagagagaaatcttagtaaagagtattttttagtattagcttgattattgactcttctatttaaatctgcttctgtaaattatgctgaaagtttgccttgagaactctatttttttattagagttatatttaaagcttttcatgggaaaagttaatgtgaatactgaggaattttggtccctcagtgacctgtgttgttaattcattaatgcattctgagttcacagagcaaattaggagaatcatttccaaccattatttactgcagtatggggagtaaatttataccaattcctctaactgtactgtaacacagcctgtaaagttagccatataaatgcaagggtatatcatatatacaaatcaggaatcaggtccgttcaccgaacttcaaattgatgtttactaatatttttgtgacagagtataaagaccctatagtgggtaaattagatactattagcatattattaatttaatgtctttatcattggatcttttgcatgctttaatctggttaacatatttaaatttgctttttttctctttacctgaaggctctgtgtatagtatttcatgacatcgttgtacagtttaactatatcaataaaaagtttggacagtatttaaatattgcaaatatgtttaattatacaaatcagaatagtatgggtaattaaatgaatacaaaaagaagagcctctttctgcagccgacttagacatgctcttccctttctataagctagattttagaataaagggtttcagttaataatcttattttcaggttatgtcatctaacttatagcaaactaccacaatacagtgagttctgccagtgtcccagtacaaggcatatttcaggtgtggctgtggaatgtaaaaatgctcaacttgtatcaggtaatgttagcaataaattaaatgctaagaatgattaatcgggtacatgttactgtaattaactcattgcacttcaaaacctaacttccatcctgaatttatcaagtagttcagtattgtcatttgtttttgttttattgaaaagtaatgttgtcttaagatttagaagtgattattagcttgagaactattacccagctctaagcaaataatgattgtatacatattaagataatggttaaatgcggttttaccaagttttcccttgaaaatgtaattcctttatggagatttattgtgcagccctaagcttccttcccatttcatgaatataaggcttctagaattggactggcaggggaaagaatggtagagacagaaattaagactttatccttgtttgcttgtaaactattattttcttgctaatgtaacatttgtctgttccagtgatgtaaggatattaagttattaagctaaatattaattttcaaaaatagtccttctttaacttagatatttcatagctggatttaggaagatctgttattctggaagtactaaaaagaataatacaacgtacaatgtctgcattcactaattcatgttccagaagaggaaataatgaagatatactcagtagagtactaggtgggaggatatggaaatttgctcataaaatctcttataaaacgtgcatataacaaaatgacacccagtaggcctgcattacatttacatgaccgtgtttatttgccatcaaataaactgagtactgacaccagacaaagactccaaagtcataaaatagcctatgaccaactgcagcaagacaggaggtcagctcgcctataatggtgcttaaagtgtgattgatgtaattttctgtactcaccatttgaagttagttaaggagaactttatttttttaaaaaaagtaaatggcaaccactagtgtgctcatcctgaactgttactccaaatccactccgtttttaaagcaaaattatcttgtgattttaagaaaagagttttctatttatttaagaaagtaacaatgcagtctgcaagctttcagtagttttctagtgctatattcatcctgtaaaactcttactacgtaaccagtaatcacaaggaaagtgtcccctttgcatatttctttaaaattctttctttggaaagtatgatgttgataattaacttacccttatctgccaaaaccagagcaaaatgctaaatacgttattgctaatcagtggtctcaaatcgatttgcctccctttgcctcgtctgagggctgtaagcctgaagatagtggcaagcaccaagtcagtttccaaaattgcccctcagctgctttaagtgactcagcaccctgcctcagcttcagcaggcgtaggctcaccctgggcggagcaaagtatgggccagggagaactacagctacgaagacctgctgtcgagttgagaaaaggggagaatttatggtctgaattttctaactgtcctctttcttgggtctaaagctcataatacacaaaggcttccagacctgagccacacccaggccctatcctgaacaggagactaaacagaggcaaatcaaccctaggaaatacttgcattctgccctacggttagtaccaggactgaggtcatttctactggaaaagattgtgagattgaacttatctgatcgcttgagactcctaataggcaggagtcaaggccactagaaaattgacagttaagagccaaaagtttttaaaatatgctactctgaaaaatctcgtgaaggctgtaggaaaagggagaatcttccatgttggtgtttttcctgtaaagatcagtttggggtatgatataagcaggtattaataaaaataacacaccaaagagttacgtaaaacatgttttattaattttggtccccacgtacagacattttatttctattttgaaatgagttatctattttcataaaagtaaaacactattaaagtgctgttttatgtgaaataacttgaatgttgttcctataaaaaatagatcataactcatgatatgtttgtaatcatggtaatttagatttttatgaggaatgagtatctggaaatattgtagcaatacttggtttaaaattttggacctgagacactgtggctgtctaatgtaatcctttaaaaattctctgcattgtcagtaaatgtagtatattattgtacagctactcataattttttaaagtttatgaagttatatttatcaaataaaaactttcctatataattaaaagtgttcctttatttaagcattttaagcctgtctctgtttatcacaacctgcactgccaaacttgtttcaagttaagttttactgtatttacccttcattatagcacagggatatcatttatgcctttcactgactgcagttttttaaaatgtagtcgacgcggccgcgaatttagtagtagtagtcgacccgggaatttccggaccg

SEQ ID NO: 43137 - DNA, 3577 bp, Homo sapiens
agcactatcttgaagtatacatggcaagctgaagaaaaatgggatgaaccttggtataaccaaaaaacagaacatcaaagaaatagcagtaagattctgagatttatttcagacttccttgcttttttggttctctacaatttcatcattccaatttcattatatgtgacagtcgaaatgcagaaatttcttggatcattttttattggctgggatcttgatctgtatcatgaagaatcagatcagaaagctcaagtcaatacttccgatctgaatgaagagcttggacaggtagagtacgtgtttacagataaaactggtacactgacagaaaatgagatgcagtttcgggaatgttcaattaatggcatgaaataccaagaaattaatggtagacttgtacccgaaggaccaacaccagactcttcagaaggaaacttatcttatcttagtagtttatcccatcttaacaacttatcccatcttacaaccagttcctctttcagaaccagtcctgaaaatgaaactgaactaattaaagaacatgatctcttctttaaagcagtcagtctctgtcacactgtacagattagcaatgttcaaactgactgcactggtgatggtccctggcaatccaacctggcaccatcgcagttggagtactatgcatcttcaccagatgaaaaggctctagtagaagctgctgcaaggattggtattgtgtttattggcaattctgaagaaactatggaggttaaaactcttggaaaactggaacggtacaaactgcttcatattctggaatttgattcagatcgtaggagaatgagtgtaattgttcaggcaccttcaggtgagaagttattatttgctaaaggagctgagtcatcaattctccctaaatgtataggtggagaaatagaaaaaaccagaattcatgtagatgaatttgctttgaaagggctaagaactctgtgtatagcatatagaaaatttacatcaaaagagtatgaggaaatagataaacgcatatttgaagccaggactgccttgcagcagcgggaagagaaattggcagctgttttccagttcatagagaaagacctgatattacttggagccacagcagtagaagacagactacaagataaagttcgagaaactattgaagcattgagaatggctggtatcaaagtatgggtacttactggggataaacatgaaacagctgttagtgtgagtttatcatgtggccattttcatagaaccatgaacatccttgaacttataaaccagaaatcagacagcgagtgtgctgaacaattgaggcagcttgccagaagaattacagaggatcatgtgattcagcatgggctggtagtggatgggaccagcctatctcttgcactcagggagcatgaaaaactatttatggaagtttgcagaaattgttcagctgtattatgctgtcgtatggctccactgcagaaagcaaaagtaataagactaataaaaatatcacctgagaaacctataacattggctgttggtgatggtgctaatgacgtaagcatgatacaagaagcccatgttggcataggaatcatgggtaaagaaggaagacaggctgcaagaaacagtgactatgcaatagccagatttaagttcctctccaaattgctttttgttcatggtcatttttattatattagaatagctacccttgtacagtattttttttataagaatgtgtgctttatcacaccccagtttttatatcagttctactgtttgttttctcagcaaacattgtatgacagcgtgtacctgactttatacaatatttgttttacttccctacctattctgatatatagtcttttggaacagcatgtagaccctcatgtgttacaaaataagcccaccctttatcgagacattagtaaaaaccgcctcttaagtattaaaacatttctttattggaccatcctgggcttcagtcatgcctttattttcttttttggatcctatttactaatagggaaagatacatctctgcttggaaatggccagatgtttggaaactggacatttggcactttggtcttcacagtcatggttattacagtcacagtaaagatggctctggaaactcatttttggacttggatcaaccatctcgttacctggggatctattatattttattttgtattttccttgttttatggagggattctctggccatttttgggctcccagaatatgtattttgtgtttattcagctcctgtcaagtggttctgcttggtttgccataatcctcatggttgttacatgtctatttcttgatatcataaagaaggtctttgaccgacacctccaccctacaagtactgaaaaggcacagcttactgaaacaaatgcaggtatcaagtgcttggactccatgtgctgtttcccggaaggagaagcagcgtgtgcatctgttggaagaatgctggaacgagttataggaagatgtagtccaacccacatcagcagatcatggagtgcatcggatcctttctataccaacgacaggagcatcttgactctctccacaatggactcatctacttgttaaaggggcagtagtactttgtgggagccagttcacctcctttcctaaaattcagtgtgatcaccctgttaatggccacactagctctgaaattaatttccaaaatctttgtagtagttcatacccactcagagttataatggcaaacaaacagaaagcattagtacaagcccctcccaacacccttaatttgaatctgaacatgttaaaatttgagaataaagagacatttttcatctctttgtctggtttgtcccttgtgcttatgggactcctaatggcatttcagtctgttgctgaggccattatattttaatataaatgtagaaaaaagagagaaatcttagtaaagagtattttttagtattagcttgattattgactcttctatttaaatctgcttctgtaaattatgctgaaagtttgccttgagaactctatttttttattagagttatatttaaagcttttcatgggaaaagttaatgtgaatactgaggaattttggtccctcagtgacctgtgttgttaattcattaatgcattctgagttcacagagcaaattaggagaatcatttccaaccattatttactgcagtatggggagtaaatttataccaattcctctaactgtactgtaacacagcctgtaaagttagccatataaatgcaagggtatatcatatatacaaatcaggaatcaggtccgttcaccgaacttcaaattgatgtttactaatatttttgtgacagagtataaagaccctatagtgggtaaattagatactattagcatattattaatttaatgtctttatcattggatcttttgcatgctttaatctggttaacatatttaaatttgctttttttctctttacctgaaggctctgtgtatagtatttcatgacatcgttgtacagtttaactatatcaataaaaagtttggacagt

SEQ ID NO: 43138 - DNA, 3878 bp, Homo sapiens
ctttactacatatagaaactgttttaatgctaatgaatgtttgaattttggctaatatttttatatgatgactagagcattatttttcccaagtttttatataatataaatagaaagtttgggcattcgatactagtatgaagaacctctctttagtatttaaatgaatcaatcagtgattgcatttgggtcctaagttttagagtaaatttttttctcaattaaaacataggtcctggtgagccaaacttttctcttattgttactttagatcatggagtgcatcggatcctttctataccaacgacaggagcatcttgactctctccacaatggactcatctacttgttaaaggggcagtagtactttgtgggagccagttcacctcctttcctaaaattcagtgtgatcaccctgttaatggccacactagctctgaaattaatttccaaaatctttgtagtagttcatacccactcagagttataatggcaaacaaacagaaagcattagtacaagcccctcccaacacccttaatttgaatctgaacatgttaaaatttgagaataaagagacatttttcatctctttgtctggtttgtcccttgtgcttatgggactcctaatggcatttcagtctgttgctgaggccattatattttaatataaatgtagaaaaaagagagaaatcttagtaaagagtattttttagtattagcttgattattgactcttctatttaaatctgcttctgtaaattatgctgaaagtttgccttgagaactctatttttttattagagttatatttaaagcttttcatgggaaaagttaatgtgaatactgaggaattttggtccctcagtgacctgtgttgttaattcattaatgcattctgagttcacagagcaaattaggagaatcatttccaaccattatttactgcagtatggggagtaaatttataccaattcctctaactgtactgtaacacagcctgtaaagttagccatataaatgcaagggtatatcatatatacaaatcaggaatcaggtccgttcaccgaacttcaaattgatgtttactaatatttttgtgacagagtataaagaccctatagtgggtaaattagatactattagcatattattaatttaatgtctttatcattggatcttttgcatgctttaatctggttaacatatttaaatttgctttttttctctttacctgaaggctctgtgtatagtatttcatgacatcgttgtacagtttaactatatcaataaaaagtttggacagtatttaaatattgcaaatatgtttaattatacaaatcagaatagtatgggtaattaaatgaatacaaaaagaagagcctctttctgcagccgacttagacatgctcttccctttctataagctagattttagaataaagggtttcagttaataatcttattttcaggttatgtcatctaacttatagcaaactaccacaatacagtgagttctgccagtgtcccagtacaaggcatatttcaggtgtggctgtggaatgtaaaaatgctcaacttgtatcaggtaatgttagcaataaattaaatgctaagaatgattaatcgggtacatgttactgtaattaactcattgcacttcaaaacctaacttccatcctgaatttatcaagtagttcagtattgtcatttgtttttgttttattgaaaagtaatgttgtcttaagatttagaagtgattattagcttgagaactattacccagctctaagcaaataatgattgtatacatattaagataatggttaaatgcggttttaccaagttttcccttgaaaatgtaattcctttatggagatttattgtgcagccctaagcttccttcccatttcatgaatataaggcttctagaattggactggcaggggaaagaatggtagagacagaaattaagactttatccttgtttgcttgtaaactattattttcttgctaatgtaacatttgtctgttccagtgatgtaaggatattaagttattaagctaaatattaattttcaaaaatagtccttctttaacttagatatttcatagctggatttaggaagatctgttattctggaagtactaaaaagaataatacaacgtacaatgtctgcattcactaattcatgttccagaagaggaaataatgaagatatactcagtagagtactaggtgggaggatatggaaatttgctcataaaatctcttataaaacgtgcatataacaaaatgacacccagtaggcctgcattacatttacatgaccgtgtttatttgccatcaaataaactgagtactgacaccagacaaagactccaaagtcataaaatagcctatgaccaactgcagcaagacaggaggtcagctcgcctataatggtgcttaaagtgtgattgatgtaattttctgtactcaccatttgaagttagttaaggagaactttatttttttaaaaaaagtaaatggcaaccactagtgtgctcatcctgaactgttactccaaatccactccgtttttaaagcaaaattatcttgtgattttaagaaaagagttttctatttatttaagaaagtaacaatgcagtctgcaagctttcagtagttttctagtgctatattcatcctgtaaaactcttactacgtaaccagtaatcacaaggaaagtgtcccctttgcatatttctttaaaattctttctttggaaagtatgatgttgataattaacttacccttatctgccaaaaccagagcaaaatgctaaatacgttattgctaatcagtggtctcaaatcgatttgcctccctttgcctcgtctgagggctgtaagcctgaagatagtggcaagcaccaagtcagtttccaaaattgcccctcagctgctttaagtgactcagcaccctgcctcagcttcagcaggcgtaggctcaccctgggcggagcaaagtatgggccagggagaactacagctacgaagacctgctgtcgagttgagaaaaggggagaatttatggtctgaattttctaactgtcctctttcttgggtctaaagctcataatacacaaaggcttccagacctgagccacacccaggccctatcctgaacaggagactaaacagaggcaaatcaaccctaggaaatacttgcattctgccctacggttagtaccaggactgaggtcatttctactggaaaagattgtgagattgaacttatctgatcgcttgagactcctaataggcaggagtcaaggccactagaaaattgacagttaagagccaaaagtttttaaaatatgctactctgaaaaatctcgtgaaggctgtaggaaaagggagaatcttccatgttggtgtttttcctgtaaagatcagtttggggtatgatataagcaggtattaataaaaataacacaccaaagagttacgtaaaacatgttttattaattttggtccccacgtacagacattttatttctattttgaaatgagttatctattttcataaaagtaaaacactattaaagtgctgttttatgtgaaataacttgaatgttgttcctataaaaaatagatcataactcatgatatgtttgtaatcatggtaatttagatttttatgaggaatgagtatctggaaatattgtagcaatacttggtttaaaattttggacctgagacactgtggctgtctaatgtaatcctttaaaaattctctgcattgtcagtaaatgtagtatattattgtacagctactcataattttttaaagtttatgaagttatatttatcaaataaaaactttcctatataa

SEQ ID NO: 43139 - DNA, 3837 bp, Homo sapiens
ggtcgcccagaggattcaagtatgatatgagtggagcattatttttcccaagtttttatataatataaatagaaagtttgggcattcgatactagtatgaagaacctctctttagtatttaaatgaatcaatcagtgattgcatttgggtcctaagttttagagtaaatttttttctcaattaaaacataggtcctggtgagccaaacttttctcttattgttactttagatcatggagtgcatcggatcctttctataccaacgacaggagcatcttgactctctccacaatggactcatctacttgttaaaggggcagtagtactttgtgggagccagttcacctcctttcctaaaattcagtgtgatcaccctgttaatggccacactagctctgaaattaatttccaaaatctttgtagtagttcatacccactcagagttataatggcaaacaaacagaaagcattagtacaagcccctcccaacacccttaatttgaatctgaacatgttaaaatttgagaataaagagacatttttcatctctttgtctggtttgtcccttgtgcttatgggactcctaatggcatttcagtctgttgctgaggccattatattttaatataaatgtagaaaaaagagagaaatcttagtaaagagtattttttagtattagcttgattattgactcttctatttaaatctgcttctgtaaattatgctgaaagtttgccttgagaactctatttttttattagagttatatttaaagcttttcatgggaaaagttaatgtgaatactgaggaattttggtccctcagtgacctgtgttgttaattcattaatgcattctgagttcacagagcaaattaggagaatcatttccaaccattatttactgcagtatggggagtaaatttataccaattcctctaactgtactgtaacacagcctgtaaagttagccatataaatgcaagggtatatcatatatacaaatcaggaatcaggtccgttcaccgaacttcaaattgatgtttactaatatttttgtgacagagtataaagaccctatagtgggtaaattagatactattagcatattattaatttaatgtctttatcattggatcttttgcatgctttaatctggttaacatatttaaatttgctttttttctctttacctgaaggctctgtgtatagtatttcatgacatcgttgtacagtttaactatatcaataaaaagtttggacagtatttaaatattgcaaatatgtttaattatacaaatcagaatagtatgggtaattaaatgaatacaaaaagaagagcctctttctgcagccgacttagacatgctcttccctttctataagctagattttagaataaagggtttcagttaataatcttattttcaggttatgtcatctaacttatagcaaactaccacaatacagtgagttctgccagtgtcccagtacaaggcatatttcaggtgtggctgtggaatgtaaaaatgctcaacttgtatcaggtaatgttagcaataaattaaatgctaagaatgattaatcgggtacatgttactgtaattaactcattgcacttcaaaacctaacttccatcctgaatttatcaagtagttcagtattgtcatttgtttttgttttattgaaaagtaatgttgtcttaagatttagaagtgattattagcttgagaactattacccagctctaagcaaataatgattgtatacatattaagataatggttaaatgcggttttaccaagttttcccttgaaaatgtaattcctttatggagatttattgtgcagccctaagcttccttcccatttcatgaatataaggcttctagaattggactggcaggggaaagaatggtagagacagaaattaagactttatccttgtttgcttgtaaactattattttcttgctaatgtaacatttgtctgttccagtgatgtaaggatattaagttattaagctaaatattaattttcaaaaatagtccttctttaacttagatatttcatagctggatttaggaagatctgttattctggaagtactaaaaagaataatacaacgtacaatgtctgcattcactaattcatgttccagaagaggaaataatgaagatatactcagtagagtactaggtgggaggatatggaaatttgctcataaaatctcttataaaacgtgcatataacaaaatgacacccagtaggcctgcattacatttacatgaccgtgtttatttgccatcaaataaactgagtactgacaccagacaaagactccaaagtcataaaatagcctatgaccaactgcagcaagacaggaggtcagctcgcctataatggtgcttaaagtgtgattgatgtaattttctgtactcaccatttgaagttagttaaggagaactttatttttttaaaaaaagtaaatggcaaccactagtgtgctcatcctgaactgttactccaaatccactccgtttttaaagcaaaattatcttgtgattttaagaaaagagttttctatttatttaagaaagtaacaatgcagtctgcaagctttcagtagttttctagtgctatattcatcctgtaaaactcttactacgtaaccagtaatcacaaggaaagtgtcccctttgcatatttctttaaaattctttctttggaaagtatgatgttgataattaacttacccttatctgccaaaaccagagcaaaatgctaaatacgttattgctaatcagtggtctcaaatcgatttgcctccctttgcctcgtctgagggctgtaagcctgaagatagtggcaagcaccaagtcagtttccaaaattgcccctcagctgctttaagtgactcagcaccctgcctcagcttcagcaggcgtaggctcaccctgggcggagcaaagtatgggccagggagaactacagctacgaagacctgctgtcgagttgagaaaaggggagaatttatggtctgaattttctaactgtcctctttcttgggtctaaagctcataatacacaaaggcttccagacctgagccacacccaggccctatcctgaacaggagactaaacagaggcaaatcaaccctaggaaatacttgcattctgccctacggttagtaccaggactgaggtcatttctactggaaaagattgtgagattgaacttatctgatcgcttgagactcctaataggcaggagtcaaggccactagaaaattgacagttaagagccaaaagtttttaaaatatgctactctgaaaaatctcgtgaaggctgtaggaaaagggagaatcttccatgttggtgtttttcctgtaaagatcagtttggggtatgatataagcaggtattaataaaaataacacaccaaagagttacgtaaaacatgttttattaattttggtccccacgtacagacattttatttctattttgaaatgagttatctattttcataaaagtaaaacactattaaagtgctgttttatgtgaaataacttgaatgttgttcctataaaaaatagatcataactcatgatatgtttgtaatcatggtaatttagatttttatgaggaatgagtatctggaaatattgtagcaatacttggtttaaaattttggacctgagacactgtggctgtctaatgtaatcctttaaaaattctctgcattgtcagtaaatgtagtatattattgtacagctactcataattttttaaagtttatgaagttatatttatcaaataaaaactttcctatataa

SEQ ID NO: 43140 - DNA, 5083 bp, Homo sapiens
agcactatcttgaagtatacatggcaagctgaagaaaaatgggatgaaccttggtataaccaaaaaacagaacatcaaagaaatagcagtaagattctgagatttatttcagacttccttgcttttttggttctctacaatttcatcattccaatttcattatatgtgacagtcgaaatgcagaaatttcttggatcattttttattggctgggatcttgatctgtatcatgaagaatcagatcagaaagctcaagtcaatacttccgatctgaatgaagagcttggacaggtagagtacgtgtttacagataaaactggtacactgacagaaaatgagatgcagtttcgggaatgttcaattaatggcatgaaataccaagaaattaatggtagacttgtacccgaaggaccaacaccagactcttcagaaggaaacttatcttatcttagtagtttatcccatcttaacaacttatcccatcttacaaccagttcctctttcagaaccagtcctgaaaatgaaactgaactaattaaagaacatgatctcttctttaaagcagtcagtctctgtcacactgtacagattagcaatgttcaaactgactgcactggtgatggtccctggcaatccaacctggcaccatcgcagttggagtactatgcatcttcaccagatgaaaaggctctagtagaagctgctgcaaggattggtattgtgtttattggcaattctgaagaaactatggaggttaaaactcttggaaaactggaacggtacaaactgcttcatattctggaatttgattcagatcgtaggagaatgagtgtaattgttcaggcaccttcaggtgagaagttattatttgctaaaggagctgagtcatcaattctccctaaatgtataggtggagaaatagaaaaaaccagaattcatgtagatgaatttgctttgaaagggctaagaactctgtgtatagcatatagaaaatttacatcaaaagagtatgaggaaatagataaacgcatatttgaagccaggactgccttgcagcagcgggaagagaaattggcagctgttttccagttcatagagaaagacctgatattacttggagccacagcagtagaagacagactacaagataaagttcgagaaactattgaagcattgagaatggctggtatcaaagtatgggtacttactggggataaacatgaaacagctgttagtgtgagtttatcatgtggccattttcatagaaccatgaacatccttgaacttataaaccagaaatcagacagcgagtgtgctgaacaattgaggcagcttgccagaagaattacagaggatcatgtgattcagcatgggctggtagtggatgggaccagcctatctcttgcactcagggagcatgaaaaactatttatggaagtttgcagaaattgttcagctgtattatgctgtcgtatggctccactgcagaaagcaaaagtaataagactaataaaaatatcacctgagaaacctataacattggctgttggtgatggtgctaatgacgtaagcatgatacaagaagcccatgttggcataggaatcatgggtaaagaaggaagacaggctgcaagaaacagtgactatgcaatagccagatttaagttcctctccaaattgctttttgttcatggtcatttttattatattagaatagctacccttgtacagtattttttttataagaatgtgtgctttatcacaccccagtttttatatcagttctactgtttgttttctcagcaaacattgtatgacagcgtgtacctgactttatacaatatttgttttacttccctacctattctgatatatagtcttttggaacagcatgtagaccctcatgtgttacaaaataagcccaccctttatcgagacattagtaaaaaccgcctcttaagtattaaaacatttctttattggaccatcctgggcttcagtcatgcctttattttcttttttggatcctatttactaatagggaaagatacatctctgcttggaaatggccagatgtttggaaactggacatttggcactttggtcttcacagtcatggttattacagtcacagtaaagatggctctggaaactcatttttggacttggatcaaccatctcgttacctggggatctattatattttattttgtattttccttgttttatggagggattctctggccatttttgggctcccagaatatgtattttgtgtttattcagctcctgtcaagtggttctgcttggtttgccataatcctcatggttgttacatgtctatttcttgatatcataaagaaggtctttgaccgacacctccaccctacaagtactgaaaaggcacagcttactgaaacaaatgcaggtatcaagtgcttggactccatgtgctgtttcccggaaggagaagcagcgtgtgcatctgttggaagaatgctggaacgagttataggaagatgtagtccaacccacatcagcagatcatggagtgcatcggatcctttctataccaacgacaggagcatcttgactctctccacaatggactcatctacttgttaaaggggcagtagtactttgtgggagccagttcacctcctttcctaaaattcagtgtgatcaccctgttaatggccacactagctctgaaattaatttccaaaatctttgtagtagttcatacccactcagagttataatggcaaacaaacagaaagcattagtacaagcccctcccaacacccttaatttgaatctgaacatgttaaaatttgagaataaagagacatttttcatctctttgtctggtttgtcccttgtgcttatgggactcctaatggcatttcagtctgttgctgaggccattatattttaatataaatgtagaaaaaagagagaaatcttagtaaagagtattttttagtattagcttgattattgactcttctatttaaatctgcttctgtaaattatgctgaaagtttgccttgagaactctatttttttattagagttatatttaaagcttttcatgggaaaagttaatgtgaatactgaggaattttggtccctcagtgacctgtgttgttaattcattaatgcattctgagttcacagagcaaattaggagaatcatttccaaccattatttactgcagtatggggagtaaatttataccaattcctctaactgtactgtaacacagcctgtaaagttagccatataaatgcaagggtatatcatatatacaaatcaggaatcaggtccgttcaccgaacttcaaattgatgtttactaatatttttgtgacagagtataaagaccctatagtgggtaaattagatactattagcatattattaatttaatgtctttatcattggatcttttgcatgctttaatctggttaacatatttaaatttgctttttttctctttacctgaaggctctgtgtatagtatttcatgacatcgttgtacagtttaactatatcaataaaaagtttggacagtatttaaatattgcaaatatgtttaattatacaaatcagaatagtatgggtaattaaatgaatacaaaaagaagagcctctttctgcagccgacttagacatgctcttccctttctataagctagattttagaataaagggtttcagttaataatcttattttcaggttatgtcatctaacttatagcaaactaccacaatacagtgagttctgccagtgtcccagtacaaggcatatttcaggtgtggctgtggaatgtaaaaatgctcaacttgtatcaggtaatgttagcaataaattaaatgctaagaatgattaatcgggtacatgttactgtaattaactcattgcacttcaaaacctaacttccatcctgaatttatcaagtagttcagtattgtcatttgtttttgttttattgaaaagtaatgttgtcttaagatttagaagtgattattagcttgagaactattacccagctctaagcaaataatgattgtatacatattaagataatggttaaatgcggttttaccaagttttcccttgaaaatgtaattcctttatggagatttattgtgcagccctaagcttccttcccatttcatgaatataaggcttctagaattggactggcaggggaaagaatggtagagacagaaattaagactttatccttgtttgcttgtaaactattattttcttgctaatgtaacatttgtctgttccagtgatgtaaggatattaagttattaagctaaatattaattttcaaaaatagtccttctttaacttagatatttcatagctggatttaggaagatctgttattctggaagtactaaaaagaataatacaacgtacaatgtctgcattcactaattcatgttccagaagaggaaataatgaagatatactcagtagagtactaggtgggaggatatggaaatttgctcataaaatctcttataaaacgtgcatataacaaaatgacacccagtaggcctgcattacatttacatgaccgtgtttatttgccatcaaataaactgagtactgacaccagacaaagactccaaagtcataaaatagcctatgaccaactgcagcaagacaggaggtcagctcgcctataatggtgcttaaagtgtgattgatgtaattttctgtactcaccatttgaagttagttaaggagaactttatttttttaaaaaaagtaaatggcaaccactagtgtgctcatcctgaactgttactccaaatccactccgttttaagccaatacctgggattcagaaagagtccaacatcagaacggacacgcagcggagttcaaagtccagggcaatcaccgaaacctaaaggacagacacaggaggcccctgatccaaaacccctgcaggatccaaccccccttggcgcgacaacccaccaggacggcaaaggccggccggggcgcggaaccatcagcccggaaccaaaacgcgacttggtgtactcgccg

SEQ ID NO: 43141 - DNA, 2843 bp, Homo sapiens
  misc_feature (2833)..(2833): n is a, c, g, or t
agcactatcttgaagtatacatggcaagctgaagaaaaatgggatgaaccttggtataaccaaaaaacagaacatcaaagaaatagcagtaagattctgagatttatttcagacttccttgcttttttggttctctacaatttcatcattccaatttcattatatgtgacagtcgaaatgcagaaatttcttggatcattttttattggctgggatcttgatctgtatcatgaagaatcagatcagaaagctcaagtcaatacttccgatctgaatgaagagcttggacaggtagagtacgtgtttacagataaaactggtacactgacagaaaatgagatgcagtttcgggaatgttcaattaatggcatgaaataccaagaaattaatggtagacttgtacccgaaggaccaacaccagactcttcagaaggaaacttatcttatcttagtagtttatcccatcttaacaacttatcccatcttacaaccagttcctctttcagaaccagtcctgaaaatgaaactgaactaattaaagaacatgatctcttctttaaagcagtcagtctctgtcacactgtacagattagcaatgttcaaactgactgcactggtgatggtccctggcaatccaacctggcaccatcgcagttggagtactatgcatcttcaccagatgaaaaggctctagtagaagctgctgcaaggattggtattgtgtttattggcaattctgaagaaactatggaggttaaaactcttggaaaactggaacggtacaaactgcttcatattctggaatttgattcagatcgtaggagaatgagtgtaattgttcaggcaccttcaggtgagaagttattatttgctaaaggagctgagtcatcaattctccctaaatgtataggtggagaaatagaaaaaaccagaattcatgtagatgaatttgctttgaaagggctaagaactctgtgtatagcatatagaaaatttacatcaaaagagtatgaggaaatagataaacgcatatttgaagccaggactgccttgcagcagcgggaagagaaattggcagctgttttccagttcatagagaaagacctgatattacttggagccacagcagtagaagacagactacaagataaagttcgagaaactattgaagcattgagaatggctggtatcaaagtatgggtacttactggggataaacatgaaacagctgttagtgtgagtttatcatgtggccattttcatagaaccatgaacatccttgaacttataaaccagaaatcagacagcgagtgtgctgaacaattgaggcagcttgccagaagaattacagaggatcatgtgattcagcatgggctggtagtggatgggaccagcctatctcttgcactcagggagcatgaaaaactatttatggaagtttgcagaaattgttcagctgtattatgctgtcgtatggctccactgcagaaagcaaaagtaataagactaataaaaatatcacctgagaaacctataacattggctgttggtgatggtgctaatgacgtaagcatgatacaagaagcccatgttggcataggaatcatgggtaaagaaggaagacaggctgcaagaaacagtgactatgcaatagccagatttaagttcctctccaaattgctttttgttcatggtcatttttattatattagaatagctacccttgtacagtattttttttataagaatgtgtgctttatcacaccccagtttttatatcagttctactgtttgttttctcagcaaacattgtatgacagcgtgtacctgactttatacaatatttgttttacttccctacctattctgatatatagtcttttggaacagcatgtagaccctcatgtgttacaaaataagcccaccctttatcgagacattagtaaaaaccgcctcttaagtattaaaacatttctttattggaccatcctgggcttcagtcatgcctttattttcttttttggatcctatttactaatagggaaagatacatctctgcttggaaatggccagatgtttggaaactggacatttggcactttggtcttcacagtcatggttattacagtcacagtaaagatggctctggaaactcatttttggacttggatcaaccatctcgttacctggggatctattatattttattttgtattttccttgttttatggagggattctctggccatttttgggctcccagaatatgtattttgtgtttattcagctcctgtcaagtggttctgcttggtttgccataatcctcatggttgttacatgtctatttcttgatatcataaagaaggtctttgaccgacacctccaccctacaagtactgaaaaggcacagcttactgaaacaaatgcaggtatcaagtgcttggactccatgtgctgtttcccggaaggagaagcagcgtgtgcatctgttggaagaatgctggaacgagttataggaagatgtagtccaacccacatcagcagatcatggagtgcatcggatcctttctataccaacgacaggagcatcttgactctctccacaatggactcatctacttgttaaaggggcagtagtactttgtgggagccagttcacctcctttcctaaaattcagtgtgatcaccctgttaatggccacactagctctgaaattaatttccaaaatctttgtagtagttcatacccactcagagttataatggcaaacaaacagaaagcattagtacaagcccctcccaacacccttaatttgttcatgacacacgcgggntcctctaggt

SEQ ID NO: 43142 - DNA, 2782 bp, Homo sapiens
agcactatcttgaagtatacatggcaagctgaagaaaaatgggatgaaccttggtataaccaaaaaacagaacatcaaagaaatagcagtaagattctgagatttatttcagacttccttgcttttttggttctctacaatttcatcattccaatttcattatatgtgacagtcgaaatgcagaaatttcttggatcattttttattggctgggatcttgatctgtatcatgaagaatcagatcagaaagctcaagtcaatacttccgatctgaatgaagagcttggacaggtagagtacgtgtttacagataaaactggtacactgacagaaaatgagatgcagtttcgggaatgttcaattaatggcatgaaataccaagaaattaatggtagacttgtacccgaaggaccaacaccagactcttcagaaggaaacttatcttatcttagtagtttatcccatcttaacaacttatcccatcttacaaccagttcctctttcagaaccagtcctgaaaatgaaactgaactaattaaagaacatgatctcttctttaaagcagtcagtctctgtcacactgtacagattagcaatgttcaaactgactgcactggtgatggtccctggcaatccaacctggcaccatcgcagttggagtactatgcatcttcaccagatgaaaaggctctagtagaagctgctgcaaggattggtattgtgtttattggcaattctgaagaaactatggaggttaaaactcttggaaaactggaacggtacaaactgcttcatattctggaatttgattcagatcgtaggagaatgagtgtaattgttcaggcaccttcaggtgagaagttattatttgctaaaggagctgagtcatcaattctccctaaatgtataggtggagaaatagaaaaaaccagaattcatgtagatgaatttgctttgaaagggctaagaactctgtgtatagcatatagaaaatttacatcaaaagagtatgaggaaatagataaacgcatatttgaagccaggactgccttgcagcagcgggaagagaaattggcagctgttttccagttcatagagaaagacctgatattacttggagccacagcagtagaagacagactacaagataaagttcgagaaactattgaagcattgagaatggctggtatcaaagtatgggtacttactggggataaacatgaaacagctgttagtgtgagtttatcatgtggccattttcatagaaccatgaacatccttgaacttataaaccagaaatcagacagcgagtgtgctgaacaattgaggcagcttgccagaagaattacagaggatcatgtgattcagcatgggctggtagtggatgggaccagcctatctcttgcactcagggagcatgaaaaactatttatggaagtttgcagaaattgttcagctgtattatgctgtcgtatggctccactgcagaaagcaaaagtaataagactaataaaaatatcacctgagaaacctataacattggctgttggtgatggtgctaatgacgtaagcatgatacaagaagcccatgttggcataggaatcatgggtaaagaaggaagacaggctgcaagaaacagtgactatgcaatagccagatttaagttcctctccaaattgctttttgttcatggtcatttttattatattagaatagctacccttgtacagtattttttttataagaatgtgtgctttatcacaccccagtttttatatcagttctactgtttgttttctcagcaaacattgtatgacagcgtgtacctgactttatacaatatttgttttacttccctacctattctgatatatagtcttttggaacagcatgtagaccctcatgtgttacaaaataagcccaccctttatcgagacattagtaaaaaccgcctcttaagtattaaaacatttctttattggaccatcctgggcttcagtcatgcctttattttcttttttggatcctatttactaatagggaaagatacatctctgcttggaaatggccagatgtttggaaactggacatttggcactttggtcttcacagtcatggttattacagtcacagtaaagatggctctggaaactcatttttggacttggatcaaccatctcgttacctggggatctattatattttattttgtattttccttgttttatggagggattctctggccatttttgggctcccagaatatgtattttgtgtttattcagctcctgtcaagtggttctgcttggtttgccataatcctcatggttgttacatgtctatttcttgatatcataaagaaggtctttgaccgacacctccaccctacaagtactgaaaaggcacagcttactgaaacaaatgcaggtatcaagtgcttggactccatgtgctgtttcccggaaggagaagcagcgtgtgcatctgttggaagaatgctggaacgagttataggaagatgtagtccaacccacatcagcaggtgtgaaatctctctaagtagcctttgctgcagatgagtatcctatctggaacaggatgaacctgccgctctagatacctaataaatcagcagctggttttaccaactgaagcaggaagtctgctatttattagcactctttggtggtagatttcactttgtggctttggggtaagggctttttcactcacaaaggaagagaaagcacctttgaagagacttcatctaatgaacaaaaa

SEQ ID NO: 43143 - DNA, 402 bp, Homo sapiens
cagaatatgtattttgtgtttattcagctcctgtcaagtggttctgcttggtttgccataatcctcatggttgttacatgtctatttcttgatatcataaagaaggtctttgacgagcacctccaccctacaagtactgaaaaggcacagatgtactccaacacagttgctttaagtgacgagttcatcgcactgcagccattgtcgagggcaaggaatcagctgagcaaacttaggtagagtaggaggagtagagcctcattaactcttctgcatgctaaaggtcaattaaacaatatcaaaagatgggcagaggcataaataaagagcggggcatttttgttagcatggccctgtctctgaataatttgacctttattaacatatacgttaaaacctaaa

SEQ ID NO: 43144 - DNA, 603 bp, Homo sapiens
gtaagtaaatagaaacttgtgttttgtgttttgtccttttagagtaacgtatgtatgttcagattttgatagacgtttgaagggacttttttcatttttcttagtcctgcagggaaccagacagaacttttctgtttagtatatttaaccagcatgacattcagaatatttatttattctggttttcagtttgaggtgagtgttaataccaaaatgtaattctggatgcttttaaaaatagataataacccttaacagcttatgagagaattttgataacttatttgtgatatttctgtaaaatccaaatcaagccaggccagataacttggaggttcacctcatttttatttttgattcgaaatgtcttaggtttggaaggagcagtagtgatttagtccagggatggcatataggttttatctcagaagctacctttaaataattgatggggcacctagagtatattgaaaaggtttctaaagctgcaggctcagagggaaaatgtaatttgttagcaatagttgtaatgggcacaaggtgggtctttgtttgcatgcatgtcacatatttaccagtcctgatctactttgttttaatttc

SEQ ID NO: 43145 - DNA, 366 bp, Homo sapiens
tatacagggtgggagtaccaggaggttggaatcaccttcaagctatagcttccacaatccctgctgatcattttagaggaaagcaatacatgcatatgtttagaaaactcagacagtacataaaggtacaaaatgaaaagttaaagctttctacaacctccaaccttttgtcttgttctttttttcttccctagtgtgtatatataattacatatatttttaaaatgggattacaggcgtgagaaaactcaagtttaatttttgaaactttttgctgtgtaatttactttgatcctggatctccagggtatttaaataataggggaacattattgggtgtggtgatgaatgatggtttaaaaaaga

SEQ ID NO: 43146 - DNA, 3186 bp, Homo sapiens
attgggatggaggatgagattttatatggaaggattaaaacatatttaaccggagcagggacttacagggacaggcaagtcagtaaagggcccaggttacaaacgagttataaccgatcagaccgacgagcgcccgcgtgcagcgcctcctgccgacgcgcgcctcgcagccttcagtcaatgctgacagctgttctccaacacccagctaggggcgggagggtccgcccacttctaccagattttgcacacaaaacagtggaaagaccattctcatggctccaagccgttttctcccttcatcgcctgcaattttagggcttttcggggggtatgactgcagggattttagaggtttttttcctcattctctttttaagaggtgataaaaagcatttaaattagcggcagggcggttaacacccgcagccctagcctctccgcacttctcgtcgctcgtccgtgttcactccacgcctggcctcgggtaggagccgcatagcgccaacggttgcgggtcgcaactactcccaggcggcgcgccttgcgcgccgggcctcccaggaccgcggcgagttcagaaggcgcggggagagaagtgaggtcgagcagcgggcggcttttgacgaacggccctcacagccaatgggaagcccggtcgactttcccgcccctgccaatagggagcagaacccgggccggggggggcgcttcccgcaggctgcggctggattcgatcctgcgcgacggccgcgaaggcgggggcggaggctcggcctgcgcggctgggagcggcttaggggaggagggaagaccggaagccacggttgcgtccccatccttagattcgctcctccgggcagggagcggagacggaggaggaggagggagaggctgaatgttggctcgggagacgtacgaggaggaccgggagtacgagagccaggccaagcgtctcaagaccgaggagggggagatcgactactcggccgaggaaggcgagaaccgccgggaagcgacgccccggggcgggggcgatggcggcggcggcggccggagcttctctcagccggaggcaggtggaagtcatcataaagtttctgtttcacccgtcgtccatgttcgaggactctgtgaatctgtggtggaagcagacctcgtggaagcgctggaaaaatttgggacaatatgctatgtgatgatgatgccatttaaacgacaggctctagtggaatttgaaaacatagatagtgccaaagaatgtgtgacatttgctgcagatgaacccgtgtacattgctggtcaacaggcttttttcaactattctacaagcaaaaggatcactcggccaggaaatactgatgatccatcaggaggcaacaaagttcttctgctctcaattcagaatccgctttatccaattacagtggatgttttatatactgtatgcaaccctgttggcaaagtgcaacgtattgttatattcaagagaaatgggatacaagcaatggttgagtttgaatcagtcctttgtgcccagaaagctaaagcagcactcaatggagctgatatatatgctggatgttgcacactaaaaattgaatatgcacggccaactcgtctaaatgttattaggaatgacaatgacagttgggactacactaaaccatatttgggaagacgagatagaggaaagggtcgccagagacaagccattttgggagaacacccttcttcgtttagacatgatggctatggatcccatggtccattattgcctttaccaagtcgttacagaatgggctctcgagatacacctgaacttgttgcttatccattaccacaggcttcttcctcttacatgcatggaggaaatccctctggttcagttgtaatggttagtggattacatcaactaaaaatgaattgttcaagagtcttcaacctgttctgcttatatggaaatattgagaaggtaaaatttatgaagaccattcctggtacagcactggtagaaatgggtgatgagtatgctgtagaaagagctgtcacacaccttaataatgtcaaattatttgggaaaagacttaatgtttgcgtgtctaaacaacattcagttgttccaagtcaaatatttgagctggaggatggtaccagcagctacaaagattttgcaatgagcaaaaataatcgctttacaagtgctggccaagcatctaagaatataatccagccaccctcctgtgttttgcattattataatgttccattgtgtgtcacagaagagaccttcacaaagttgtgtaatgaccatgaagttcttacattcatcaaatataaagtgtttgatgcaaaaccttcagccaaaacactttctgggctattagaatgggagtgcaaaactgatgcagtagaagcccttacggcactgaatcactatcagataagagtgccgaatggttccaatccctatacattgaagctttgcttttctacatcatcccatttataagaagagaagagcatgttagaatttatgttcacctttattacaatttcaaagctacacttcattaaaaaaaaatctaaaatggttgatctcatgttgccttgcttactttaagatcctgttctgtaataaacatattttgccttgagtaaatttgttgtaagcttaaatattgaattgttttcattttaagatagaatatcataatgtagactatctacagcttcattgtagattatacagatatatgatttctaaccttattactggaatttttcttccacagtaaaaatatatttgcattcttaatgctaattatctgcaagtattttttcattgtgtaagagattaatgcaggtgaaagtattgcattttaatatagaattcctattatatgtttagatgtttaagtatgttgcagttactcatattaaacataacttgtatatttattattttaatgaagtttgagaataacgttacatatgttgaattttaagtactacagatttaactgattttatatttctgaaaggctaacagacatggatacacgtgtacagtatgcattcaaacttatttaaattggtgtatttttttttaagtcactgtccatttgtattgacatgcctctgtttctagtccagtttggagattttataaagttataacaatga

SEQ ID NO: 43147 - DNA, 3442 bp, Homo sapiens
attgggatggaggatgagattttatatggaaggattaaaacatatttaaccggagcagggacttacagggacaggcaagtcagtaaagggcccaggttacaaacgagttataaccgatcagaccgacgagcgcccgcgtgcagcgcctcctgccgacgcgcgcctcgcagccttcagtcaatgctgacagctgttctccaacacccagctaggggcgggagggtccgcccacttctaccagattttgcacacaaaacagtggaaagaccattctcatggctccaagccgttttctcccttcatcgcctgcaattttagggcttttcggggggtatgactgcagggattttagaggtttttttcctcattctctttttaagaggtgataaaaagcatttaaattagcggcagggcggttaacacccgcagccctagcctctccgcacttctcgtcgctcgtccgtgttcactccacgcctggcctcgggtaggagccgcatagcgccaacggttgcgggtcgcaactactcccaggcggcgcgccttgcgcgccgggcctcccaggaccgcggcgagttcagaaggcgcggggagagaagtgaggtcgagcagcgggcggcttttgacgaacggccctcacagccaatgggaagcccggtcgactttcccgcccctgccaatagggagcagaacccgggccggggggggcgcttcccgcaggctgcggctggattcgatcctgcgcgacggccgcgaaggcgggggcggaggctcggcctgcgcggctgggagcggcttaggggaggagggaagaccggaagccacggttgcgtccccatccttagattcgctcctccgggcagggagcggagacggaggaggaggagggagaggctgaatgttggctcggtaattgagaggagcggccgctccagagcttcctcccggggcgcccccctcagtccgtccgcgcttctcagccgccagtctcctggccgcgcagtccccgcggacggccgggccgcggagaccctcgcagaagaggcgctgccggcggcgaggactggccggcggcatccgaggcgcgcgccccaccgccacccccacccgcctgccagccggtccctccggccgccgccatgtcctcctcctcttcctcccccagggagacgtacgaggaggaccgggagtacgagagccaggccaagcgtctcaagaccgaggagggggagatcgactactcggccgaggaaggcgagaaccgccgggaagcgacgccccggggcgggggcgatggcggcggcggcggccggagcttctctcagccggaggcaggtggaagtcatcataaagtttctgtttcacccgtcgtccatgttcgaggactctgtgaatctgtggtggaagcagacctcgtggaagcgctggaaaaatttgggacaatatgctatgtgatgatgatgccatttaaacgacaggctctagtggaatttgaaaacatagatagtgccaaagaatgtgtgacatttgctgcagatgaacccgtgtacattgctggtcaacaggcttttttcaactattctacaagcaaaaggatcactcggccaggaaatactgatgatccatcaggaggcaacaaagttcttctgctctcaattcagaatccgctttatccaattacagtggatgttttatatactgtatgcaaccctgttggcaaagtgcaacgtattgttatattcaagagaaatgggatacaagcaatggttgagtttgaatcagtcctttgtgcccagaaagctaaagcagcactcaatggagctgatatatatgctggatgttgcacactaaaaattgaatatgcacggccaactcgtctaaatgttattaggaatgacaatgacagttgggactacactaaaccatatttgggaagacgagatagaggaaagggtcgccagagacaagccattttgggagaacacccttcttcgtttagacatgatggctatggatcccatggtccattattgcctttaccaagtcgttacagaatgggctctcgagatacacctgaacttgttgcttatccattaccacaggcttcttcctcttacatgcatggaggaaatccctctggttcagttgtaatggttagtggattacatcaactaaaaatgaattgttcaagagtcttcaacctgttctgcttatatggaaatattgagaaggtaaaatttatgaagaccattcctggtacagcactggtagaaatgggtgatgagtatgctgtagaaagagctgtcacacaccttaataatgtcaaattatttgggaaaagacttaatgtttgcgtgtctaaacaacattcagttgttccaagtcaaatatttgagctggaggatggtaccagcagctacaaagattttgcaatgagcaaaaataatcgctttacaagtgctggccaagcatctaagaatataatccagccaccctcctgtgttttgcattattataatgttccattgtgtgtcacagaagagaccttcacaaagttgtgtaatgaccatgaagttcttacattcatcaaatataaagtgtttgatgcaaaaccttcagccaaaacactttctgggctattagaatgggagtgcaaaactgatgcagtagaagcccttacggcactgaatcactatcagataagagtgccgaatggttccaatccctatacattgaagctttgcttttctacatcatcccatttataagaagagaagagcatgttagaatttatgttcacctttattacaatttcaaagctacacttcattaaaaaaaaatctaaaatggttgatctcatgttgccttgcttactttaagatcctgttctgtaataaacatattttgccttgagtaaatttgttgtaagcttaaatattgaattgttttcattttaagatagaatatcataatgtagactatctacagcttcattgtagattatacagatatatgatttctaaccttattactggaatttttcttccacagtaaaaatatatttgcattcttaatgctaattatctgcaagtattttttcattgtgtaagagattaatgcaggtgaaagtattgcattttaatatagaattcctattatatgtttagatgtttaagtatgttgcagttactcatattaaacataacttgtatatttattattttaatgaagtttgagaataacgttacatatgttgaattttaagtactacagatttaactgattttatatttctgaaaggctaacagacatggatacacgtgtacagtatgcattcaaacttatttaaattggtgtatttttttttaagtcactgtccatttgtattgacatgcctctgtttctagtccagtttggagattttataaagttataacaatga

SEQ ID NO: 43148 - DNA, 4983 bp, Homo sapiens
attgggatggaggatgagattttatatggaaggattaaaacatatttaaccggagcagggacttacagggacaggcaagtcagtaaagggcccaggttacaaacgagttataaccgatcagaccgacgagcgcccgcgtgcagcgcctcctgccgacgcgcgcctcgcagccttcagtcaatgctgacagctgttctccaacacccagctaggggcgggagggtccgcccacttctaccagattttgcacacaaaacagtggaaagaccattctcatggctccaagccgttttctcccttcatcgcctgcaattttagggcttttcggggggtatgactgcagggattttagaggtttttttcctcattctctttttaagaggtgataaaaagcatttaaattagcggcagggcggttaacacccgcagccctagcctctccgcacttctcgtcgctcgtccgtgttcactccacgcctggcctcgggtaggagccgcatagcgccaacggttgcgggtcgcaactactcccaggcggcgcgccttgcgcgccgggcctcccaggaccgcggcgagttcagaaggcgcggggagagaagtgaggtcgagcagcgggcggcttttgacgaacggccctcacagccaatgggaagcccggtcgactttcccgcccctgccaatagggagcagaacccgggccggggggggcgcttcccgcaggctgcggctggattcgatcctgcgcgacggccgcgaaggcgggggcggaggctcggcctgcgcggctgggagcggcttaggggaggagggaagaccggaagccacggttgcgtccccatccttagattcgctcctccgggcagggagcggagacggaggaggaggagggagaggctgaatgttggctcggtaattgagaggagcggccgctccagagcttcctcccggggcgcccccctcagtccgtccgcgcttctcagccgccagtctcctggccgcgcagtccccgcggacggccgggccgcggagaccctcgcagaagaggcgctgccggcggcgaggactggccggcggcatccgaggcgcgcgccccaccgccacccccacccgcctgccagccggtccctccggccgccgccatgtcctcctcctcttcctcccccagggagacgtacgaggaggaccgggagtacgagagccaggccaagcgtctcaagaccgaggagggggagatcgactactcggccgaggaaggcgagaaccgccgggaagcgacgccccggggcgggggcgatggcggcggcggcggccggagcttctctcagccggaggcaggtggaagtcatcataaagtttctgtttcacccgtcgtccatgttcgaggactctgtgaatctgtggtggaagcagacctcgtggaagcgctggaaaaatttgggacaatatgctatgtgatgatgatgccatttaaacgacaggctctagtggaatttgaaaacatagatagtgccaaagaatgtgtgacatttgctgcagatgaacccgtgtacattgctggtcaacaggcttttttcaactattctacaagcaaaaggatcactcggccaggaaatactgatgatccatcaggaggcaacaaagttcttctgctctcaattcagaatccgctttatccaattacagtggatgttttatatactgtatgcaaccctgttggcaaagtgcaacgtattgttatattcaagagaaatgggatacaagcaatggttgagtttgaatcagtcctttgtgcccagaaagctaaagcagcactcaatggagctgatatatatgctggatgttgcacactaaaaattgaatatgcacggccaactcgtctaaatgttattaggaatgacaatgacagttgggactacactaaaccatatttgggaagacgagatagaggaaagggtcgccagagacaagccattttgggagaacacccttcttcgtttagacatgatggctatggatcccatggtccattattgcctttaccaagtcgttacagaatgggctctcgagatacacctgaacttgttgcttatccattaccacaggcttcttcctcttacatgcatggaggaaatccctctggttcagttgtaatggttagtggattacatcaactaaaaatgaattgttcaagagtcttcaacctgttctgcttatatggaaatattgagaaggtaaaatttatgaagaccattcctggtacagcactggtagaaatgggtgatgagtatgctgtagaaagagctgtcacacaccttaataatgtcaaattatttgggaaaagacttaatgtttgcgtgtctaaacaacattcagttgttccaagtcaaatatttgagctggaggatggtaccagcagctacaaagattttgcaatgagcaaaaataatcgctttacaagtgctggccaagcatctaagaatataatccagccaccctcctgtgttttgcattattataatgttccattgtgtgtcacagaagagaccttcacaaagttgtgtaatgaccatgaagttcttacattcatcaaatataaagtgtttgatgcaaaaccttcagccaaaacactttctgggctattagaatgggagtgcaaaactgatgcagtagaagcccttacggcactgaatcactatcagataagagtgccgaatggttccaatccctatacattgaagctttgcttttctacatcatcccatttataagaagagaagagcatgttagaatttatgttcacctttattacaatttcaaagctacacttcattaaaaaaaaatctaaaatggttgatctcatgttgccttgcttactttaagatcctgttctgtaataaacatattttgccttgagtaaatttgttgtaagcttaaatattgaattgttttcattttaagatagaatatcataatgtagactatctacagcttcattgtagattatacagatatatgatttctaaccttattactggaatttttcttccacagtaaaaatatatttgcattcttaatgctaattatctgcaagtattttttcattgtgtaagagattaatgcaggtgaaagtattgcattttaatatagaattcctattatatgtttagatgtttaagtatgttgcagttactcatattaaacataacttgtatatttattattttaatgaagtttgagaataacgttacatatgttgaattttaagtactacagatttaactgattttatatttctgaaaggctaacagacatggatacacgtgtacagtatgcattcaaacttatttaaattggtgtatttttttttaagtcactgtccatttgtattgacatgcctctgtttctagtccagtttggagattttataaagttataacaatgagttaatgtgttcattttcatttgttgcatgtgacttaaatacagctagtatttggcattgagattttaatagaggttataattaacagttcctcttatagataataatctgggatccatgggtgggcttcagagaatctgtgtaccccctaaaattgtatgtagaattttggatatttacatttttattttttaactcttggatccatcagtaatatgtatttttctatatggtacaagatttaaggatctaattttatttttattccaaacagatagctatttgtctcaataccatttattaaacattctttctcccactggatctgttttttttttctttttaagataatagattttatacataggcaagtaagatttaaggaccaaacatggtattaagagactatagcacgattgttaccaagttcacagcttttttacaatagaaaaactgatgtggccattttgttttcatctttaaaagaagggagaatatgtgtcatctacctagaataactgatatcagtagttgacaatatcagttttgtaatcctgacacttttaaacaaatttgtaaatgaaagttccatttagatcttttgtaaagactttattttaaattttaatataaaaaatccttttagaaataaggcaggcatttacaattttagagctgtttaataggaagtttagatggaaactaaacacacattaacatttatttcccctcattttgatggcagtggaccagcatttagccctctaaagataaagaaaaaattaaatttaatctagaagtattttagacccttatcacagaacccagtaagttatgccaagggtaactgtgtgaactgtgttcgatactgggctatgtatgtttcttattcattgccaatttaatacctaagtttatctaactttacaataaagctttttttcccctataaatacttttctacctcttttgaaaaattgaaataccttaattttggtttatgtaatagttgtctacgttccttcctcctctgaaaattaatgtgggttgtcagaattacagactttttaatgcctaagattttaagaaataaacctgtaggtgttggcaggacttatttcatttagattttaattagtttagatgtgtagaaatgatttttatctgtaaggctctctctccaccaaaataagtgaattgtttgggagtaaactagttggtaagttgggccttgctgatagatttatacactggtgtgtaagccctatactgctgctgtcactaatgtttttgatagtttacttaggcatgactgctgttaatgaagtttgctttgtgaatactctctctttccttagccttggcaacattcttctctgtgctatctttatgcttttagaagaactagaaaaagcagatttaagaactgtaaagaaataatactagctttgagtttttaaaaaaaatattgaaatcccatctctgtatccaaatcctactacacatttgataataaatctgccaaactgagttatggaata

SEQ ID NO: 43149 - DNA, 3525 bp, Homo sapiens
attgggatggaggatgagattttatatggaaggattaaaacatatttaaccggagcagggacttacagggacaggcaagtcagtaaagggcccaggttacaaacgagttataaccgatcagaccgacgagcgcccgcgtgcagcgcctcctgccgacgcgcgcctcgcagccttcagtcaatgctgacagctgttctccaacacccagctaggggcgggagggtccgcccacttctaccagattttgcacacaaaacagtggaaagaccattctcatggctccaagccgttttctcccttcatcgcctgcaattttagggcttttcggggggtatgactgcagggattttagaggtttttttcctcattctctttttaagaggtgataaaaagcatttaaattagcggcagggcggttaacacccgcagccctagcctctccgcacttctcgtcgctcgtccgtgttcactccacgcctggcctcgggtaggagccgcatagcgccaacggttgcgggtcgcaactactcccaggcggcgcgccttgcgcgccgggcctcccaggaccgcggcgagttcagaaggcgcggggagagaagtgaggtcgagcagcgggcggcttttgacgaacggccctcacagccaatgggaagcccggtcgactttcccgcccctgccaatagggagcagaacccgggccggggggggcgcttcccgcaggctgcggctggattcgatcctgcgcgacggccgcgaaggcgggggcggaggctcggcctgcgcggctgggagcggcttaggggaggagggaagaccggaagccacggttgcgtccccatccttagattcgctcctccgggcagggagcggagacggaggaggaggagggagaggctgaatgttggctcggtaattgagaggagcggccgctccagagcttcctcccggggcgcccccctcagtccgtccgcgcttctcagccgccagtctcctggccgcgcagtccccgcggacggccgggccgcggagaccctcgcagaagaggcgctgccggcggcgaggactggccggcggcatccgaggcgcgcgccccaccgccacccccacccgcctgccagccggtccctccggccgccgccatgtcctcctcctcttcctcccccagggagacgtacgaggaggaccgggagtacgagagccaggccaagcgtctcaagaccgaggagggggagatcgactactcggccgaggaaggcgagaaccgccgggaagcgacgccccggggcgggggcgatggcggcggcggcggccggagcttctctcagccggaggcaggtggaagtcatcataaagtttctgtttcacccgtcgtccatgttcgaggactctgtgaatctgtggtggaagcagacctcgtggaagcgctggaaaaatttgggacaatatgctatgtgatgatgatgccatttaaacgacaggctctagtggaatttgaaaacatagatagtgccaaagaatgtgtgacatttgctgcagatgaacccgtgtacattgctggtcaacaggcttttttcaactattctacaagcaaaaggatcactcggccaggaaatactgatgatccatcaggaggcaacaaagttcttctgctctcaattcagaatccgctttatccaattacagtggatgttttatatactgtatgcaaccctgttggcaaagtgcaacgtattgttatattcaagagaaatgggatacaagcaatggttgagtttgaatcagtcctttgtgcccagaaagctaaagcagcactcaatggagctgatatatatgctggatgttgcacactaaaaattgaatatgcacggccaactcgtctaaatgttattaggaatgacaatgacagttgggactacactaaaccatatttgggaagacgaggttgttgttggcttatgctgaaacttcttgaaagaagcccactttgaaaatgtgttgctgttgaagctaatagtatgattcagatagaggaaagggtcgccagagacaagccattttgggagaacacccttcttcgtttagacatgatggctatggatcccatggtccattattgcctttaccaagtcgttacagaatgggctctcgagatacacctgaacttgttgcttatccattaccacaggcttcttcctcttacatgcatggaggaaatccctctggttcagttgtaatggttagtggattacatcaactaaaaatgaattgttcaagagtcttcaacctgttctgcttatatggaaatattgagaaggtaaaatttatgaagaccattcctggtacagcactggtagaaatgggtgatgagtatgctgtagaaagagctgtcacacaccttaataatgtcaaattatttgggaaaagacttaatgtttgcgtgtctaaacaacattcagttgttccaagtcaaatatttgagctggaggatggtaccagcagctacaaagattttgcaatgagcaaaaataatcgctttacaagtgctggccaagcatctaagaatataatccagccaccctcctgtgttttgcattattataatgttccattgtgtgtcacagaagagaccttcacaaagttgtgtaatgaccatgaagttcttacattcatcaaatataaagtgtttgatgcaaaaccttcagccaaaacactttctgggctattagaatgggagtgcaaaactgatgcagtagaagcccttacggcactgaatcactatcagataagagtgccgaatggttccaatccctatacattgaagctttgcttttctacatcatcccatttataagaagagaagagcatgttagaatttatgttcacctttattacaatttcaaagctacacttcattaaaaaaaaatctaaaatggttgatctcatgttgccttgcttactttaagatcctgttctgtaataaacatattttgccttgagtaaatttgttgtaagcttaaatattgaattgttttcattttaagatagaatatcataatgtagactatctacagcttcattgtagattatacagatatatgatttctaaccttattactggaatttttcttccacagtaaaaatatatttgcattcttaatgctaattatctgcaagtattttttcattgtgtaagagattaatgcaggtgaaagtattgcattttaatatagaattcctattatatgtttagatgtttaagtatgttgcagttactcatattaaacataacttgtatatttattattttaatgaagtttgagaataacgttacatatgttgaattttaagtactacagatttaactgattttatatttctgaaaggctaacagacatggatacacgtgtacagtatgcattcaaacttatttaaattggtgtatttttttttaagtcactgtccatttgtattgacatgcctctgtttctagtccagtttggagattttataaagttataacaatga

SEQ ID NO: 43150 - DNA, 2875 bp, Homo sapiens
attgggatggaggatgagattttatatggaaggattaaaacatatttaaccggagcagggacttacagggacaggcaagtcagtaaagggcccaggttacaaacgagttataaccgatcagaccgacgagcgcccgcgtgcagcgcctcctgccgacgcgcgcctcgcagccttcagtcaatgctgacagctgttctccaacacccagctaggggcgggagggtccgcccacttctaccagattttgcacacaaaacagtggaaagaccattctcatggctccaagccgttttctcccttcatcgcctgcaattttagggcttttcggggggtatgactgcagggattttagaggtttttttcctcattctctttttaagaggtgataaaaagcatttaaattagcggcagggcggttaacacccgcagccctagcctctccgcacttctcgtcgctcgtccgtgttcactccacgcctggcctcgggtaggagccgcatagcgccaacggttgcgggtcgcaactactcccaggcggcgcgccttgcgcgccgggcctcccaggaccgcggcgagttcagaaggcgcggggagagaaggagacgtacgaggaggaccgggagtacgagagccaggccaagcgtctcaagaccgaggagggggagatcgactactcggccgaggaaggcgagaaccgccgggaagcgacgccccggggcgggggcgatggcggcggcggcggccggagcttctctcagccggaggcaggtggaagtcatcataaagtttctgtttcacccgtcgtccatgttcgaggactctgtgaatctgtggtggaagcagacctcgtggaagcgctggaaaaatttgggacaatatgctatgtgatgatgatgccatttaaacgacaggctctagtggaatttgaaaacatagatagtgccaaagaatgtgtgacatttgctgcagatgaacccgtgtacattgctggtcaacaggcttttttcaactattctacaagcaaaaggatcactcggccaggaaatactgatgatccatcaggaggcaacaaagttcttctgctctcaattcagaatccgctttatccaattacagtggatgttttatatactgtatgcaaccctgttggcaaagtgcaacgtattgttatattcaagagaaatgggatacaagcaatggttgagtttgaatcagtcctttgtgcccagaaagctaaagcagcactcaatggagctgatatatatgctggatgttgcacactaaaaattgaatatgcacggccaactcgtctaaatgttattaggaatgacaatgacagttgggactacactaaaccatatttgggaagacgagatagaggaaagggtcgccagagacaagccattttgggagaacacccttcttcgtttagacatgatggctatggatcccatggtccattattgcctttaccaagtcgttacagaatgggctctcgagatacacctgaacttgttgcttatccattaccacaggcttcttcctcttacatgcatggaggaaatccctctggttcagttgtaatggttagtggattacatcaactaaaaatgaattgttcaagagtcttcaacctgttctgcttatatggaaatattgagaaggtaaaatttatgaagaccattcctggtacagcactggtagaaatgggtgatgagtatgctgtagaaagagctgtcacacaccttaataatgtcaaattatttgggaaaagacttaatgtttgcgtgtctaaacaacattcagttgttccaagtcaaatatttgagctggaggatggtaccagcagctacaaagattttgcaatgagcaaaaataatcgctttacaagtgctggccaagcatctaagaatataatccagccaccctcctgtgttttgcattattataatgttccattgtgtgtcacagaagagaccttcacaaagttgtgtaatgaccatgaagttcttacattcatcaaatataaagtgtttgatgcaaaaccttcagccaaaacactttctgggctattagaatgggagtgcaaaactgatgcagtagaagcccttacggcactgaatcactatcagataagagtgccgaatggttccaatccctatacattgaagctttgcttttctacatcatcccatttataagaagagaagagcatgttagaatttatgttcacctttattacaatttcaaagctacacttcattaaaaaaaaatctaaaatggttgatctcatgttgccttgcttactttaagatcctgttctgtaataaacatattttgccttgagtaaatttgttgtaagcttaaatattgaattgttttcattttaagatagaatatcataatgtagactatctacagcttcattgtagattatacagatatatgatttctaaccttattactggaatttttcttccacagtaaaaatatatttgcattcttaatgctaattatctgcaagtattttttcattgtgtaagagattaatgcaggtgaaagtattgcattttaatatagaattcctattatatgtttagatgtttaagtatgttgcagttactcatattaaacataacttgtatatttattattttaatgaagtttgagaataacgttacatatgttgaattttaagtactacagatttaactgattttatatttctgaaaggctaacagacatggatacacgtgtacagtatgcattcaaacttatttaaattggtgtatttttttttaagtcactgtccatttgtattgacatgcctctgtttctagtccagtttggagattttataaagttataacaatga

SEQ ID NO: 43151 - DNA, 2918 bp, Homo sapiens
attgggatggaggatgagattttatatggaaggattaaaacatatttaaccggagcagggacttacagggacaggcaagtcagtaaagggcccaggttacaaacgagttataaccgatcagaccgacgagcgcccgcgtgcagcgcctcctgccgacgcgcgcctcgcagccttcagtcaatgctgacagctgttctccaacacccagctaggggcgggagggtccgcccacttctaccagattttgcacacaaaacagtggaaagaccattctcatggctccaagccgttttctcccttcatcgcctgcaattttagggcttttcggggggtatgactgcagggattttagaggtttttttcctcattctctttttaagaggtgataaaaagcatttaaattagcggcagggcggttaacacccgcagccctagcctctccgcacttctcgtcgctcgtccgtgttcactccacgcctggcctcgggtaggagccgcatagcgccaacggttgcgggtcgcaactactcccaggcggcgcgccttgcgcgccgggcctcccaggaccgcggcgagttcagaaggcgcggggagagaagtgaggtcgagcagcgggcggcttttgacgaacggccctcacagccaatgggaagcccggtcgactttcccgcccctgccaatagggagcagaacccgggccggggggggcgcttcccgcaggctgcggctggattcgatcctgcgcgacggccgcgaaggcgggggcggaggctcggcctgcgcggctgggagcggcttaggggaggagggaagaccggaagccacggttgcgtccccatccttagattcgctcctccgggcagggagcggagacggaggaggaggagggagaggctgaatgttggctcggtaattgagaggagcggccgctccagagcttcctcccggggcgcccccctcagtccgtccgcgcttctcagccgccagtctcctggccgcgcagtccccgcggacggccgggccgcggagaccctcgcagaagaggcgctgccggcggcgaggactggccggcggcatccgaggcgcgcgccccaccgccacccccacccgcctgccagccggtccctccggccgccgccatgtcctcctcctcttcctcccccagggagacgtacgaggaggaccgggagtacgagagccaggccaagcgtctcaagaccgaggagggggagatcgactactcggccgaggaaggcgagaaccgccgggaagcgacgccccggggcgggggcgatggcggcggcggcggccggagcttctctcagccggaggcaggtggaagtcatcataaagtttctgtttcacccgtcgtccatgttcgaggactctgtgaatctgtggtggaagcagacctcgtggaagcgctggaaaaatttgggacaatatgctatgtgatgatgatgccatttaaacgacaggctctagtggaatttgaaaacatagatagtgccaaagaatgtgtgacatttgctgcagatgaacccgtgtacattgctggtcaacaggcttttttcaactattctacaagcaaaaggatcactcggccaggaaatactgatgatccatcaggaggcaacaaagttcttctgctctcaattcagaatccgctttatccaattacagtggatgttttatatactgtatgcaaccctgttggcaaagtgcaacgtattgttatattcaagagaaatgggatacaagcaatggttgagtttgaatcagtcctttgtgcccagaaagctaaagcagcactcaatggagctgatatatatgctggatgttgcacactaaaaattgaatatgcacggccaactcgtctaaatgttattaggaatgacaatgacagttgggactacactaaaccatatttgggaagacgagatagaggaaagggtcgccagagacaagccattttgggagaacacccttcttcgtttagacatgatggctatggatcccatggtccattattgcctttaccaagtcgttacagaatgggctctcgagatacacctgaacttgttgcttatccattaccacaggcttcttcctcttacatgcatggaggaaatccctctggttcagttgtaatggttagtggattacatcaactaaaaatgaattgttcaagagtcttcaacctgttctgcttatatggaaatattgagaaggtaaaatttatgaagaccattcctggtacagcactggtagaaatgggtgatgagtatgctgtagaaagagctgtcacacaccttaataatgtcaaattatttgggaaaagacttaatgtttgcgtgtctaaacaacattcagttgttccaagtcaaatatttgagctggaggatggtaccagcagctacaaagattttgcaatgagcaaaaataatcgctttacaagtgctggccaagcatctaagaatataatccagccaccctcctgtgttttgcattattataatgttccattgtgtgtcacagaagagaccttcacaaagttgtgtaatgaccatgaagttcttacattcatcaaatataaagtgtttgatgcaaaaccttcagccaaaacactttctgggctattagaatgggagtgcaaaactgatgcagtagaagcccttacggcactgaatcactatcagataagagtgccgaatggttccaatccctatacattgaagctttgcttttctacatcatcccatttataagaagagaagagcatgttagaatttatgttcacctttattacaatttcaaagctacacttcattaaaaaaaaatctaaaatggttgatctcatgttgccttgcttactttaagatcctgttctgtaataaacatattttgccttgagtaaa

SEQ ID NO: 43152 - DNA, 3388 bp, Homo sapiens
attgggatggaggatgagattttatatggaaggattaaaacatatttaaccggagcagggacttacagggacaggcaagtcagtaaagggcccaggttacaaacgagttataaccgatcagaccgacgagcgcccgcgtgcagcgcctcctgccgacgcgcgcctcgcagccttcagtcaatgctgacagctgttctccaacacccagctaggggcgggagggtccgcccacttctaccagattttgcacacaaaacagtggaaagaccattctcatggctccaagccgttttctcccttcatcgcctgcaattttagggcttttcggggggtatgactgcagggattttagaggtttttttcctcattctctttttaagaggtgataaaaagcatttaaattagcggcagggcggttaacacccgcagccctagcctctccgcacttctcgtcgctcgtccgtgttcactccacgcctggcctcgggtaggagccgcatagcgccaacggttgcgggtcgcaactactcccaggcggcgcgccttgcgcgccgggcctcccaggaccgcggcgagttcagaaggcgcggggagagaagtgaggtcgagcagcgggcggcttttgacgaacggccctcacagccaatgggaagcccggtcgactttcccgcccctgccaatagggagcagaacccgggccggggggggcgcttcccgcaggctgcggctggattcgatcctgcgcgacggccgcgaaggcgggggcggaggctcggcctgcgcggctgggagcggcttaggggaggagggaagaccggaagccacggttgcgtccccatccttagattcgctcctccgggcagggagcggagacggaggaggaggagggagaggctgaatgttggctcggtaattgagaggagcggccgctccagagcttcctcccggggcgcccccctcagtccgtccgcgcttctcagccgccagtctcctggccgcgcagtccccgcggacggccgggccgcggagaccctcgcagaagaggcgctgccggcggcgaggactggccggcggcatccgaggcgcgcgccccaccgccacccccacccgcctgccagccggtccctccggccgccgccatgtcctcctcctcttcctcccccagggagacgtacgaggaggaccgggagtacgagagccaggccaagcgtctcaagaccgaggagggggagatcgactactcggccgaggaaggcgagaaccgccgggaagcgacgccccggggcgggggcgatggcggcggcggcggccggagcttctctcagccggaggcaggtggaagtcatcataaagtttctgtttcacccgtcgtccatgttcgaggactctgtgaatctgtggtggaagcagacctcgtggaagcgctggaaaaatttgggacaatatgctatgtgatgatgatgccatttaaacgacaggctctagtggaatttgaaaacatagatagtgccaaagaatgtgtgacatttgctgcagatgaacccgtgtacattgctggtcaacaggcttttttcaactattctacaagcaaaaggatcactcggccaggaaatactgatgatccatcaggaggcaacaaagttcttctgctctcaattcagaatccgctttatccaattacagtggatgttttatatactgtatgcaaccctgttggcaaagtgcaacgtattgttatattcaagagaaatgggatacaagcaatggttgagtttgaatcagtcctttgtgcccagaaagctaaagcagcactcaatggagctgatatatatgctggatgttgcacactaagttgggactacactaaaccatatttgggaagacgagatagaggaaagggtcgccagagacaagccattttgggagaacacccttcttcgtttagacatgatggctatggatcccatggtccattattgcctttaccaagtcgttacagaatgggctctcgagatacacctgaacttgttgcttatccattaccacaggcttcttcctcttacatgcatggaggaaatccctctggttcagttgtaatggttagtggattacatcaactaaaaatgaattgttcaagagtcttcaacctgttctgcttatatggaaatattgagaaggtaaaatttatgaagaccattcctggtacagcactggtagaaatgggtgatgagtatgctgtagaaagagctgtcacacaccttaataatgtcaaattatttgggaaaagacttaatgtttgcgtgtctaaacaacattcagttgttccaagtcaaatatttgagctggaggatggtaccagcagctacaaagattttgcaatgagcaaaaataatcgctttacaagtgctggccaagcatctaagaatataatccagccaccctcctgtgttttgcattattataatgttccattgtgtgtcacagaagagaccttcacaaagttgtgtaatgaccatgaagttcttacattcatcaaatataaagtgtttgatgcaaaaccttcagccaaaacactttctgggctattagaatgggagtgcaaaactgatgcagtagaagcccttacggcactgaatcactatcagataagagtgccgaatggttccaatccctatacattgaagctttgcttttctacatcatcccatttataagaagagaagagcatgttagaatttatgttcacctttattacaatttcaaagctacacttcattaaaaaaaaatctaaaatggttgatctcatgttgccttgcttactttaagatcctgttctgtaataaacatattttgccttgagtaaatttgttgtaagcttaaatattgaattgttttcattttaagatagaatatcataatgtagactatctacagcttcattgtagattatacagatatatgatttctaaccttattactggaatttttcttccacagtaaaaatatatttgcattcttaatgctaattatctgcaagtattttttcattgtgtaagagattaatgcaggtgaaagtattgcattttaatatagaattcctattatatgtttagatgtttaagtatgttgcagttactcatattaaacataacttgtatatttattattttaatgaagtttgagaataacgttacatatgttgaattttaagtactacagatttaactgattttatatttctgaaaggctaacagacatggatacacgtgtacagtatgcattcaaacttatttaaattggtgtatttttttttaagtcactgtccatttgtattgacatgcctctgtttctagtccagtttggagattttataaagttataacaatga

SEQ ID NO: 43153 - DNA, 2095 bp, Homo sapiens
gaaaccccgtatctctaacattacaaaaattagctaggcatgatggcatgcacctgtaatcccagctactcaggaggctgaggcaggagaattgcttgaacccgggaggtggaggttgcattgagcccaggtcgcgccactgcactcctggtgatagagcaagactccgtctcaaaaacaaaacaaaacaaaaaattctcttaaaattcatcctgaaattggtaaaacatttccagaagtaaaagagctacttctgattattttcaatcctgtcctttgggagtgaataatgattaagtatcagataccttaaaccgaatttccttaatagagctaatgtttgaatcagtcctttgtgcccagaaagctaaagcagcactcaatggagctgatatatatgctggatgttgcacactaaaaattgaatatgcacgggtaaatatttttttcaacaccctacccaagaaatatttatgctttggatatgcagtttgaacttacattattttcaatcttaacagccaactcgtctaaatgttattaggaatgacaatgacagttgggactacactaaaccatatttgggaagacgagatagaggaaagggtcgccagagacaagccattttgggagaacacccttcttcgtttagacatgatggctatggatcccatggtccattattgcctttaccaagtcgttacagaatgggctctcgagatacacctgaacttgttgcttatccattaccacaggcttcttcctcttacatgcatggaggaaatccctctggttcagttgtaatggttagtggattacatcaactaaaaatgaattgttcaagagtcttcaacctgttctgcttatatggaaatattgagaaggtaaaatttatgaagaccattcctggtacagcactggtagaaatgggtgatgagtatgctgtagaaagagctgtcacacaccttaataatgtcaaattatttgggaaaagacttaatgtttgcgtgtctaaacaacattcagttgttccaagtcaaatatttgagctggaggatggtaccagcagctacaaagattttgcaatgagcaaaaataatcgctttacaagtgctggccaagcatctaagaatataatccagccaccctcctgtgttttgcattattataatgttccattgtgtgtcacagaagagaccttcacaaagttgtgtaatgaccatgaagttcttacattcatcaaatataaagtgtttgatgcaaaaccttcagccaaaacactttctgggctattagaatgggagtgcaaaactgatgcagtagaagcccttacggcactgaatcactatcagataagagtgccgaatggttccaatccctatacattgaagctttgcttttctacatcatcccatttataagaagagaagagcatgttagaatttatgttcacctttattacaatttcaaagctacacttcattaaaaaaaaatctaaaatggttgatctcatgttgccttgcttactttaagatcctgttctgtaataaacatattttgccttgagtaaatttgttgtaagcttaaatattgaattgttttcattttaagatagaatatcataatgtagactatctacagcttcattgtagattatacagatatatgatttctaaccttattactggaatttttcttccacagtaaaaatatatttgcattcttaatgctaattatctgcaagtattttttcattgtgtaagagattaatgcaggtgaaagtattgcattttaatatagaattcctattatatgtttagatgtttaagtatgttgcagttactcatattaaacataacttgtatatttattattttaatgaagtttgagaataacgttacatatgttgaattttaagtactacagatttaactgattttatatttctgaaaggctaacagacatggatacacgtgtacagtatgcattcaaacttatttaaattggtgtatttttttttaagtcactgtccatttgtattgacatgcctctgtttctagtccagtttggagattttataaagttataacaatga

SEQ ID NO: 43154 - DNA, 2934 bp, Homo sapiens
attgggatggaggatgagattttatatggaaggattaaaacatatttaaccggagcagggacttacagggacaggcaagtcagtaaagggcccaggttacaaacgagttataaccgatcagaccgacgagcgcccgcgtgcagcgcctcctgccgacgcgcgcctcgcagccttcagtcaatgctgacagctgttctccaacacccagctaggggcgggagggtccgcccacttctaccagattttgcacacaaaacagtggaaagaccattctcatggctccaagccgttttctcccttcatcgcctgcaattttagggcttttcggggggtatgactgcagggattttagaggtttttttcctcattctctttttaagaggtgataaaaagcatttaaattagcggcagggcggttaacacccgcagccctagcctctccgcacttctcgtcgctcgtccgtgttcactccacgcctggcctcgggtaggagccgcatagcgccaacggttgcgggtcgcaactactcccaggcggcgcgccttgcgcgccgggcctcccaggaccgcggcgagttcagaaggcgcggggagagaagtgaggtcgagcagcgggcggcttttgacgaacggccctcacagccaatgggaagcccggtcgactttcccgcccctgccaatagggagcagaacccgggccggggggggcgcttcccgcaggctgcggctggattcgatcctgcgcgacggccgcgaaggcgggggcggaggctcggcctgcgcggctgggagcggcttaggggaggagggaagaccggaagccacggttgcgtccccatccttagattcgctcctccgggcagggagcggagacggaggaggaggagggagaggctgaatgttggctcggtaattgagaggagcggccgctccagagcttcctcccggggcgcccccctcagtccgtccgcgcttctcagccgccagtctcctggccgcgcagtccccgcggacggccgggccgcggagaccctcgcagaagaggcgctgccggcggcgaggactggccggcggcatccgaggcgcgcgccccaccgccacccccacccgcctgccagccggtccctccggccgccgccatgtcctcctcctcttcctcccccagggagacgtacgaggaggaccgggagtacgagagccaggccaagcgtctcaagaccgaggagggggagatcgactactcggccgaggaaggcgagaaccgccgggaagcgacgccccggggcgggggcgatggcggcggcggcggccggagcttctctcagccggaggcaggtggaagtcatcataaagtttctgtttcacccgtcgtccatgttcgaggactctgtgaatctgtggtggaagcagacctcgtggaagcgctggaaaaatttgggacaatatgctatgtgatgatgatgccatttaaacgacaggctctagtggaatttgaaaacatagatagtgccaaagaatgtgtgacatttgctgcagatgaacccgtgtacattgctggtcaacaggcttttttcaactattctacaagcaaaaggatcactcggccaggaaatactgatgatccatcaggaggcaacaaagttcttctgctctcaattcagaatccgctttatccaattacagtggatgttttatatactgtatgcaaccctgttggcaaagtgcaacgtattgttatattcaagagaaatgggatacaagcaatggttgagtttgaatcagtcctttgtgcccagaaagctaaagcagcactcaatggagctgatatatatgctggatgttgcacactaaaaattgaatatgcacggccaactcgtctaaatgttattaggaatgacaatgacagttgggactacactaaaccatatttgggaagacgagatagaggaaagggtcgccagagacaagccattttgggagaacacccttcttcgtttagacatgatggctatggatcccatggtccattattgcctttaccaagtcgttacagaatgggctctcgagatacacctgaacttgttgcttatccattaccacaggcttcttcctcttacatgcatggaggaaatccctctggttcagttgtaatggttagtggattacatcaactaaaaatgaattgttcaagagtcttcaacctgttctgcttatatggaaatattgagaaggtaaaatttatgaagaccattcctggtacagcactggtagaaatgggtgatgagtatgctgtagaaagagctgtcacacaccttaataatgtcaaattatttgggaaaagacttaatgtttgcgtgtctaaacaacattcagttgttccaagtcaaatatttgagctggaggatggtaccagcagctacaaagattttgcaatgagcaaaaataatcgctttacaagtgctggccaagcatctaagaatataatccagccaccctcctgtgttttgcattattataatgttccattgtgtgtcacagaagagaccttcacaaagttgtgtaatgaccatgaagttcttacattcatcaaatataaagtgtttgatgcaaaaccttcagccaaaacactttctgggctattagaatgggagtgcaaaactgatgcagtagaagcccttacggcactgaatcactatcagataagagtgccgaagacggggtttcaccacgttggccaggctggtctcgaactcctggacctcatgatctgcccacctccgccttccgaagtgctgggattacaggcgtgagaaaactcaagtttaatttttgaaactttttgctgtgtaatttactttgatcctggatctccagggtatttaaataataggggaacattattgggtgtggtgatgaatgatggtttaaaaaaga

SEQ ID NO: 43155 - DNA, 2523 bp, Homo sapiens
attgggatggaggatgagattttatatggaaggattaaaacatatttaaccggagcagggacttacagggacaggcaagtcagtaaagggcccaggttacaaacgagttataaccgatcagaccgacgagcgcccgcgtgcagcgcctcctgccgacgcgcgcctcgcagccttcagtcaatgctgacagctgttctccaacacccagctaggggcgggagggtccgcccacttctaccagattttgcacacaaaacagtggaaagaccattctcatggctccaagccgttttctcccttcatcgcctgcaattttagggcttttcggggggtatgactgcagggattttagaggtttttttcctcattctctttttaagaggtgataaaaagcatttaaattagcggcagggcggttaacacccgcagccctagcctctccgcacttctcgtcgctcgtccgtgttcactccacgcctggcctcgggtaggagccgcatagcgccaacggttgcgggtcgcaactactcccaggcggcgcgccttgcgcgccgggcctcccaggaccgcggcgagttcagaaggcgcggggagagaagtgaggtcgagcagcgggcggcttttgacgaacggccctcacagccaatgggaagcccggtcgactttcccgcccctgccaatagggagcagaacccgggccggggggggcgcttcccgcaggctgcggctggattcgatcctgcgcgacggccgcgaaggcgggggcggaggctcggcctgcgcggctgggagcggcttaggggaggagggaagaccggaagccacggttgcgtccccatccttagattcgctcctccgggcagggagcggagacggaggaggaggagggagaggctgaatgttggctcgggagacgtacgaggaggaccgggagtacgagagccaggccaagcgtctcaagaccgaggagggggagatcgactactcggccgaggaaggcgagaaccgccgggaagcgacgccccggggcgggggcgatggcggcggcggcggccggagcttctctcagccggaggcaggtggaagtcatcataaagtttctgtttcacccgtcgtccatgttcgaggactctgtgaatctgtggtggaagcagacctcgtggaagcgctggaaaaatttgggacaatatgctatgtgatgatgatgccatttaaacgacaggctctagtggaatttgaaaacatagatagtgccaaagaatgtgtgacatttgctgcagatgaacccgtgtacattgctggtcaacaggcttttttcaactattctacaagcaaaaggatcactcggccaggaaatactgatgatccatcaggaggcaacaaagttcttctgctctcaattcagaatccgctttatccaattacagtggatgttttatatactgtatgcaaccctgttggcaaagtgcaacgtattgttatattcaagagaaatgggatacaagcaatggttgagtttgaatcagtcctttgtgcccagaaagctaaagcagcactcaatggagctgatatatatgctggatgttgcacactaaaaattgaatatgcacggccaactcgtctaaatgttattaggaatgacaatgacagttgggactacactaaaccatatttgggaagacgaggtaggtattttatacattttagaatgtacttgatctgctgacaaatttttatatgcagttagattcttttttcctgagatgagctagttaattcaaatgaaaaccttgttgatgaatgcttttgttgcaaaaggccatgtaatgctggaaaataaccttgaacattagtgccccctactggtatgtactgagctatttatatttagttcaacaaggagcccacacattcaggcacgcccgcagttcaaggacttgcatttctccaagcagctctctctctttggaggagaggaaactgattcagaatattccttacaaactgcaaacttgcacactgcttctctatggaaaggactttcccccaagctggacgaggcattaagaaggatagaggactccagcaggctgactctacacttcatcatgcacaacatcggcatcagcaaaaagccctctgaaaaactcagactcgcaattcaccttgactgcatactgcatgcaccatcaccccaagtttttaaaggaggacacttaacagtacttcagaattgcatgggatgaacaccatgatagactgtgcccatttatacaagttgtatgtatatattggtctgatttcccttaaggtttcagttgtagaatttaagactttccactaacggaaactagacttcatctgcaatgttgtaaatcttaatgcccattactgtgactgtgtgcagcttagattcaaattgttaattggcaaataaccaggaccagtttattaacaggtcttgggaattgataatgctcaaccaatccacacagatagaaaaataaaaggattagaaaggtg

SEQ ID NO: 43156 - DNA, 3266 bp, Homo sapiens
attgggatggaggatgagattttatatggaaggattaaaacatatttaaccggagcagggacttacagggacaggcaagtcagtaaagggcccaggttacaaacgagttataaccgatcagaccgacgagcgcccgcgtgcagcgcctcctgccgacgcgcgcctcgcagccttcagtcaatgctgacagctgttctccaacacccagctaggggcgggagggtccgcccacttctaccagattttgcacacaaaacagtggaaagaccattctcatggctccaagccgttttctcccttcatcgcctgcaattttagggcttttcggggggtatgactgcagggattttagaggtttttttcctcattctctttttaagaggtgataaaaagcatttaaattagcggcagggcggttaacacccgcagccctagcctctccgcacttctcgtcgctcgtccgtgttcactccacgcctggcctcgggtaggagccgcatagcgccaacggttgcgggtcgcaactactcccaggcggcgcgccttgcgcgccgggcctcccaggaccgcggcgagttcagaaggcgcggggagagaagtgaggtcgagcagcgggcggcttttgacgaacggccctcacagccaatgggaagcccggtcgactttcccgcccctgccaatagggagcagaacccgggccggggggggcgcttcccgcaggctgcggctggattcgatcctgcgcgacggccgcgaaggcgggggcggaggctcggcctgcgcggctgggagcggcttaggggaggagggaagaccggaagccacggttgcgtccccatccttagattcgctcctccgggcagggagcggagacggaggaggaggagggagaggctgaatgttggctcggtaattgagaggagcggccgctccagagcttcctcccggggcgcccccctcagtccgtccgcgcttctcagccgccagtctcctggccgcgcagtccccgcggacggccgggccgcggagaccctcgcagaagaggcgctgccggcggcgaggactggccggcggcatccgaggcgcgcgccccaccgccacccccacccgcctgccagccggtccctccggccgccgccatgtcctcctcctcttcctcccccagggagacgtacgaggaggaccgggagtacgagagccaggccaagcgtctcaagaccgaggagggggagatcgactactcggccgaggaaggcgagaaccgccgggaagcgacgccccggggcgggggcgatggcggcggcggcggccggagcttctctcagccggaggcaggtggaagtcatcataaagtttctgtttcacccgtcgtccatgttcgaggactctgtgaatctgtggtggaagcagacctcgtggaagcgctggaaaaatttgggacaatatgctatgtgatgatgatgccatttaaacgacaggctctagtggaatttgaaaacatagatagtgccaaagaatgtgtgacatttgctgcagatgaacccgtgtacattgctggtcaacaggcttttttcaactattctacaagcaaaaggatcactcggccaggaaatactgatgatccatcaggaggcaacaaagttcttctgctctcaattcagaatccgctttatccaattacagtggatgttttatatactgtatgcaaccctgttggcaaagtgcaacgtattgttatattcaagagaaatgggatacaagcaatggttgagtttgaatcagtcctttgtgcccagaaagctaaagcagcactcaatggagctgatatatatgctggatgttgcacactaaaaattgaatatgcacggccaactcgtctaaatgttattaggaatgacaatgacagttgggactacactaaaccatatttgggaagacgaggtaggtattttatacattttagaatgtacttgatctgctgacaaatttttatatgcagttagattcttttttcctgagatgagctagttaattcaaatgaaaaccttgttgatgaatgcttttgttgcaaaaggccatgtaatgctggaaaataaccttgaacattagtgccccctactggtatgtactgagctatttatatttagttcaacaaggagcccacacattcaggcacgcccgcagttcaaggacttgcatttctccaagcagctctctctctttggaggagaggaaactgattcagaatattccttacaaactgcaaacttgcacactgcttctctatggaaaggactttcccccaagctggacgaggcattaagaaggatagaggactccagcaggctgactctacacttcatcatgcacaacatcggcatcagcaaaaagccctctgaaaaactcagactcgcaattcaccttgactgcatactgcatgcaccatcaccccaagtttttaaaggaggacacttaacagtacttcagaattgcatgggatgaacaccatgatagactgtgcccatttatacaagttgtatgtatatattggtctgatttcccttaaggtttcagttgtagaatttaagactttccactaacggaaactagacttcatctgcaatgttgtaaatcttaatgcccattactgtgactgtgtgcagcttagattcaaattgttaattggcaaataaccaggaccagtttattaacaggtcttgggaattgataatgctcaaccaatccacacagatagaaaaataaaaggattagaaaggtgcacacttgctgcattgtttactttttaaattttttgtttttttctcaattgtggtcactgaacagaaattctaacataatgaaaaggtgcattatatgtgaaagacgttcttctgtgtggtttgatttttgtaaagtggctgtttataagttgtcactttttgtaacaatttaaggttatcactgtcaatttgtgtaactagaaattttgacatttcaaatgtaggtgaaagtaacatgtctgttcaagatagaatatctttaaacttgataaatctgaaaataagagcatttcatttgggatgcatcttcacctataagtgctagatttcgtgaggataaatttgactgataaaattgttcaactaactgtgtggcaattctggaatatacaaattaaaatgtggatcttgtaaaacaagggggctgcagtattggctacatcttaactacaatatcagtgtttgaactacagggtggaaaagctc

SEQ ID NO: 43157 - DNA, 450 bp, Homo sapiens
tataacctaacattggaagtggcataccatcacttaatgttataatttttttggtcacagagaccaaacagtacagtgagtgtaggaggggactatacagggtgggagtaccaggaggttggaatcaccttcaagctatagcttccacaatccctgctgatcattttagaggaaagcaatacatgcatatgtttagaaaactcagacagtacataaaggtacaaaatgaaaagttaaagctttctacaacctccaaccttttgtcttgttctttttttcttccctagtgtgtatatataattacatatatttttaaaacttggctaggcactgtgactcacgcctgtaatcccagcactttgggagactgaggcgggtggatcgtctgaggtcaggagttcgagaccagcttggccaatgtggcgaaaccctgtctctactaaaaataaa

SEQ ID NO: 43158 - DNA, 3322 bp, Homo sapiens
attgggatggaggatgagattttatatggaaggattaaaacatatttaaccggagcagggacttacagggacaggcaagtcagtaaagggcccaggttacaaacgagttataaccgatcagaccgacgagcgcccgcgtgcagcgcctcctgccgacgcgcgcctcgcagccttcagtcaatgctgacagctgttctccaacacccagctaggggcgggagggtccgcccacttctaccagattttgcacacaaaacagtggaaagaccattctcatggctccaagccgttttctcccttcatcgcctgcaattttagggcttttcggggggtatgactgcagggattttagaggtttttttcctcattctctttttaagaggtgataaaaagcatttaaattagcggcagggcggttaacacccgcagccctagcctctccgcacttctcgtcgctcgtccgtgttcactccacgcctggcctcgggtaggagccgcatagcgccaacggttgcgggtcgcaactactcccaggcggcgcgccttgcgcgccgggcctcccaggaccgcggcgagttcagaaggcgcggggagagaagtgaggtcgagcagcgggcggcttttgacgaacggccctcacagccaatgggaagcccggtcgactttcccgcccctgccaatagggagcagaacccgggccggggggggcgcttcccgcaggctgcggctggattcgatcctgcgcgacggccgcgaaggcgggggcggaggctcggcctgcgcggctgggagcggcttaggggaggagggaagaccggaagccacggttgcgtccccatccttagattcgctcctccgggcagggagcggagacggaggaggaggagggagaggctgaatgttggctcggtaattgagaggagcggccgctccagagcttcctcccggggcgcccccctcagtccgtccgcgcttctcagccgccagtctcctggccgcgcagtccccgcggacggccgggccgcggagaccctcgcagaagaggcgctgccggcggcgaggactggccggcggcatccgaggcgcgcgccccaccgccacccccacccgcctgccagccggtccgaggcaggtggaagtcatcataaagtttctgtttcacccgtcgtccatgttcgaggactctgtgaatctgtggtggaagcagacctcgtggaagcgctggaaaaatttgggacaatatgctatgtgatgatgatgccatttaaacgacaggctctagtggaatttgaaaacatagatagtgccaaagaatgtgtgacatttgctgcagatgaacccgtgtacattgctggtcaacaggcttttttcaactattctacaagcaaaaggatcactcggccaggaaatactgatgatccatcaggaggcaacaaagttcttctgctctcaattcagaatccgctttatccaattacagtggatgttttatatactgtatgcaaccctgttggcaaagtgcaacgtattgttatattcaagagaaatgggatacaagcaatggttgagtttgaatcagtcctttgtgcccagaaagctaaagcagcactcaatggagctgatatatatgctggatgttgcacactaaaaattgaatatgcacggccaactcgtctaaatgttattaggaatgacaatgacagttgggactacactaaaccatatttgggaagacgaggttgttgttggcttatgctgaaacttcttgaaagaagcccactttgaaaatgtgttgctgttgaagctaatagtatgattcagatagaggaaagggtcgccagagacaagccattttgggagaacacccttcttcgtttagacatgatggctatggatcccatggtccattattgcctttaccaagtcgttacagaatgggctctcgagatacacctgaacttgttgcttatccattaccacaggcttcttcctcttacatgcatggaggaaatccctctggttcagttgtaatggttagtggattacatcaactaaaaatgaattgttcaagagtcttcaacctgttctgcttatatggaaatattgagaaggtaaaatttatgaagaccattcctggtacagcactggtagaaatgggtgatgagtatgctgtagaaagagctgtcacacaccttaataatgtcaaattatttgggaaaagacttaatgtttgcgtgtctaaacaacattcagttgttccaagtcaaatatttgagctggaggatggtaccagcagctacaaagattttgcaatgagcaaaaataatcgctttacaagtgctggccaagcatctaagaatataatccagccaccctcctgtgttttgcattattataatgttccattgtgtgtcacagaagagaccttcacaaagttgtgtaatgaccatgaagttcttacattcatcaaatataaagtgtttgatgcaaaaccttcagccaaaacactttctgggctattagaatgggagtgcaaaactgatgcagtagaagcccttacggcactgaatcactatcagataagagtgccgaatggttccaatccctatacattgaagctttgcttttctacatcatcccatttataagaagagaagagcatgttagaatttatgttcacctttattacaatttcaaagctacacttcattaaaaaaaaatctaaaatggttgatctcatgttgccttgcttactttaagatcctgttctgtaataaacatattttgccttgagtaaatttgttgtaagcttaaatattgaattgttttcattttaagatagaatatcataatgtagactatctacagcttcattgtagattatacagatatatgatttctaaccttattactggaatttttcttccacagtaaaaatatatttgcattcttaatgctaattatctgcaagtattttttcattgtgtaagagattaatgcaggtgaaagtattgcattttaatatagaattcctattatatgtttagatgtttaagtatgttgcagttactcatattaaacataacttgtatatttattattttaatgaagtttgagaataacgttacatatgttgaattttaagtactacagatttaactgattttatatttctgaaaggctaacagacatggatacacgtgtacagtatgcattcaaacttatttaaattggtgtatttttttttaagtcactgtccatttgtattgacatgcctctgtttctagtccagtttggagattttataaagttataacaatga

SEQ ID NO: 43159 - DNA, 3146 bp, Homo sapiens
attgggatggaggatgagattttatatggaaggattaaaacatatttaaccggagcagggacttacagggacaggcaagtcagtaaagggcccaggttacaaacgagttataaccgatcagaccgacgagcgcccgcgtgcagcgcctcctgccgacgcgcgcctcgcagccttcagtcaatgctgacagctgttctccaacacccagctaggggcgggagggtccgcccacttctaccagattttgcacacaaaacagtggaaagaccattctcatggctccaagccgttttctcccttcatcgcctgcaattttagggcttttcggggggtatgactgcagggattttagaggtttttttcctcattctctttttaagaggtgataaaaagcatttaaattagcggcagggcggttaacacccgcagccctagcctctccgcacttctcgtcgctcgtccgtgttcactccacgcctggcctcgggtaggagccgcatagcgccaacggttgcgggtcgcaactactcccaggcggcgcgccttgcgcgccgggcctcccaggaccgcggcgagttcagaaggcgcggggagagaagtgaggtcgagcagcgggcggcttttgacgaacggccctcacagccaatgggaagcccggtcgactttcccgcccctgccaatagggagcagaacccgggccggggggggcgcttcccgcaggctgcggctggattcgatcctgcgcgacggccgcgaaggcgggggcggaggctcggcctgcgcggctgggagcggcttaggggaggagggaagaccggaagccacggttgcgtccccatccttagattcgctcctccgggcagggagcggagacggaggaggaggagggagaggctgaatgttggctcggtaattgagaggagcggccgctccagagcttcctcccggggcgcccccctcagtccgtccgcgcttctcagccgccagtctcctggccgcgcagtccccgcggacggccgggccgcggagaccctcgcagaagaggcgctgccggcggcgaggactggccggcggcatccgaggcgcgcgccccaccgccacccccacccgcctgccagccggtccctccggccgccgccatgtcctcctcctcttcctcccccagggagacgtacgaggaggaccgggagtacgagagccaggccaagcgtctcaagaccgaggagggggagatcgactactcggccgaggaaggcgagaaccgccgggaagcgacgccccggggcgggggcgatggcggcggcggcggccggagcttctctcagccggaggcaggtggaagtcatcataaagtttctgtttcacccgtcgtccatgttcgaggactctgtgaatctgtggtggaagcagacctcgtggaagcgctggaaaaatttgggacaatatgctatgtgatgatgatgccatttaaacgacaggctctagtggaatttgaaaacatagatagtgccaaagaatgtgtgacatttgctgcagatgaacccgtgtacattgctggtcaacaggcttttttcaactattctacaagcaaaaggatcactcggccaggaaatactgatgatccatcaggaggcaacaaagttcttctgctctcaattcagaatccgctttatccaattacagtggatgttttatatactgtatgcaaccctgttggcaaagtgcaacgtattgttatattcaagagaaatgggatacaagcaatggttgagtttgaatcagtcctttgtgcccagaaagctaaagcagcactcaatggagctgatatatatgctggatgttgcacactaaaaattgaatatgcacggccaactcgtctaaatgttattaggaatgacaatgacagttgggactacactaaaccatatttgggaagacgagatagaggaaagggtcgccagagacaagccattttgggagaacacccttcttcgtttagacatgatggctatggatcccatggtccattattgcctttaccaagtcgttacagaatgggctctcgagatacacctgaacttgttgcttatccattaccacaggcttcttcctcttacatgcatggaggaaatccctctggttcagttgtaatggttagtggattacatcaactaaaaatgaattgttcaagagtcttcaacctgttctgcttatatggaaatattgagaaggtaaaatttatgaagaccattcctggtacagcactggtagaaatgggtgatgagtatgctgtagaaagagctgtcacacaccttaataatgtcaaattatttgggaaaagacttaatgtttgcgtgtctaaacaacattcagttgttccaagtcaaatatttgagctggaggatggtaccagcagctacaaagattttgcaatgagcaaaaataatcgctttacaagtgctggccaagcatctaagaatataatccagccaccctcctgtgttttgcattattataatgttccattgtgtgtcacagaagagaccttcacaaagttgtgtaatgaccatgaagttcttacattcatcaaatataaagtgtttgatgcaaaaccttcagccaaaacactttctgggctattagaatgggagtgcaaaactgatgcagtagaagcccttacggcactgaatcactatcagataagagtgccgaatggttccaatccctatacattgaagctttgcttttctacatcatcccatttataagaagagaagagcatgttagaatttatgttcacctttattacaatttcaaagctacacttcattaaaaaaaaatctaaaatggttgatctcatgttgccttgcttactttaagatcctgttctgtaataaacatattttgccttgagtaaaaaaaaaaaaaaaaagagaaacagcaacactttggggccggcggggcccaagaaagttttctaacccactccggtgggcgcgcgggccagatggtagtgaactgggccacgcggccaaggaaacggggcgaaccgggcgggtcccccataaaaccgcggggcccggggcttgaaacaacccaagggcgggctccgggcccacagggcccagagcgttaccccccgcgga

SEQ ID NO: 43160 - DNA, 3101 bp, Homo sapiens
attgggatggaggatgagattttatatggaaggattaaaacatatttaaccggagcagggacttacagggacaggcaagtcagtaaagggcccaggttacaaacgagttataaccgatcagaccgacgagcgcccgcgtgcagcgcctcctgccgacgcgcgcctcgcagccttcagtcaatgctgacagctgttctccaacacccagctaggggcgggagggtccgcccacttctaccagattttgcacacaaaacagtggaaagaccattctcatggctccaagccgttttctcccttcatcgcctgcaattttagggcttttcggggggtatgactgcagggattttagaggtttttttcctcattctctttttaagaggtgataaaaagcatttaaattagcggcagggcggttaacacccgcagccctagcctctccgcacttctcgtcgctcgtccgtgttcactccacgcctggcctcgggtaggagccgcatagcgccaacggttgcgggtcgcaactactcccaggcggcgcgccttgcgcgccgggcctcccaggaccgcggcgagttcagaaggcgcggggagagaagtgaggtcgagcagcgggcggcttttgacgaacggccctcacagccaatgggaagcccggtcgactttcccgcccctgccaatagggagcagaacccgggccggggggggcgcttcccgcaggctgcggctggattcgatcctgcgcgacggccgcgaaggcgggggcggaggctcggcctgcgcggctgggagcggcttaggggaggagggaagaccggaagccacggttgcgtccccatccttagattcgctcctccgggcagggagcggagacggaggaggaggagggagaggctgaatgttggctcggtaattgagaggagcggccgctccagagcttcctcccggggcgcccccctcagtccgtccgcgcttctcagccgccagtctcctggccgcgcagtccccgcggacggccgggccgcggagaccctcgcagaagaggcgctgccggcggcgaggactggccggcggcatccgaggcgcgcgccccaccgccacccccacccgcctgccagccggtccctccggccgccgccatgtcctcctcctcttcctcccccagggagacgtacgaggaggaccgggagtacgagagccaggccaagcgtctcaagaccgaggagggggagatcgactactcggccgaggaaggcgagaaccgccgggaagcgacgccccggggcgggggcgatggcggcggcggcggccggagcttctctcagccggaggcaggtggaagtcatcataaagtttctgtttcacccgtcgtccatgttcgaggactctgtgaatctgtggtggaagcagacctcgtggaagcgctggaaaaatttgggacaatatgctatgtgatgatgatgccatttaaacgacaggctctagtggaatttgaaaacatagatagtgccaaagaatgtgtgacatttgctgcagatgaacccgtgtacattgctggtcaacaggcttttttcaactattctacaagcaaaaggatcactcggccaggaaatactgatgatccatcaggaggcaacaaagttcttctgctctcaattcagaatccgctttatccaattacagtggatgttttatatactgtatgcaaccctgttggcaaagtgcaacgtattgttatattcaagagaaatgggatacaagcaatggttgagtttgaatcagtcctttgtgcccagaaagctaaagcagcactcaatggagctgatatatatgctggatgttgcacactaaaaattgaatatgcacggccaactcgtctaaatgttattaggaatgacaatgacagttgggactacactaaaccatatttgggaagacgagatagaggaaagggtcgccagagacaagccattttgggagaacacccttcttcgtttagacatgatggctatggatcccatggtccattattgcctttaccaagtcgttacagaatgggctctcgagatacacctgaacttgttgcttatccattaccacaggcttcttcctcttacatgcatggaggaaatccctctggttcagttgtaatggttagtggattacatcaactaaaaatgaattgttcaagagtcttcaacctgttctgcttatatggaaatattgagaaggtaaaatttatgaagaccattcctggtacagcactggtagaaatgggtgatgagtatgctgtagaaagagctgtcacacaccttaataatgtcaaattatttgggaaaagacttaatgtttgcgtgtctaaacaacattcagttgttccaagtcaaatatttgagctggaggatggtaccagcagctacaaagattttgcaatgagcaaaaataatcgctttacaagtgctggccaagcatctaagaatataatccagccaccctcctgtgttttgcattattataatgttccattgtgtgtcacagaagagaccttcacaaagttgtgtaatgaccatgaagttcttacattcatcaaatataaagtgtttgatgcaaaaccttcagccaaaacactttctgggctattagaatgggagtgcaaaactgatgcagtagaagcccttacggcactgaatcactatcagataagagtgccgagtaagtaaaatgctttatttgtgttgtaattatgtagtggcagttaccatcacagaaacattcatggtaatataaaaataacacttaataggcttcttaaaaaatacagataaatacaaaaaagaaaggcatattaattcctgtattagttatctattgctgtataacaaattgccataaaatttagcatcttaaaacagcaaacatttattatcttactgtttctgagggttagtattttgggtgcatttcagctgggcaattcgggcttaggatctcccatgaagttgcagtcaaactgttgtttaagtctgcagtaatctcagggcttgactgaagccagaagatccacccccaggcgcactcatatggttgtgtgtaggctcaat

SEQ ID NO: 43161 - DNA, 2842 bp, Homo sapiens
attgggatggaggatgagattttatatggaaggattaaaacatatttaaccggagcagggacttacagggacaggcaagtcagtaaagggcccaggttacaaacgagttataaccgatcagaccgacgagcgcccgcgtgcagcgcctcctgccgacgcgcgcctcgcagccttcagtcaatgctgacagctgttctccaacacccagctaggggcgggagggtccgcccacttctaccagattttgcacacaaaacagtggaaagaccattctcatggctccaagccgttttctcccttcatcgcctgcaattttagggcttttcggggggtatgactgcagggattttagaggtttttttcctcattctctttttaagaggtgataaaaagcatttaaattagcggcagggcggttaacacccgcagccctagcctctccgcacttctcgtcgctcgtccgtgttcactccacgcctggcctcgggtaggagccgcatagcgccaacggttgcgggtcgcaactactcccaggcggcgcgccttgcgcgccgggcctcccaggaccgcggcgagttcagaaggcgcggggagagaagtgaggtcgagcagcgggcggcttttgacgaacggccctcacagccaatgggaagcccggtcgactttcccgcccctgccaatagggagcagaacccgggccggggggggcgcttcccgcaggctgcggctggattcgatcctgcgcgacggccgcgaaggcgggggcggaggctcggcctgcgcggctgggagcggcttaggggaggagggaagaccggaagccacggttgcgtccccatccttagattcgctcctccgggcagggagcggagacggaggaggaggagggagaggctgaatgttggctcggtaattgagaggagcggccgctccagagcttcctcccggggcgcccccctcagtccgtccgcgcttctcagccgccagtctcctggccgcgcagtccccgcggacggccgggccgcggagaccctcgcagaagaggcgctgccggcggcgaggactggccggcggcatccgaggcgcgcgccccaccgccacccccacccgcctgccagccggtccctccggccgccgccatgtcctcctcctcttcctcccccagggagacgtacgaggaggaccgggagtacgagagccaggccaagcgtctcaagaccgaggagggggagatcgactactcggccgaggaaggcgagaaccgccgggaagcgacgccccggggcgggggcgatggcggcggcggcggccggagcttctctcagccggaggcaggtggaagtcatcataaagtttctgtttcacccgtcgtccatgttcgaggactctgtgaatctgtggtggaagcagacctcgtggaagcgctggaaaaatttgggacaatatgctatgtgatgatgatgccatttaaacgacaggctctagtggaatttgaaaacatagatagtgccaaagaatgtgtgacatttgctgcagatgaacccgtgtacattgctggtcaacaggcttttttcaactattctacaagcaaaaggatcactcggccaggaaatactgatgatccatcaggaggcaacaaagttcttctgctctcaattcagaatccgctttatccaattacagtggatgttttatatactgtatgcaaccctgttggcaaagtgcaacgtattgttatattcaagagaaatgggatacaagcaatggttgagtttgaatcagtcctttgtgcccagaaagctaaagcagcactcaatggagctgatatatatgctggatgttgcacactaaaaattgaatatgcacggccaactcgtctaaatgttattaggaatgacaatgacagttgggactacactaaaccatatttgggaagacgagatagaggaaagggtcgccagagacaagccattttgggagaacacccttcttcgtttagacatgatggctatggatcccatggtccattattgcctttaccaagtcgttacagaatgggctctcgagatacacctgaacttgttgcttatccattaccacaggcttcttcctcttacatgcatggaggaaatccctctggttcagttgtaatggttagtggattacatcaactaaaaatgaattgttcaagagtcttcaacctgttctgcttatatggaaatattgagaaggtaaaatttatgaagaccattcctggtacagcactggtagaaatgggtgatgagtatgctgtagaaagagctgtcacacaccttaataatgtcaaattatttgggaaaagacttaatgtttgcgtgtctaaacaacattcagttgttccaagtcaaatatttgagctggaggatggtaccagcagctacaaagattttgcaatgagcaaaaataatcgctttacaagtgctggccaagcatctaagaatataatccagccaccctcctgtgttttgcattattataatgttccattgtgtgtcacagaagagaccttcacaaagttgtgtaatgaccatgaagttcttacattcatcaaatataaagtgtttgatgcaaaaccttcagccaaaacactttctgggctattagaatgggagtgcaaaactgatgcagtagaagcccttacggcactgaatcactatcagataagagtgccgaatggttccaatccctatacaatgaagtgtagctttgaaattgtaataaaggtgaacataaattctaacatgctcttctcttcttataaatgggatgatgtagaaaagcaaagcttcaatgtatagggtcg

SEQ ID NO: 43162 - DNA, 3352 bp, Homo sapiens
attgggatggaggatgagattttatatggaaggattaaaacatatttaaccggagcagggacttacagggacaggcaagtcagtaaagggcccaggttacaaacgagttataaccgatcagaccgacgagcgcccgcgtgcagcgcctcctgccgacgcgcgcctcgcagccttcagtcaatgctgacagctgttctccaacacccagctaggggcgggagggtccgcccacttctaccagattttgcacacaaaacagtggaaagaccattctcatggctccaagccgttttctcccttcatcgcctgcaattttagggcttttcggggggtatgactgcagggattttagaggtttttttcctcattctctttttaagaggtgataaaaagcatttaaattagcggcagggcggttaacacccgcagccctagcctctccgcacttctcgtcgctcgtccgtgttcactccacgcctggcctcgggtaggagccgcatagcgccaacggttgcgggtcgcaactactcccaggcggcgcgccttgcgcgccgggcctcccaggaccgcggcgagttcagaaggcgcggggagagaagtgaggtcgagcagcgggcggcttttgacgaacggccctcacagccaatgggaagcccggtcgactttcccgcccctgccaatagggagcagaacccgggccggggggggcgcttcccgcaggctgcggctggattcgatcctgcgcgacggccgcgaaggcgggggcggaggctcggcctgcgcggctgggagcggcttaggggaggagggaagaccggaagccacggttgcgtccccatccttagattcgctcctccgggcagggagcggagacggaggaggaggagggagaggctgaatgttggctcggtaattgagaggagcggccgctccagagcttcctcccggggcgcccccctcagtccgtccgcgcttctcagccgccagtctcctggccgcgcagtccccgcggacggccgggccgcggagaccctcgcagaagaggcgctgccggcggcgaggactggccggcggcatccgaggcgcgcgccccaccgccacccccacccgcctgccagccggtccctccggccgccgccatgtcctcctcctcttcctcccccagggagacgtacgaggaggaccgggagtacgagagccaggccaagcgtctcaagaccgaggagggggagatcgactactcggccgaggaaggcgagaaccgccgggaagcgacgccccggggcgggggcgatggcggcggcggcggccggagcttctctcagccggaggcaggtggaagtcatcataaagtttctgtttcacccgtcgtccatgttcgaggactctgtgaatctgtggtggaagcagacctcgtggaagcgctggaaaaatttgggacaatatgctatgtgatgatgatgccatttaaacgacaggctctagtggaatttgaaaacatagatagtgccaaagaatgtgtgacatttgctgcagatgaacccgtgtacattgctggtcaacaggcttttttcaactattctacaagcaaaaggatcactcggccaggaaatactgatgatccatcaggaggcaacaaagttcttctgctctcaattcagaatccgctttatccaattacagtggatgttttatatactgtatgcaaccctgttggcaaagtgcaacgtattgttatattcaagagaaatgggatacaagcaatggttgagtttgaatcagtcctttgtgcccagaaagctaaagcagcactcaatggagctgatatatatgctggatgttgcacactaaaaattgaatatgcacgggtaaatatttttttcaacaccctacccaagaaatatttatgctttggatatgcagtttgaacttacattattttcaatcttaacagccaactcgtctaaatgttattaggaatgacaatgacagttgggactacactaaaccatatttgggaagacgaggtaggtattttatacattttagaatgtacttgatctgctgacaaatttttatatgcagttagattcttttttcctgagatgagctagttaattcaaatgaaaaccttgttgatgaatgcttttgttgcaaaaggccatgtaatgctggaaaataaccttgaacattagtgccccctactggtatgtactgagctatttatatttagttcaacaaggagcccacacattcaggcacgcccgcagttcaaggacttgcatttctccaagcagctctctctctttggaggagaggaaactgattcagaatattccttacaaactgcaaacttgcacactgcttctctatggaaaggactttcccccaagctggacgaggcattaagaaggatagaggactccagcaggctgactctacacttcatcatgcacaacatcggcatcagcaaaaagccctctgaaaaactcagactcgcaattcaccttgactgcatactgcatgcaccatcaccccaagtttttaaaggaggacacttaacagtacttcagaattgcatgggatgaacaccatgatagactgtgcccatttatacaagttgtatgtatatattggtctgatttcccttaaggtttcagttgtagaatttaagactttccactaacggaaactagacttcatctgcaatgttgtaaatcttaatgcccattactgtgactgtgtgcagcttagattcaaattgttaattggcaaataaccaggaccagtttattaacaggtcttgggaattgataatgctcaaccaatccacacagatagaaaaataaaaggattagaaaggtgcacacttgctgcattgtttactttttaaattttttgtttttttctcaattgtggtcactgaacagaaattctaacataatgaaaaggtgcattatatgtgaaagacgttcttctgtgtggtttgatttttgtaaagtggctgtttataagttgtcactttttgtaacaatttaaggttatcactgtcaatttgtgtaactagaaattttgacatttcaaatgtaggtgaaagtaacatgtctgttcaagatagaatatctttaaacttgataaatctgaaaataagagcatttcatttgggatgcatcttcacctataagtgctagatttcgtgaggataaatttgactgataaaattgttcaactaactgtgtggcaattctggaatatacaaattaaaatgtggatcttgtaaaacaagggggctgcagtattggctacatcttaactacaatatcagtgtttgaactacagggtggaaaagctc

SEQ ID NO: 43163 - DNA, 425 bp, Homo sapiens
tgttctgatttctgcctttggagccgtgtttaggtcataatcaaaggccatgcctcagtgtctcagggaaggtatgtttgcttttattgtcttctaacacttatttctttttttaatgctccaatcctcaacatctagagtgtacttcatggagggatccagctctgcgttgtcccccggtctggatgaccccatgtgacctctagagcatccaatggcctttggagctgcaccccacccctgtgctccccaatgctgtgccagctcctcactccagggtcctgcccagccctgccctgcgtgcccacacctatggctatttatgctgcttactacatgactgtcaacgcatgcgcttgagcgttagctctgtttaccctttaaaggaatctcccaagacactaccaggcagtattgactagcgc

SEQ ID NO: 43164 - DNA, 512 bp, Homo sapiens
  misc_feature (54)..(54): n is a, c, g, or t
  misc_feature (57)..(57): n is a, c, g, or t
  misc_feature (62)..(62): n is a, c, g, or t
ccgcccctcacccaggcccaggcccaggccccgcccccacaagccgggctcacncgnctggnagaccccgccaagcgcctcggagcgcgcaggatgcgctgggcggccgccaccctccgtggcaaggcgaggccccgggggcgggccggggtcaccacgcctgccccagggaaccgcacaggcacgtgcgctaagctgcggctacccccgcaagcaaccttccaagtccttcgtggcaatggtgcttccgtggggaccgtgtcatgtccatggccttcctcacctgctgcctcctcaagtgcgtgaagaagagcaagcggcggcgctccaacaggtcagcccagctgtggtcccagctgaaagatgaggacttggagacggtgcaggccgcataccttggcctcaagcacttcaacaaacccgtgagcgggcccagccaggcgcacgacaaccacagcttcaccaccccagtgtgcaaacttggtgccaccacacgagaccttttggcttca

SEQ ID NO: 43165 - DNA, 1356 bp, Homo sapiens
  misc_feature (54)..(54): n is a, c, g, or t
  misc_feature (57)..(57): n is a, c, g, or t
  misc_feature (62)..(62): n is a, c, g, or t
ccgcccctcacccaggcccaggcccaggccccgcccccacaagccgggctcacncgnctggnagaccccgccaagcgcctcggagcgcgcaggatgcgctgggcggccgccaccctccgtggcaaggcgaggccccgggggcgggccggggtcaccacgcctgccccagggaaccgcacagacggtactcacccttcttgcgatgatgtgagatgataaaatgcctacatgatgagatgaagtgagatgaaaaacataggccttgtgatggaatgggaaattccagagataatttgcacgtgcgctaagctgcggctacccccgcaagcaaccttccaagtccttcgtggcaatggtgcttccgtggggaccgtgctcatgttccgctgcccctccaaccaccagatggtggggtctgggctcctcacctgcacctggaaggggagcatcgctgagtggtcttcagggtccccagtgtgcaaactggtgccaccacacgagacctttggcttcaaggtggccgtgatcgcctccattgtgagctgtgccatcatcctgctcatgtccatggccttcctcacctgctgcctcctcaagtgcgtgaagaagagcaagcggcggcgctccaacaggtcagcccagctgtggtcccagctgaaagatgaggacttggagacggtgcaggccgcataccttggcctcaagcacttcaacaaacccgtgagcgggcccagccaggcgcacgacaaccacagcttcaccacagaccatggtgagagcaccagcaagctggccagtgtgacccgcagcgtggacaaggaccctgggatccccagagctctaagcctcagtggctcctccagctcaccccaagcccaggtgatggtgcacatggcaaaccccagacagcccctgcctgcctctgggctggccacaggaatgccacaacagcccgcagcatatgccctagggtgaccacgcagtgaggctggtgcccatgctccacactgggaggccaggctgaccccaccagccagtcagctacaactccacatcaactccacatgcgcccagctcgagactgatgagtggaatcagcttccaggtgtagggaccccttgaggggccgagctgacatccaaggctgaggaccccagtggggagtgttctgttccggcatatcctggccgtaacgatttttatagttatggactacttgaaaccactactgagggtaatttactagctgtggcctcccactaactagcattcctttaaagagactgggaaatgttttaagcaaatctagttttgtataataaaataagaaaatagcaataaacttcttttcagcaa

SEQ ID NO: 43166 - DNA, 1297 bp, Homo sapiens
  misc_feature (54)..(54): n is a, c, g, or t
  misc_feature (57)..(57): n is a, c, g, or t
  misc_feature (62)..(62): n is a, c, g, or t
ccgcccctcacccaggcccaggcccaggccccgcccccacaagccgggctcacncgnctggnagaccccgccaagcgcctcggagcgcgcaggatgcgctgggcggccgccaccctccgtggcaaggcgaggccccgggggcgggccggggtcaccacgcctgccccagggaaccgcacaggcacgtgcgctaagctgcggctacccccgcaagcaaccttccaagtccttcgtggcaatggtgcttccgtggggaccgtgctcatgttccgctgcccctccaaccaccagatggtggggtctgggctcctcacctgcacctggaaggggagcatcgctgagtggtcttcagggtccccagtgtgcaaactggtgccaccacacgagacctttggcttcaaggtggccgtgatcgcctccattgtgagctgtgccatcatcctgctcatgtccatggccttcctcacctgctgcctcctcaagtgcgtgaagaagagcaagcggcggcgctccaacaggtcagcccagctgtggtcccagctgaaagatgaggacttggagacggtgcaggccgcataccttggcctcaagcacttcaacaaacccgtgagcgggcccagccaggcgcacgacaaccacagcttcaccacagaccatggtgagagcaccagcaagctggccagtgtgacccgcagcgtggacaaggaccctgggatccccagagctctaagcctcagtggctcctccagctcaccccaagcccaggtgatggtgcacatggcaaaccccagacagcccctgcctgcctctgggctggccacaggaatgccacaacagcccgcagcatatgccctagggtgaccacgcagtgaggctggtgcccatgctccacactgggaggccaggctgaccccaccagccagtcagctacaactccacatcaactccacatgcgcccagctcgagactgatgagtggaatcagcttccaggtgtagggaccccttgaggggccgagctgacatccaaggctgaggaccccagtggggagtgttctgttccggcatatcctggccgtaacgatttttatagttatggactacttgaaaccactactgagggtaatttactagctgtggcctcccactaactagcattcctttaaagagactgggaaatgttttaagcaaatctagttttgtataataaaataagaaaatagcaataaacttcttttcagcaaaaaaacacacccaaaacacttttgggccccccgggccccaaaaattttaaccccg

SEQ ID NO: 43167 - DNA, 989 bp, Homo sapiens
  misc_feature (54)..(54): n is a, c, g, or t
  misc_feature (57)..(57): n is a, c, g, or t
  misc_feature (62)..(62): n is a, c, g, or t
ccgcccctcacccaggcccaggcccaggccccgcccccacaagccgggctcacncgnctggnagaccccgccaagcgcctcggagcgcgcaggatgcgctgggcggccgccaccctccgtggcaaggcgaggccccgggggcgggccggggtcaccacgcctgccccagggaaccgcacaggcacgtgcgctaagctgcggctacccccgcaagcaaccttccaagtccttcgtggcaatggtgcttccgtggggaccgtgctcatgttccgctgcccctccaaccaccagatggtggggtctgggctcctcacctgcacctggaaggggagcatcgctgagtggtcttcagggtccccagtgtgcaaactggtgccaccacacgagacctttggcttcaaggtggccgtgatcgcctccattgtgagctgtgccatcatcctgctcatgtccatggccttcctcacctgctgcctcctcaagtgcgtgaagaagagcaagcggcggcgctccaacaggtcagcccagctgtggtcccagctgaaagatgaggacttggagacggtgcaggccgcataccttggcctcaagcacttcaacaaacccgtgagcgggcccagccaggcgcacgacaaccacagcttcaccacagaccatggtgagagcaccagcaagctggccagtgtgacccgcagcgtggacaaggaccctgggatccccagagctctaagcctcagtggctcctccagctcaccccaagcccaggtgatggtgcacatggcaaaccccagacagcccctgcctgcctctgggctggccacaggaatgccacaacagcccgcagcatatgccctagggtgaccacgcagtgaggctggtgcccatgctcccactaactagcattcctttaaagagactgggaaatgttttaagcaaatctagttttgtataataaaataagaaaatagcaataaacttcttttcagcaa

SEQ ID NO: 43168 - DNA, 1242 bp, Homo sapiens
  misc_feature (54)..(54): n is a, c, g, or t
  misc_feature (57)..(57): n is a, c, g, or t
  misc_feature (62)..(62): n is a, c, g, or t
ccgcccctcacccaggcccaggcccaggccccgcccccacaagccgggctcacncgnctggnagaccccgccaagcgcctcggagcgcgcaggatgcgctgggcggccgccaccctccgtggcaaggcgaggccccgggggcgggccggggtcaccacgcctgccccagggaaccgcacaggcacgtgcgctaagctgcggctacccccgcaagcaaccttccaagtccttcgtggcaatggtgcttccgtggggaccgtgctcatgttccgctgcccctccaaccaccagatggtggggtctgggctcctcacctgcacctggaaggggagcatcgctgagtggtcttcagggtccccagtgtgcaaactggtgccaccacacgagacctttggcttcaaggtggccgtgatcgcctccattgtgagctgtgccatcatcctgctcatgtccatggccttcctcacctgctgcctcctcaagtgcgtgaagaagagcaagcggcggcgctccaacaggtcagcccagctgtggtcccagctgaaagatgaggacttggagacggtgcaggccgcataccttggcctcaagcacttcaacaaacccgtgagcgggcccagccaggcgcacgacaaccacagcttcaccacagaccatggtgagagcaccagcaagctggccagtgtgacccgcagcgtggacaaggaccctgggatccccagagctctaagcctcagtggctcctccagctcaccccaagcccaggtgatggtgcacatggcaaaccccagacagcccctgcctgcctctgggctggccacaggaatgccacaacagcccgcagcatatgccctagggtgaccacgcagtgaggctggtgcccatgctccacactgggaggccaggctgaccccaccagccagtcagctacaactccacatcaactccacatgcgcccagctcgagactgatgagtggaatcagcttccaggtgtagggaccccttgaggggccgagctgacatccaaggctgaggaccccagtggggagtgttctgttccggcatatcctggccgtaacgatttttatagttatggactacttgaaaccactactgagggtaatttactagctgtggcctcccactaactagcattcctttaaagagactgggaaatgttttaagcaaatctagttttgtataataaaataagaaaatagcaataaacttcttttcagcaa

SEQ ID NO: 43169 - DNA, 639 bp, Homo sapiens
  misc_feature (54)..(54): n is a, c, g, or t
  misc_feature (57)..(57): n is a, c, g, or t
  misc_feature (62)..(62): n is a, c, g, or t
ccgcccctcacccaggcccaggcccaggccccgcccccacaagccgggctcacncgnctggnagaccccgccaagcgcctcggagcgcgcaggatgcgctgggcggccgccaccctccgtggcaaggcgaggccccgggggcgggccggggtcaccacgcctgccccagggaaccgcacaggtgagggctggggccgagtggccgcgtgcggggctctgcgcccatttcacagacgggaaagccgaggggagggggtcgcggggccgcacagccgtgggtgggggccacagcaacgatctgccccgaggacgaacctcctcgaccctccgccggcccagcaggcgccctagcggagccgaagcctggcagcgagcagttcgaaaccaggcggctgcacgcagcagcccgcgcgcccgttcccgagtggccgcagcgccttggtcccgggcgtctgcggacagcgcggccggccaagcctctccacgccgcaggctccgggcccctccgcgcccctcccggggaagtcgaaaccggcctcacctggcgggcgggtggcgcgggggcgggaggggggagccgggagccctctctgcgcctgagggaggtgtcatcttcacgattccttggtgaccagcgca

SEQ ID NO: 43170 - DNA, 1394 bp, Homo sapiens
  misc_feature (54)..(54): n is a, c, g, or t
  misc_feature (57)..(57): n is a, c, g, or t
  misc_feature (62)..(62): n is a, c, g, or t
ccgcccctcacccaggcccaggcccaggccccgcccccacaagccgggctcacncgnctggnagaccccgccaagcgcctcggagcgcgcaggatgcgctgggcggccgccaccctccgtggcaaggcgaggccccgggggcgggccggggtcaccacgcctgccccagggaaccgcacagacggtactcacccttcttgcgatgatgtgagatgataaaatgcctacatgatgagatgaagtgagatgaaaaacataggccttgtgatggaatgggaaattccagagataatttgtcataatcaaaggccatgcctcagtgtctcagggaaggcacgtgcgctaagctgcggctacccccgcaagcaaccttccaagtccttcgtggcaatggtgcttccgtggggaccgtgctcatgttccgctgcccctccaaccaccagatggtggggtctgggctcctcacctgcacctggaaggggagcatcgctgagtggtcttcagggtccccagtgtgcaaactggtgccaccacacgagacctttggcttcaaggtggccgtgatcgcctccattgtgagctgtgccatcatcctgctcatgtccatggccttcctcacctgctgcctcctcaagtgcgtgaagaagagcaagcggcggcgctccaacaggtcagcccagctgtggtcccagctgaaagatgaggacttggagacggtgcaggccgcataccttggcctcaagcacttcaacaaacccgtgagcgggcccagccaggcgcacgacaaccacagcttcaccacagaccatggtgagagcaccagcaagctggccagtgtgacccgcagcgtggacaaggaccctgggatccccagagctctaagcctcagtggctcctccagctcaccccaagcccaggtgatggtgcacatggcaaaccccagacagcccctgcctgcctctgggctggccacaggaatgccacaacagcccgcagcatatgccctagggtgaccacgcagtgaggctggtgcccatgctccacactgggaggccaggctgaccccaccagccagtcagctacaactccacatcaactccacatgcgcccagctcgagactgatgagtggaatcagcttccaggtgtagggaccccttgaggggccgagctgacatccaaggctgaggaccccagtggggagtgttctgttccggcatatcctggccgtaacgatttttatagttatggactacttgaaaccactactgagggtaatttactagctgtggcctcccactaactagcattcctttaaagagactgggaaatgttttaagcaaatctagttttgtataataaaataagaaaatagcaataaacttcttttcagcaa

SEQ ID NO: 43171 - DNA, 1053 bp, Homo sapiens
  misc_feature (54)..(54): n is a, c, g, or t
  misc_feature (57)..(57): n is a, c, g, or t
  misc_feature (62)..(62): n is a, c, g, or t
ccgcccctcacccaggcccaggcccaggccccgcccccacaagccgggctcacncgnctggnagaccccgccaagcgcctcggagcgcgcaggatgcgctgggcggccgccaccctccgtggcaaggcgaggccccgggggcgggccggggtcaccacgcctgccccagggaaccgcacagtggtgccaccacacgagacctttggcttcaaggtggccgtgatcgcctccattgtgagctgtgccatcatcctgctcatgtccatggccttcctcacctgctgcctcctcaagtgcgtgaagaagagcaagcggcggcgctccaacaggtcagcccagctgtggtcccagctgaaagatgaggacttggagacggtgcaggccgcataccttggcctcaagcacttcaacaaacccgtgagcgggcccagccaggcgcacgacaaccacagcttcaccacagaccatggtgagagcaccagcaagctggccagtgtgacccgcagcgtggacaaggaccctgggatccccagagctctaagcctcagtggctcctccagctcaccccaagcccaggtgatggtgcacatggcaaaccccagacagcccctgcctgcctctgggctggccacaggaatgccacaacagcccgcagcatatgccctagggtgaccacgcagtgaggctggtgcccatgctccacactgggaggccaggctgaccccaccagccagtcagctacaactccacatcaactccacatgcgcccagctcgagactgatgagtggaatcagcttccaggtgtagggaccccttgaggggccgagctgacatccaaggctgaggaccccagtggggagtgttctgttccggcatatcctggccgtaacgatttttatagttatggactacttgaaaccactactgagggtaatttactagctgtggcctcccactaactagcattcctttaaagagactgggaaatgttttaagcaaatctagttttgtataataaaataagaaaatagcaataaacttcttttcagcaa

SEQ ID NO: 43172 - DNA, 1092 bp, Homo sapiens
  misc_feature (54)..(54): n is a, c, g, or t
  misc_feature (57)..(57): n is a, c, g, or t
  misc_feature (62)..(62): n is a, c, g, or t
ccgcccctcacccaggcccaggcccaggccccgcccccacaagccgggctcacncgnctggnagaccccgccaagcgcctcggagcgcgcaggatgcgctgggcggccgccaccctccgtggcaaggcgaggccccgggggcgggccggggtcaccacgcctgccccagggaaccgcacaggcacgtgcgctaagctgcggctacccccgcaagcaaccttccaagtccttcgtggcaatggtgcttccgtggggaccgtgctcatgttccgctgcccctccaaccaccagatggtggggtctgggctcctcacctgcacctggaaggggagcatcgctgagtggtcttcagggtccccagtgtgcaaactggtgccaccacacgagacctttggcttcaaggtggccgtgatcgcctccattgtgagctgtgccatcatcctgctcatgtccatggccttcctcacctgctgcctcctcaagtgcgtgaagaagagcaagcggcggcgctccaacaggtcagcccagctgtggtcccagctgaaagatgaggacttggagacggtgcaggccgcataccttggcctcaagcacttcaacaaacccgtgagcgggcccagccaggcgcacgacaaccacagcttcaccacagaccatggtgagagcaccagcaagctggccagtgtgacccgcagcgtggacaaggaccctgggatccccagagctctaagcctcagtggctcctccagctcaccccaagcccaggtgatggtgcacatggcaaaccccagacagcccctgcctgcctctgggctggccacaggaatgccacaacagcccgcagcatatgccctagggtgaccacgcagtgaggctggtgcccatgctccacactgggaggccaggctgaccccaccagccaggcgcctgccacaacgtctggagacggagtttctccattttggccagtttggtgtcgacctcccgggcttaagcgatccacccacctcagcctcccaaagtgttgggattacaggcgtgagccactgtatccagcttgtgatatacttttaataaatttctcttaaactt

SEQ ID NO: 43173 - DNA, 1017 bp, Homo sapiens
  misc_feature (54)..(54): n is a, c, g, or t
  misc_feature (57)..(57): n is a, c, g, or t
  misc_feature (62)..(62): n is a, c, g, or t
ccgcccctcacccaggcccaggcccaggccccgcccccacaagccgggctcacncgnctggnagaccccgccaagcgcctcggagcgcgcaggatgcgctgggcggccgccaccctccgtggcaaggcgaggccccgggggcgggccggggtcaccacgcctgccccagggaaccgcacaggcacgtgcgctaagctgcggctacccccgcaagcaaccttccaagtccttcgtggcaatggtgcttccgtggggaccgtgctcatgttccgctgcccctccaaccaccagatggtggggtctgggctcctcacctgcacctggaaggggagcatcgctgagtggtcttcagggtccccagtgtgcaaactggtgccaccacacgagacctttggcttcaaggtggccgtgatcgcctccattgtgagctgtgccatcatcctgctcatgtccatggccttcctcacctgctgcctcctcaagtgcgtgaagaagagcaagcggcggcgctccaacaggtcagcccagctgtggtcccagctgaaagatgaggacttggagacggtgcaggccgcataccttggcctcaagcacttcaacaaacccgtgagcgggcccagccaggcgcacgacaaccacagcttcaccacagaccatggtgagagcaccagcaagctggccagtgtgacccgcagcgtggacaaggaccctgggatccccagagctctaagcctcagtggctcctccagctcaccccaagcccaggtgatggtgcacatggcaaaccccagacagcccctgcctgcctctgggctggccacaggaatgccacaacagcccgcagcatatgccctagggtgaccacgcagtgaggctggtgcccatgctccacactgggaggccaggctgaccccaccagccagtcagctacaactccacatcaactccacatgcgcccagctcgagactgatgagtggaatcagcttccacccttcggtcgaaagatcctctaagtc

SEQ ID NO: 43174 - DNA, 776 bp, Homo sapiens
tacaggcatgagccacctgcccggccacctcaattttttttctgagtttcatgttacacagaacataccttttggtttgggagctagctacagggaagcacaggcttctctagagtggaatgtacaattcttatcaaggcaaaaagttaaagactacttgctttttaaaattagggagaatgaaaaatatccagcacttttccccagcccagttccctaatatctccttcctctccgggggcagagctgcagagctgtcattccttgctgtggcttcttgccctccctgggtgtgaaggtaatgaaacaagtgtgttgaagctgccagatcttctgccttggtaacttaggtgttcaggttccaaatctaaaaatgaaaggagaatctacacagatatatagtggaatcaaattctctttctgtctcatgaacaccatgagactctttggctttggcccttttattctacacagcaagaaaacccagaggaatggttagcaagcttgccatcaactatagtacaatacaacttgcatgttctacgattccttagtaaacaggactaagaatctcagaaattaatagagcacaaccaaggcagcagtagattaggactcagaaatgcgtcttcatctcccccatgtttttaaggtaaaaatattcagaggccaggtgtggtggtttgcatctgtagttccggctactcgggaggctgaggcaagaggattgcttgagtccaggagttccagaccagcctgggcaacataacaagacc

SEQ ID NO: 43175 - DNA, 349 bp, Homo sapiens
gtgattggtggggtttccagaaagactcacccagaaggtgctcctctttgggagttttggttcttcctcccttatgctgcctagaacacagatggaatggctgtattacagcagccatgttgtgacactgagatgactttgagaatggaagccaaggactaaaaatggtggaaaagaaagaagcagcctggggtgcctgacaatttgaaactactaagttatccctgtacctcccagctccagattcattttataagaaaaaaaccaacttctatcttaagtaagtgactgtgatttgagactgaagatattgtgagaaagactcttcaagccatttccaaatatgtcc

SEQ ID NO: 43176 - DNA, 575 bp, Homo sapiens
attccttcaaagatttgtgcaataagtatatatatatatatatatatatatatatatatatatatatctccccaaaacaaacctcagttagttttgctggtttttaagcttcctgtatagcaaattcctactgcatgtattttcccatgatgcacattatgtgtaggagttatctgtggtgtgggaggctgtcattcattcatttttactgctgaaggcttacatatcgttttaccacaatttcaccagtttcctattgatgtacatgtggccgattccagtttttgccataaatattagtgtgcatgtctcctgtgcacataggcaagaaagccccaaagcccccagagtggatgattaggaatgggttggttgcatgatacattgtatggactttaaccatactagataatgataatatgatttccaaagtaattgtggctacttaaacttttacaataaatgtgtaatacttgatgttgatgatgtgttctgaaaacactgagttgaaggaattgtgttaaaagtcaccgtcttggtggtagaattatagcaagcatttttattctgttaaa

SEQ ID NO: 43177 - DNA, 853 bp, Homo sapiens
tcgagacggagtcttgctctgttgcccaggctggagttcagccgagatcgtgccactgcaatccagcctgggcagcagaacgagactccatctcaaataaataaataaataaaatgaatttcagctagaagagccttattccattttcctttttattaaacatctggcataagttggtaagtatgtgaagtttatcatatattcttatgcgaattattattttcgccttttttttataattctgtctgggatttgaatagtagagtttgaattcaggaaggacacctgtgataggacaataaaatctagagctggacgtggccctcctgctacctgtcgacacaggtaaatttcctagaatctgttccctttatagatccatgttgaaattcacttatagcctcacttgcatgagatttgccaggcagaagtgaagaagacattagtcaggtattggaaccccaccatacagggagacagcctgcttcctgctcattttcctggttattttctctgccaatcaaaagtatcctgaaaacaccctgagctgcttgacttccattctcaaagagatgtgttggtttccacagttgtctccacaagctccgcatcaaagatccacgtacagtttggattttccttctagccttcatgtgtggcccaagcatctatttcagactgtcatggttggcattgttctctgaggttctgtcttccctttgtgtttctatgagctttaatttgtatggttcttgttctgttaatgccactagggactatgtattcctgattccaccatgacagctacagtaaaacagtaaaaaaaaaaaaacaactatatgggagtttgttc

SEQ ID NO: 43178 - DNA, 1804 bp, Homo sapiens
gtgtacagtaacatcctgggccttcgcattcactcaccactcaactgactcacccagagcaacttctagtcctgcaagctatgttcatggagtgtcctatgcaggtgcatccttttttatcttttatactgcatgtttactctgtgtattttctgtgtttagactcataaatacttaacattttgttacaatttcctacagtgttcagtacaacaacatgttgtatggtttatagcctagtagcaatagactgtaccatatagtctagatgtgttgtagctataccatctagatttgtgtaagttcactttgtgatgtttgtaccatgaggaaatcacctacaacacgtttctcagaacatatacccatgattaagcaatctctgcctgtaaaatgctccagaaaattcacaccatgatataaattcatcacacacgatataaaagttaaggcaaggcatggtggctcatgcctgtaatcccagcactttgggaggccaaggcaggcagatcacctgaggtcaggagttcgagaccagcctggccaagacggtgaaaccccatctctactaaaaatacaaaaattacctgagcgtggtggcatgcacctgtaattccagctacttgggaggctgaggcaggagaaatgcttgaacctggaagtcagaggttgcagtgagccaagatcacaccactgcactccagcctggacaacagaacgagactccatatcaaaaaaattaaattaaaatataataaatttcttgccgggcgcagtggctcacacctgtaatcccagcactttgggaggccgaggtgggcggatcacgaagtcaggagattgagaccatcctggctaatacagtgaaaccccgtctctactataaatacaaaaaattagctgggcatggtggcgggcgtctgtagtcccagctactcaggagtctgaggcaggagaatggtgtgaacccgggaggcggagcttgcagtgagccgagatcgtgccactgcaatccagcctgggcagcagaacgagactccatctcaaataaataaataaataaaatgaatttcagctagaagagccttattccattttcctttttattaaacatctggcataagttggtaagtatgtgaagtttatcatatattcttatgcgaattattattttcgccttttttttataattctgtctgggatttgaatagtagagtttgaattcaggaaggacacctgtgataggacaataaaatctagagctggacgtggccctcctgctacctgtcgacacaggtaaatttcctagaatctgttccctttatagatccatgttgaaattcacttatagcctcacttgcatgagatttgccaggcagaagtgaagaagacattagtcaggtattggaaccccaccatacagggagacagcctgcttcctgctcattttcctggttattttctctgccaatcaaaagtatcctgaaaacaccctgagctgcttgacttccattctcaaagagatgtgttggtttccacagttgtctccacaagctccgcatcaaagatccacgtacagtttggattttccttctagccttcatgtgtggcccaagcatctatttcagactgtcatggttggcattgttctctgaggttctgtcttccctttgtgtttctatgagctttaatttgtatggttcttgttctgttaatgccactagggactatgtattcctgattccaccatgacagctacagtaaaacagtaaaaaaaaaaaaacaactatatgggagtttgttc

SEQ ID NO: 43179 - DNA, 843 bp, Homo sapiens
ttgagacggagctgctcgctctgtcacccaggcgagatcgtgccactgcaatccagcctgggcagcagaacgagactccatctcaaataaataaataaataaaatgaatttcagctagaagagccttattccattttcctttttattaaacatctggcataagttggtaagtatgtgaagtttatcatatattcttatgcgaattattattttcgccttttttttataattctgtctgggatttgaatagtagagtttgaattcaggaaggacacctgtgataggacaataaaatctagagctggacgtggccctcctgctacctgtcgacacaggtaaatttcctagaatctgttccctttatagatccatgttgaaattcacttatagcctcacttgcatgagatttgccaggcagaagtgaagaagacattagtcaggtattggaaccccaccatacagggagacagcctgcttcctgctcattttcctggttattttctctgccaatcaaaagtatcctgaaaacaccctgagctgcttgacttccattctcaaagagatgtgttggtttccacagttgtctccacaagctccgcatcaaagatccacgtacagtttggattttccttctagccttcatgtgtggcccaagcatctatttcagactgtcatggttggcattgttctctgaggttctgtcttccctttgtgtttctatgagctttaatttgtatggttcttgttctgttaatgccactagggactatgtattcctgattccaccatgacagctacagtaaaacagtaaaaaaaaaaaaacaactatatgggagtttgttc

SEQ ID NO: 43180 - DNA, 1748 bp, Homo sapiens
gtgtacagtaacatcctgggccttcgcattcactcaccactcaactgactcacccagagcaacttctagtcctgcaagctatgttcatggagtgtcctatgcaggtgcatccttttttatcttttatactgcatgtttactctgtgtattttctgtgtttagactcataaatacttaacattttgttacaatttcctacagtgttcagtacaacaacatgttgtatggtttatagcctagtagcaatagactgtaccatatagtctagatgtgttgtagctataccatctagatttgtgtaagttcactttgtgatgtttgtaccatgaggaaatcacctacaacacgtttctcagaacatatacccatgattaagcaatctctgcctgtaaaatgctccagaaaattcacaccatgatataaattcatcacacacgatataaaagttaaggcaaggcatggtggctcatgcctgtaatcccagcactttgggaggccaaggcaggcagatcacctgaggtcaggagttcgagaccagcctggccaagacggtgaaaccccatctctactaaaaatacaaaaattacctgagcgtggtggcatgcacctgtaattccagctacttgggaggctgaggcaggagaaatgcttgaacctggaagtcagaggttgcagtgagccaagatcacaccactgcactccagcctggacaacagaacgagactccatatcaaaaaaattaaattaaaatataataaatttcttgccgggcgcagtggctcacacctgtaatcccagcactttgggaggccgaggtgggcggatcacgaagtcaggagattgagaccatcctggctaatacagtgaaaccccgtctctactataaatacaaaaaattagctgggcatggtggcgggcgtctgtagtcccagctactcaggagtctgaggcaggagaatggtgtgaacccgggaggcggagcttgcagtgagccgagatcgtgccactgcaatccagcctgggcagcagaacgagactccatctcaaataaataaataaataaaatgaatttcagctagaagagccttattccattttcctttttattaaacatctggcataagttggtaagtatgtgaagtttatcatatattcttatgcgaattattattttcgccttttttttataattctgtctgggatttgaatagtagagtttgaattcaggaaggacacctgtgataggacaataaaatctgttccctttatagatccatgttgaaattcacttatagcctcacttgcatgagatttgccaggcagaagtgaagaagacattagtcaggtattggaaccccaccatacagggagacagcctgcttcctgctcattttcctggttattttctctgccaatcaaaagtatcctgaaaacaccctgagctgcttgacttccattctcaaagagatgtgttggtttccacagttgtctccacaagctccgcatcaaagatccacgtacagtttggattttccttctagccttcatgtgtggcccaagcatctatttcagactgtcatggttggcattgttctctgaggttctgtcttccctttgtgtttctatgagctttaatttgtatggttcttgttctgttaatgccactagggactatgtattcctgattccaccatgacagctacagtaaaacagtaaaaaaaaaaaaacaactatatgggagtttgttc

SEQ ID NO: 43181 - DNA, 2033 bp, Homo sapiens
  misc_feature (1275)..(1275): n is a, c, g, or t
ttttacttcatgccaacatgagaaaagacaaatcacatttctttaggaaggaatcctaagtgcctagcaatttggacaggataaatggagtttgggagaagagttttgaagccaattgttacctaaaattgataaactcaataaacaagagggttgtgctagcccacagagatcttatggggattgactgagattataaattcatgagaaagtgatttttaacccacaaaaggctatacatatattagtatgttaggtacattcattacagttagcatacactaatcctgtctttaatttacaacttggccttctccattcaagaatttcttttttttctttttttttttttgctataatactattctttctttaaccagtagtttattgagaaaaactttaacatgtccaattttaaaaatattaaatactatggtaatgtgtcctagaatgtcctgtttgtcatctgtttctgtttactacctgctcagttccaacaggtatttaaatcagctagaacactgataaagcctattgcagctttctgagttacctgtagtgagtcaggacaggtagcagagagggaaggaataaatgtcacaaaaaatgactcattcaaaaccaattttggttttagctgcaggcagtgacataaatgcacagttgcttactactccagatttctgtttccttcttttaactctgaagttgatggcttatagtctatagcaaaaacaaaacaaaacaacaaaaaaactatgctgaacataaaacttatagtgggtaagtaaaacttaactataaagaaaataactttagaatagaggaatgttctagttagcttcaaatgcaagaatcagaaaaccccacattccagaagctcatacaagtagctttgtaatcactagggactcacgttccttctgtcttgacattttgccatttttagcatttgcttgcacctcttagtgtgagacttttgcttcagttccagctatccaatccctattccaaccagcagaaaggaggcacgagaaagaaacctccctgtcctttaagttacacatcccatccattgacatctgagtcatttcacagtttattcaatatttgctgagcatctgctatgtgcaagcactgttctaagccctaggcagttatctaagccctgttcttagtgaacagaaaggactctatgaacaaaaatcctcctgttggtggagcttatattttactagatgtgagaacaagtgtgggggaaggggcccactggcnagggttttaagccacatggtcatacttagcttcaagaccaagcagggaaatatagcctttagctgcattctgggaatccagttctaaggaaggaaaggaaagaatggatattgggggcaattggcagtctctgacaacatgaataaagtgtgaagaaaaataggtcaactggtatgttatgtcacttagcagtaaaaaacaactttgcaattacacctctagtctattcctaacagacatgtatgtgtatgcatgtatgtttagtgcatatctgagttcatttctgggtaccatggttggtagactgtgaggaggcatgtagtgagtgaacaagttgaggtattcctgaaaatctctttgtgctggggatagctgacctataaggggtattaggtccagagaagtccaagaagacagatgcttcttttaactgttaaggaagtgactgtaagaagaaaactgggcttgattcatgctgcctcagatgactgtgctagagttggtaggcaaaatttgagaggaggaagatttttcttttagtgcaaaagaactctgtagcagcaggaacactctcacctgttttgcatgctgcagaggaaattttcatcccaagtgaaaggcaaaggcaatctccaagaccctcctgtatgtaattccactaaataaatgccctgtcacgtagatgaagcttaggaaatgctgggctctttttcgttccttcccttgagggacttaatttgaatgcagaaactctgcca

SEQ ID NO: 43182 - DNA, 448 bp, Homo sapiens
cagaaattcctggaaaacccatgtggttttctttatgagcaatttaaggacacgttcttccaaagagagagatggacaatataaaacataatccacttttaaaaataaattctactctgtgaaaaagttccccctgagtggtgctcagtaaaccctttggtatcagtagtttgtcagctctagcacaattggagcttgtgtgggaagccatttcactcagtggtggttgctctgccaccaccaagaagccagagaacatgggctgtaactgaggagaaggataaccatgagagaagtaataagcagaccttagaaaatctttgaaatggtcctaggtaagatctcttatcctggaatcagattccccttcctccttatcattttgttggaggaacatttgagaaagaaatggattttcagttgactaggaaaatgtaaattgataaaa

SEQ ID NO: 43183 - DNA, 847 bp, Homo sapiens
gtactttatgttgtatcttttagcctaacctttaaatattggattcctaaggtcccttttatcattctgtattctcccttaagaaggtttttatcctctctcattcactgggttatctatttggtgtcacccccaggtaatatctagctcacactttcttcctgagttcaatacctcaaagtatgtttgtatacatgacttacctcatgtgggtgcttcataggtactggaaactcacatttgaaatagaagttatcttcctctcctctaaaatgtcttttaacactgcttctgacttccctgacctcagtatataacattgccattcatctgcctggtccctcaagtgaaaaaacacaaaaaccatcgtatgctcttcctttccctttgttcccctcccctcacatattataagcccctagttcctgctattattaatgtcattaagttctcctaaattcagccatgacccttcccttctgtctcttagctcaaggcttcttccggaacctcatagctgattgtcttcttttgggcattgcttttctcaagtcattttgtacactgcaactagagtgaactttttataaaaggcagcctgatcatctgtcctacttgaaagccccagtagcttcccatttgctcttgggatgaagtcctagtgaagggttatatgctcatctttagttcctctaaacagcttccctgaccctctgcatcttctctgatagatttggtgtgcctttttataagctcctttgtgcttcattacgtactggcatagttggttaaaagctttggttctgaagccagacagctaggtttaaatcctgactgctatttacta

SEQ ID NO: 43184 - DNA, 581 bp, Homo sapiens
tggtctcttggttctctgaggttattctgtgacatgggttcacttttattcttataaccaaatatcatctttaacacatcactagacaagacttgagatagtggtgttttaaccagagaatggttgctttctctttaagttcctaagtttccctaaagtagaagatactaaaggagtttcttttgtcataaatatacgtgatataaaatttaccattttattcacatttaagtgtgtagtttcagatgcattgcatacattcaaattgctgtgtaaccattgccactattcatctccaggacgctttcaacattccaaactgaaactctgttccattatgcaataattccctgttcccccctccttctggcgcctggtaaccacccattctattttctgcctctatgaagttgactattccaggtacctcatataaatagaatcatgctatatttgtgtttctgtgtctggcttatttcatacagtataatgtcttcagagtttaggttgtagcatgaatcagaatttttttcctttttattttattttattttattttttatttttgagacggagtctcg

SEQ ID NO: 43185 - DNA, 344 bp, Homo sapiens
tctgccctttaactgctgggctggtggaacatacttggatggggctgttccttgtttcctctttagtctcctgcctcattcaaggcaaccttcctgtgtctttgcttttttagggctgcctttggtgttacctattgcttctctgaaggttactccatgaattctgatatgtctgtaaaaaaaaaaaaaatccaaatgactttataaaaattgccgtcaataggtaatgtagtaatagtagtagttttgttttggataattgtttttgaaaaagagataatcaggtggggtgcagtgggtcacatctgtaatcctagcactttgggaggccgaggcaggtggat

SEQ ID NO: 43186 - DNA, 471 bp, Homo sapiens
aacatgatgaatccccgtctctactaaaaatactaacattagccgagcgtggtggtgcatgcctgtaatcccagctactcgggaggctgaggcaggagaatcactggaacctgggagatggaggctgcagtgagctgagatcacgccactgcacttcggcctgggcgacagagtgagactccatctcaaaaaaaaagagagaataactcagttttcgaaggaaccacagactcacatgtgaaaataaagagagtaaggcagaacccctgcctcacatcctgcatggtttggtactgcttagctttcataaggggcgtgcctttcctccgaaataatattgttcaggccagacatggtggctcacacctgtaaacccagcacttcgggaggccaaggaaggaggatcacttgaggccaagagttcaagaccagcctgggcaactgagcaagaccccatttctacaaaagtga

SEQ ID NO: 43187 - DNA, 262 bp, Homo sapiens
ggacatacaacctacacatgggaaaacattgttacaactaaagacacaaccacatgtacatgtgcaagtaaaactgtggacatctcagaaaagatcagagaattgcatcagtgtccatatcctgattgtggtagtgtactattattttgtaagatgtcattattgggagaaactgggtagagagtccatgagatctctttgtattatttcttacaaatacatgtacacctctaatcatctcaataaaaactttcagttcaag

SEQ ID NO: 43188 - DNA, 390 bp, Homo sapiens
caggctcgcctggtcatgtgtcctttactctcctctgagtctccctctttccaagccgcctgcactctacttgacacactctcccttaagacaccagagtacacaagcgcaagtccctgcacctcacctttactcccagacatgggagggagatgacatgaagacccaaacgccacttagcaggagatctggggtatgcagaggggcagatcggaggctgtggaagctccaggggctccctgcaggaggccgcatgtaagctggctattgaatgtggctctgagctgagacctctccttgaagctccagaccaggagccagctgctagctggacccctccatttggtgcctcagagaaaccttgcactccatagatctgactctgaaccc

SEQ ID NO: 43189 - DNA, 309 bp, Homo sapiens
atgggcacatggagaagggctcaataatcggctgctaaacggagtaatgagtagggacactgctctattctgtagctagggaaactgaggcagaggtgcgggaactaacccaagtatcccagccttggccgacacaccccaaccctatgcttcctaccatccttttcctggtgcaaaaggacaataagggagagcaggtgggtttgtttcccccccgacctttggttcctgcccttgggtccgtgaaaagaaaaactgcactttggttccgacactggcaggcagggctggcttgttctgactatagct

SEQ ID NO: 43190 - DNA, 380 bp, Homo sapiens
ttcctgtgaaaaatgaccaagtaggactctcacgttcctggcctggaaactgctaacttctaacaagatagataagctcttcagcacctagggcaggccctggctggacatgcaggacacagccccatgtgttgctctgagggctctagcttcttttctggtcgcaatcattttaagaaattaaagcattatttacatacattaaaatgcacagaccctaattgttcgatgttttgacagttgtatacacccatataaccaccatgcaaaacaagatataggacatttccacaatcccagaaagtcccttcacgtgcttcccctcccccccactctctggctgccgttcccatgtagttttgcctgttcttgaaatttat

SEQ ID NO: 43191 - DNA, 301 bp, Homo sapiens
gccttctatggcaagtgcacaccagtaacaagtttaggcttgttggtgtgatgggctttgtagcttgaaatcagtaggtgctacttacttccttttttacacatgaggaaccaagtatattttaatattaaacctctttatagaagaaccaagcaagttggtttggctgtatcaatgcacagtttaatgtgttgattatcgtttgcctctttggcagagaagaatttttttttctctttagttcatttaagttgatttgttgaatgtttccatctatacaaaaaaagaattgctttgtata

SEQ ID NO: 43192 - DNA, 407 bp, Homo sapiens
tgtaaaaataccttgggacggattaaatgtcttggcttagagaaagaacaacagacaataggaaactgtcattgaggagaagccgggattcaggagatgtacattattcaggtagctgagggaggggacaggaacctgaatcttcaacagaagcaaacaaactgggatggagggcccagcctcatgaaggtgaccagaaggacccggtgctgcaggctgtgtgggtagctgagcagagctaagcggcttgacggaccaacatctctccagctggttgaagacaagctctcagaagacaatgctgcatgtcacagccccagcaaccaacaacaccagcctgacaacttgctggggtggccgccttgtggtctgaggtggccgtctaaactatgtggtctgatctcagg

SEQ ID NO: 43193 - DNA, 391 bp, Homo sapiens
gaaaatgttttgcaaaaattgagttttttgttttgttttgttttttgagacagtctcgctctgtcacccaggctggaatgcgctagtgtgatttcactgcaacctttgcttcccaggctaaagcgatcctcccacctcagcctcctgagtagctgggattacaggcatgtgccactgtgcccagctaatttttgtatttttcgtagagatggggttgtaccatgttgccaagcctggtctcgaactcctgtgctcaagtgatctgcctgccttggccttccaaagtgctgggtaattacaggcaagagccacctcgcccagcaaaaatctagtttttaaaggcatcgttaatatactaatagtattcactattgtttgcttgttcttgtga

SEQ ID NO: 43194 - DNA, 413 bp, Homo sapiens
gagtgagaccctttttcaagaaaataaaaataaaaatgtattttccattaaaaaccagcttacattattttcaatgtttttacatttcttgctgtggagaaaagcctagtcccttctctagaattttaatcattcatctggatgccttgatatatgtggtatgatgcttagtaaaatggaatggatatttcttctatctccattagtttttctgtttgtttgtttttctttttacctgcctttatttctgttgttgttattcttcttccatccaccaagaacatgtggtcctcttatctctgggctgaggtgttttcacatgtccttttattctttcttcatctcacaaaaggtatatctaggctttttaaaggtgccaagatactatttaatgaacaatatgatatggattg

SEQ ID NO: 43195 - DNA, 267 bp, Homo sapiens
ttcttgcagagatgtcttgcctcctcaaggcccctaccaccatatttagcaaatcttgggttacttctcagcctggaaaagaccaagatgcatgcaggtcagtcccatggaatggatcatgggctgacttcaagattagaggactaaagaagcaggacctttgatcttttagggtttccagacatctctttctggcacttggaataaaacaaatttttcttatttaaaaaatattttttccaatttcaaagtaatacaatttgcttc

SEQ ID NO: 43196 - DNA, 431 bp, Homo sapiens
gggattgtttatttgctaaaagtgtggccctttcattcagcaagtctgcttctgcctactgaggaatggcctttcgacatccccatgtcaaaccctgcatattcaggcccatctttaaaatccatcctaggccaggtgaggtggctcatgcctgtaatcccagcattttgggaggccaaggcaggcggatcacctgaggtcaggagtccgagaccagcctggccaacatggtgaaactctgtctctactaaaaatacaaaaattagccgggcatggtggcgtgtgcctgtagtcccagcttcttagaaggctagacatgagcattgcttgaacccaggaggcagaggtttcagggagctgagattgtgccacggtaatccagcctgggcaacacagtgagactgtttcaaaaaagtaaataaataagtaaa

SEQ ID NO: 43197 - DNA, 139 bp, Homo sapiens
ttcactggtaagatgctcaagttcctggagacatgcaaaagctttccaagtggtcctctagaaaagcctctccttaaccttaggagagaggattctgcatctaccacattctgccttttttcactattattattattat

SEQ ID NO: 43198 - DNA, 2335 bp, Homo sapiens
  misc_feature (949)..(949): n is a, c, g, or t
tgcttgatttaaaaatttcagtcttgttaaatttatctcataggattctgacttcctcctctgttatcttgaatttcattgggcttgctcaaaacaggtattttgaattctctgaaaggtcaagtatctgtatcactctgggattgtcactggtgccttatttagtttatttggtgaggtcatgtttctcgggatggtctcgatgctttggatgtttgttgatgtccgagcattgaacggttagatatttgttgtggtcttcacagtcttggcttgtttgtacccatctttcttgagaaggctttctaggtattccaagtgtgttgtgtgttgtaatctaagtctttggttactgcagctgcatctgcattagggggcacctcaagccgagtaatgctgtgactcttggcagatgcgtggaagcactgtcttggtgatctggggtaagatccaagagaattccctgcattaccaggcagagactcttttccccttctcttgccttcctgcaaacaaatggagtctctctccatactgagctccctggatcctggggcaggggtgacacaagagcccatatggccaccaccactgggactgcactggatcagacctaaagccagggcaacactgggtcttgcctaaggcccacagtgaccactgcctggctattgctgatgttcacccaaggcccaggggctgttcagtcagcagttggtgaacccagccagacccatgtccttcccttcaaggcaataagcttttctccctgctggcccaaggtgggttcccttctggccctgggtgtgtctggaaatgtcatctgggagctagggcctggatgagtgcatcagggctctgcctggcaccctatcctactgtggctgagctggtgtacaagttgcaagacagtcttctttactcctcctcctcctctcctgtagcaganagaaggaatctctcccaaagctgcgagctgtactgcttggggttgggggaggggtggcacaagcactcccttagccaccctggctggtgtctcactaatttgtgtgcaccccaagtccactggctccaagggcagcgcagcaccagggctttcccaggagttgcactctttgtggcctagactgtctttcaagtttatttaagtttatcaagtttatttaagtgctctggcactttagccctcagtgatggggctagtttgaactcaggttctgactgctaggatgggacagtttccctctggctggggctggtctaaatgttccctccatgggcactggctgaattctgccccatgttgctttctgctgtgacaaggcagcagtgagttacaatgcaaagtctcacaattactgtgctctccctcccctaagcacacagattctctctcggtgtcacgaggctgctgctgggggacgggggtggggtggtgtaggcaattcaagactgtctttcctaccatcttcagtgcctttctccttgatacgctgttaaaaccaggcactgtgattgcttacctgatatttgttttttatgaaggggctttctcgtgtggatagctgttcaatttggcattcctgttggggggtggacagtgattgctggagggttttatttggtcgtcttgctccacctcatttcctgacatagaatttttggttggagatacttttcaactggaattttgaatgggctacttcattgattgtttatgttcattgcagctgttaagatatctgatgcctgtttatcttaatttgggtttcaccaaaagctatgcttagtagatgacgagctgagaaaaggacttgggtgcaagtaattcatttgggaattgacctcggaaattaggggcaggtaagacataaggatgagaaaagtcaataaggaaggatattattgaaaaagttactcctgtgggcaactgcactcagtcctgctgggaccctctcagagcccatgaaacacaccttagaattgtcccatgcaggatcaaggaaactgggatgtctgtctcccaattactgccctttgttgcttgagggttttacttggagaattacctccctggcactccagcccatcccatactcaggctgaacatgcttctctggccagagaagagattcaggcagagaaactcaggaacttgaggtagaaagacctcaaaccatatgagaactgtccaccaaagctgccatagaactttggcttgggctaagaagttacaaaccttatgtgcataacattagtagcaacaaaaaaaagcactgacatctcagatcagaaacaaaggtagagacattctgcagagtagttgaacacc

SEQ ID NO: 43199 - DNA, 1104 bp, Homo sapiens
aacgcacaccttactggattctccatatatatttacattaccagagaacagtggccctagggatgtttaagcactgcttataatggaaaaagtcagcttgagaagtaaacgtatatcagactacaggtaattcctcatcttgaagccatgcaacacctgcaaatctggatttatacaaaagttgctaatgtgtttcataaagatttagcatgagtaacagactcttggtgcatttaaaatatgtgagttccagaaagtagatttgcatacaccttttcaacagcacatttcactggaatggatgaggggcttctgaagaccactccactacctgaatttatttggatcactgaggaagagcatttgttgggattacagaattataggccattagacatcatgggtaggtagtcttaagatccttcaactttcaaaaaccacagtctaaggactatattcaaatgacaagagccgcactgtatactgctttctgcagtgaccatgctgggtcacgcatcctatgtttctcatttttaaatgatttggaacattttagccagcattttgatcacacagattaataatgctgttctccccaaaacgggaaactttacctgaaacgctctcctgaacaaacaccagtgcactgccagcctcacatgattgcatgggagctttaattaacgctggagcccagcaaccttggcttttcctgcctgttatctgctactgtcacaccgtgaatggtatttgaatctcacctccctctcacctcagtaagagtatgtttgtttacagccccaacctcagcaatgccaaaggctggcatcgggggcagtgccaagctgtccctggatactatttacctttgaggaagaacagcatgggtttgccaagctcaattcccaggctggtgctccttgaattaatcatggcacagtgttcatctctctggaaatgcccacgccagcccagacacagctcagagtcctttccaacacgaccctccaggcagcagttaccaaccatcagtcttcagctgaagcttcaagtctttgccatccttgtaatgacagccttaggccttgccccaagcattctgga

SEQ ID NO: 43200 - DNA, 559 bp, Homo sapiens
tttttttgactcctaggagatttgggcatgtggagaataatgggacaggagatgacggtaatgaattaaaacagaatggaatggaatggaaagcctagcgcagggcttggtttggaaggagacggtccagtattatagcaggaaaaaggaagactctcatctttgcctcggtgacaaagctatgtatgacattactcaaaatctcaaggatgcacctccaacaaaacaattcttacatggaatcctagagtctttggaacgtggtttgaacaccaccagctttgagaaggaagagaaaatccagaagtcagaagtggaccatgttgatcaggatcctacaccttccaggcttgagagctctccaaagacagatcatacttttctaagcactccgtatattggacataaagaaatgctgaaggtaatcagagattaaattaagattatttttaaaactcacaggcaagctttcaactataaacttcaaatttgtgagcttttacactttcttgagtgacttcaatttgcaaagttgtttaatctcattatacacataaaa

SEQ ID NO: 43201 - DNA, 564 bp, Homo sapiens
aattctctggatctcgtctttggataccctgggaaaaagtcttgtctcttcttaggcccttctgactaaaagcagccaggacttttaaactgactaatttttaaagatttccaaatagagaaaattaaagcaaaaatttttgaaagctgaaaatgatctttccaacttttctcattcagagtagaacactggagcattgaaagtttgttcatgtttgtgattgatcacatatttaaaaaattgtaaaataaagaccttattttaatgttaaaagttcacttcaacaccatcatttctacgaggttctaggtcttttgtgaacaaattaaatatagtgctttctttataacatgaattaaatctagatcccaatgatatttggcaccttctaaatacccagatggccactgcgtttgccttgaagtgaagacgtgtgtagagttttaatcacatgttttattttttctcttttaaatatcgccttttcaatagttgcttgttaatgaatgactgattgtttactgcagtttataatcaggaatttgaacattaaaaaattctaat

SEQ ID NO: 43202 - DNA, 433 bp, Homo sapiens
ttcattcaacaaatatttgaatatatatatatatatatattcaatatatatctctcatatattaaatatgttaatataatattcaaatatatatatatctaaatatacaaatatttttgacagggtttcctgtcacccaggctagataacaaatatatatatatgtgtatatatatgtgcgtgtatatatatatacacatatacacacacacgttaacatatatatatatacatatgtacatatatatttgttgaatgaaaatagacttggaatagggagaaatcttgagtgtgactggagaaaggaaagggaaaaaaatacctttgtaaaggggaaaggaagagagaaagagaatttgggcagctggtagagggaaaagggtatttgcgggggtaaagtattttcaagaaatctttaagaatgttttgctgg

SEQ ID NO: 43203 - DNA, 268 bp, Homo sapiens
tttgtctggtttgtttccagttttataccgtgtgcagttgcagctgctgtgtatttatttgtacatattagcttttttctttgaaattattttcttgtagtgtattcccaaaagtgggattattgggccaaacagttccatagctcttgttacattattgtctgatctttctcaacaaagaaagaaagaaaggaacaccataagaagccatcacatatgggcatgcttatttcctgaaagtcctgccagtattgtgctttattcttta

SEQ ID NO: 43204 - DNA, 388 bp, Homo sapiens
tggaaggcaggagctgtgcatacttcttcccaaaggagtgcaaaattttttcttttcttttctttcttttcttactttctttttttctcttttttgagatggagcaagaccccgtctcaaaaaataaacaaataaataaaataatggacctctagctgggccctctccaggtgccctggcttcatacccggagtctctggcagacagacatgactcttccatggagaaaccaagagaataataactggccccgagtttatccagtcagtaagccgactgccagagacagtcctcgttctgaagggaagtaaagaggaatgcagaaaggaatgaattctgctcacttgtgaaccctcctaactcttcacaaaaaattgcttacaacttc

SEQ ID NO: 43205 - DNA, 415 bp, Homo sapiens
agatggggttttagcatgttggccaggctggtctcgaactcctgatctcaagtgatctgcctgcctcggcctcccaaagtgctgggattacaggcgtgagccaccgtgaccggcctgatctggatttcttgataacttgttgccaagcctggtggtgggtgctcagcatttcctaccagcccattcacagaagagcaaactgaggcctggggaaagggtcttctgtgctgagggctgccctgagggtcagagggaaggccaggcctgagcgtaggtccgcgtgaccctggagaggccccttgcctgaagcctcagtcacctgtgacatggtagaggctgggaggtggagtgtggtcacacagttggcggagcggggacgtcccctgtggtgtcaggggacgtctgtacagagggc

SEQ ID NO: 43206 - DNA, 708 bp, Homo sapiens
tttcacatgaaaatagatgtcttcccaattcccttggccttcacttggtattaacaaaatttacaatggcactgggacctaatgctttattaaagtctatctacatcagggaaaatagggctggtcacactccaagtcatgtgaaacacctcccaagacaatgtggattcatttaacacccttacttggtgcttataagtgcctccccaaaatcattcatcagtgctctcatatgtagagcttgaaaacagtagagtggctatacctttgtattttcctagacggagagtccctagggctgattatttactgtcatcctttctttctctccttaatggtgttcctaggtcaaaggggcaaacaaaggctgtttttgaatcattgcaggtataaaaccagaaattcacattttacgagacatttgattttaaagaaacaagctggtaataaccatgaggaatacttgacacagaagggaggccttcccacaagacagctcaatgccacctcgaggtctcagagctggcagaggttccagagtcactgcatcttacaatccaccaagatgctggtaatgagaccaacaccaactggaaggcatggtggtaaatgagctgactgagaaagcaaaaaggatactgatgataccatgcaaatgagttgctgacagctggtttctaagttacacgtgaaaactatttcagagat

SEQ ID NO: 43207 - DNA, 307 bp, Homo sapiens
gctaagttctggggtagttcgttacatggcagcgggtaactaacacaaggagctttagactttatgataatactggggtgggaggcctcaggttgaccagtaggcagaccctccttgctgtgtctctgcattctcgcccttgccctataccagggagaggaagtttcttcctgaacctagctggaagtggggtctttgtgtcctacctcagggcctacgatagatgggtggttaatattaaaagaaaaaaagttttgctataggtttaatgagctttaggtaatgagctacagaaccagaagaggca

SEQ ID NO: 43208 - DNA, 392 bp, Homo sapiens
aatgcagaaggcctttcagaagttctcactggcctgcaaggtagaggctgttttctgctgaggatacatttgccccctctatcccccagatcggcggctgctcaaggagcctggtacagctgcacggaggcgcagcacccacaggacaagtggtggaatgttctggttgtccttggtgcaggtggcgggcggggctggggggctctgtagccttcctggcttcggtcccctggacaggctccacctccctcttatcgtggcccctttggcaggctgcctgccacctcaaagtcacgctgccctgggcaccctgcctcttccggggactggggctggggctggggcagctgtgtttatgggtgtactccctgtgctgggcactgcgctgagct

SEQ ID NO: 43209 - DNA, 409 bp, Homo sapiens
acaggcatttgctgaaggtaaactaacagtcaggctgcagtaatattaaaaatcttggccaggcactgtggctcacacctgtagttccagcactttgggaggctgaggcaggcggattgcttgagcctagaagtttgagaccagcctggccaaaatggtgaaaccctgtctctactaaaaataaagaaattggtgggacatggtggtacaggcctgtagtgccagttacttgggaggctgaggtgggaggatcactggatcctgggagatggacgttgcagtaagctatgattgtgccactgcgctctatgtagcctgggtgacatagtgagattttgtcttaaattttttttaatctttgtattaatcatgtgttcatactaaggggcattatttgagagtcttattt

SEQ ID NO: 43210 - DNA, 577 bp, Homo sapiens
agaggctttgctaattcattgcaaccacatacttggcactaactttaaaaaaaataaaaatagagatggaggttttgctatgttgctcagagtggtctcaactcctggcttcaactgatcctctgccttgcccccacaaagtgctgggattacaggtgtgagcaccgtgcctggttgacacgacttttaaggagtatttccttgatagagataaagggaatgaaatctttagtcaaattttcataagacttagcctaaaactatttggaagatcttagagtcttatcaacttagggaggacttgggcttggggccattttctttttgaaatctccactcttctatactgataagaattttgctgagtgagaatcacaactgcctttcagaatggtgccagaattttgaatttcagacatggttaaatattaaagtaatttctataggtttgctaatgtaaaaattttgttagtaggcatattaaaaagaaacagaaaccaaccagtatgctatatactgtcaccagattacttcataaaagaaataacattttaacactgaaaggagaaaagactta

SEQ ID NO: 43211 - DNA, 477 bp, Homo sapiens
aaacatttgaattagaacagcttgttctgagtgacagtctaatatacgtaggagaaattttagaaaggaaagagatttagggattaaaatttttgcatcagggcaagctagtttttgaaggcattaaggggtggaattatcagaaggaaagaggaaagtaattagaacgaaagaaatgttagagctggaacaggttgccctcctgttggcaggtgtccacctgcagaaccagtctcacctttctttgctacaaaggggagtcagtcctacatgactataaggttgctggccacgaggcactgttttgctctttatcctttttttctaattcctgatctggcctatattaccatcttacatcactctagctctgaaatgtttggcatgcctactttattttcttctaatctctgtaccctccctgaggtcatccatgattttcagctaagaggacaattttgcagctatttctataaa

SEQ ID NO: 43212 - DNA, 390 bp, Homo sapiens
aaatacagtatgcgtaagaatgacctcagcaacttcaggacagtgactatttctgggtaagggagaatgaaaaggaacttgaacttgagttacatataacatcttttttctttcttttaaagatatttaaagcaaacaagacaaaacatgaacatatgttaaatctgggtagcagagtggggtagtagacttgtatttttgtaatccatccctctcttcctttaaaaagaagtatcatggtgttaaagccaagacattacatctccatggaccagcaatggaacagaaacacagaagttattgatggggccaaagcagcagaactactgaactctggggataggaaacagagaaatatttgggaaatggactcatatgagagtaatgggg

SEQ ID NO: 43213 - DNA, 939 bp, Homo sapiens
aggtgtgagccaccatgcctggcctggtttttctttctattctacttgtgcaagctgggaaatcgtaagaaaacgtatgtaatccatcaacaaggacactgttgggactgagtaagggataaagcaagattcacaacatgaaaagaggaatatagcctgtacacagtatcttcccatatcccagtttgtacaaaagtcaatagagaaaaagctttcaaaattggccctctttaatgcaaccttttgtctcttatacaagcttttccccctttattttcattcccactgacacctccatagcctagtctccctgcctccaaccatagtaaatactacagacctcaattttgccaaataaatcttcacaaaataccatttaatcctatcagccaataggtctcaaggttattcaaaataagaggcttgactcttctcaaattttcaaaacttttgcctattaccaggctcacacaaatcctctaaaattaaactccaccccctgaagtccattcctgcctctgcaccttggcatattctgaataactaactaacttccctccttctatctgccttaataattattctacatacctctcattcagtactagactgctttgaggtattgtttgaactgttttatttatttatttatttatgtatttatttttgagacacggtcacactctgttgcccagactagagtgcagtgacatatcagtgacatgatatcagtgcagcgacatgagctcactgcagtctcaacctcctgggcttaagcgacccttgcacttcagctgggacaataggcgcacaccaccatcatgcctggctgatttttatgaggcttttttgtagagacagtgtttcaccatgctgccgaggctggttaaatctttacgtgggtaagaactttcttctcagagggcagaaaacatgggt

SEQ ID NO: 43214 - DNA, 541 bp, Homo sapiens
aaataactcaaacttgtgctgtctgtaaaacttcttcaaataaatacattaaaatattgcatcagtgcctagaaaaatatcaaagtgaataaatctgttggcaccaactagattagtgattacgtgtaatactagaaaagatgccacatgcttgacatgtgccctacacatacaatggttgaacaatgtagccctaccagagcaataaagctgtgtgtaatggggaaatatttcatactgcatcaatttcaaaatttaaatataattaaaatgaaacaaaatttaaaatttagtttctcagtctctctagccactttcagttgctcagaaacatgcagctggtggcaccatattggggtatagagacagtctgtcaaaagacagggtgaggagccaggcgaggtggctcatgcctgtagcaacagctacttgggaggctgaggtggagaatcactggaccctaaaagctggaggctgcactgagctatgatagtgccactgcactctagcctgggtgacagagtgagaccccgtctagggg

SEQ ID NO: 43215 - DNA, 463 bp, Homo sapiens
ggtttttgattggcagaaggcttgcacggccctacatgatcttttactgtcatgcattgcaaaaatcgtaattgaaaaggcaaaaggcagtagcattattacaggaatttaaaagacatcacaggcacctgctaatcccgccaccctaacacagccactattttcactggagtaataaggtcttcacttaaaatctccccattagtgaaatgcatatgctctgaaggaaaatgaaatgtacatgcagccgagcagaaagtactcaggtcccgcgtggcccctgccccccaccaagcagcacttccctacggccctggaaaatggggattgcgtttggggaggaagctgggaggcctccagggccttccaaactgaaggatgattgaacagtggtccacgctgtcccttagccgaggctaaatgtaggattcaatctttcacagaagggttttccatgaggttg

SEQ ID NO: 43216 - DNA, 466 bp, Homo sapiens
  misc_feature (1)..(1): n is a, c, g, or t
ntttttttttcagttgcagcagtcatttattattattaatgttattattagtattatttctttttagagacagggacttgctctgtctcttaagctggagtacagtggtgcaatcatggctcactgcagtcttgaactcctgggatcaaacaattcttccagatcaccttctgaattagatgggactacaggtgccaatcaccatgcaaggttgattttgtacattttcttatatacatggggacgtctcactgcattgctcaggctgatcttgaattcctgacatcaatagtcctccaacctcagcctccaaaagtagtgggattacagtcatgagccagcatgctaggtgtatagtcactctttctacctctgcctcattttcctgcattccgtaaatccccagtcagaagacagcagggccgcctggctacggggatagcatccaagaaacaaatgttaaact

SEQ ID NO: 43217 - DNA, 1368 bp, Homo sapiens
gcacccagaagctccagaggggcccaggctgcagcctgccacacctcccaccactcagcaggctccaggcctgggggccacctaggaggacaagctgtggggaccccaaactgtgtcccagtagagggtcccggctgcaccaaagaggaagacgttcttgcatcctcagcctgtgtcagcacagacggcggcagcctccattgccacaaccccagcgggccttccgatgtgcctgcccggcagccacaccccgagcaagaagggtggccacccggcacaggagacttccccagccaggtgcccaagcaggtgctggacgtcagtcaggagctgctgcagtccggggtcgtcaccctcccagggacccgagaccgtcatggcagagcagtggtgcaggtccgcaccaggagcctgctctggaccagggaacactcgtcctgtgctgagctgacccgcctgctgctgtacttccatagcatccccaggaaagaggtccgggacctggggctggttgtcctggtggatgcacgcaggagtccagctgcccctgccgtctcccaggccctctcaggattgcagaacaacacatctcctataattcatagtatcttgctgttggtagataaagaatctgcatttaggcctgacaaggatgcaataattcagtgtgaggtcgtgagctccctgaaggccgtgcacaaatttgttgacagctgccagctgaccgcagacctcgacggctcctttccctacagccatggtgactggatctgcttccgtcagaggctggaacacttcgctgcaaactgtgaagaagccatcattttcctacagaattcattctgctccctgaacacccacagaaccccaagaacagcccaggaagtcgccgagttaattgaccagcatgagacgatgatgaagcttgtcctggaagacccactgcttgtgtctctcaggctggaggggggcaccgtcctggcgcggctgaggagagaagagcttggcacagaagacagccgggacaccctggaggccgccacaagcctgtacgaccgagtggatgaggaggtgcacaggctggtcctcacctcgaacaatcgtctccagcagctggagcacctccgggagctggcgtcactcctggaagggaatgaccaggtcagagctgcaggaggaaggcggcccggtcagcatcccctccaggccaggctggccaaggcaaccctctcaccttcacactgtgtctttagggccttgatctgatttccatttggaatgaaattatgtcaggatagggcatgccttgctgcttgtgtaaaaagaaataaattttattttttacgtgagagatactggatcagtgga

SEQ ID NO: 43218 - DNA, 894 bp, Homo sapiens
gcacccagaagctccagaggggcccaggctgcagcctgccacacctcccaccactcagcaggctccaggcctgggggccacctaggaggacaagctgtggggaccccaaactgtgtcccagtagagggtcccggctgcaccaaagaggaagacgttcttgcatcctcagcctgtgtcagcacagacggcggcagcctccattgccacaaccccagcgggccttccgatgtgcctgcccggcagccacaccccgagcaagaagggtggccacccggcacaggagacttccccagccaggtgcccaagcaggtgctggacgtcagtcaggagctgctgcagtccggggtcgtcaccctcccagggacccgagaccgtcatggcagagcagtggtgcaggtccgcaccaggagcctgctctggaccagggaacactcgtcctgtgctgagctgacccgcctgctgctgtacttccatagcatccccaggaaagaggtccgggacctggggctggttgtcctggtggatgcacgcaggagtccagctgcccctgccgtctcccaggccctctcaggattgcaggtacggcaaggttgtcatatcccttgggtgtgcagagcatcgtagggccgtgtgttgctggggctgcccacatcgtggttctggagtagccagtccacaggcttagtgtgaagattcgagatgggggcccctgtgcagagccacctccttcttggggtcttcccagtgagtccagctcttgctctctggggccaggcacagacactggggaaggtgggcttggcccatccgctggggacttggggaagcttcatgctcagggcaactgcaaacctaaaatgcaaagccagccaggcccgggtggtgggcacctgt

SEQ ID NO: 43219 - DNA, 514 bp, Homo sapiens
cattttctttctttcttcttttctttctattccctccttttccttttcttttttcttttctttccttttcttcctttttgcctaattgctctatctagaaattccaagactacgtggtatggaagtggtgaaagtgggcattcttgtcttgttcctgatcttcgaggaaaaagtttgtcttgcatcattgagtatgatttaactatggggttttcatatatggctatcatattgtggtagttttcttctatttctagtttgctgcattttttttttaatcatgaaagcgtgttgaactttttcaaaagctttttgtgcattgactaagatgatcatgtggtttttgtctgtcattcagttactgttgtgcattacacttaccgattctgggattgattttaaagcattcattcctccaaacacactcccagggttaggtctcttacctctgcatgtatttaggaaaaagacataatatgaccaacttcccaactattaaaccatgtttaggata

SEQ ID NO: 43220 - DNA, 230 bp, Homo sapiens
attgccatccctacaccagggtgccaactcccaagtgggctgacaggaagggagattggaaacagctttatagtagatttgatgctgttataagacacgttgtaagacatcaggtaaatatagcacatcagattttattaatcataagaattctttaaaagccttcagcagagccgagatcatgccactgcactccagcccgggtgacagagcaagactccatctcaaaa

SEQ ID NO: 43221 - DNA, 462 bp, Homo sapiens
gtgatcaagctagtatctgaagccagcaagtctcagaggtttacccaagacccttgatgtgttacctgggtattgctgctggcttttcagggcctaagagctcttcagttagcagatgatgaatactgccagcacttgttcctttccttcaagacagcaggctctcttctggtccagggtgtgtctgggagctagggcttggaacaggggcctcttgactctgttcagcggcctaccctgccatggctgggctagtatccaagaagtaggacaaagttctccccactctcccttctcctctcctcaagtggaaggaagtggtctcttttgaagcttcaagctgtacagtttggggctaggggaagggtgatgccagcactcccttggcttccccagctggtatctcagtatgttgtgtgctgcaccccaaatacccctacagtacactgtttctgggcctaa

SEQ ID NO: 43222 - DNA, 251 bp, Homo sapiens
tgaatatttgtattattacaagttaaatgtggattgttatataattatagaatgttaagaatggaagagctttacaaattatctagtcccaccctaaaattaatgtaaatagttagataatatttttatatgactcaaaaatgtttaaaaagatatacattgaaaaaaatctcactcccatcccatgtctttctactccattccctttccggttctctatagacagtcacttttattagtttcttatgtat

SEQ ID NO: 43223 - DNA, 357 bp, Homo sapiens
gctcacggaaggtgttccctgcacataagggcactacaatgtgaaactttttcctggaaatcaagaacaagattgtatgtgatgaccaatattatttttctcctatcggaagaaggaaagttatctgctgctcataatttcttctatgcctagaagattctgtgagaatttaaactattaaatgaatagcccagtaaaatggctgaatataagactaatatacaaaactgaagagtctttctatattagagctataatcaattaggaaaaatactaatggggaaaatcccattcacaattgtaaccaaaggataaataattaactttgtcccatacccctatttaaaaaaatttatt

SEQ ID NO: 43224 - DNA, 446 bp, Homo sapiens
acctatagatcactcacttagatcttcacagtttggtctattttaggtggtccaatgtttcatctgaatttcagtctccaccatttgcatagcatgaaagatgtactagtatgtttgcttgttatgggcttgtgcacattatctgttgtcctggtagttcaagtttatgagcgcaccctccagatggtctggaccctgagcatcttgacacacttatgaagttgatgaagagcatgtggggctggggaaggaacgtgatgcatcccttttaaccatttcttggctcctagggttcgttggccctagcagtatccagcatgtgcctgctctgtgcttaaaattttaagttataaaacatttaactgtttgctactagttccctcccaatgggttgacattatctgggatgttgtctgtaaaatattttaagctatttaaaggaaaaa

SEQ ID NO: 43225 - DNA, 529 bp, Homo sapiens
ggtcaaagggttttttttttaaaaaattgttttttgaaacagggtctcactgtcatccaggctggatggcccattgagtacccagcacaataaatgagtagtgttccatcaaagcacaacaccatgaaatttcagaacaccaggacaaagaaaaagcactataagattccagtgagggcagtgaggtacactgcctataaggtagccctgctccacaaggatcagtattaaaaaaaacaaaaaaaaaagatttcagtgaaataaaaccaggttacattcagagggctagggatcagaataactttgggcttctcaacagtacctctggaagctagaagataatagagcaaggccttcaaagtttgaaggaaacgtatttctattctagaattacgtatacctagctgaactatcaaataggaaagtagaatacattttcagacactcaagatgttaaaatgttttacctgccatgtatccttttccaggaatctacaaaggataacctccaccaaaatgaaatagttga

SEQ ID NO: 43226 - DNA, 398 bp, Homo sapiens
gatataagaaatttccttccttttacagctgcctgagttgatttaagtctcgatatgggcttccttttttctctcctccctcccatctaataacccttatcctgaatcagcacagttcttagaactggctaaagtggaagaatggccaggaacagctttcacatttataattcttacgatacacttgcgagcccctaacaaacaccgtcttccattcaagcatacttttactgtgtgctcatagtttgtatctaatatacaaatcttatgcactaatacgacatctgctacgtggtcacaaggaaagcatagaagatattctaaccactagcaagaacagatctgtaccctccacccccaaatccatcagacacaaaccttcaaacatcacccaaaag

SEQ ID NO: 43227 - DNA, 414 bp, Homo sapiens
tgtgaagggtgaagtggtttcccggggtccaggacctgttcctgaagaggagacttccagccaggaagtggagtgtgtgcagctcctcacccacgcccgcccttttacctttattgaaaatgagtggcatgttcaatgtgggtcccgtcatgaagggcttactctctttcaccaaggtgtgcacgtatcttaataaatgatttaaaacatatggaaaattatagaggataatataatgaattagcctgtacccaagacctggccacatattgatatcttccagtaacagtttcaaaattgtttaagaaagaaaactttgcaggctgggcgcagtgactcatgcctgtaatccaagcactttgggaggccgaggtgggcggatcacaaggtcaggagatcgagaccaccctggct

SEQ ID NO: 43228 - DNA, 607 bp, Homo sapiens
aaaagtaagagtgcatgtcaaaggacataggcactgacatgaaagaacccccaatgaccaaagctgcaaaattggagcaacccaattaataactatagttatttatttaacccatagaataaaatagatatatgcgaacccatactgttatagataggtagataggtagatagatagatagatagatagatagatagatagataggagtcaaggatcagctcttccttccagaagaattataattaataaatgaattatagaaggaataaaagaaattgaacaccatcatcaaaacactatgttaatggctgggcatggtggcacatgcctctaatcccagtactttgagaggctgaggtgggtgaatcactcgagcttgagagatcaagaccagcctgggcaacatagcaaaatctcatctctacctacaagaaatacacaaattatctgggtgtggtggtgcatgcctgtagtcctagctactcaggaggctgaggtgggaggactgctagagtccgggaggtcaaggttgtagtgagtggagatcacgtcactgaactccagcctagatgacagagtaagagcttatcttaaaaaaaagaaaaa

SEQ ID NO: 43229 - DNA, 339 bp, Homo sapiens
tttctctctgtataaatattttaaacatttatgagagctacaaatcatatagcttttcttgtgtatttatacccaaattcactgtggctttgcctatgaaccagcccctacaagagaaaaaattaaagggggttgcagagatttctctttgaaagataagcagaatctttagaacttacaaagtcaaaaggctatacagtttctttattcattccaaactgacctcccatcatttcaaataaataaaatgctctatttactccatgaactgactcatgtcaggctctcggcaaaggttccagtaaaactcaagactcaagggactgtgtcctcaaaagg

SEQ ID NO: 43230 - DNA, 1982 bp, Homo sapiens
gtaaagtctgagcaggacagggtggctgactggcagatccagaggttcccttggcagtccacgccaggccttcaccatggatcagttccctgaatcagtgacagaaaactttgagtacgatgatttggctgaggcctgttatattggggacatcgtggtctttgggactgtgttcctgtccatattctactccgtcatctttgccattggcctggtgggaaatttgttggtagtgtttgccctcaccaacagcaagaagcccaagagtgtcaccgacatttacctcctgaacctggccttgtctgatctgctgtttgtagccactttgcccttctggactcactatttgataaatgaaaagggcctccacaatgccatgtgcaaattcactaccgccttcttcttcatcggcttttttggaagcatattcttcatcaccgtcatcagcattgataggtacctggccatcgtcctggccgccaactccatgaacaaccggaccgtgcagcatggcgtcaccatcagcctaggcgtctgggcagcagccattttggtggcagcaccccagttcatgttcacaaagcagaaagaaaatgaatgccttggtgactaccccgaggtccttcaggaaatctggcccgtgctccgcaatgtggaaacaaattttcttggcttcctactccccctgctcattatgagttattgctacttcagaatcatccagacgctgttttcctgcaagaaccacaagaaagccaaagccattaaactgatccttctggtggtcatcgtgtttttcctcttctggacaccctacaacgttatgattttcctggagacgcttaagctctatgacttctttcccagttgtgacatgaggaaggatctgaggctggccctcagtgtgactgagacggttgcatttagccattgttgcctgaatcctctcatctatgcatttgctggggagaagttcagaagatacctttaccacctgtatgggaaatgcctggctgtcctgtgtgggcgctcagtccacgttgatttctcctcatctgaatcacaaaggagcaggcatggaagtgttctgagcagcaattttacttaccacacgagtgatggagatgcattgctccttctctgaagggaatcccaaagccttgtgtctacagagaacctggagttcctgaacctgatgctgactagtgaggaaagatttttgttgttatttcttacaggcacaaaatgatggacccaatgcacacaaaacaaccctagagtgttgttgagaattgtgctcaaaatttgaagaatgaacaaattgaactctttgaatgacaaagagtagacatttctcttactgcaaatgtcatcagaactttttggtttgcagatgacaaaaattcaactcagactagtttagttaaatgagggtggtgaatattgttcatattgtggcacaagcaaaaagggtgtctgagccctcaaagtgaggggaaaccagggcctgagccaagctagaattccctctctctgactctcaaatcttttagtcattatagatcccccagactttacatgacacagctttatcaccagagagggactgacacccatgtttctctggccccaagggcaaaattcccagggaagtgctctgataggccaagtttgtatcaggtgcccatccctggaaggtgctgttatccatggggaagggatatataagatggaagcttccagtccaatctcatggagaagcagaaatacatatttccaagaagttggatgggtgggtactattctgattacacaaaacaaatgccacacatcacccttaccatgtgcctgatccagcttctcccctgattacaccagcctcgtcttcattaagccctcttccatcatgtccccaaacctggcaagggcttccccactgcctactgcatcgagttcaaaactcaaatggttgggtttttcat

SEQ ID NO: 43231 - DNA, 593 bp, Homo sapiens
ggaaatactcgtctctggtaaagtctgagcaggacagggtggctgactggcagatccagaggttcccttggcagtccacgccaggtaggtgcacaggactagttgggtacctgtgggtggggtggagcagtggacagctaataggttaataatgcctgtttgcttacgtgcagacaatggaaaccattttcctggggatgttgtagcctaaatatgtccaaggggatggaagagtgggaggcaaggggtgatcagatcatttataatacactcaacctggtggaatagtattagaagcattagtaattacgttttagagacatggagaaaagctcatgattttaaactaactgaaaaaagcatgaaaaattgcatctggatgctgttgaggaattattgctaattttttgagatgagaaattgtattaaagtctttttcaaaaaagagtccttaacttttagagacgcacacaagtgtttatgggtgaaattaaataattcagtagagacattaagtgggaaatagaggaaatattgaccatgggttgctaatagttgaagccaggtgttgggtataaggaggttctcgctgc

SEQ ID NO: 43232 - DNA, 161 bp, Homo sapiens
atacctgaaggccagagattctctattattgaaccaggaaagtttgcatgcacactggataccaacatgttaaagcagcagggcatgtttggccatgaagttgaagagtttggcttacaggtgcattgtaatggaatcccttctctacttccacatggagc

SEQ ID NO: 43233 - DNA, 4171 bp, Homo sapiens
cttagactttttctagaatattattggccaagtgatttcaggttctctgtggactggtgggggaaggggtgaggagactattggtagaaactgtattatacgaaatccaattgttctttatgaaacccaaataggattcctcagaccctggcactaaagaaaaaatatataccctgagacttttccaaaaccttaaatttgaaaatcctactagcatgtgattacgatgcccccctaaaacacagtatattattatatttttaggagagtcactacttaccataaactgaaaaattttaagaattaacatagacatgaagcctcaaagtaaatcaacgtattactattcatcttggattctcaaaccccctgccctttgatgcgaaatgtaataaatacatcatattaatactttgtagttggcagggtagaagccagcttgaaaggcagatgctggccagacagctaggctcactcgctagcgaaatgactcgcatctgcgaatttaaaagtcatgatacgtcatccaccttcaggattacttgtgaatgtttgcaacactggatattaattaaatccttaaatgctggatatctattgcacatatccgaacaatttgtggtgacactaaaggaatttttgtttcttcaggtatggctatcctgatccttcttacctgaaacgtgtcaaagaggagctgaaagctaaaggaattgagtaagacaactgctggaagatgtcttaaatcaagctttcaaaaaaatatattttaggaggctgatttaatgccagtctaaatccttatgtagaaaggactttgaaatttttcttctcaagaaatggtttgtataagaataacaatctgctagtctgtcatttctggagtgatacttttttttttgagacggagtctgctctgtcgctcgcgctggagtgcagtggcatgatctcggctcactgcaagctccgcctcccaggttcatgccattctcctacctcagcctcccgagtagctgggactacaggcgcccaccaccatgcccggctaatttttgtttttgtatttttagtagagacagggtttcactgtgttagccaggatggtctcgatctcctgacctcgtgatccgcccgcctcagccttccaaagtgttgggattataggcgtgagccaccgcgcccagccctggagtgatactttttatggaagacaaaagccccccaaatctgtgtaaaatctgctgcaaaggtgtcatccctcttgtgtcatcactggggttagaggtgggtccgaaataatcttctgtgtccttcagttggactctcggctgccaattgatctctttttcattgccatctctggggtggttctttggttttttgtgtgttttccccttcatctctacctgtgaaagtgaaattctattgtaaatgggaggaaaaagggttggttgtgaaaaattaaagacccacattctgctttcttactcatggtaagaaaagtggccatgagtagagattgggcaagcattggtaataaatggaataagactattattattattatttgagatggagtctcactctgtcacccaggctggaatgcagtggtgtgatcttggctcactgcaacctccacttcccgggttcaagcgattctcctgcctcagcctcctgagtagctgggattacaggtgtgtgcctccacacccggctaattttttgtatttttagtagagacggggttttgccatgttggccaggctggtttcaaactcctgagctcaaatgatcctcctgccttggcctcccaaagtgctggaattacaggcatgagccaccacacccacacaagactatcatttttaatgaccaagagcctagtatatagttggtgcctgtcttagtctgtttgtgttgctataaaagaacacctgagactgggtaattgataaagaaaaaggtttgtttggctcacaattttgctggctagaaggttgggcatccggtgaaagcctcaggctgcttccattcatagcaaagggcagccagtgtgtgcagaaatcaaatgacagagaggaagtgagagagagaggtgtcggggaggtgccaggctctttttaacaagcagttcttcaggaactaagagtgagtcactcccatgagaacagcaccaagccattcatgggggaatctgcccccatgacccagacccctcccgttaggcttcacctccaacactgaggatcaaatttcaacatgagatttggaggaggtcaaacaaactaaactgtagcagtgtttcataaaattgtttgcctgactcaggttgctagtaagccagcagagggatatttgcctcctaaatctttggcagaggcaggagtaaggaagccatttctggagtccttgctactaatttggaaaactgagcttctttctttcattgctttttcccttaagagacaagtccttactatattgccctgtctctcaagggaagacatcaagactggacttgaactcctgggctcaagccatcccccaaccttggcctctcgagtagatgggattataggcatgtgccacggtgcctgacttgagtttcttattctagaacacttggagcctgaactctgaccaggcccctcacttgagcctttgctttctgctccttgtaaactgccatattgggtgcacttgccctgccacagtaatgctatatatttctgagcattgtttttctctagataattttatatttttgagtataccccacttccaagtgttttttgtttgttttgctttgtttttgttgttgttgttttgagacagggtctcactgtgtcccccaggctggagtgcagtggcacaatgacgactcactgcagcctcaacctcctggggccaagtgatcctcccacctcagcctctcaagtggctgggaccacagaagtgcaccaccatgcctggctttttttttttttttgggtcgagatggggtgtccctgtgttgcccagactggtcttgaactcctggactcaagggatcctcctgtcttgggctcccaaagtgttgggattacaggcgtgagtgaccatgcctagctcacttccaggtttaacagacaaaataaacttactctagtttccatctctatcattttataataaccgtagcccacattgtagtagtttttcagctctttactaagtcccaccaattcatgttttcacccttaaaatctttctcactgatactctctctggacagaaaaaaggtgaaataagcctactataaggaatatatgacatgctaaattttatttttaaacggttcttcaagtcagattaaagtaataatagcaaattatgtgattatccatgtcccagcctctctccaaaaaaatagtaaacaagatgtcttcttcttttcccaaagatacacatacacacatgtacaaatttttttatcagataataatagctaatatttaatgagtacttaccttagtttgtcccctttacaacagctttacatctgtgtgattgatacagttcatattcccattttataactgagaaaactggtgcacagagaggataagcaacttgccaaaggtcacacagttaataagtggaaatgctggggtatgaaccaggtagtctgcccccatagctctgccccccagagctgtactgtctcccatgagggtacttctccatggagcagcctgaggcgatccctttattctgggcttctctcagaaatggattcccacacagtattcaaagcaaatttccccagaggaaatcctattggaagaacttaaaaactcagaatctttttctttgtccagagagttgaggaagcttaagctaaatgatacatgttttttaaaaaaaatcagattataaatttagtttttggtgattcattaaattctttactattatagttattttctagctgttcatcttttagctaaatttgttccaaagaagcaaaagtttggtttctactaagttctggattctggatgggagattgcactgtgtgtgacatgcaagtttcatggtgtgggagattgcagagcatttgggttactgcttttactctttggaagctgttatcatctgtatctgctttaaataaagttaaagatttgga

SEQ ID NO: 43234 - DNA, 3786 bp, Homo sapiens
tttggcaccattgtgattacttattctatgaaagcaggcatacaaacagaagaacacccaaacccaggaaagagataccctggaatacagcgaactgcatacttgcctgataataaggaaggaaggaaggttttgaaactgctttatagggcctttgaccaaaagctgatttttacagtggggtactctcgcgtattaggagtctcagatgtcatcacttggaatgatattcaccacaaaacatcccggtttggaggaccagaaatgtatggctatcctgatccttcttacctgaaacgtgtcaaagaggagctgaaagctaaaggaattgagtaagacaactgctggaagatgtcttaaatcaagctttcaaaaaaatatattttaggaggctgatttaatgccagtctaaatccttatgtagaaaggactttgaaatttttcttctcaagaaatggtttgtataagaataacaatctgctagtctgtcatttctggagtgatacttttttttttgagacggagtctgctctgtcgctcgcgctggagtgcagtggcatgatctcggctcactgcaagctccgcctcccaggttcatgccattctcctacctcagcctcccgagtagctgggactacaggcgcccaccaccatgcccggctaatttttgtttttgtatttttagtagagacagggtttcactgtgttagccaggatggtctcgatctcctgacctcgtgatccgcccgcctcagccttccaaagtgttgggattataggcgtgagccaccgcgcccagccctggagtgatactttttatggaagacaaaagccccccaaatctgtgtaaaatctgctgcaaaggtgtcatccctcttgtgtcatcactggggttagaggtgggtccgaaataatcttctgtgtccttcagttggactctcggctgccaattgatctctttttcattgccatctctggggtggttctttggttttttgtgtgttttccccttcatctctacctgtgaaagtgaaattctattgtaaatgggaggaaaaagggttggttgtgaaaaattaaagacccacattctgctttcttactcatggtaagaaaagtggccatgagtagagattgggcaagcattggtaataaatggaataagactattattattattatttgagatggagtctcactctgtcacccaggctggaatgcagtggtgtgatcttggctcactgcaacctccacttcccgggttcaagcgattctcctgcctcagcctcctgagtagctgggattacaggtgtgtgcctccacacccggctaattttttgtatttttagtagagacggggttttgccatgttggccaggctggtttcaaactcctgagctcaaatgatcctcctgccttggcctcccaaagtgctggaattacaggcatgagccaccacacccacacaagactatcatttttaatgaccaagagcctagtatatagttggtgcctgtcttagtctgtttgtgttgctataaaagaacacctgagactgggtaattgataaagaaaaaggtttgtttggctcacaattttgctggctagaaggttgggcatccggtgaaagcctcaggctgcttccattcatagcaaagggcagccagtgtgtgcagaaatcaaatgacagagaggaagtgagagagagaggtgtcggggaggtgccaggctctttttaacaagcagttcttcaggaactaagagtgagtcactcccatgagaacagcaccaagccattcatgggggaatctgcccccatgacccagacccctcccgttaggcttcacctccaacactgaggatcaaatttcaacatgagatttggaggaggtcaaacaaactaaactgtagcagtgtttcataaaattgtttgcctgactcaggttgctagtaagccagcagagggatatttgcctcctaaatctttggcagaggcaggagtaaggaagccatttctggagtccttgctactaatttggaaaactgagcttctttctttcattgctttttcccttaagagacaagtccttactatattgccctgtctctcaagggaagacatcaagactggacttgaactcctgggctcaagccatcccccaaccttggcctctcgagtagatgggattataggcatgtgccacggtgcctgacttgagtttcttattctagaacacttggagcctgaactctgaccaggcccctcacttgagcctttgctttctgctccttgtaaactgccatattgggtgcacttgccctgccacagtaatgctatatatttctgagcattgtttttctctagataattttatatttttgagtataccccacttccaagtgttttttgtttgttttgctttgtttttgttgttgttgttttgagacagggtctcactgtgtcccccaggctggagtgcagtggcacaatgacgactcactgcagcctcaacctcctggggccaagtgatcctcccacctcagcctctcaagtggctgggaccacagaagtgcaccaccatgcctggctttttttttttttttgggtcgagatggggtgtccctgtgttgcccagactggtcttgaactcctggactcaagggatcctcctgtcttgggctcccaaagtgttgggattacaggcgtgagtgaccatgcctagctcacttccaggtttaacagacaaaataaacttactctagtttccatctctatcattttataataaccgtagcccacattgtagtagtttttcagctctttactaagtcccaccaattcatgttttcacccttaaaatctttctcactgatactctctctggacagaaaaaaggtgaaataagcctactataaggaatatatgacatgctaaattttatttttaaacggttcttcaagtcagattaaagtaataatagcaaattatgtgattatccatgtcccagcctctctccaaaaaaatagtaaacaagatgtcttcttcttttcccaaagatacacatacacacatgtacaaatttttttatcagataataatagctaatatttaatgagtacttaccttagtttgtcccctttacaacagctttacatctgtgtgattgatacagttcatattcccattttataactgagaaaactggtgcacagagaggataagcaacttgccaaaggtcacacagttaataagtggaaatgctggggtatgaaccaggtagtctgcccccatagctctgccccccagagctgtactgtctcccatgagggtacttctccatggagcagcctgaggcgatccctttattctgggcttctctcagaaatggattcccacacagtattcaaagcaaatttccccagaggaaatcctattggaagaacttaaaaactcagaatctttttctttgtccagagagttgaggaagcttaagctaaatgatacatgttttttaaaaaaaatcagattataaatttagtttttggtgattcattaaattctttactattatagttattttctagctgttcatcttttagctaaatttgttccaaagaagcaaaagtttggtttctactaagttctggattctggatgggagattgcactgtgtgtgacatgcaagtttcatggtgtgggagattgcagagcatttgggttactgcttttactctttggaagctgttatcatctgtatctgctttaaataaagttaaagatttgga

SEQ ID NO: 43235 - DNA, 4119 bp, Homo sapiens
cttagactttttctagaatattattggccaagtgatttcaggttctctgtggactggtgggggaaggggtgaggagactattggtagaaactgtattatacgaaatccaattgttctttatgaaacccaaataggattcctcagaccctggcactaaagaaaaaatatataccctgagacttttccaaaaccttaaatttgaaaatcctactagcatgtgattacgatgcccccctaaaacacagtatattattatatttttaggagagtcactacttaccataaactgaaaaattttaagaattaacatagacatgaagcctcaaagtaaatcaacgtattactattcatcttggattctcaaaccccctgccctttgatgcgaaatgtaataaatacatcatattaatactttgtagttggcagggtagaagccagcttgaaaggcagatgctggccagacagctaggctcactcgctagcgaaatgactcgcatctgcgaatttaaaagtcatgatacgtcatccaccttcaggattacttgtgaatgtttgcaacactggatattaattaaatccttaaatgctggatatctattgcacatatccgaacaatttgtggtgacactaaaggaatttttgtttcttcaggtatggctatcctgatccttcttacctgaaacgtgtcaaagaggagctgaaagctaaaggaattgagtaagacaactgctggaagatgtcttaaatcaagctttcaaaaaaatatattttaggaggctgatttaatgccagtctaaatccttatgtagaaaggactttgaaatttttcttctcaagaaatggtttgtataagaataacaatctgctagtctgtcatttctggagtgatacttttttttttgagacggagtctgctctgtcgctcgcgctggagtgcagtggcatgatctcggctcactgcaagctccgcctcccaggttcatgccattctcctacctcagcctcccgagtagctgggactacaggcgcccaccaccatgcccggctaatttttgtttttgtatttttagtagagacagggtttcactgtgttagccaggatggtctcgatctcctgacctcgtgatccgcccgcctcagccttccaaagtgttgggattataggcgtgagccaccgcgcccagccctggagtgatactttttatggaagacaaaagccccccaaatctgtgtaaaatctgctgcaaaggtgtcatccctcttgtgtcatcactggggttagaggtgggtccgaaataatcttctgtgtccttcagttggactctcggctgccaattgatctctttttcattgccatctctggggtggttctttggttttttgtgtgttttccccttcatctctacctgtgaaagtgaaattctattgtaaatgggaggaaaaagggttggttgtgaaaaattaaagacccacattctgctttcttactcatggtaagaaaagtggccatgagtagagattgggcaagcattggtaataaatggaataagactattattattattatttgagatggagtctcactctgtcacccaggctggaatgcagtggtgtgatcttggctcactgcaacctccacttcccgggttcaagcgattctcctgcctcagcctcctgagtagctgggattacaggtgtgtgcctccacacccggctaattttttgtatttttagtagagacggggttttgccatgttggccaggctggtttcaaactcctgagctcaaatgatcctcctgccttggcctcccaaagtgctggaattacaggcatgagccaccacacccacacaagactatcatttttaatgaccaagagcctagtatatagttggtgcctgtcttagtctgtttgtgttgctataaaagaacacctgagactgggtaattgataaagaaaaagcctcaggctgcttccattcatagcaaagggcagccagtgtgtgcagaaatcaaatgacagagaggaagtgagagagagaggtgtcggggaggtgccaggctctttttaacaagcagttcttcaggaactaagagtgagtcactcccatgagaacagcaccaagccattcatgggggaatctgcccccatgacccagacccctcccgttaggcttcacctccaacactgaggatcaaatttcaacatgagatttggaggaggtcaaacaaactaaactgtagcagtgtttcataaaattgtttgcctgactcaggttgctagtaagccagcagagggatatttgcctcctaaatctttggcagaggcaggagtaaggaagccatttctggagtccttgctactaatttggaaaactgagcttctttctttcattgctttttcccttaagagacaagtccttactatattgccctgtctctcaagggaagacatcaagactggacttgaactcctgggctcaagccatcccccaaccttggcctctcgagtagatgggattataggcatgtgccacggtgcctgacttgagtttcttattctagaacacttggagcctgaactctgaccaggcccctcacttgagcctttgctttctgctccttgtaaactgccatattgggtgcacttgccctgccacagtaatgctatatatttctgagcattgtttttctctagataattttatatttttgagtataccccacttccaagtgttttttgtttgttttgctttgtttttgttgttgttgttttgagacagggtctcactgtgtcccccaggctggagtgcagtggcacaatgacgactcactgcagcctcaacctcctggggccaagtgatcctcccacctcagcctctcaagtggctgggaccacagaagtgcaccaccatgcctggctttttttttttttttgggtcgagatggggtgtccctgtgttgcccagactggtcttgaactcctggactcaagggatcctcctgtcttgggctcccaaagtgttgggattacaggcgtgagtgaccatgcctagctcacttccaggtttaacagacaaaataaacttactctagtttccatctctatcattttataataaccgtagcccacattgtagtagtttttcagctctttactaagtcccaccaattcatgttttcacccttaaaatctttctcactgatactctctctggacagaaaaaaggtgaaataagcctactataaggaatatatgacatgctaaattttatttttaaacggttcttcaagtcagattaaagtaataatagcaaattatgtgattatccatgtcccagcctctctccaaaaaaatagtaaacaagatgtcttcttcttttcccaaagatacacatacacacatgtacaaatttttttatcagataataatagctaatatttaatgagtacttaccttagtttgtcccctttacaacagctttacatctgtgtgattgatacagttcatattcccattttataactgagaaaactggtgcacagagaggataagcaacttgccaaaggtcacacagttaataagtggaaatgctggggtatgaaccaggtagtctgcccccatagctctgccccccagagctgtactgtctcccatgagggtacttctccatggagcagcctgaggcgatccctttattctgggcttctctcagaaatggattcccacacagtattcaaagcaaatttccccagaggaaatcctattggaagaacttaaaaactcagaatctttttctttgtccagagagttgaggaagcttaagctaaatgatacatgttttttaaaaaaaatcagattataaatttagtttttggtgattcattaaattctttactattatagttattttctagctgttcatcttttagctaaatttgttccaaagaagcaaaagtttggtttctactaagttctggattctggatgggagattgcactgtgtgtgacatgcaagtttcatggtgtgggagattgcagagcatttgggttactgcttttactctttggaagctgttatcatctgtatctgctttaaataaagttaaagatttgga

SEQ ID NO: 43236 - DNA, 2369 bp, Homo sapiens
gtagtgatctcctgctggctcaagtgtgataaggatgagcacacccacacaagactatcatttttaatgaccaagagcctagtatatagttggtgcctgtcttagtctgtttgtgttgctataaaagaacacctgagactgggtaattgataaagaaaaaggtttgtttggctcacaattttgctggctagaaggttgggcatccggtgaaagcctcaggctgcttccattcatagcaaagggcagccagtgtgtgcagaaatcaaatgacagagaggaagtgagagagagaggtgtcggggaggtgccaggctctttttaacaagcagttcttcaggaactaagagtgagtcactcccatgagaacagcaccaagccattcatgggggaatctgcccccatgacccagacccctcccgttaggcttcacctccaacactgaggatcaaatttcaacatgagatttggaggaggtcaaacaaactaaactgtagcagtgtttcataaaattgtttgcctgactcaggttgctagtaagccagcagagggatatttgcctcctaaatctttggcagaggcaggagtaaggaagccatttctggagtccttgctactaatttggaaaactgagcttctttctttcattgctttttcccttaagagacaagtccttactatattgccctgtctctcaagggaagacatcaagactggacttgaactcctgggctcaagccatcccccaaccttggcctctcgagtagatgggattataggcatgtgccacggtgcctgacttgagtttcttattctagaacacttggagcctgaactctgaccaggcccctcacttgagcctttgctttctgctccttgtaaactgccatattgggtgcacttgccctgccacagtaatgctatatatttctgagcattgtttttctctagataattttatatttttgagtataccccacttccaagtgttttttgtttgttttgctttgtttttgttgttgttgttttgagacagggtctcactgtgtcccccaggctggagtgcagtggcacaatgacgactcactgcagcctcaacctcctggggccaagtgatcctcccacctcagcctctcaagtggctgggaccacagaagtgcaccaccatgcctggctttttttttttttttgggtcgagatggggtgtccctgtgttgcccagactggtcttgaactcctggactcaagggatcctcctgtcttgggctcccaaagtgttgggattacaggcgtgagtgaccatgcctagctcacttccaggtttaacagacaaaataaacttactctagtttccatctctatcattttataataaccgtagcccacattgtagtagtttttcagctctttactaagtcccaccaattcatgttttcacccttaaaatctttctcactgatactctctctggacagaaaaaaggtgaaataagcctactataaggaatatatgacatgctaaattttatttttaaacggttcttcaagtcagattaaagtaataatagcaaattatgtgattatccatgtcccagcctctctccaaaaaaatagtaaacaagatgtcttcttcttttcccaaagatacacatacacacatgtacaaatttttttatcagataataatagctaatatttaatgagtacttaccttagtttgtcccctttacaacagctttacatctgtgtgattgatacagttcatattcccattttataactgagaaaactggtgcacagagaggataagcaacttgccaaaggtcacacagttaataagtggaaatgctggggtatgaaccaggtagtctgcccccatagctctgccccccagagctgtactgtctcccatgagggtacttctccatggagcagcctgaggcgatccctttattctgggcttctctcagaaatggattcccacacagtattcaaagcaaatttccccagaggaaatcctattggaagaacttaaaaactcagaatctttttctttgtccagagagttgaggaagcttaagctaaatgatacatgttttttaaaaaaaatcagattataaatttagtttttggtgattcattaaattctttactattatagttattttctagctgttcatcttttagctaaatttgttccaaagaagcaaaagtttggtttctactaagttctggattctggatgggagattgcactgtgtgtgacatgcaagtttcatggtgtgggagattgcagagcatttgggttactgcttttactctttggaagctgttatcatctgtatctgctttaaataaagttaaagatttgga

SEQ ID NO: 43237 - DNA, 2252 bp, Homo sapiens
agacaaatggtgtgtgtgcatggataacgtaattctggaaaaaggtttgtttggctcacaattttgctggctagaaggttgggcatccggtgaaagcctcaggctgcttccattcatagcaaagggcagccagtgtgtgcagaaatcaaatgacagagaggaagtgagagagagaggtgtcggggaggtgccaggctctttttaacaagcagttcttcaggaactaagagtgagtcactcccatgagaacagcaccaagccattcatgggggaatctgcccccatgacccagacccctcccgttaggcttcacctccaacactgaggatcaaatttcaacatgagatttggaggaggtcaaacaaactaaactgtagcagtgtttcataaaattgtttgcctgactcaggttgctagtaagccagcagagggatatttgcctcctaaatctttggcagaggcaggagtaaggaagccatttctggagtccttgctactaatttggaaaactgagcttctttctttcattgctttttcccttaagagacaagtccttactatattgccctgtctctcaagggaagacatcaagactggacttgaactcctgggctcaagccatcccccaaccttggcctctcgagtagatgggattataggcatgtgccacggtgcctgacttgagtttcttattctagaacacttggagcctgaactctgaccaggcccctcacttgagcctttgctttctgctccttgtaaactgccatattgggtgcacttgccctgccacagtaatgctatatatttctgagcattgtttttctctagataattttatatttttgagtataccccacttccaagtgttttttgtttgttttgctttgtttttgttgttgttgttttgagacagggtctcactgtgtcccccaggctggagtgcagtggcacaatgacgactcactgcagcctcaacctcctggggccaagtgatcctcccacctcagcctctcaagtggctgggaccacagaagtgcaccaccatgcctggctttttttttttttttgggtcgagatggggtgtccctgtgttgcccagactggtcttgaactcctggactcaagggatcctcctgtcttgggctcccaaagtgttgggattacaggcgtgagtgaccatgcctagctcacttccaggtttaacagacaaaataaacttactctagtttccatctctatcattttataataaccgtagcccacattgtagtagtttttcagctctttactaagtcccaccaattcatgttttcacccttaaaatctttctcactgatactctctctggacagaaaaaaggtgaaataagcctactataaggaatatatgacatgctaaattttatttttaaacggttcttcaagtcagattaaagtaataatagcaaattatgtgattatccatgtcccagcctctctccaaaaaaatagtaaacaagatgtcttcttcttttcccaaagatacacatacacacatgtacaaatttttttatcagataataatagctaatatttaatgagtacttaccttagtttgtcccctttacaacagctttacatctgtgtgattgatacagttcatattcccattttataactgagaaaactggtgcacagagaggataagcaacttgccaaaggtcacacagttaataagtggaaatgctggggtatgaaccaggtagtctgcccccatagctctgccccccagagctgtactgtctcccatgagggtacttctccatggagcagcctgaggcgatccctttattctgggcttctctcagaaatggattcccacacagtattcaaagcaaatttccccagaggaaatcctattggaagaacttaaaaactcagaatctttttctttgtccagagagttgaggaagcttaagctaaatgatacatgttttttaaaaaaaatcagattataaatttagtttttggtgattcattaaattctttactattatagttattttctagctgttcatcttttagctaaatttgttccaaagaagcaaaagtttggtttctactaagttctggattctggatgggagattgcactgtgtgtgacatgcaagtttcatggtgtgggagattgcagagcatttgggttactgcttttactctttggaagctgttatcatctgtatctgctttaaataaagttaaagatttgga

SEQ ID NO: 43238 - DNA, 1177 bp, Homo sapiens
atctctctatccttaatctctctatccttaatctctctatccttaatctcaagggatcctcctgtcttgggctcccaaagtgttgggattacaggcgtgagtgaccatgcctagctcacttccaggtttaacagacaaaataaacttactctagtttccatctctatcattttataataaccgtagcccacattgtagtagtttttcagctctttactaagtcccaccaattcatgttttcacccttaaaatctttctcactgatactctctctggacagaaaaaaggtgaaataagcctactataaggaatatatgacatgctaaattttatttttaaacggttcttcaagtcagattaaagtaataatagcaaattatgtgattatccatgtcccagcctctctccaaaaaaatagtaaacaagatgtcttcttcttttcccaaagatacacatacacacatgtacaaatttttttatcagataataatagctaatatttaatgagtacttaccttagtttgtcccctttacaacagctttacatctgtgtgattgatacagttcatattcccattttataactgagaaaactggtgcacagagaggataagcaacttgccaaaggtcacacagttaataagtggaaatgctggggtatgaaccaggtagtctgcccccatagctctgccccccagagctgtactgtctcccatgagggtacttctccatggagcagcctgaggcgatccctttattctgggcttctctcagaaatggattcccacacagtattcaaagcaaatttccccagaggaaatcctattggaagaacttaaaaactcagaatctttttctttgtccagagagttgaggaagcttaagctaaatgatacatgttttttaaaaaaaatcagattataaatttagtttttggtgattcattaaattctttactattatagttattttctagctgttcatcttttagctaaatttgttccaaagaagcaaaagtttggtttctactaagttctggattctggatgggagattgcactgtgtgtgacatgcaagtttcatggtgtgggagattgcagagcatttgggttactgcttttactctttggaagctgttatcatctgtatctgctttaaataaagttaaagatttgga

SEQ ID NO: 43239 - DNA, 4193 bp, Homo sapiens
cttagactttttctagaatattattggccaagtgatttcaggttctctgtggactggtgggggaaggggtgaggagactattggtagaaactgtattatacgaaatccaattgttctttatgaaacccaaataggattcctcagaccctggcactaaagaaaaaatatataccctgagacttttccaaaaccttaaatttgaaaatcctactagcatgtgattacgatgcccccctaaaacacagtatattattatatttttaggagagtcactacttaccataaactgaaaaattttaagaattaacatagacatgaagcctcaaagtaaatcaacgtattactattcatcttggattctcaaaccccctgccctttgatgcgaaatgtaataaatacatcatattaatactttgtagttggcagggtagaagccagcttgaaaggcagatgctggccagacagctaggctcactcgctagcgaaatgactcgcatctgcgaatttaaaagtcatgatacgtcatccaccttcaggattacttgtgaatgtttgcaacactggatattaattaaatccttaaatgctggatatctattgcacatatccgaacaatttgtggtgacactaaaggaatttttgtttcttcaggtatggctatcctgatccttcttacctgaaacgtgtcaaagaggagctgaaagctaaaggaattgagtaagacaactgctggaagatgtcttaaatcaagctttcaaaaaaatatattttaggaggctgatttaatgccagtctaaatccttatgtagaaaggactttgaaatttttcttctcaagaaatggtttgtataagaataacaatctgctagtctgtcatttctggagtgatacttttttttttgagacggagtctgctctgtcgctcgcgctggagtgcagtggcatgatctcggctcactgcaagctccgcctcccaggttcatgccattctcctacctcagcctcccgagtagctgggactacaggcgcccaccaccatgcccggctaatttttgtttttgtatttttagtagagacagggtttcactgtgttagccaggatggtctcgatctcctgacctcgtgatccgcccgcctcagccttccaaagtgttgggattataggcgtgagccaccgcgcccagccctggagtgatactttttatggaagacaaaagccccccaaatctgtgtaaaatctgctgcaaaggtgtcatccctcttgtgtcatcactggggttagaggtgggtccgaaataatcttctgtgtccttcagttggactctcggctgccaattgatctctttttcattgccatctctggggtggttctttggttttttgtgtgttttccccttcatctctacctgtgaaagtgaaattctattgtaaatgggaggaaaaagggttggttgtgaaaaattaaagacccacattctgctttcttactcatggtaagaaaagtggccatgagtagagattgggcaagcattggtaataaatggaataagactattattattattatttgagatggagtctcactctgtcacccaggctggaatgcagtggtgtgatcttggctcactgcaacctccacttcccgggttcaagcgattctcctgcctcagcctcctgagtagctgggattacaggtgtgtgcctccacacccggctaattttttgtatttttagtagagacggggttttgccatgttggccaggctggtttcaaactcctgagctcaaatgatcctcctgccttggcctcccaaagtgctggaattacaggcatgagccaccacacccacacaagactatcatttttaatgaccaagagcctagtatatagttggtgcctgtcttagtctgtttgtgttgctataaaagaacacctgagactgggtaattgataaagaaaaaggtttgtttggctcacaattttgctggctagaaggttgggcatccggtgaaagcctcaggctgcttccattcatagcaaagggcagccagtgtgtgcagaaatcaaatgacagagaggaagtgagagagagaggtgtcggggaggtgccaggctctttttaacaagcagttcttcaggaactaagagtgagtcactcccatgagaacagcaccaagccattcatgggggaatctgcccccatgacccagacccctcccgttaggcttcacctccaacactgaggatcaaatttcaacatgagatttggaggaggtcaaacaaactaaactgtagcagtgtttcataaaattgtttgcctgactcaggttgctagtaagccagcagagggatatttgcctcctaaatctttggcagaggcaggagtaaggaagccatttctggagtccttgctactaatttggaaaactgagcttctttctttcattgctttttcccttaagagacaagtccttactatattgccctgtctctcaagggaagacatcaagactggacttgaactcctgggctcaagccatcccccaaccttggcctctcgagtagatgggattataggcatgtgccacggtgcctgacttgagtttcttattctagaacacttggagcctgaactctgaccaggcccctcacttgagcctttgctttctgctccttgtaaactgccatattgggtgcacttgccctgccacagtaatgctatatatttctgagcattgtttttctctagataattttatatttttgagtataccccacttccaagtgttttttgtttgttttgctttgtttttgttgttgttgttttgagacagggtctcactgtgtcccccaggctggagtgcagtggcacaatgacgactcactgcagcctcaacctcctggggccaagtgatcctcccacctcagcctctcaagtggctgggaccacagaagtgcaccaccatgcctggctttttttttttttttgggtcgagatggggtgtccctgtgttgcccagactggtcttgaactcctggactcaagggatcctcctgtcttgggctcccaaagtgttgggattacaggcgtgagtgaccatgcctagctcacttccaggtttaacagacaaaataaacttactctagtttccatctctatcattttataataaccgtagcccacattgtagtagtttttcagctctttactaagtcccaccaattcatgttttcacccttaaaatctttctcactgatactctctctggacagaaaaaaggtgaaataagcctactataaggaatatatgacatgctaaattttatttttaaacggttcttcaagtcagattaaagtaataatagcaaattatgtgattatccatgtcccagcctctctccaaaaaaatagtaaacaagatgtcttcttcttttcccaaagatacacatacacacatgtacaaatttttttatcagataataatagctaatatttaatgagtacttaccttagtttgtcccctttacaacagctttacatctgtgtgattgatacagttcatattcccattttataactgagaaaactggtgcacagagaggataagcaacttgccaaaggtcacacagttaataagtggaaatgctggggtatgaaccaggtagtctgcccccatagctctgccccccagagctgtactgtctcccatgagggtacttctccatggagcagcctgaggcgatccctttattctgggcttctctcagaaatggattcccacacagtattcaaagcaaatttccccagaggaaatcctattggaagaacttaaaaactcagaatctttttctttgtccagagagttgaggaagcttaagctaaatgatacatgttttttaaaaaaaatcagattataaatttagtttttggtgattcattaaattctttactattatagttattttctagctgttcatcttttagctaaatttgttccaaagaagcaaaagtttggtttctactaagttctggattctggatgggagattgcactgtgtgtgacatgcaagtttcatggtgtgggagattgcagagcatttgggttactgcttttactctttggaagctgttatcatctgtatctgctttaaataaagttaaagatttggaccacttggccacaaaaaaaggg

SEQ ID NO: 43240 - DNA, 3877 bp, Homo sapiens
cttagactttttctagaatattattggccaagtgatttcaggttctctgtggactggtgggggaaggggtgaggagactattggtagaaactgtattatacgaaatccaattgttctttatgaaacccaaataggattcctcagaccctggcactaaagaaaaaatatataccctgagacttttccaaaaccttaaatttgaaaatcctactagcatgtgattacgatgcccccctaaaacacagtatattattatatttttaggagagtcactacttaccataaactgaaaaattttaagaattaacatagacatgaagcctcaaagtaaatcaacgtattactattcatcttggattctcaaaccccctgccctttgatgcgaaatgtaataaatacatcatattaatactttgtagttggcagggtagaagccagcttgaaaggcagatgctggccagacagctaggctcactcgctagcgaaatgactcgcatctgcgaatttaaaagtcatgatacgtcatccaccttcaggattacttgtgaatgtttgcaacactggatattaattaaatccttaaatgctggatatctattgcacatatccgaacaatttgtggtgacactaaaggaatttttgtttcttcaggtatggctatcctgatccttcttacctgaaacgtgtcaaagaggagctgaaagctaaaggaattgagtaagacaactgctggaagatgtcttaaatcaagctttcaaaaaaatatattttaggaggctgatttaatgccagtctaaatccttatgtagaaaggactttgaaatttttcttctcaagaaatggtttgtataagaataacaatctgctagtctgtcatttctggagtgatacttttttttttgagacggagtctgctctgtcgctcgcgctggagtgcagtggcatgatctcggctcactgcaagctccgcctcccaggttcatgccattctcctacctcagcctcccgagtagctgggactacaggcgcccaccaccatgcccggctaatttttgtttttgtatttttagtagagacagggtttcactgtgttagccaggatggtctcgatctcctgacctcgtgatccgcccgcctcagccttccaaagtgttgggattataggcgtgagccaccgcgcccagccctggagtgatactttttatggaagacaaaagccccccaaatctgtgtaaaatctgctgcaaaggtgtcatccctcttgtgtcatcactggggttagaggtgggtccgaaataatcttctgtgtccttcagttggactctcggctgccaattgatctctttttcattgccatctctggggtggttctttggttttttgtgtgttttccccttcatctctacctgtgaaagtgaaattctattgtaaatgggaggaaaaagggttggttgtgaaaaattaaagacccacattctgctttcttactcatggtaagaaaagtggccatgagtagagattgggcaagcattggtaataaatggaataagactattattattattatttgagatggagtctcactctgtcacccaggctggaatgcagtggtgtgatcttggctcactgcaacctccacttcccgggttcaagcgattctcctgcctcagcctcctgagtagctgggattacaggtgtgtgcctccacacccggctaattttttgtatttttagtagagacggggttttgccatgttggccaggctggtttcaaactcctgagctcaaatgatcctcctgccttggcctcccaaagtgctggaattacaggcatgagccaccacacccacacaagactatcatttttaatgaccaagagcctagtatatagttggtgcctgtcttagtctgtttgtgttgctataaaagaacacctgagactgggtaattgataaagaaaaaggtttgtttggctcacaattttgctggctagaaggttgggcatccggtgaaagcctcaggctgcttccattcatagcaaagggcagccagtgtgtgcagaaatcaaatgacagagaggaagtgagagagagaggtgtcggggaggtgccaggctctttttaacaagcagttcttcaggaactaagagtgagtcactcccatgagaacagcaccaagccattcatgggggaatctgcccccatgacccagacccctcccgttaggcttcacctccaacactgaggatcaaatttcaacatgagatttggaggaggtcaaacaaactaaactgtagcagtgtttcataaaattgtttgcctgactcaggttgctagtaagccagcagagggatatttgcctcctaaatctttggcagaggcaggagtaaggaagccatttctggagtccttgctactaatttggaaaactgagcttctttctttcattgctttttcccttaagagacaagtccttactatattgccctgtctctcaagggaagacatcaagactggacttgaactcctgggctcaagccatcccccaaccttggcctctcgagtagatgggattataggcatgtgccacggtgcctgacttgagtttcttattctagaacacttggagcctgaactctgaccaggcccctcacttgagcctttgctttctgctccttgtaaactgccatattgggtgcacttgccctgccacagtaatgctatatatttctgagcattgtttttctctagataattttatatttttgagtataccccacttccaagtgttttttgtttgttttgctttgtttttgttgttgttgttttgagacagggtctcactgtgtcccccaggctggagtgcagtggcacaatgacgactcactgcagcctcaacctcctggggccaagtgatcctcccacctcagcctctcaagtggctgggaccacagaagtgcaccaccatgcctggctttttttttttttttgggtcgagatggggtgtccctgtgttgcccagactggtcttgaactcctggactcaagggatcctcctgtcttgggctcccaaagtgttgggattacaggcgtgagtgaccatgcctagctcacttccaggtttaacagacaaaataaacttactctagtttccatctctatcattttataataaccgtagcccacattgtagtagtttttcagctctttactaagtcccaccaattcatgttttcacccttaaaatctttctcactgatactctctctggacagaaaaaaggtgaaataagcctactataaggaatatatgacatgctaaattttatttttaaacggttcttcaagtcagattaaagtaataatagcaaattatgtgattatccatgtcccagcctctctccaaaaaaatagtaaacaagatgtcttcttcttttcccaaagatacacatacacacatgtacaaatttttttatcagataataatagctaatatttaatgagtacttaccttagtttgtcccctttacaacagctttacatctgtgtgattgatacagttcatattcccattttataactgagaaaactggtgcacagagaggataagcaacttgccaaaggtcacacagttaataagtggaaatgctggggtatgaaccaggtagtctgcccccatagctctgccccccagagctgtactgtctcccatgagggtacttctccatggagcagcctgaggcgatccctttattattgcactgtgtgtgacatgcaagtttcatggtgtgggagattgcagagcatttgggttactgcttttactctttggaagctgttatcatctgtatctgctttaaataaagttaaagatttgga

SEQ ID NO: 43241 - DNA, 2642 bp, Homo sapiens
cttagactttttctagaatattattggccaagtgatttcaggttctctgtggactggtgggggaaggggtgaggagactattggtagaaactgtattatacgaaatccaattgttctttatgaaacccaaataggattcctcagaccctggcactaaagaaaaaatatataccctgagacttttccaaaaccttaaatttgaaaatcctactagcatgtgattacgatgcccccctaaaacacagtatattattatatttttaggagagtcactacttaccataaactgaaaaattttaagaattaacatagacatgaagcctcaaagtaaatcaacgtattactattcatcttggattctcaaaccccctgccctttgatgcgaaatgtaataaatacatcatattaatactttgtagttggcagggtagaagccagcttgaaaggcagatgctggccagacagctaggctcactcgctagcgaaatgactcgcatctgcgaatttaaaagtcatgatacgtcatccaccttcaggattacttgtgaatgtttgcaacactggatattaattaaatccttaaatgctggatatctattgcacatatccgaacaatttgtggtgacactaaaggaatttttgtttcttcaggtatggctatcctgatccttcttacctgaaacgtgtcaaagaggagctgaaagctaaaggaattgagtaagacaactgctggaagatgtcttaaatcaagctttcaaaaaaatatattttaggaggctgatttaatgccagtctaaatccttatgtagaaaggactttgaaatttttcttctcaagaaatggtttgtataagaataacaatctgctagtctgtcatttctggagtgatacttttttttttgagacggagtctgctctgtcgctcgcgctggagtgcagtggcatgatctcggctcactgcaagctccgcctcccaggttcatgccattctcctacctcagcctcccgagtagctgggactacaggcgcccaccaccatgcccggctaatttttgtttttgtatttttagtagagacagggtttcactgtgttagccaggatggtctcgatctcctgacctcgtgatccgcccgcctcagccttccaaagtgttgggattataggcgtgagccaccgcgcccagccctggagtgatactttttatggaagacaaaagccccccaaatctgtgtaaaatctgctgcaaaggtgtcatccctcttgtgtcatcactggggttagaggtgggtccgaaataatcttctgtgtccttcagttggactctcggctgccaattgatctctttttcattgccatctctggggtggttctttggttttttgtgtgttttccccttcatctctacctgtgaaagtgaaattctattgtaaatgggaggaaaaagggttggttgtgaaaaattaaagacccacattctgctttcttactcatggtaagaaaagtggccatgagtagagattgggcaagcattggtaataaatggaataagactattattattattatttgagatggagtctcactctgtcacccaggctggaatgcagtggtgtgatcttggctcactgcaacctccacttcccgggttcaagcgattctcctgcctcagcctcctgagtagctgggattacaggtgtgtgcctccacacccggctaattttttgtatttttagtagagacggggttttgccatgttggccaggctggtttcaaactcctgagctcaaatgatcctcctgccttggcctcccaaagtgctggaattacaggcatgagccaccacacccacacaagactatcatttttaatgaccaagagcctagtatatagttggtgcctgtcttagtctgtttgtgttgctataaaagaacacctgagactgggtaattgataaagaaaaaggtttgtttggctcacaattttgctggctagaaggttgggcatccggtgaaagcctcaggctgcttccattcatagcaaagggcagccagtgtgtgcagaaatcaaatgacagagaggaagtgagagagagaggtgtcggggaggtgccaggctctttttaacaagcagttcttcaggaactaagagtgagtcactcccatgagaacagcaccaagccattcatgggggaatctgcccccatgacccagacccctcccgttaggcttcacctccaacactgaggatcaaatttcaacatgagatttggaggaggtcaaacaaactaaactgtagcagtgatctcctgatgaagaagctagccttctgaacctcgcctgaagccagcctctctgccaagtcactcaggtcatgggcattgttcaagcctgagtggcagccgctcttgctcacctgttgaggaagggctggctcacctgttgaggaagggctggctcactgtccaccgtggcggcatctttaactggcctccactcaatgggaaactgactcgcctgtgaaagacacagtgggagagctgaaaatgaatcagaagctttatgtatatgatttttaaattaaactttactttttcagactgcccctcccctttttgtaaaaagtccattttctgtaaaaaaaa

SEQ ID NO: 43242 - DNA, 427 bp, Homo sapiens
gaaatacggcaatttctggatgtggatataagtagactctatatctgtggaattggcgccctgagagctgctgatcggggatggtaatctcaaagacagaaagattggtctccatcactttctaccgtgccagctataaagtactatggagttatttaaattttgcaccaaaggacagggggcttttgaatccgagatgaatactatataagctgatttaatttgaggcgttgtgtctatttgaaggctagaggctcggaatgtcactttgcttccttttaaggtcacctttctttttcaccccttcccccaccagtccacagagaacctgaaatcacttggccaataatattctagaaaaagtctaagttgtgaggagactattggtagaaactgtattatacgaaatccaattgttctttatgaa

SEQ ID NO: 43243 - DNA, 365 bp, Homo sapiens
aagaacttaaaaactcagaatctttttctttgtccagagagttgaggaagcttaagctaaatgatacatgttttttaaaaaaaatcagattataaatttagtttttggtgattcattaaattctttactattatagttattttctagctgttcatcttttagctaaatttgttccaaagaagcaaaagtttggtttctactaagttctggattctggatgggagattgcactgtgtgtgacatgcaagtttcatggtgtgggagattgcagagcatttgggttactgcttttactctttggaagctgttatcatctgtatctgctttaaataaagttaaagatttggaacaaattgtgttctttc

SEQ ID NO: 43244 - DNA, 1903 bp, Homo sapiens
gcaggaggaggctggggtgaatcggcaccgaggtttcataaaattgtttgcctgactcaggttgctagtaagccagcagagggatatttgcctcctaaatctttggcagaggcaggagtaaggaagccatttctggagtccttgctactaatttggaaaactgagcttctttctttcattgctttttcccttaagagacaagtccttactatattgccctgtctctcaagggaagacatcaagactggacttgaactcctgggctcaagccatcccccaaccttggcctctcgagtagatgggattataggcatgtgccacggtgcctgacttgagtttcttattctagaacacttggagcctgaactctgaccaggcccctcacttgagcctttgctttctgctccttgtaaactgccatattgggtgcacttgccctgccacagtaatgctatatatttctgagcattgtttttctctagataattttatatttttgagtataccccacttccaagtgttttttgtttgttttgctttgtttttgttgttgttgttttgagacagggtctcactgtgtcccccaggctggagtgcagtggcacaatgacgactcactgcagcctcaacctcctggggccaagtgatcctcccacctcagcctctcaagtggctgggaccacagaagtgcaccaccatgcctggctttttttttttttttgggtcgagatggggtgtccctgtgttgcccagactggtcttgaactcctggactcaagggatcctcctgtcttgggctcccaaagtgttgggattacaggcgtgagtgaccatgcctagctcacttccaggtttaacagacaaaataaacttactctagtttccatctctatcattttataataaccgtagcccacattgtagtagtttttcagctctttactaagtcccaccaattcatgttttcacccttaaaatctttctcactgatactctctctggacagaaaaaaggtgaaataagcctactataaggaatatatgacatgctaaattttatttttaaacggttcttcaagtcagattaaagtaataatagcaaattatgtgattatccatgtcccagcctctctccaaaaaaatagtaaacaagatgtcttcttcttttcccaaagatacacatacacacatgtacaaatttttttatcagataataatagctaatatttaatgagtacttaccttagtttgtcccctttacaacagctttacatctgtgtgattgatacagttcatattcccattttataactgagaaaactggtgcacagagaggataagcaacttgccaaaggtcacacagttaataagtggaaatgctggggtatgaaccaggtagtctgcccccatagctctgccccccagagctgtactgtctcccatgagggtacttctccatggagcagcctgaggcgatccctttattctgggcttctctcagaaatggattcccacacagtattcaaagcaaatttccccagaggaaatcctattggaagaacttaaaaactcagaatctttttctttgtccagagagttgaggaagcttaagctaaatgatacatgttttttaaaaaaaatcagattataaatttagtttttggtgattcattaaattctttactattatagttattttctagctgttcatcttttagctaaatttgttccaaagaagcaaaagtttggtttctactaagttctggattctggatgggagattgcactgtgtgtgacatgcaagtttcatggtgtgggagattgcagagcatttgggttactgcttttactctttggaagctgttatcatctgtatctgctttaaataaagttaaagatttgga

SEQ ID NO: 43245 - DNA, 403 bp, Homo sapiens
aaatgcccagtttccaacaaaataggaggcatgcaaagaaacacaagagtatgacccccacatttaaattttttaaaaagcagacaacagaaactgcctggggaatgaccagatattggatttaatgggaaaaggcagggagggaggaaggaaacctatcaatcccaaatcctatgcgcagcagagctttctttcaagaatgaaggtgaaataaagactttttccgacaaactgagagtttgttgccagctgacccaccttacaaaaaatactaaaggaagttcttcaggcagtgagcaagaaacttcagacagtaatttgaaatcacatgaaaaaaacagagtgcctcttaaggtaattatgtaatttcataagacagtacgaatacatatttttctctttt

SEQ ID NO: 43246 - DNA, 299 bp, Homo sapiens
tgtctctccttggtagagtttgtcacccccaagtaagaactaaggctctgagaaaataagttttgcccaacctaagtgtagtatgttcaagtcagatatttaaacctaatccaacatttcttgccccaaccatctctataagtaataattctcaactagtctagtaaaggagataggtatgtgaataaataacttacaaagttgtaatttatttaatggtttaatgattacacaaccattaaaaatgagcaatagctgtatatttattgtcattgaaatacattcaccatgtgttattt

SEQ ID NO: 43247 - DNA, 289 bp, Homo sapiens
aaaatgtgaaacacatacacacacaactttctgattatttaagttcatctaagcatattttggaggaatgaatgtacattgtatccttgaaataatcttcctaaatagattcctttaaggggagtttgttcttgtgggggaaagaaagagagatgagactgttattgtgtctatgtagaaagaggaagacataagaaactccattgtgatctgtactaagaaaaactcttctgccttgagatgctgtgaatctgtaaccctagccccaaccctgtgctcgcagaaacat

SEQ ID NO: 43248 - DNA, 586 bp, Homo sapiens
ctggggccacagagccccgggaccttgtgtcactttttagtgatcctgctgcagaagtcacgttcttcttcccactgccatcttgcctttgcattctcagttctacgtgccctttgaactttaatggtaaaacatttcacactttggatggtttgcttgtctctagtttttagaaagctcttatcactccttcctaagaaaaaagaagggcaggtaaatttttttaaccaaaaaaaaatcacacatttcataaaaccctgatgaattttggatatgtgagagggcataaacattcctaaatatggacctgtgaatttagtaaattacccccatgaatatactccttcagtgcagggatttttgtgttttttttttttttttaatttttttgcaacagccttgctcatattccaggtgtagctagcaaacccctgtttttgaagcaagagccttatttgattcagtgtagatgtttcctgtctatcctttgtgacagggccttttaatgagtgttttttctttttgtatatgttacgtgtttgttgttgtattaaataaagaggaatgtacatactaaaatcgtgtc

SEQ ID NO: 43249 - DNA, 3555 bp, Homo sapiens
aatctctaatgatagggtgtgtgtgtgtgtgtgtgtgtgtgtgtgtgtgtctgtaagtcactttttggatttttgttgctttttccagataaggccttagtagcctctaaatatcaactatgcagataaacatactccttttttttttcacatgtccctgtcttttccattctcagataacaaatgttaagacccaaagaaataaggcataagggtttttgttgaatgtgtgtttgttcttctagggaaaattaacagaagcataaaatagagatactttgtgtgttcatctatcgtaaaatgtgaactctgtattcaaaaactatctacagatgctttcactggtgcaaagctgtagttagtatcatggaatgtctttgggttgttaatgataaaatcatcccagtgttcaattctgagagttttagattatatgacacaatgttcaggtttatagagctgaatgggtgatcaaactctaattaaaaatagctttgaatattaatgttgaattcttctttcttggtttcctttagtcttcattctttattcagagctcttaatcatattgctacactagaatatgaattgtatattaggagtctggggaggaaaggttaaattgtcttttacatcctcttctcactcactctggcaacctatcctgtgtccccatagaactgagaagtaaagccctgtgcaggcctgctttagaagactttacatcccagcagaggattcaggcagggactctcaggattttaatcagactgcctttgaataatgtgatattaaattttatttttctcatagactctcaaagtaccacttgcttgaaagtagctacttgtgatctttaatttccttatattgtgatagttctacttttcagtctttcctgtgtatctccatttcatagtgcgttagtacttaaacttcggacacttttccaaactgttaaacaagtcaggaatgcttttcagaatcgcagtagtattattagggtctctgtgtctaggacttacagtcatcagtggtcatcactgggactagaggtgttcttttttttcctcttctcctttgtattaaaaaatagattttgctactgtataatgcggcatttcatgacttcctcttgttacttttcaaggttattctaaagagatggagatcttcattagaggctatttctcataatagtctgccttgcttattttcatactccccctgaaataagcctacttttgcaaacaggccatatgaatcaaattttatgtttgttcctcacaaaattttctacacattatttgttcccactttgctaataataatataatgattttattgtaaatctgtgttttaaatattttataatagagcactaatggaaacctaataaatacaaacaagataactattacccaagataacatggaaatacttctgtttttgaagttaacaacaccgtctgccctcaaagcacatttaggagtatcaaccaagaccagccagttgacatgtttttctgtgtggcaacctgcccttaaattgtcagatcttaactatcttgtgtttgctgtgcttgcagccataagctttcctccttttttgcttatccctgctgtttgtagggttagtgtgccctctgtcagaaaattgggttttctttactatacctgcaaaattaccaagggttaccccaatattgtctagaggaattaaaaagaacttattctcagttgacaaaagtattactgttatacatagttaattggaaagttggccaactttggtcacctatttttgagtcttggctatgcctttgtaattagttacatataccttctgagaccttcagataatcaatgggcctttccccattagaggtaggttcccagcctacaagtatttcctgtgatccatggcaagcctccagagaaaagattcaagctttgcactgcccttttgttgattgtcattgaaaacttactttatttcagaaagtatcaaaaataccaaattggtctttcagagagtatgtaaatctggggcttgcccttggatttcacttgttaaacaccctcaaacttaaaagaagaaaatagatctccagctggtgaaaattttgtgccccaaataatatattaatccaagtctaccaaggtaactaagtaatggatgttttctctcttttattacaagcaagaaagttcatttgcagttgtaaaaatgattaccgaactccagacctatttgctataactgattggaaataatgattctgatttttagtctgggtaaacacatacttcggtgtgaattttgataagggaaagacttgtttggtagcccaaggaaaaacaggatgtatttatacagtgaatgttcactctgcagaggaacttccctccagttacatcttcctcatacattagccacctccacacttgacatagatgccaacatgtttcaaaaccaatcttgaaggagcctaaagagttgatggtcctctaggtgaaagacaagaattactgtattgcatttgcttatagggaggtgtgtttttgctaacttgaagggatatactgtatttcaaataagtgtgtgacttaatattttgggatttttttttcctcctttaaaaactggacctgaacacaagctttgagttgatgtttgtaataatctcaggacctgaaagattgtagcatttagtgtgtcttaaaaattatgtactgtaccagccatggatttttgtaaatatacctgtctcccttttttgtattttagtaaaaaaaaaaaaaataaatttaaataaaagggggtggtgatgacatgtgaatgggtgcgggtatgtgtgcgtgtgtgtttgtataaggctcttttgagatgaactggtgcttgtttaatttccagctcaaatcggagcaggaatatggacaaactgctgctactgaaccctgcactgagccgaggtatttccatttggttaactaaacgctagctaccaggaaatgacgcagaagtcacgttcttcttcccactgccatcttgcctttgcattctcagttctacgtgccctttgaactttaatggtaaaacatttcacactttggatggtttgcttgtctctagtttttagaaagctcttatcactccttcctaagaaaaaagaagggcaggtaaatttttttaaccaaaaaaaaatcacacatttcataaaaccctgatgaattttggatatgtgagagggcataaacattcctaaatatggacctgtgaatttagtaaattacccccatgaatatactccttcagtgcagggatttttgtgttttttttttttttttaatttttttgcaacagccttgctcatattccaggtgtagctagcaaacccctgtttttgaagcaagagccttatttgattcagtgtagatgtttcctgtctatcctttgtgacagggccttttaatgagtgttttttctttttgtatatgttacgtgtttgttgttgtattaaataaagaggaatgtacatactaaaatcgtgtc

SEQ ID NO: 43250 - DNA, 3501 bp, Homo sapiens
aatctctaatgatagggtgtgtgtgtgtgtgtgtgtgtgtgtgtgtgtgtctgtaagtcactttttggatttttgttgctttttccagataaggccttagtagcctctaaatatcaactatgcagataaacatactccttttttttttcacatgtccctgtcttttccattctcagataacaaatgttaagacccaaagaaataaggcataagggtttttgttgaatgtgtgtttgttcttctagggaaaattaacagaagcataaaatagagatactttgtgtgttcatctatcgtaaaatgtgaactctgtattcaaaaactatctacagatgctttcactggtgcaaagctgtagttagtatcatggaatgtctttgggttgttaatgataaaatcatcccagtgttcaattctgagagttttagattatatgacacaatgttcaggtttatagagctgaatgggtgatcaaactctaattaaaaatagctttgaatattaatgttgaattcttctttcttggtttcctttagtcttcattctttattcagagctcttaatcatattgctacactagaatatgaattgtatattaggagtctggggaggaaaggttaaattgtcttttacatcctcttctcactcactctggcaacctatcctgtgtccccatagaactgagaagtaaagccctgtgcaggcctgctttagaagactttacatcccagcagaggattcaggcagggactctcaggattttaatcagactgcctttgaataatgtgatattaaattttatttttctcatagactctcaaagtaccacttgcttgaaagtagctacttgtgatctttaatttccttatattgtgatagttctacttttcagtctttcctgtgtatctccatttcatagtgcgttagtacttaaacttcggacacttttccaaactgttaaacaagtcaggaatgcttttcagaatcgcagtagtattattagggtctctgtgtctaggacttacagtcatcagtggtcatcactgggactagaggtgttcttttttttcctcttctcctttgtattaaaaaatagattttgctactgtataatgcggcatttcatgacttcctcttgttacttttcaaggttattctaaagagatggagatcttcattagaggctatttctcataatagtctgccttgcttattttcatactccccctgaaataagcctacttttgcaaacaggccatatgaatcaaattttatgtttgttcctcactattgtaaatctgtgttttaaatattttataatagagcactaatggaaacctaataaatacaaacaagataactattacccaagataacatggaaatacttctgtttttgaagttaacaacaccgtctgccctcaaagcacatttaggagtatcaaccaagaccagccagttgacatgtttttctgtgtggcaacctgcccttaaattgtcagatcttaactatcttgtgtttgctgtgcttgcagccataagctttcctccttttttgcttatccctgctgtttgtagggttagtgtgccctctgtcagaaaattgggttttctttactatacctgcaaaattaccaagggttaccccaatattgtctagaggaattaaaaagaacttattctcagttgacaaaagtattactgttatacatagttaattggaaagttggccaactttggtcacctatttttgagtcttggctatgcctttgtaattagttacatataccttctgagaccttcagataatcaatgggcctttccccattagaggtaggttcccagcctacaagtatttcctgtgatccatggcaagcctccagagaaaagattcaagctttgcactgcccttttgttgattgtcattgaaaacttactttatttcagaaagtatcaaaaataccaaattggtctttcagagagtatgtaaatctggggcttgcccttggatttcacttgttaaacaccctcaaacttaaaagaagaaaatagatctccagctggtgaaaattttgtgccccaaataatatattaatccaagtctaccaaggtaactaagtaatggatgttttctctcttttattacaagcaagaaagttcatttgcagttgtaaaaatgattaccgaactccagacctatttgctataactgattggaaataatgattctgatttttagtctgggtaaacacatacttcggtgtgaattttgataagggaaagacttgtttggtagcccaaggaaaaacaggatgtatttatacagtgaatgttcactctgcagaggaacttccctccagttacatcttcctcatacattagccacctccacacttgacatagatgccaacatgtttcaaaaccaatcttgaaggagcctaaagagttgatggtcctctaggtgaaagacaagaattactgtattgcatttgcttatagggaggtgtgtttttgctaacttgaagggatatactgtatttcaaataagtgtgtgacttaatattttgggatttttttttcctcctttaaaaactggacctgaacacaagctttgagttgatgtttgtaataatctcaggacctgaaagattgtagcatttagtgtgtcttaaaaattatgtactgtaccagccatggatttttgtaaatatacctgtctcccttttttgtattttagtaaaaaaaaaaaaaataaatttaaataaaagggggtggtgatgacatgtgaatgggtgcgggtatgtgtgcgtgtgtgtttgtataaggctcttttgagatgaactggtgcttgtttaatttccagctcaaatcggagcaggaatatggacaaactgctgctactgaaccctgcactgagccgaggtatttccatttggttaactaaacgctagctaccaggaaatgacgcagaagtcacgttcttcttcccactgccatcttgcctttgcattctcagttctacgtgccctttgaactttaatggtaaaacatttcacactttggatggtttgcttgtctctagtttttagaaagctcttatcactccttcctaagaaaaaagaagggcaggtaaatttttttaaccaaaaaaaaatcacacatttcataaaaccctgatgaattttggatatgtgagagggcataaacattcctaaatatggacctgtgaatttagtaaattacccccatgaatatactccttcagtgcagggatttttgtgttttttttttttttttaatttttttgcaacagccttgctcatattccaggtgtagctagcaaacccctgtttttgaagcaagagccttatttgattcagtgtagatgtttcctgtctatcctttgtgacagggccttttaatgagtgttttttctttttgtatatgttacgtgtttgttgttgtattaaataaagaggaatgtacatactaaaatcgtgtc

SEQ ID NO: 43251 - DNA, 3501 bp, Homo sapiens
aatctctaatgatagggtgtgtgtgtgtgtgtgtgtgtgtgtgtgtgtgtctgtaagtcactttttggatttttgttgctttttccagataaggccttagtagcctctaaatatcaactatgcagataaacatactccttttttttttcacatgtccctgtcttttccattctcagataacaaatgttaagacccaaagaaataaggcataagggtttttgttgaatgtgtgtttgttcttctagggaaaattaacagaagcataaaatagagatactttgtgtgttcatctatcgtaaaatgtgaactctgtattcaaaaactatctacagatgctttcactggtgcaaagctgtagttagtatcatggaatgtctttgggttgttaatgataaaatcatcccagtgttcaattctgagagttttagattatatgacacaatgttcaggtttatagagctgaatgggtgatcaaactctaattatcattctttattcagagctcttaatcatattgctacactagaatatgaattgtatattaggagtctggggaggaaaggttaaattgtcttttacatcctcttctcactcactctggcaacctatcctgtgtccccatagaactgagaagtaaagccctgtgcaggcctgctttagaagactttacatcccagcagaggattcaggcagggactctcaggattttaatcagactgcctttgaataatgtgatattaaattttatttttctcatagactctcaaagtaccacttgcttgaaagtagctacttgtgatctttaatttccttatattgtgatagttctacttttcagtctttcctgtgtatctccatttcatagtgcgttagtacttaaacttcggacacttttccaaactgttaaacaagtcaggaatgcttttcagaatcgcagtagtattattagggtctctgtgtctaggacttacagtcatcagtggtcatcactgggactagaggtgttcttttttttcctcttctcctttgtattaaaaaatagattttgctactgtataatgcggcatttcatgacttcctcttgttacttttcaaggttattctaaagagatggagatcttcattagaggctatttctcataatagtctgccttgcttattttcatactccccctgaaataagcctacttttgcaaacaggccatatgaatcaaattttatgtttgttcctcacaaaattttctacacattatttgttcccactttgctaataataatataatgattttattgtaaatctgtgttttaaatattttataatagagcactaatggaaacctaataaatacaaacaagataactattacccaagataacatggaaatacttctgtttttgaagttaacaacaccgtctgccctcaaagcacatttaggagtatcaaccaagaccagccagttgacatgtttttctgtgtggcaacctgcccttaaattgtcagatcttaactatcttgtgtttgctgtgcttgcagccataagctttcctccttttttgcttatccctgctgtttgtagggttagtgtgccctctgtcagaaaattgggttttctttactatacctgcaaaattaccaagggttaccccaatattgtctagaggaattaaaaagaacttattctcagttgacaaaagtattactgttatacatagttaattggaaagttggccaactttggtcacctatttttgagtcttggctatgcctttgtaattagttacatataccttctgagaccttcagataatcaatgggcctttccccattagaggtaggttcccagcctacaagtatttcctgtgatccatggcaagcctccagagaaaagattcaagctttgcactgcccttttgttgattgtcattgaaaacttactttatttcagaaagtatcaaaaataccaaattggtctttcagagagtatgtaaatctggggcttgcccttggatttcacttgttaaacaccctcaaacttaaaagaagaaaatagatctccagctggtgaaaattttgtgccccaaataatatattaatccaagtctaccaaggtaactaagtaatggatgttttctctcttttattacaagcaagaaagttcatttgcagttgtaaaaatgattaccgaactccagacctatttgctataactgattggaaataatgattctgatttttagtctgggtaaacacatacttcggtgtgaattttgataagggaaagacttgtttggtagcccaaggaaaaacaggatgtatttatacagtgaatgttcactctgcagaggaacttccctccagttacatcttcctcatacattagccacctccacacttgacatagatgccaacatgtttcaaaaccaatcttgaaggagcctaaagagttgatggtcctctaggtgaaagacaagaattactgtattgcatttgcttatagggaggtgtgtttttgctaacttgaagggatatactgtatttcaaataagtgtgtgacttaatattttgggatttttttttcctcctttaaaaactggacctgaacacaagctttgagttgatgtttgtaataatctcaggacctgaaagattgtagcatttagtgtgtcttaaaaattatgtactgtaccagccatggatttttgtaaatatacctgtctcccttttttgtattttagtaaaaaaaaaaaaaataaatttaaataaaagggggtggtgatgacatgtgaatgggtgcgggtatgtgtgcgtgtgtgtttgtataaggctcttttgagatgaactggtgcttgtttaatttccagctcaaatcggagcaggaatatggacaaactgctgctactgaaccctgcactgagccgaggtatttccatttggttaactaaacgctagctaccaggaaatgacgcagaagtcacgttcttcttcccactgccatcttgcctttgcattctcagttctacgtgccctttgaactttaatggtaaaacatttcacactttggatggtttgcttgtctctagtttttagaaagctcttatcactccttcctaagaaaaaagaagggcaggtaaatttttttaaccaaaaaaaaatcacacatttcataaaaccctgatgaattttggatatgtgagagggcataaacattcctaaatatggacctgtgaatttagtaaattacccccatgaatatactccttcagtgcagggatttttgtgttttttttttttttttaatttttttgcaacagccttgctcatattccaggtgtagctagcaaacccctgtttttgaagcaagagccttatttgattcagtgtagatgtttcctgtctatcctttgtgacagggccttttaatgagtgttttttctttttgtatatgttacgtgtttgttgttgtattaaataaagaggaatgtacatactaaaatcgtgtc

SEQ ID NO: 43252 - DNA, 3497 bp, Homo sapiens
aatctctaatgatagggtgtgtgtgtgtgtgtgtgtgtgtgtgtgtgtgtctgtaagtcactttttggatttttgttgctttttccagataaggccttagtagcctctaaatatcaactatgcagataaacatactccttttttttttcacatgtccctgtcttttccattctcagataacaaatgttaagacccaaagaaataaggcataagggtttttgttgaatgtgtgtttgttcttctagggaaaattaacagaagcataaaatagagatactttgtgtgttcatctatcgtaaaatgtgaactctgtattcaaaaactatctacagatgctttcactggtgcaaagctgtagttagtatcatggaatgtctttgggttgttaatgataaaatcatcccagtgttcaattctgagagttttagattatatgacacaatgttcaggtttatagagctgaatgggtgatcaaactctaattaaaaatagctttgaatattaatgttgaattcttctttcttggtttcctttagtcttcattctttattcagagctcttaatcatattgctacactagaatatgaattgtatattaggagtctggggaggaaaggttaaattgtcttttacatcctcttctcactcactctggcaacctatcctgtgtccccatagaactgagaagtaaagccctgtgcaggcctgctttagaagactttacatcccagcagaggattcaggcagggactctcaggattttaatcagactgcctttgaataatgtgatattaaattttatttttctcatagactctcaaagtaccacttgcttgaaagtagctacttgtgatctttaatttccttatattgtgatagttctacttttcagtctttcctgtgtatctccatttcatagtgcgttagtacttaaacttcggacacttttccaaactgttaaacaagtcaggaatgcttttcagaatcgcagtagtattattagggtctctgtgtctaggacttacagtcatcagtggtcatcactgggactagaggtgttcttttttttcctcttctcctttgtattaaaaaatagattttgctactgtataatgcggcatttcatgacttcctcttgttacttttcaaggttattctaaagagatggagatcttcattagaggctatttctcataatagtctgccttgcttattttcatactccccctgaaataagcctacttttgcaaacaggccatatgaatcaaattttatgtttgttcctcacaaaattttctacacattatttgttcccactttgctaataataatataatgattttattgtaaatctgtgttttaaatattttataatagagcactaatggaaacctaataaatacaaacaagataactattacccaagataacatggaaatacttctgtttttgaagttaacaacaccgtctgccctcaaagcacatttaggagtatcaaccaagaccagccagttgacatgtttttctgtgtggcaacctgcccttaaattgtcagatcttaactatcttgtgtttgctgtgcttgcagccataagctttcctccttttttgcttatccctgctgtttgtagggttagtgtgccctctgtcagaaaattgggttttctttactatacctgcaaaattaccaagggttaccccaatattgtctagaggaattaaaaagaacttattctcagttgacaaaagtattactgttatacatagttaattggaaagttggccaactttggtcacctatttttgagtcttggctatgcctttgtaattagttacatataccttctgagaccttcagataatcaatgggcctttccccattagaggtaggttcccagcctacaagtatttcctgtgatccatggcaagcctccagagaaaagattcaagctttgcactgcccttttgttgattgtcattgaaaacttactttatttcagaaagtatcaaaaataccaaattggtctttcagagagtatgtaaatctggggcttgcccttggatttcacttgttaaacaccctcaaacttaaaagaagaaaatagatctccagctggtgaaaattttgtgccccaaataatatattaatccaagtctaccaaggtaactaagtaatggatgttttctctcttttattacaagcaagaaagttcatttgcagttgtaaaaatgattaccgaactccagacctatttgctataactgattggaaataatgattctgatttttagtctgggtaaacacatacttcggtgtgaattttgataagggaaagacttgtttggtagcccaaggaaaaacaggatgtatttatacagtgaatgttcactctgcagaggaacttccctccagttacatcttcctcatacattagccacctccacacttgacatagatgccaacatgtttcaaaaccaatcttgaaggagcctaaagagttgatggtcctctaggtgaaagacaagaattactgtattgcatttgcttatagggaggtgtgtttttgctaacttgaagggatatactgtatttcaaataagtgtgtgacttaatattttgggatttttttttcctcctttaaaaactggacctgaacacaagctttgagttgatgtttgtaataatctcaggacctgaaagattgtagcatttagtgtgtcttaaaaattatgtactgtaccagccatggatttttgtaaatatacctgtctcccttttttgtattttagtaaaaaaaaaaaaaataaatttaaataaaagggggtggtgatgacatgtgaatgggtgcgggtatgtgtgcgtgtgtgtttgtataaggctcttttgagatgaactggtgcttgtttaatttccagctcaaatcggagcaggaatatggacaaactgctgctactgaaccctgcactgagccgaggtatttccatttggttaactaaacgctagctaccaggaaatgacgcagaagtcacgttcttcttcccactgccatcttgcctttgcattctcagttctacgtgccctttgaactttaatggtaaaacatttcacactttggatggtttgcttgtctctagtttttagaaagctcttatcactccttcctaagaaaaaagaagggcaggtaaatttttttaaccaaaaattcctaaatatggacctgtgaatttagtaaattacccccatgaatatactccttcagtgcagggatttttgtgttttttttttttttttaatttttttgcaacagccttgctcatattccaggtgtagctagcaaacccctgtttttgaagcaagagccttatttgattcagtgtagatgtttcctgtctatcctttgtgacagggccttttaatgagtgttttttctttttgtatatgttacgtgtttgttgttgtattaaataaagaggaatgtacatactaaaatcgtgtc

SEQ ID NO: 43253 - DNA, 1203 bp, Homo sapiens
gctcgcacccatagctacaccgtacggtgaatgttcactctgcagaggaacttccctccagttacatcttcctcatacattagccacctccacacttgacatagatgccaacatgtttcaaaaccaatcttgaaggagcctaaagagttgatggtcctctaggtgaaagacaagaattactgtattgcatttgcttatagggaggtgtgtttttgctaacttgaagggatatactgtatttcaaataagtgtgtgacttaatattttgggatttttttttcctcctttaaaaactggacctgaacacaagctttgagttgatgtttgtaataatctcaggacctgaaagattgtagcatttagtgtgtcttaaaaattatgtactgtaccagccatggatttttgtaaatatacctgtctcccttttttgtattttagtaaaaaaaaaaaaaataaatttaaataaaagggggtggtgatgacatgtgaatgggtgcgggtatgtgtgcgtgtgtgtttgtataaggctcttttgagatgaactggtgcttgtttaatttccagctcaaatcggagcaggaatatggacaaactgctgctactgaaccctgcactgagccgaggtatttccatttggttaactaaacgctagctaccaggaaatgacgcagaagtcacgttcttcttcccactgccatcttgcctttgcattctcagttctacgtgccctttgaactttaatggtaaaacatttcacactttggatggtttgcttgtctctagtttttagaaagctcttatcactccttcctaagaaaaaagaagggcaggtaaatttttttaaccaaaaaaaaatcacacatttcataaaaccctgatgaattttggatatgtgagagggcataaacattcctaaatatggacctgtgaatttagtaaattacccccatgaatatactccttcagtgcagggatttttgtgttttttttttttttttaatttttttgcaacagccttgctcatattccaggtgtagctagcaaacccctgtttttgaagcaagagccttatttgattcagtgtagatgtttcctgtctatcctttgtgacagggccttttaatgagtgttttttctttttgtatatgttacgtgtttgttgttgtattaaataaagaggaatgtacatactaaaatcgtgtc

SEQ ID NO: 43254 - DNA, 343 bp, Homo sapiens
aaacttcccattaaggactgtatactctaggtgaactgaattaccttccgttcactatgcccagaatacagttttctagaaactctctgtctctgtgatattcacgtcatgtaggtttcctatgtccacgactttgaaattctaaatctaatccataatttaaggttcagttaagttgccaccctcttcaaataggcttcctggaataccacaactaaaagtaaaatctctgccattgaactttattttcatataccaagattctactacagtgctaaaacataattatgactatgggctagtcacaggggcttatgcctataatcccagccctttgggaggc

SEQ ID NO: 43255 - DNA, 950 bp, Homo sapiens
cggcacgaggaaggctttttgaggtgagaggcccaggtggtcctggcaaccctgagtagaaggagagacggggtagggaacgggcccggccagaaaagaaccatttcttctgccatcttttatgcaccatagacatcgagactccagggggtcctggctcccctgtccctgcagccctgcaggtcagtgcatgatctgggttcgtgtcctgaccaggtgctcctcctttgatccgaggggaaagggactggtttatagaaagagcctaggagacaaaagggccagtccccctgcccagaatggagcagcagcaggacagacccccacgaggccccccagagaggaggaagatcccacggaggaacacatgaggttagggacccttgttcagcaccccaaacagcctgcctgtttaaagcaggcagcaggcttaggccttccctgcaaccccaacacccacaagtttgtttctctaggaaacacattcactgtctcagctggctgttactctctcagaccatatggcaaagttttccaagaaaatgccccgacaggggtgcccagcacactgcctgagggacaacagacatcagaacaaacccccagagagaaacagtcaaaatcagggcccggtgcagtgttgtcatgtggaacctgctttatccattgctgagtgttgaatgtgggtaatggttagggctttccagatctcagcagccaaagacagttattgttggaagactgtcatgtagataaccatgagcaatggctcgcctcagaatcagttcataaaattctatggtactggccccttcgtgggtattgtgtgaaatgagatggtggcgaggggtgcgctgtggaactgccgcagccacgcaggaggtccctgggggatgctttgggaagtccttgcccctgagcactgcctgattgccagggcctgtggaggt

SEQ ID NO: 43256 - DNA, 360 bp, Homo sapiens
gatgaacaagacaaggatattcactcttgccacttctattcaacaatatactaggggctctaaccagggcaattagcaagaaaatgaaattaaaggcctacagatgaaaaaggaagcactaaaagcatctctatttgcagatgatatgatcacttatatagaaaatcctaaggaatccactaaaaacccactgtaactaataaacaagtgcagcaaggttggaagatacaagatcaatatataaaaatcgactgcatttctatacagtagcagtaatgaaccaaaataaattaagaaaatccatttacaacaggataaaaaattaaatattttgaaataaatttaacaaagagcattgta

SEQ ID NO: 43257 - DNA, 286 bp, Homo sapiens
tgtttctgacctttgataagaaagaagaaatgttagttattgaaccacagaagccccaccaggtactaacttactgcatttttgcttttaattatctatatatgtctgtctgggacactagacttaccctccttaagagtaaaggctgttccttgtgtttgtgtatccagtatccagtactccaagggaaagatggtgtttagtcatgagtatctgcttgtgggacacatgtggtaacctagtgtgaagtgggtgtggatgagggctggatgatgtgagaagagaa

SEQ ID NO: 43258 - DNA, 1867 bp, Homo sapiens
ggtcaaaggcctgcgtcagttgcactgtagcctcggcagtgaaccgggaggtactaccaggtcgccgtcgttgctccgctcgctctgagagagcatggccctgagaggcgtctccgtgcggctgctgagccgcggacccggcctgcacgtccttcgcacgtgggtctcgtcggcggcgcagaccgagaaaggcgggagaacacagagccaactggctaagtcctcgcgtcccgagtttgactggcaggacccgctggtgctggaggagcagctgaccacagatgagatcctcatcagggacaccttccgcacctactgccaggagagactcatgcctcgcatcctgttggccaatcgcaacgaagtttttcatcgggagatcatttcggagatgggggagttgggtgtgctgggccccaccatcaaaggatatggctgtgctggggtttcgtctgtggcctatgggctcctggcccgagagctggagcgggtggacagtggctacaggtcggcgatgagtgtccagtcctccctcgtcatgcaccctatctatgcctatggcagcgaggaacagcggcagaagtacctgccccagctggccaagggggagctcctgggctgcttcgggctcacagagcccaacagcggaagtgaccccagcagcatggagaccagagcccactacaactcatccaacaagagctacaccctcaatgggaccaagacctggatcacgaactcgcctatggccgatctgtttgtagtgtgggctcggtgtgaagatggctgcattcggggcttcctgctggagaaggggatgcggggtctctcggcccccaggatccagggcaagttctcgctgcgggcctcagccacaggcatgatcatcatggacggtgtggaggtgccagaggagaatgtgctccctggtgcatccagcctggggggtcccttcggctgcctgaacaacgcccggtacggcatcgcgtggggcgtgcttggagcttcggagttctgcttgcacacagcccggcagtacgccctcgacaggatgcagtttggtgtcccactggccaggaaccagctgattcagaagaagctggcagacatgctcactgagattaccctgggccttcacgcctgcctgcagctcggccgcttgaaggaccaggacaaggctgcccccgagatggtttctctgctgaagaggaataactgtgggaaagccctggacatcgcccgccaggcccgagacatgctggggggtaatgggatttctgacgagtatcacgtgatccggcacgccatgaacctggaggccgtgaacacctacgaaggtacacatgacattcacgccctgatccttgggagagctatcacgggaatccaggcgttcacggccagcaagtgagccgctccatcaggggcccgaaactctcaagcccctttctggagagatgcctggctggaccgtaggagcgctgtgctctgagcttagaaagggaggtggcggatggagtgggaagtgagagacactgatttttaaatatcaaaatttcccttctgaagtcgttcggatgtgttccttaaaaagaagatggaattctctgtagagcgtctcaatccacttttaaccatggatgagagcagactccatttaccctgaaatagcagcttctcttgagaggagagtgacatggaagcaactccgtctgctgcagctgaccccctcacactgagttcacagtgcgccctccctccctcccatctgggggtagtgccttatgctgggtgttggagcagagtgagggagaggaaaataaagacctgcacatctgaccccaaggtgtcaggccggtttactggt

SEQ ID NO: 43259 - DNA, 984 bp, Homo sapiens
ggtcaaaggcctgcgtcagttgcactgtagcctcggcagtgaaccgggaggtactaccaggtcgccgtcgttgctccgctcgctctgagagagcatggccctgagaggcgtctccgtgcggctgctgagccgcggacccggcctgcacgtccttcgcacgtgggtctcgtcggcggcgcagaccgagaaaggcgggagaacacagagccaactggctaagtcctcgcgtcccgagtttgactggcaggacccgctggtgctggaggagcagctgaccacagatgagatcctcatcagggacaccttccgcacctactgccaggagagactcatgcctcgcatcctgttggccaatcgcaacgaagtttttcatcgggagatcatttcggagatgggggagttgggtgtgctgggccccaccatcaaaggatatggctgtgctggggtttcgtctgtggcctatgggctcctggcccgagagctggagcgggtggacagtggctacaggtcggcgatgagtgtccagtcctccctcgtcatgcaccctatctatgcctatggcagcgaggaacagcggcagaagtacctgccccagctgggtgagtggcttcccatggggcctggtggaaggaagacagtctctgaggtctggaactcaagggtggggctgtcccctgagcctattctgtccctatctcaaagatagcataagtggccacctggacccccgccagaccctgggcttcacctggagatctgatccctggccagcctgactgtccccctctgtgaccaccgtcatctccctatgctttctgtgttccccagtccagcccaaagtttaaagtccaccaggttcctgctggccatttgcagtggctcacacctataatcccagcactttgggagggtgaagtgagaagatcccttgagcccaagagttcgaaaccagcctgggcaacgtaaggagaccccatgtctatt

SEQ ID NO: 43260 - DNA, 1935 bp, Homo sapiens
ggtcaaaggcctgcgtcagttgcactgtagcctcggcagtgaaccgggaggtactaccaggtaaggaaggtgcggtggccccagccgtgggtgagaggagctccgctctgacacccccgctcctgtaggtcgccgtcgttgctccgctcgctctgagagagcatggccctgagaggcgtctccgtgcggctgctgagccgcggacccggcctgcacgtccttcgcacgtgggtctcgtcggcggcgcagaccgagaaaggcgggagaacacagagccaactggctaagtcctcgcgtcccgagtttgactggcaggacccgctggtgctggaggagcagctgaccacagatgagatcctcatcagggacaccttccgcacctactgccaggagagactcatgcctcgcatcctgttggccaatcgcaacgaagtttttcatcgggagatcatttcggagatgggggagttgggtgtgctgggccccaccatcaaaggatatggctgtgctggggtttcgtctgtggcctatgggctcctggcccgagagctggagcgggtggacagtggctacaggtcggcgatgagtgtccagtcctccctcgtcatgcaccctatctatgcctatggcagcgaggaacagcggcagaagtacctgccccagctggccaagggggagctcctgggctgcttcgggctcacagagcccaacagcggaagtgaccccagcagcatggagaccagagcccactacaactcatccaacaagagctacaccctcaatgggaccaagacctggatcacgaactcgcctatggccgatctgtttgtagtgtgggctcggtgtgaagatggctgcattcggggcttcctgctggagaaggggatgcggggtctctcggcccccaggatccagggcaagttctcgctgcgggcctcagccacaggcatgatcatcatggacggtgtggaggtgccagaggagaatgtgctccctggtgcatccagcctggggggtcccttcggctgcctgaacaacgcccggtacggcatcgcgtggggcgtgcttggagcttcggagttctgcttgcacacagcccggcagtacgccctcgacaggatgcagtttggtgtcccactggccaggaaccagctgattcagaagaagctggcagacatgctcactgagattaccctgggccttcacgcctgcctgcagctcggccgcttgaaggaccaggacaaggctgcccccgagatggtttctctgctgaagaggaataactgtgggaaagccctggacatcgcccgccaggcccgagacatgctggggggtaatgggatttctgacgagtatcacgtgatccggcacgccatgaacctggaggccgtgaacacctacgaaggtacacatgacattcacgccctgatccttgggagagctatcacgggaatccaggcgttcacggccagcaagtgagccgctccatcaggggcccgaaactctcaagcccctttctggagagatgcctggctggaccgtaggagcgctgtgctctgagcttagaaagggaggtggcggatggagtgggaagtgagagacactgatttttaaatatcaaaatttcccttctgaagtcgttcggatgtgttccttaaaaagaagatggaattctctgtagagcgtctcaatccacttttaaccatggatgagagcagactccatttaccctgaaatagcagcttctcttgagaggagagtgacatggaagcaactccgtctgctgcagctgaccccctcacactgagttcacagtgcgccctccctccctcccatctgggggtagtgccttatgctgggtgttggagcagagtgagggagaggaaaataaagacctgcacatctgaccccaaggtgtcaggccggtttactggt

SEQ ID NO: 43261 - DNA, 2175 bp, Homo sapiens
ggtcaaaggcctgcgtcagttgcactgtagcctcggcagtgaaccgggaggtactaccaggtcgccgtcgttgctccgctcgctctgagagagcatggccctgagaggcgtctccgtgcggctgctgagccgcggacccggcctgcacgtccttcgcacgtgggtctcgtcggcggcgcagaccgagaaaggcgggagaacacagagccaactggctaagtgtaaggacctctggtcgcaccgtgtgtctgctgcccctgttcagctgtctgtctgccgcaggtcgactctgtcccagaatccgagagctgcccgagcggggtggcagggtcgtggccagggtcagaggcactaaggcagtgagtgcgctgtgcctgcggggccggagaaaagtcacctgatcagtctcgcttgcagctcgcactagccggggggcgacatgggtgttggggggtagggctgatgagggtccgagaagggagggcacagtgatcttgcggactggaccgaggcgaattccccttcccagcctcgcgtcccgagtttgactggcaggacccgctggtgctggaggagcagctgaccacagatgagatcctcatcagggacaccttccgcacctactgccaggagagactcatgcctcgcatcctgttggccaatcgcaacgaagtttttcatcgggagatcatttcggagatgggggagttgggtgtgctgggccccaccatcaaaggatatggctgtgctggggtttcgtctgtggcctatgggctcctggcccgagagctggagcgggtggacagtggctacaggtcggcgatgagtgtccagtcctccctcgtcatgcaccctatctatgcctatggcagcgaggaacagcggcagaagtacctgccccagctggccaagggggagctcctgggctgcttcgggctcacagagcccaacagcggaagtgaccccagcagcatggagaccagagcccactacaactcatccaacaagagctacaccctcaatgggaccaagacctggatcacgaactcgcctatggccgatctgtttgtagtgtgggctcggtgtgaagatggctgcattcggggcttcctgctggagaaggggatgcggggtctctcggcccccaggatccagggcaagttctcgctgcgggcctcagccacaggcatgatcatcatggacggtgtggaggtgccagaggagaatgtgctccctggtgcatccagcctggggggtcccttcggctgcctgaacaacgcccggtacggcatcgcgtggggcgtgcttggagcttcggagttctgcttgcacacagcccggcagtacgccctcgacaggatgcagtttggtgtcccactggccaggaaccagctgattcagaagaagctggcagacatgctcactgagattaccctgggccttcacgcctgcctgcagctcggccgcttgaaggaccaggacaaggctgcccccgagatggtttctctgctgaagaggaataactgtgggaaagccctggacatcgcccgccaggcccgagacatgctggggggtaatgggatttctgacgagtatcacgtgatccggcacgccatgaacctggaggccgtgaacacctacgaaggtacacatgacattcacgccctgatccttgggagagctatcacgggaatccaggcgttcacggccagcaagtgagccgctccatcaggggcccgaaactctcaagcccctttctggagagatgcctggctggaccgtaggagcgctgtgctctgagcttagaaagggaggtggcggatggagtgggaagtgagagacactgatttttaaatatcaaaatttcccttctgaagtcgttcggatgtgttccttaaaaagaagatggaattctctgtagagcgtctcaatccacttttaaccatggatgagagcagactccatttaccctgaaatagcagcttctcttgagaggagagtgacatggaagcaactccgtctgctgcagctgaccccctcacactgagttcacagtgcgccctccctccctcccatctgggggtagtgccttatgctgggtgttggagcagagtgagggagaggaaaataaagacctgcacatctgaccccaaggtgtcaggccggtttactggt

SEQ ID NO: 43262 - DNA, 1831 bp, Homo sapiens
ggtcaaaggcctgcgtcagttgcactgtagcctcggcagtgaaccgggaggtactaccaggtcgccgtcgttgctccgctcgctctgagagagcatggccctgagaggcgtctccgtgcggctgctgagccgcggacccggcctgcacgtccttcgcacgtgggtctcgtcggcggcgcagaccgcctcgcgtcccgagtttgactggcaggacccgctggtgctggaggagcagctgaccacagatgagatcctcatcagggacaccttccgcacctactgccaggagagactcatgcctcgcatcctgttggccaatcgcaacgaagtttttcatcgggagatcatttcggagatgggggagttgggtgtgctgggccccaccatcaaaggatatggctgtgctggggtttcgtctgtggcctatgggctcctggcccgagagctggagcgggtggacagtggctacaggtcggcgatgagtgtccagtcctccctcgtcatgcaccctatctatgcctatggcagcgaggaacagcggcagaagtacctgccccagctggccaagggggagctcctgggctgcttcgggctcacagagcccaacagcggaagtgaccccagcagcatggagaccagagcccactacaactcatccaacaagagctacaccctcaatgggaccaagacctggatcacgaactcgcctatggccgatctgtttgtagtgtgggctcggtgtgaagatggctgcattcggggcttcctgctggagaaggggatgcggggtctctcggcccccaggatccagggcaagttctcgctgcgggcctcagccacaggcatgatcatcatggacggtgtggaggtgccagaggagaatgtgctccctggtgcatccagcctggggggtcccttcggctgcctgaacaacgcccggtacggcatcgcgtggggcgtgcttggagcttcggagttctgcttgcacacagcccggcagtacgccctcgacaggatgcagtttggtgtcccactggccaggaaccagctgattcagaagaagctggcagacatgctcactgagattaccctgggccttcacgcctgcctgcagctcggccgcttgaaggaccaggacaaggctgcccccgagatggtttctctgctgaagaggaataactgtgggaaagccctggacatcgcccgccaggcccgagacatgctggggggtaatgggatttctgacgagtatcacgtgatccggcacgccatgaacctggaggccgtgaacacctacgaaggtacacatgacattcacgccctgatccttgggagagctatcacgggaatccaggcgttcacggccagcaagtgagccgctccatcaggggcccgaaactctcaagcccctttctggagagatgcctggctggaccgtaggagcgctgtgctctgagcttagaaagggaggtggcggatggagtgggaagtgagagacactgatttttaaatatcaaaatttcccttctgaagtcgttcggatgtgttccttaaaaagaagatggaattctctgtagagcgtctcaatccacttttaaccatggatgagagcagactccatttaccctgaaatagcagcttctcttgagaggagagtgacatggaagcaactccgtctgctgcagctgaccccctcacactgagttcacagtgcgccctccctccctcccatctgggggtagtgccttatgctgggtgttggagcagagtgagggagaggaaaataaagacctgcacatctgaccccaaggtgtcaggccggtttactggt

SEQ ID NO: 43263 - DNA, 1784 bp, Homo sapiens
ggtcaaaggcctgcgtcagttgcactgtagcctcggcagtgaaccgggaggtactaccaggtcgccgtcgttgctccgctcgctctgagagagcatggccctgagaggcgtctccgtgcggctgctgagccgcggacccggcctgcacgtccttcgcacgtgggtctcgtcggcggcgcagaccgagaaaggcgggagaacacagagccaactggctaagtcctcgcgtcccgagtttgactggcaggacccgctggtgctggaggagcagctgaccacagatgagatcctcatcagggacaccttccgcacctactgccaggagagactcatgcctcgcatcctgttggccaatcgcaacgaagtttttcatcgggagatcatttcggagatgggggagttgggtgtgctgggccccaccatcaaaggatatggctgtgctggggtttcgtctgtggcctatgggctcctggcccgagagctggagcgggtggacagtggctacaggtcggcgatgagtgtccagtcctccctcgtcatgcaccctatctatgcctatggcagcgaggaacagcggcagaagtacctgccccagctggccaagggggagctcctgggctgcttcgggctcacagagcccaacagcggaagtgaccccagcagcatggagaccagagcccactacaactcatccaacaagagctacaccctcaatgggaccaagacctgtgtgggctcggtgtgaagatggctgcattcggggcttcctgctggagaaggggatgcggggtctctcggcccccaggatccagggcaagttctcgctgcgggcctcagccacaggcatgatcatcatggacggtgtggaggtgccagaggagaatgtgctccctggtgcatccagcctgggggtgcttggagcttcggagttctgcttgcacacagcccggcagtacgccctcgacaggatgcagtttggtgtcccactggccaggaaccagctgattcagaagaagctggcagacatgctcactgagattaccctgggccttcacgcctgcctgcagctcggccgcttgaaggaccaggacaaggctgcccccgagatggtttctctgctgaagaggaataactgtgggaaagccctggacatcgcccgccaggcccgagacatgctggggggtaatgggatttctgacgagtatcacgtgatccggcacgccatgaacctggaggccgtgaacacctacgaaggtacacatgacattcacgccctgatccttgggagagctatcacgggaatccaggcgttcacggccagcaagtgagccgctccatcaggggcccgaaactctcaagcccctttctggagagatgcctggctggaccgtaggagcgctgtgctctgagcttagaaagggaggtggcggatggagtgggaagtgagagacactgatttttaaatatcaaaatttcccttctgaagtcgttcggatgtgttccttaaaaagaagatggaattctctgtagagcgtctcaatccacttttaaccatggatgagagcagactccatttaccctgaaatagcagcttctcttgagaggagagtgacatggaagcaactccgtctgctgcagctgaccccctcacactgagttcacagtgcgccctccctccctcccatctgggggtagtgccttatgctgggtgttggagcagagtgagggagaggaaaataaagacctgcacatctgaccccaaggtgtcaggccggtttactggt

SEQ ID NO: 43264 - DNA, 252 bp, Homo sapiens
gtcgccgtcgttgctccgctcgctctgagagagcatggccctgagaggcgtctccgtgcggctgctgagccgcggacccggcctgcacgtccttcgcacgtgggtctcgtcggcggcgcagaccggtcagtgtggggtcgggagtgtggagggaaggagggaggaactgggggtttagggactttccggggtgactttcccgttctgtgcttgcagagaaaggcgggagaacacagagccaactggctaagt

SEQ ID NO: 43265 - DNA, 1635 bp, Homo sapiens
ggtcaaaggcctgcgtcagttgcactgtagcctcggcagtgaaccgggaggtactaccaggtcgccgtcgttgctccgctcgctctgagagagcatggccctgagaggcgtctccgtgcggctgctgagccgcggacccggcctgcacgtccttcgcacgtgggtctcgtcggcggcgcagaccgagaaaggcgggagaacacagagccaactggctaagtcctcgcgtcccgagtttgactggcaggacccgctggtgctggaggagcagctgaccacagatgagatcctcatcagggacaccttccgcacctactgccaggagagactcatgcctcgcatcctgttggccaatcgcaacgaagtttttcatcgggagatcatttcggagatgggggagttgggtgtgctgggccccaccatcaaaggatatggctgtgctggggtttcgtctgtggcctatgggctcctggcccgagagctggagcgggtggacagtggctacaggtcggcgatgagtgtccagtcctccctcgtcatgcaccctatctatgcctatggcagcgaggaacagcggcagaagtacctgccccagctggccaagggggagctcctgggctgcttcgggctcacagagcccaacagcggaagtgaccccagcagcatggagaccagagcccactacaactcatccaacaagagctacaccctcaatgggaccaagacctggatcacgaactcgcctatggccgatctgtttgtagtgtgggctcggtgtgaagatggctgcattcggggcttcctgctggagaaggggatgcggggtctctcggcccccaggatccagggcaagttctcgctgcgggcctcagccacaggcatgatcatcatggacggtgtggaggtgccagaggagaatgtgctccctggtgcatccagcctggggggtcccttcggctgcctgaacaacgcccggtacggcatcgcgtggggcgtgcttggagcttcggagttctgcttgcacacagcccggcagtacgccctcgacaggatgcagtttggtgtcccactggccaggaaccagctgattcagaagaagctggcagacatgctcactgagattaccctgggccttcacgcctgcctgcagctcggccgcttgaaggaccaggacaaggctgcccccgagatggtttctctgctgaagaggaataactgtgggaaagccctggacatcgcccgccaggcccgagacatgctggggggtaatgggatttctgacgagtatcacgtgatccggcacgccatgaacctggaggccgtgaacacctacgaagtcgttcggatgtgttccttaaaaagaagatggaattctctgtagagcgtctcaatccacttttaaccatggatgagagcagactccatttaccctgaaatagcagcttctcttgagaggagagtgacatggaagcaactccgtctgctgcagctgaccccctcacactgagttcacagtgcgccctccctccctcccatctgggggtagtgccttatgctgggtgttggagcagagtgagggagaggaaaataaagacctgcacatctgaccccaaggtgtcaggccggtttactggt

SEQ ID NO: 43266 - DNA, 2141 bp, Homo sapiens
ggtcaaaggcctgcgtcagttgcactgtagcctcggcagtgaaccgggaggtactaccaggtcgccgtcgttgctccgctcgctctgagagagcatggccctgagaggcgtctccgtgcggctgctgagccgcggacccggcctgcacgtccttcgcacgtgggtctcgtcggcggcgcagaccgagaaaggcgggagaacacagagccaactggctaagtcctcgcgtcccgagtttgactggcaggacccgctggtgctggaggagcagctgaccacagatgagatcctcatcagggacaccttccgcacctactgccaggagagactcatgcctcgcatcctgttggccaatcgcaacgaagtttttcatcgggagatcatttcggagatgggggagttgggtgtgctgggccccaccatcaaaggatatggctgtgctggggtttcgtctgtggcctatgggctcctggcccgagagctggagcgggtggacagtggctacaggtcggcgatgagtgtccagtcctccctcgtcatgcaccctatctatgcctatggcagcgaggaacagcggcagaagtacctgccccagctggccaagggggagctcctgggctgcttcgggctcacagagcccaacagcggaagtgaccccagcagcatggagaccagagcccactacaactcatccaacaagagctacaccctcaatgggaccaagacctggatcacgaactcgcctatggccgatctgtttgtagtgtgggctcggtgtgaagatggctgcattcggggcttcctgctggagaaggggatgcggggtctctcggcccccaggatccagggcaagttctcgctgcgggcctcagccacaggcatgatcatcatggacggtgtggaggtgccagaggagaatgtgctccctggtgcatccagcctggggggtcccttcggctgcctgaacaacgcccggtacggcatcgcgtggggcgtgcttggagcttcggagttctgcttgcacacagcccggcagtacgccctcgacaggatgcagtttggtgtcccactggccaggaaccagctgattcagaagaagctggcagacatgctcactgagattaccctgggccttcacgcctgcctgcagctcggccgcttgaaggaccaggacaagtaggggctgtgtggtgggggcggggggatggcagcggtggctggaggaccttgtgtccttcctggagagaaaggtccttcctgcctggtggccctggggacctgaaccttctgctgtccctcttgtccttgatgggctgggctgaggacagccccactggtccctcattgggagcttggctgcatcagggaatccccaccccgggctaggtttgcttggagcatcgggatgccaggatccccagtccttgttaccctcatgtgccactcccagggctgcccccgagatggtttctctgctgaagaggaataactgtgggaaagccctggacatcgcccgccaggcccgagacatgctggggggtaatgggatttctgacgagtatcacgtgatccggcacgccatgaacctggaggccgtgaacacctacgaaggtacacatgacattcacgccctgatccttgggagagctatcacgggaatccaggcgttcacggccagcaagtgagccgctccatcaggggcccgaaactctcaagcccctttctggagagatgcctggctggaccgtaggagcgctgtgctctgagcttagaaagggaggtggcggatggagtgggaagtgagagacactgatttttaaatatcaaaatttcccttctgaagtcgttcggatgtgttccttaaaaagaagatggaattctctgtagagcgtctcaatccacttttaaccatggatgagagcagactccatttaccctgaaatagcagcttctcttgagaggagagtgacatggaagcaactccgtctgctgcagctgaccccctcacactgagttcacagtgcgccctccctccctcccatctgggggtagtgccttatgctgggtgttggagcagagtgagggagaggaaaataaagacctgcacatctgaccccaaggtgtcaggccggtttactggt

SEQ ID NO: 43267 - DNA, 1620 bp, Homo sapiens
ggtcaaaggcctgcgtcagttgcactgtagcctcggcagtgaaccgggaggtactaccaggtcgccgtcgttgctccgctcgctctgagagagcatggccctgagaggcgtctccgtgcggctgctgagccgcggacccggcctgcacgtccttcgcacgtgggtctcgtcggcggcgcagaccgagaaaggcgggagaacacagagccaactggctaagtcctcgcgtcccgagtttgactggcaggacccgctggtgctggaggagcagctgaccacagatgagatcctcatcagggacaccttccgcacctactgccaggagagactcatgcctcgcatcctgttggccaatcgcaacgaagtttttcatcgggagatcatttcggagatgggggagttgggtgtgctgggccccaccatcaaaggatatggctgtgctggggtttcgtctgtggcctatgggctcctggcccgagagctggagcgggtggacagtggctacaggtcggcgatgagtgtccagtcctccctcgtcatgcaccctatctatgcctatggcagcgaggaacagcggcagaagtacctgccccagctggccaagggggagctcctgggctgcttcgggctcacagagcccaacagcggaagtgaccccagcagcatggagaccagagcccactacaactcatccaacaagagctacaccctcaatgggaccaagacctggatcacgaactcgcctatggccgatctgtttgtagtgtgggctcggtgtgaagatggctgcattcggggcttcctgctggagaaggggatgcggggtctctcggcccccaggatccagggcaagttctcgctgcgggcctcagccacaggcatgatcttcacgcctgcctgcagctcggccgcttgaaggaccaggacaaggctgcccccgagatggtttctctgctgaagaggaataactgtgggaaagccctggacatcgcccgccaggcccgagacatgctggggggtaatgggatttctgacgagtatcacgtgatccggcacgccatgaacctggaggccgtgaacacctacgaaggtacacatgacattcacgccctgatccttgggagagctatcacgggaatccaggcgttcacggccagcaagtgagccgctccatcaggggcccgaaactctcaagcccctttctggagagatgcctggctggaccgtaggagcgctgtgctctgagcttagaaagggaggtggcggatggagtgggaagtgagagacactgatttttaaatatcaaaatttcccttctgaagtcgttcggatgtgttccttaaaaagaagatggaattctctgtagagcgtctcaatccacttttaaccatggatgagagcagactccatttaccctgaaatagcagcttctcttgagaggagagtgacatggaagcaactccgtctgctgcagctgaccccctcacactgagttcacagtgcgccctccctccctcccatctgggggtagtgccttatgctgggtgttggagcagagtgagggagaggaaaataaagacctgcacatctgaccccaaggtgtcaggccggtttactggt

SEQ ID NO: 43268 - DNA, 1978 bp, Homo sapiens
ggtcaaaggcctgcgtcagttgcactgtagcctcggcagtgaaccgggaggtactaccaggtcgccgtcgttgctccgctcgctctgagagagcatggccctgagaggcgtctccgtgcggctgctgagccgcggacccggcctgcacgtccttcgcacgtgggtctcgtcggcggcgcagaccgagaaaggcgggagaacacagagccaactggctaagtcctcgcgtcccgagtttgactggcaggacccgctggtgctggaggagcagctgaccacagatgagatcctcatcagggacaccttccgcacctactgccaggagagactcatgcctcgcatcctgttggccaatcgcaacgaagtttttcatcgggagatcatttcggagatgggggagttgggtgtgctgggccccaccatcaaaggatatggctgtgctggggtttcgtctgtggcctatgggctcctggcccgagagctggagcgggtggacagtggctacaggtcggcgatgagtgtccagtcctccctcgtcatgcaccctatctatgcctatggcagcgaggaacagcggcagaagtacctgccccagctggccaagggggagctcctgggctgcttcgggctcacagagcccaacagcggaagtgaccccagcagcatggagaccagagcccactacaactcatccaacaagagctacaccctcaatgggaccaagacctggatcacgaactcgcctatggccgatctgtttgtagtgtgggctcggtgtgaagatggctgcattcggggcttcctgctggagaaggggatgcggggtctctcggcccccaggatccagggcaagttctcgctgcgggcctcagccacaggcatgatcatcatggacggtgtggaggtgccagaggagaatgtgctccctggtgcatccagcctggggggtcccttcggctgcctgaacaacgcccggtacggcatcgcgtggggcgtgcttggagcttcggagttctgcttgcacacagcccggcagtacgccctcgacaggatgcagtttggtgtcccactggccaggaaccagctgattcagaagaagctggcagacatgctcactgagattaccctgggccttcacgcctgcctgcagctcggccgcttgaaggaccaggacaaggctgcccccgagatggtttctctgctgaagaggaataactgtgggaaagccctggacatcgcccgccaggcccgagacatgctggggggtaatgggatttctgacgagtatcacgtgatccggcacgccatgaacctggaggccgtgaacacctacgaaggtgagctcattcattccacagctgctgctgaaacaatgactcccacagaaccatctccagaccctcaccccaccccgagttccgggtcagaaagttgaactgtatcctggacatgtggatgtccctggccaccgaaagtggctcagataaacaaggacaacacagaactcatgttcttgtctctgccagagaagccaccacctaccggaaaccaccacaagctggaaagcagacagcagtgatgtgcttgtaagcatttagcaactggctgtgtgatgggggggaagccctgattcgtagtgtttgccaatttccgtggtgcagagcctcccaccattagccaatttcaggctaccaacatgaagacgctaaatgccaagttgggaagagatgtgtagaattggctctttcaagccggtaggagctggccccagtacatcatggccgggaaacatcctccctcatccccttcctgtgtcttatggcacaaggcacttcctccatctgccctgctaaaggccaccccccccacaccccccataaaagcctcccactagacctccctacacccacacattctccctcccaaccattctctacaaagcagccatatttttttattaatattttttgagacaggg

SEQ ID NO: 43269 - DNA, 930 bp, Homo sapiens
ggtcaaaggcctgcgtcagttgcactgtagcctcggcagtgaaccgggaggtactaccaggtcgccgtcgttgctccgctcgctctgagagagcatggccctgagaggcgtctccgtgcggctgctgagccgcggacccggcctgcacgtccttcgcacgtgggtctcgtcggcggcgcagaccgagaaaggcgggagaacacagagccaactggctaagtcctcgcgtcccgagtttgactggcaggacccgctggtgctggaggagcagctgaccacagatgagatcctcatcagggacaccttccgcacctactgccaggagagactcatgcctcgcatcctgttggccaatcgcaacgaagtttttcatcgggagatcatttcggagatgggggagttgggtgtgctgggccccaccatcaaaggatatggctgtgctggggtttcgtctgtggcctatgggctcctggcccgagagctggagcgggtggacagtggctacaggtcggcgatgagtgtccagtcctccctcgtcatgcaccctatctatgcctatggcagcgaggaacagcggcagaagtacctgccccagctggccaagggggagctcctgggctgcttcgggctcacagagcccaacagcggaagtgaccccagcagcatggagaccagagcccactacaactcatcatggggctcctgtacaaggtgctgggcgtcctcttctttgccatagcctgcttcttatacaagcccctgtccgagtcttcagatggcctggaaacttgtctgcccagccagtcctcagcccctgacagtgccacagatagccagctccagagcagcgtctgaccaccgcccgcgcccacccggccacggcgggcactcagcatttcctgatgacagaacagtgccgtagccagtctg

SEQ ID NO: 43270 - DNA, 874 bp, Homo sapiens
cttcaaaaggcaaattctctatttcccccactttgattatctgcttatgctcctaaaataatgtaaatatggtcattaatcatctacaacattgtcaattaggagagtaaagccagtaatgaactctacatccctgacctcatatggtatgttgcattttaagggagctgtttttatcaatgacaatcgtattatttgtgctcataacctgggctctacatccagtgaaaggattttgatacagaatctttatttgaagagaactacacaaaaacaccatcaccatcatacctgatgtctgctattgttgaaataggcttcagcactgtagctggtggaaaccaggtcaccaaagacactgcccttgtacctggaaggcccgtccctgcccccattcacacagtgaattcatttagaagagaggaatgctgtagacagagtcattagaaaacccttcatgactgtggcgtggaaaagggctggcaaggatcacaaacagctttcctgggtttggtcttacagcatggacttcttcaccctcatctacacgtaaaatttattaacttcaaggagaggagatcagggttgcctctaccttgcattcctatgtagccatgaattaattcccaaatgccagtgtgagcctgttttccttttcatacatcgtatttgaggaaacagctggaaatattactctgtgtgccacacatcccgattcagcacagtctcttgttcccagagtggagtaaatgagtaaagaaattattcatccgccttttacctaacttggtgtgtgaccaataaattctctcaagattgattcaggttcctatattcatggaaacaaaaaaagaaaattgggcagaaaataata

SEQ ID NO: 43271 - DNA, 410 bp, Homo sapiens
tactcttctcccaagcttcttggtgttccgtggactagggaaacatgtttacctcaaattctatgaagacaagggtattggtttctcacctgttctgtttgggcagtgccaggaaacactaatgggatatgtgcttcccgacttctctctaatgtttctaggatctcctctgtttctcttttcattggaaaagaaacatgaagagagaaaaattcaccttgtcctggtcaccttttctcttactgaatagctagactttctcttgttcttccgtactagtgagggcaactccagaagccccgaagggcactcagctctaaatggctttgttaggggagcaaggcatggaagccagtggagggcagtggagcctcgactcaagtaaacaccaagggcaacgaacggcaatg

SEQ ID NO: 43272 - DNA, 459 bp, Homo sapiens
caatgcaggacaaacaaagcctgggcgggaacaaggtgagggtggaagcagggccctgtttggtcctgggacagtgtgggttctacccgatcgacaatggaaagtcactgaaggtctccattggaggtgacacagtcggatctgcatttgaggaagatggcatcacctgttgtgaagagaaggacccagaaggcggcagcggtggaggtgagtgcccctcaggctgccagggatggaacccgggggttctgaggaggccaagtccagagcgatgggcatgagtgagggtggagacaacccaaggggagggagcctcctggcccaggcacccaggcagatggggtccctcattaagaagggacaggtgtgggacacagggccagggagtgggaggaagggtggcctccgtcaagtagaggtgtctgacagacggatgtgaggacagcctgagctagagac

SEQ ID NO: 43273 - DNA, 371 bp, Homo sapiens
ggcaaccgacacatctggatgagggtgggacaagtgaacagtggtgggattaattatacaagcaaacagtggtggctttaaggtccagcttttaaaaagctggggccaaaaagttaggtgttttaaattctgggtcatgccccttattagctgtgtgacactggacaaattacttagcctctctaagccatacttttggagatcatttgaaatatagcacataggtatatgaaaaataaacaggtaatggctgggtgtggtagctcacgcctataatcccagcattttggcaggccaaggtgaaacagattacctgaggtcaggagttcaagaccagcctggccaacatggtgaaacaccgtctctactac

SEQ ID NO: 43274 - DNA, 509 bp, Homo sapiens
ccattcctgtatcttcaggggaccagttagactatattctttcttaacccttcaaatctgaaattatatatattttattaaaaatgatataatgcctatagaaacattattccaatatatgacaccaagagacttataattacaatgatgatgatgatgatgatgatgatgactatatcaatgaagctggaactaccataggagctctggtttgatagctatggataatgagatgttctatttgtgaattttgtcttaactgaaaattcttctaatgcttttcatcttcctaggggagcaagaaatatgttatttttttcaaagttaacagacgtgagagttgaaggcacagtagagcaattaataggtatttaaataagtaggaactgaagtattgattgtgtatttttgcctgtgtgtgaaaaacttttgctttttatttcctcacatttccttccagctcttgtcaatatattgaagtgcagtcagtatggttttatttctgtggg

SEQ ID NO: 43275 - DNA, 347 bp, Homo sapiens
agtttatttctaagaccccaagctcttggtgccattaagaaaatgtttattggtgctttttttttgacagttgataacgctgcggtaaaagactccaatacatctgtagccactcagcagcatggcaaggtttccaaagcagggatgcctccctcttctcctagcagcagatgcaaaggctgtttaaatggaagcagctaggctcttaaagaagtagaacaggttttctaacctaatagaaaattagtctcagcaaatgttttgaaaacctcaaatcatcactaaccaacagttagtgaatgaaagccttccagaacaaaggataatgttagttgttctcccttctt

SEQ ID NO: 43276 - DNA, 375 bp, Homo sapiens
gtgtccctttgcattctctgtacctagcatggtgcctggcaaatagtaggcactcaattaatgttagttgaaaaacgcatcctcaccctgttttctcaattagtattaggattaaatgtgaagaaagttcattttagaaaaataaaattgagttgcaaacttttaaggttcattctaatgtaaagatttaggattctattttgggagttctaaggtgtagttggaaacagtgattgaaaactggaaatgtaaatggctttcatgaatattttatgcaaaatctctaatttggcaagtctttgttactattaatagaaacattgtcattataagcagctcataaatattcattaatcaattatttggtttggtgtt

SEQ ID NO: 43277 - DNA, 356 bp, Homo sapiens
accataaaaagggctggacttgagcatggggaagagggggaagcttcaaaaaacttcaaactgaatataagggattgaatgggagtttgctagatgggaaatgcgaagaggcaacacaggagtaaaacatggaatactcccaactctggagcttagaatgtatgtgggaaagtagtagtagaggggcaggtgaaacagccagattgtgaggggatctcagtgtcacattgagacatttggacttgatatggaaagtcagtaaaggacgtaaagcagttgattgatgtggattttcttttagaaggagggcattaatggctagacaggacaagagagagcacaagaatctgggtaca

SEQ ID NO: 43278 - DNA, 401 bp, Homo sapiens
ccagctaatttttgtatttttagtagagacagggtttcaccatgttggccaggctgggtttgaactcctgaccttgtgatcctcccacctcagccttccaaggtgctggaattacaggcgtgagccactgcgcccagccatcttctgcattttttgaacagccacctaactcgttttccttatctgatctcactctaggcctgctcttatactgatactgctaacagagtatcatcctaaaacagagatcttatttaaattagttatctctgtaaagtactatcactgttccaccattaccaatgattaagatctaaagttcttcatatggcattcactcagcctctatacgctggcctcaatgttccctttgcacccaaacctctaactccctttcatga

SEQ ID NO: 43279 - DNA, 424 bp, Homo sapiens
ccagtccctgcattctcccgatgttgtcatatgcgcatacagcttcagatagacttacctgttggttccaatatcaaagcatcatgggtgagattggactacatgctcctgagatttttctcccaaaaccttttccttggctgtaattctgaggttcaggctgacagtatgtgacattaactcggctcctatttctttccttctgcataatattcttccaacaattttttttgttttgttttgtttttggtgagatggagttttactcttgttgcccaggctggagtgcaatggcgcgatcttggctcactgcatcctccacctcccagagaatgccttgaacccaggagacagaggttgcatgagccaagattgcagcattgcactccagcctggggcaacaagagcgaaactccatctcaaa

SEQ ID NO: 43280 - DNA, 820 bp, Homo sapiens
  misc_feature (51)..(51): n is a, c, g, or t
  misc_feature (63)..(63): n is a, c, g, or t
gtaattaaaaatgaattgtataaaaagatacagagaacacgaaaggaaaancctcaggttgtngctgcagtactgaagagcaacttcagctattgagttacacctcaatgcaacctcctggcaggccagccttaagcccagcagtccaaccatgcatctaagctgagttctcatcagagccaacttcaattataaacaactgagatgatgccagaggccagaatccctgagaacccaatttgctgtcatcaccgcagctgaaacaaggcgcttggcatctagaaaagctgatctgtaggaaatttccaatagagttcaattttttctaagtttaaagtgtacaatatcatcaaggtcagacactcgagataaaactaggcttgtgtttaaatataataaaaatatttgaagaatagtaagagtggtgactacttttacacaggaatgtttcaaataaattgtttttttcttgtgccttttaaattttgtgatttgtcaatgagatgctgacatgtttttaatgaagcatgccttgtaaaataataagtgaatgaaaactacacagtaatatttacatcaacaaagctagaagaagactgtatgtctcaagaggctccatcatctacccagtggccacttcaccaaattaagatccaaataccaaaaagaaaagtaattaaaatttgtgttgtatgccttataagaccaaacctataaaatgaggggaaacttcacaattacttgtaatttgctctgtggaattgtaacagatggattataaagatgattccatgataaacatctaaatgtgggttactac

SEQ ID NO: 43281 - DNA, 786 bp, Homo sapiens
actgaagagcaacttcagctactgaggtatctatcagaagtcttactctccaaaaagcctctgttacacctcaatgcaacctcctggcaggccagccttaagcccagcagtccaaccatgcatctaagctgagttctcatcagagccaacttcaattataaacaactgagatgatgccagaggccagaatccctgagaacccaatttgctgtcatcaccgcagctgaaacaaggcgcttggcatctagaaaagctgatctgtaggaaatttccaatagagttcaattttttctaagtttaaagtgtacaatatcatcaaggtcagacactcgagataaaactaggcttgtgtttaaatataataaaaatatttgaagaatagtaagagtggtgactacttttacacaggaatgtttcaaataaattgtttttttcttgtgccttttaaattttgtgatttgtcaatgagatgctgacatgtttttaatgaagcatgccttgtaaaataataagtgaatgaaaactacacagtaatatttacatcaacaaagctagaagaagactgtatgtctcaagaggctccatcatctacccagtggccacttcaccaaattaagatccaaataccaaaaagaaaagtaattaaaatttgtgttgtatgccttataagaccaaacctataaaatgaggggaaacttcacaattacttgtaatttgctctgtggaattgtaacagatggattataaagatgattccatgataaacatctaaatgtgggttactac

SEQ ID NO: 43282 - DNA, 425 bp, Homo sapiens
tccagcttcatccttgtccctacaaaggacatgaactcatcctttttatggctgcatagtattccatggtgtatatgtgccacattttcttaatccagtctatcattgttggacatttgggttggttccaagtctttgctattgtcagtagtgcctcaataaactccttctttctttgcctagttacacctcaatgcaacctcctggcaggccagccttaagcccagcagtccaaccatgcatctaagctgagttctcatcagagccaacttcaattataaacaactgagatgatgccagaggccagaatccctgagaacccaatttgctgtcatcaccgcagctgaaacaaggcgcttggcatctagaaaagctgatctgtaggaaatttccaatagagttcaattttttctaagtttaaagtg

SEQ ID NO: 43283 - DNA, 368 bp, Homo sapiens
aacaaaatcagacataaagcaaaggtcgatctaggctgatgttcacacaattgggaagggggggtctttaagaagaataattaaaaattacgaatacaaaatgaaagtgaatattgatttggaatgacaatagaaatggtgatacattatggatgtcacaaatgttataaaatccagaataacattaactgcctgatatctctctgtagtactttctcccaacattttgttttttttaagagatggggcctcaccacgtagcccaggctagtctcaaactcctgggccaagtgatcctcccaacttggactctcaaaatgctgagattgcaggcatgagccactgcacttggcctcccccaacatttt

SEQ ID NO: 43284 - DNA, 349 bp, Homo sapiens
gagatggagtctcgctcttgtcacccagcctggagtgcaatggcgcatcttggctcactgtcattgcactgtactccacagcctgggcaacaagaatgagaccccatctctagaatgaatgaatgaatgaaaccagaaccaccagaaatatggattaaaattataaataggatttcaatgctcaataatctcgatcactgtcatgtctacagtgagtcagggaacaacaaccaaaaaaatgttttttgggaaaccaacccaaaacgtttactgggacattctctaggtcataagccctatgaaacatcaacaacttgtagtacatacagtaagtcacatacatgcttta

SEQ ID NO: 43285 - DNA, 398 bp, Homo sapiens
gatggtattcacattcgtggaacactgaggctcacagacgataaataacttgctaaagtcacacaccttaagtttcagagtcttgtttcagcctagatctctgactcaaaactttggttactttctcctcaagggggaggcagacgtgtcgcagataaacatccaataacaagtaagtgctcttgaagagataaacatgagtagtgctggggtggctgacttgcctggagagtcagtagatacattttgactgttgttttatttaccaggactggagaggaaaatgggaagaacatatattctctctcttcacagccagctcctctctgctcctctcctcgcttctgtgaacaattccctcagcctgtgtatgaatcatgatcaccattcactataga

SEQ ID NO: 43286 - DNA, 87 bp, Homo sapiens
ttgtacttttaagtagactgaaatatctgtttatttaaaatttaacataaggatcttcactttttaaagaaatttgtcatgactttt

SEQ ID NO: 43287 - DNA, 1427 bp, Homo sapiens
atgcgcgcctgtctcccgggacgctagagcaggcggttcctgggctgctccggtaggtttggcgtgcgcgggtttctgcagatctagggcgagcttgcacgttacatcaccgatgcatctcttcttgcttgcttaatttgccaccacttaggcctttcttgcagaattcgccatatactccttaagggccgcggaatcggagcgaccttggtgactggcaaactctcggcagatgtgcgtgcactggtttgatgcagacgtggttgtaggcgatttaatttttcccagctttgcagcgactgttggcttcccagaacggatctccccagcctcgactggaagctgagggacaaaaattcataaaagcaattactctttcccggcgaggcttctagaagagcaagaagagcgatatgattacacctgcagccctataaagattgatctgtccgtctttcccttacagtcgtggcctgttaaacgttcctgtgttgttcagtgccagaatgagtgaccgctatttagaacaaaggattagtatcaaattttgcgtgaaattgaacaagtctgcaagtgagacccaccatcttttaaaagaagcttatggggatgaagtcatgtcaagggccagagtttttgactggcacaaaaggtttaaagaaggacgggaagatgttcgagatgatgcccgaagtgggcgtccagtcacccaccgaacagatgacaatatccagaaggtcaaggacttggtttgttcaaacaggcagttaaccgtgaggatgatggctgaagagttaaatttagacaaagaaactgttaggctcattttgaaagaaaacttgaacatgaggaagatttctgcaaaagttatttcgggtgttttgaagggtgagcctaaaccacgaaaacttgactttcggtccgatctttcaaaggaaactaggaaaaatagctcatgtttgaggaaaaagagacggaacctcactatgttgcccaggctggtctcgaactccttgtctcaagggatcctcccaccttggcctcccaaagctctgggattatcagcatgagccaccatgccaagccaaaaccaggagttcaatggtgtaaattccagtctgagtccacaggccgaagagcgaggagtgctgatgtacaagggcaggagaagatggatgtcacagctcaagaagcgagaacaaatttgcccttcctatctttttgttctattcaggtcctcaatgaattggatgatgtccatgcacattagggagggctgcctcttcattactcggtctaccaattcaaatgctaatctcttccggaaacatccccacagacacacccagaaataatgttttcccatctatctcagtaccccatgatccagtcaagtgaacatataaaattggctgtcacatctccat

SEQ ID NO: 43288 - DNA, 1097 bp, Homo sapiens
atgcgcgcctgtctcccgggacgctagagcaggcggttcctgggctgctccggtaggtttggcgtgcgcgggtttctgcagatctagggcgagcttgcacgttacatcaccgatgcatctcttcttgcttgcttaatttgccaccacttaggcctttcttgcagaattcgccatatactccttaagggccgcggaatcggagcgaccttggtgactggcaaactctcggcagatgtgcgtgcactggtttgatgcagacgtggttgtaggcgatttaatttttcccagctttgcagcgactgttggcttcccagaacggatctccccagcctcgactggaagctgagggacaaaaattcataaaagcaattactctttcccggcgaggcttctagaagagcaagaagagcgatatgattacacctgcagccctataaagattgatctgtccgtctttcccttacagtcgtggcctgttaaacgttcctgtgttgttcagtgccagaatgagtgaccgctatttagaacaaaggattagtatcaaattttgcgtgaaattgaacaagtctgcaagtgagacccaccatcttttaaaagaagcttatggggatgaagtcatgtcaagggccagagtttttgactggcacaaaaggtttaaagaaggacgggaagatgttcgagatgatgcccgaagtgggcgtccagtcacccaccgaacagatgacaatatccagaaggtcaaggacttggtttgttcaaacaggcagttaaccgtgaggatgatggctgaagagttaaatttagacaaagaaactgttaggctcattttgaaagaaaacttgaacatgaggaagatttctgcaaaagttatttcgggtgttttgaagggtgagcctaaaccacgaaaacttgactttcggtccgatctttcaaaggaaactaggaaaaatagctcatgtttgaggaaaaaggatgtttttcttctctactagcccaggacctcctaaaagccaagcccacatctgattgttccatgttccctgcatccagaataaaccttgcgtggaactgctcaataaatgtttgatagatgaatg

SEQ ID NO: 43289 - DNA, 342 bp, Homo sapiens
taagagctgtgtcatccttatgtaggcaagagatgtttgcttttgttaaaagctttattgagatataattaacataaaataaactgaacatatttaaagtgtactatttgataagttttcacaccttgtggagaacatgcatactacaattaagagagtgaacatatccatcatccctcaaagtgtcacaatgctcctcctgatgactcctccccagaaaaccaccaatcggctttcattttgcattttgtagttttatgtgaatggaatcatatagtatgtcttttttttttgtctggcttctttcactttgcataattattttgagattcatatggcaca

SEQ ID NO: 43290 - DNA, 305 bp, Homo sapiens
tttcaaagagcttttgaagctaagttcatttgaaactaagtcttaaaaaccacatgttctcgcttatgagtgggagctaaccaattggtatacatggacatacagagtggaataatagacatcagagactccaaaagatgggaggaggagagggggctgagggatgaaatactacctattgggtacaatgtacagtattagtgtgatggtgacactagaaggccagacttcagcactacgcaaaatatccatgtaacacaactgcacttgtacccctaaatctataaaaataaaacacaaaatgt

SEQ ID NO: 43291 - DNA, 226 bp, Homo sapiens
cattaatataaaaatgtatgtcggtaataagcatgcagtttatgaattttcacaaagtgaacacacatatgtatcaacatttgcttttagttgaagctaaatgttgttgctaagtgtggatggttaaggtttgttcacctatgttttgaaaagactattctcattaaaaataaaacaaaatcaaatcccaacaaagcttaaaggttaaagaaagcaaaagaaataa

SEQ ID NO: 43292 - DNA, 394 bp, Homo sapiens
cctgggcagtggcggggctggccgaggctgcggcgtttctccccaaggaagtgtcttctccgctttccctgttcttctgtttctcacacactttctatctcattctgtaactttcaagcctttccttctaactgtatgtatttagttacttgttttcaagctggttccctctctggccccctggcctggggaaagcctccacacttactgcgggtcttgtttagagtctgagtttgtgagattatttgggggagagtgggcgagtggctgacaggtgacccccaggaggaggattcctggggctggtgtcttctcccagctgctgcttccagtgggcctgggcccaggactggacctccgctggcacccctgagtgcctccctgccaggtaaga

SEQ ID NO: 43293 - DNA, 304 bp, Homo sapiens
tattcaaaataattttcttattaatcttggatagtttcttgtcacagtaattccattttgaagataataaatattaccataaagaagtgatcaaaaacatagatatgtgtgcccaaaggtatttatcacaatagtatttataatagtgaaaaaagaaacaactaaaatgtctggcaataggagaatgattaataaagcgatgtttcagctgaatatagtggcatgcgcctgtaagcccagctactcaggaggttgaggctgcaagatggcttgagcccaggagttaatgaccagcccaggcaac

SEQ ID NO: 43294 - DNA, 526 bp, Homo sapiens
tataatattcttgaaatagcctaaagatggagaaaagattagtggttgccaggggttaggagtcagcagagagaaaggaatgtggctataaagggatagcacctgggggccctgtggtgttgatacaattatgtactttgattgtggtgctgattacaaaaagctacacatgtaataaaattacatagaactacacacacacacacacacacacacacacacacgagtacacacaagcaggagaaatctgaataagctctatagattgtaccagtgttcattttctagtattgacactgtaatatatatatatttgcaagatgttaacagtatgagagattgagtgaagtgtacacagggcctgcctatatatttcttttcagcatgtacctaactatatattgttataagaaatgacttcaaatacaaaggacatcaaatgatacaaataggttggaaataaaaggatggccaagaatatgccatgtggaaaagtattcagtgtccccctgtgaaaagtaggtcc

SEQ ID NO: 43295 - DNA, 148 bp, Homo sapiens
cagaaataaagccacacacctacagccatctgatattcgacagtgtggacaaaactaaataatggagaaaaaactccctactcaacacatggtgctgggaaaactggctagttatatgtagaagaataaaactgaaccactacatttc

SEQ ID NO: 43296 - DNA, 199 bp, Homo sapiens
ataaactttttaaaggccaattatagtactgctctaggttcatatagtacatcttttccttagaacttcaaaacactcaaacaatctattctcatgactatccatgaagccaggaggagcaagtattattttatcggatgtggaatccagaagaacaaagagattctgcaatttgctcaaagccatagagttagcagca

SEQ ID NO: 43297 - DNA, 410 bp, Homo sapiens
aaagaaagaaagaaagaaagaaagaaagaaagaaagaaagaaagaaagaaagaaagaaagaaagaaagaaagaggaccaacacctgtagaggaggggaaaatgagacagggaaacagtaaaatacagacctcagagttgttccacaaaaggggccagagaggtaggatgtttatacatcaacttccattgggcattgattgagggttgatggaggggagtgttgataaaagagattggttaattctccaacacttccaaactatggacctccagggcgttacaggaaggcctcatcagaggtggggatatagattctgacaattgacgatgcagaatcacagttgattcctactgtgtattgggcattgctatgcctcccccactgaatagtccattgctgctgtgtcct

SEQ ID NO: 43298 - DNA, 505 bp, Homo sapiens
cactgaggttctagttatatttaagatgctgtgtttcacctggggtgaattagccgcttgtgttgaggaattggtccacttgacctagttgttgaatttgcccagagagttgttcgaagcattcccttatccttttgatatctgcggggtccacagtggcctcctttttcctttcagatgttggtgttttgtgtctttttttccctttgtctctcttgctagaagttgatccgtgtttttgatcttttctaagaactggcttgggcttcattgagttttctctcctgctcttccctccccatcgtcttccatgctcatactccctgggtatcttcctaggactgctgggcacagagtttgcagctgtgtcacagttgccaagacttggatgtctgttgggatgataacaacagtaatgaaagcaagttgtcatggcagcagacgcagggtttcccgggcaggcacagtgttaagtgcatccgggcctggtgacagcgcactgccc

SEQ ID NO: 43299 - DNA, 346 bp, Homo sapiens
cgcctgtccctgctaaaatcagagctttgtgagggcagagatggattctgtgcacaggtatcttctgagtctctgattcagtgcctgaaacacagtggctcccgagacaatctacctcagtgcctgttttacaggctcacctgtgacacatgactgggacatatgttattcatgatgacatgcaagagtctctgtgtaggtgtctactggtcttcatcatcaaacagagcgagaactccaagtcaggaggcagacatatcttggggcaagaagacacctagaatttttcttcaacctgtagactttcggattgggtagaaggattgttaaggaggttgcgaaactt

SEQ ID NO: 43300 - DNA, 438 bp, Homo sapiens
  misc_feature (377)..(377): n is a, c, g, or t
  misc_feature (417)..(417): n is a, c, g, or t
  misc_feature (433)..(433): n is a, c, g, or t
agcactcatcagaaatatcatggcgtgtggtgcgtgtaagagaaggccctctgatgtaagcaccaaggctgttaccatggagaccacatgattcaagtcacttcctgatgctaacgcacctgatcttcaattcttcactagtttccacagaaccttgaccatacttgacattttaaactctaatatgccagaatttattttaagaaaatgagtgatctatatacaatttagaacatgatgtaatttttccattattttcttctcagcattatgacaggattattttccatttaatttcgaatgtaattcttttaacttagatatttctgagcccacagaggcaggagagctgccagggtctgcccattcgaccaggntggcttgggccccggagcccacgggtctggttgatggccntagcagccaccaccgngggcg

SEQ ID NO: 43301 - DNA, 260 bp, Homo sapiens
cgggcgcaggaacaggaatgaggagggagaggcggcagagatttccaagctctccctacaggggatcgtagatgcccgttggatggaagtgtgtctaagtgtgtgtcagggagctggcgagtattttccagtctgtgaaagtagcatcaccccaggggtggtggctcctcctccgaggccagggcagggaacccggccttcccgctaaccctcccgctgctggcacccgaacctctcagctctgtatctgcagcatcagc

SEQ ID NO: 43302 - DNA, 1068 bp, Homo sapiens
gccttcacattttaaacttttatttttactagcactttgattggcaatatagtgttctatacaatgccttgtacatcatagatgacgtatttaattgattatttaatgaaagaaatgagttacctattgacttatatgtatgtttttacctttatggtaaaattaaaatgaacagaagcctagggtttagtacaatgagtaagatattagaaaacatttggcaatcttaaaaagataattatacaaggtctgtttattagatatcatctttaaaattgttaatgttttatgaaaatagagccctaagcatgttagcacatacagcataaaagtttatttcaggtcttgctttcacacactgggagaacactgtgatctgtgaaagtcagaataagcctgttttagaaaacaggatatgtggcagcattcacactcaaaagccttcggagctcactgagttaagggtgtgatttatagagtcatacagactggtgtttcaatcctggctctgacacaggcaaatgagattaactttgagtctaagttttctaatgtgtaagatgtataaaacaatagctctgtagaggatggcagggggccataggtaggtgccctggcagtggcagctcaggtgctgtgggtaggaagtgctccagtgggaggcaccataggcaggcagttcttgagtggggatgctgcaggttagaagtgtatggcatccatgactgggattattaccatttttgggatttctttaggccatatattacttggaacctaaacatgtgattttacatagtgtatctgcactataattgaaagttgagatttttcactggaatgacatagcaacataaattaatgtagcagcagcaacagcagcagtattgtggtagcagtaaaaaataataatttaacaacttacatcaaaataatatagacactatggctttagtgagaggttgtcatgtaaattcaagaaatgcagagaacccttgtgagatactatgtaagacaaccatccccaagacacacagtcatcagattctccaaggtagatgtgaaaga

SEQ ID NO: 43303 - DNA, 328 bp, Homo sapiens
cccacaacgttagccccatgttgggcccctctttgacaccaggccacccttctcttgccagaggagtcccaggtcagctgtgcccctgggaatgtcccaccagggctgggcatagtcagcccagatgggccaagggctgcctgtcaggagggaaaggggacggtgtagggtcccagggccaattctggacctgcactatgctggtgactgccctagggttctgcagccagagtttgaatatggatgctgctagctgtgcaacagtttgccaccctccctggcctccctttcctgtgccagatccctcctctgggggcagctgtgataa

SEQ ID NO: 43304 - DNA, 326 bp, Homo sapiens
gatctgcccaccttggcatcccaaagtgccaggattacaggcgtgagccacacacccggcatgttttctttttttggaaacaataacaggatatcagattgataaatgcaataccaatttctgataatttatcttgctatataatacttcatggacttcttgcactttgtggtgttttattagtcaggaataaggagaaaacaacttatagctgtggaaagagtacaaattaatttttaaaaactggagaataaatcaagcaattcggcttttgaagactttcacttgaaaaaacactttttactttttaattatcatttcttaat

SEQ ID NO: 43305 - DNA, 669 bp, Homo sapiens
ttctggcttttattatttccttcatagacaaaagaaagagttcacatagctttatgaagcttagcatgttttcatgaaaaacatacgtagatattggctaatggtagtatagtcttcattgacttaacgaggaaagttatatgctttgaaaggtggacaggaaacattgattagggtaaaactcataaagggaagctttacaaggaggaccaaagtacagcactttcagggaactttctttctgtccccctagggtaagcaaggctaccattaatgaaaaggacatcttctcgttattattttcttcttttactagagatgccatagcagaaggcatcttatgtattacattgtttttcttttcctttgtcaaagcatctatgttcactgacctagcccttgtcattacattgaaattatttctgggaagcaattttaatggatgttgacttccaagtggtgataggacattaggtttgggtcagacactctataatactccaggcaggcatataacaacttcgtatgaaagaattactgtttgtttttgtttttgtttttgtttttgtttgagatagggtctcacctttatcgcccaggctgagagtgcagtgagccaagatcatgccattgcactccagcctgggcgacaagagcgaaatccgtctc

SEQ ID NO: 43306 - DNA, 416 bp, Homo sapiens
tcgtcgacccgcgttgctgtagtgacaggtgaatcacctgtgttccagattagccgtgctcccgtcggcacttcacagggtaccacgcttagctgccggagacgtgttctgccacagggagctgtcagtttgatcccgtacgtttatttcctggtcttttcagcaacatttaatgaatcgcattcctcgtcttaggcgccagccgctatggagggagtgcagctgagcctacgccatgcggtgtgtctccagtggggagggtagcacccactttggaactgctcacgtgggttttgtgaaaaatccgaggtgtaagcaaagtgcagaaacgtgaaggcccggtcctgatggtgagattggcatctcatccaaggagcgtggactggagctcgggctggtccatgctcacgtcgacc

SEQ ID NO: 43307 - DNA, 329 bp, Homo sapiens
tttgccttttccttccctatggtgtccccaaaaaaccaggtcaaacaaaacaggaggtaaggagggggcctgagcactcatgctggtgttggaccaagagctttcaactaagtggaaaagaaaagtgcaaccctgttgatttagtccagtgtcctaacgtgccaggaaagaactcaccactgtagctgttagcactgatttatggaatctcatctagaccattttcagccctaccaaaaaatagctggtcctctgaatacacacagctgatgaatgcctctgtttaacttggccacaagcaaaaccacactgaatgtgaataattgctt

SEQ ID NO: 43308 - DNA, 1002 bp, Homo sapiens
ttgacagcttgatggatgaagagcagatgggtttatggtgtatgggaggaagcatggattttaggagggacagtatcagagagggatggttagaaagtgagtaagacaggttgctctttggaaaacaaggaaaatccctttattagaacaaggcatgaaattctgccactaggtggcgatgccctataactttacaacttagtgtacatcacacgagcactatggaagatttctccattctgcgccccaccaactccctcccctccttcatttttcaggatgacaacaccttagaggtttatggccatcaggagaatttactactaagctatatactgatgtaatgaaatctaatatatgttgtgcaatgaattatgagatgttatttagtttcaggattttattacttcaatcagttatgaccatatttccttttatatgattgctcactctttaaacataccagatgactgtataaggaacacctaataaagtctatagatgttaaaatattttaaatgttttaatttatatgccataatttgtttacattctggttatactggcgttcatattaaaagccataacatgttagaatctgagatctcaggtcggatagtgcctctaagttatattttgctaagaaattttattgtattagcaattgagcaagaaagaagaactgaatcattatacggtggttaatttttagcatagatgtcagaaagcctgttaatattccagaggcttatgataaactatttaaattgtcattctggattctgattatatctcctacaaagaaagagtgtattatttattgaactttttgtttgaatacatgtgcctatttttgcataaatgtaaaaatgtaattttaaaataaacccctgaaaacttctggtaacattatccagttgaataattgttctgttagtattctaaatattttaagaaaattgtatacatatctgtgacaattgtattcacaagccaaaccaa

SEQ ID NO: 43309 - DNA, 568 bp, Homo sapiens
gactgtctgctgggtgagcctgggaactgacctggttctttgactgtgggagaaaagtcaccagtcacaaccaagatgctgccaaagtgcccacccagttccgtggtcttggtaatatttgtggttagtatgacctacatatcgtcacagctgctttcagtggccgcgtagaaaagcaagcaagcagaaaggaaccttcctggctgcggagaagctgtggagtaggctggctgcaagcaaggcctttggagcagatggagctggttgcggctctagctgtgggactttgagcaagtcattggatttctctgatcctgtttcctcattcgtaaaatgggcatgaaaagagggagttaagtgaaatgtctgtctcatgctcagggctaacagcacacaacaaatgctcaattcatggtaaatggtaatattcttgttagtagagggcacaaacacttgtatatcagctcaggagtatgtcagtttcacattcattgacatttactgtttctactggttaaaaaaattaatgcatacttgtaaaaaagtttaaagttcagaagagaaaaaa

SEQ ID NO: 43310 - DNA, 403 bp, Homo sapiens
accactctgtgaaacactagagattcagaaataaataaacagtgttctatcctcaaggaattcacagcctggtaaaggagagagatatcggttgcagaaatgtggtagggattatcccagagattgtaaacagctgcccagatgacttgctccttccacctccctccactccccttcctcagcccctgcagtacctacctggtttgcaagccttgtaaactgagttgggcctcactgctaggctcatagctgtgaatgaaaatatgagtgaatacaaacatgaaatgtctgctacattaggaacttgctggaacccactcttgcctggccagctctctcccttcccttccatgcagcagcaggcacctcgggctacccctgctgccttgagcttagactttag

SEQ ID NO: 43311 - DNA, 395 bp, Homo sapiens
tgaagatggagtgtccctttgttgcccaggctggtctcaaactggcctcaagtgatcttcccacctcggcctcccaaaatgctgggattacaggcaagaaccgtcacacctggcctaactttgcttggaattgtgtacagttttatagactaatttaggaagtatgaatatcttttcattactgagtctgcacttcaaataacatgtagtatccctccagctattcatgtttgatttttttaaatattctccagtggatatgattttcttcatatacgtcctgtgtttgttaggcttattcttagacactatatattttgacacttagatgtatattgatatatgcctgaatcattaatacatatcttttactcatttgtttcttcagacacaac

SEQ ID NO: 43312 - DNA, 432 bp, Homo sapiens
cctggtgcatgcatgtgcaatatgctcccctggcctgggtctttcctgccgcttcttgccagttgggtcagaactagcttattaaccagttttttctgagctttaatcgaactggctccaaccagttggagacttgaaaagggctacgtgatagttatagatttttaaagatatattattattttagagtagtattgagtgtacagcaaaatggagtacagggtccagagatctcatatggcctcaattcctgtatactctcgggtcactccaccaacaacctcctacaccagagccactttgaaacattagaaaatatatttgagcattcagaaatgtataaactaggcagccccagactgcaagcagctcagaggtcccacagagaggcttagggagggtgggggaagaattttatatggtgaatgtgga

SEQ ID NO: 43313 - DNA, 320 bp, Homo sapiens
cgtcctcacccccacctcacatgctgcagctccagttcccactggtctcccactttgatccaaagttccctggcctggggccccacattccactcccgaaggcctggtcggctccggagacaacgcagaggggagcggctccttaactccattaaggcccggtccccaggaaatcacaggtaccaggagggccagtcccaccacacctcccccagccccggcccagcctgttcctccatgccgtccttctgggcctactcatgccgccccacagggtgacacgaggtgcaggggcaaccccagctgacttcgcaggcgcc

SEQ ID NO: 43314 - DNA, 644 bp, Homo sapiens
ttaggtcctggatctagctccatgttaaagatgagaaaactaaggcacaaagctgttacttgcctgagatcacagacctagtaagtggcagagcaaggacttagactgaaatcctgattctagtttctgtgcttgagaaaagtctgcttaatgcttccgagtgccaagtcacaccagccaggcccagctcccaggattgcacagagaaaaagaactcttaatgactacattatttgaccctttgataagggtaaacaaatatttcaataggtgtcacctgcaaaagaatcagtgaaagaggtgtatcagaaaaccttgcttagatgtcagcttttctccaacttgataaacatcccaacattaacttatcgccaccatagagtgtcagaataaatagtatacctgtgactttgaagatagggaaaccaaagcccagatggcaaatgtgaaaggacttgctttatcaaactggtggagtcccagaagttgcaaatcatccccttcatgaacggtttccaagaaaagcattctatacttaggaaatcatcctcttcaagaacagtttccaagaaaagcattctatacttaagaaattaaatctaaattaagaaaataaagaacactcacaactaaaagctatcttt

SEQ ID NO: 43315 - DNA, 442 bp, Homo sapiens
gggcaggctagaggcgccccctctcccccagcagccacttctcctcctgtcgctctccccatctccatcccagggcacccgaggacagagtctaggccttagtggcccaccctgccgcaccgacccttgacttgagacagacgtagggcttagatgcgaacatacaggcaggtgtgcagccccgtttcccatgggtgaaatagggtcacctatggctgggtgcaatggattcctgggtacacctgtaatcccagcattttgagaggctgaggcgggaggattgcttgagcccaggaattcaagaccagcctgggcaacatggtgaaacctcatctctacaaaaaacacaaaaattagccaggcgggggtttgtgtgcctgtagtcccagctactcaggaggctgagctgggaggatcacttgagcctgggaggatgaggctg

SEQ ID NO: 43316 - DNA, 531 bp, Homo sapiens
agctgggaaagacctcttgtgcctgaaagggcttctctcccttattgattcttgtatttagtgttgattttagtgagtgttaaagtggtttcaaagtgatcatagtgtctatttttatcatattctacttccttcactttacatgtgcgtttctcatgagatttaaaaactttttgaaaatatcataaatatcagtatctaaacaaaaattattaaaataacctctttagccaatcttctagtgttggattgctgggctttgattcttagtattacgagtatctgtctaatgaaaactctcctgcactttgcattctttccttgcgatccactccctgaggcagaagagcagaggaagggtgaagagcggagccacacagaggctcggcctctgctcttgacagccatcggcggcggcagcctctccacacagcactccctgagatgcacggaggtaacactgcctcactctgtgatgcactctttataagagacactccaaataaagcttgaaagtaaaactaaaaaaaa

SEQ ID NO: 43317 - DNA, 793 bp, Homo sapiens
ttttttttctttttagagatcaggtcttgccatgttgcccaggctgaacgtgaactcctgggctcaagtgattctactgcctcagcttcctgagtagctgggactgtaggtgcatgctaacatttgctttgtgtttttattgttcttattgttaattcaattctgaactttttgccagttatcgaattctcctcttaagattttcagacacaataggtgttttgtaacttttttttttttttgagaaatctctcccagagccttagcatatactccaatttggaatagctgccatctatgccttgtgtacagctgcttcacctcaaatcaagggattctcttcggctccctcctgtgttgtatctcttgtttgcaatatcccaccttgtcttctttttaagtttactccctcattttggcagagaaagtccctcagctgctttgtcaggaagagtgtgggagaggtacaaatttttgagactttgtatatacaaaaacttcattcctactcttacactagatagtttgcctagagagacagaattctaggccattttcattcaacattctggaggcattattgaattgtcttctggacgctaatgtggctattgagaagtttgaagccactctacttaattctttgtgtgtgactgtttctcctgttctctggaagtttatagaatcttgtttttgttttcagtgctctaaaatgtcacaatgatataacttgctgaaagtctgctttcatccactatgttgtacttaatggacactttccttttgtaaaaaa

SEQ ID NO: 43318 - DNA, 501 bp, Homo sapiens
aatagcaggaagtccccaggccttttcaaagttccaaaccaagctctcctgattttaatgtagagatcataccaacccaggtgggggaggagggtccccagccccaggcagcagccatcaccccctccactgaaaacaatattggaggctgctttgggactgcccttctcagccccctaagtctgttttgtaatgcctgtggtgctctccctcctggacctttcctctcgggggtcaccacactttgctaactcttgtgtgcacatattttataatagagtagcgagggaatggtgccgcctccagcttccgtaagctgcccgggctctggggggctctgggacaatcggggctgggaagtgactgtgctcttattgtacactctttatttctctgtatctttggcttgtgctctttgtaattaatgggatttgtctgccttttcaacactatactgagcaataacaataaatgcacacgtggaaatgcagacacggtaca

SEQ ID NO: 43319 - DNA, 487 bp, Homo sapiens
ccctagtttagaagttcaatagcacctagtttagaagtttcaatagctcctagttttagaagtttcaatagcacctaatacaaaacgccccaggcagcagccatcaccccctccactgaaaacaatattggaggctgctttgggactgcccttctcagccccctaagtctgttttgtaatgcctgtggtgctctccctcctggacctttcctctcgggggtcaccacactttgctaactcttgtgtgcacatattttataatagagtagcgagggaatggtgccgcctccagcttccgtaagctgcccgggctctggggggctctgggacaatcggggctgggaagtgactgtgctcttattgtacactctttatttctctgtatctttggcttgtgctctttgtaattaatgggatttgtctgccttttcaacactatactgagcaataacaataaatgcacacgtggaaatgcagacacggtaca

SEQ ID NO: 43320 - DNA, 431 bp, Homo sapiens
agagtgaaacagaacccgtacacactgtttgtgctagttcatgacaactcccatgtggaactaacgaggtgattggttcagagtgagcaaatggagtctcccttctacaggaataattgttacctaatgaaatatgttaaagatggccaggcgcggtggctcacacctgtaatcccaacactttgggaggctgaggcgggtggatcacttgaggtcaggagttagagaccagcctggccaacatggtgaaaccccatctctgctaaaaatataaaaattagctgggcctggtagtgcatgcctgtaatcccagtacttgggaggctgaggcaggagaattgtttgaacccaggcgctggaggttccagtgagccaagatcacaccactgcactcctgtctgggtgacagagtgagactttgtctcaaaaaa

SEQ ID NO: 43321 - DNA, 376 bp, Homo sapiens
tggagatggagtcttgctctgtcacccaggctggagtacagtggcaccatctcagatcactgcaacctccagctcctgggttcaagcaattctcctacctcagcctcccaagtagctaggattacaggcacccaccaccatgcccagctaatttttgcgtttttagtagagacggggtttcaccaagttggccaggctggtctcgaactcctgacttcaggcgatccgtctgccttggcctcccaaagtgctgggattacaggtgtgagcctctgtgcccggccaaatacttgaagcttattaatcaaatcactaatttaaacgttttaaattaggtaacatcaattaaaataggatatcatcatagaaaaataag

SEQ ID NO: 43322 - DNA, 1204 bp, Homo sapiens
gaagacttaacattgctaagacagcagtacctacaaattgatctacagattcagtgaaatccttatcagaatcccaggatcccatgacttctttgacaagttgattctaaaatttatatggaaattcaagacccagaatagccaaaacaatcttgaaaaagaagaacaaagttggaggactcacactttgtgatttcaaaacttactacagagctacagtctgaatcaagacagtgtggtactgggataaattagacatatcatcaatggagtagaatcacaagtccagaaataaacccttatatttattgtcaattgattttcaacagatataccaagacaattcaataggaaataatagacttttcaacaaatgatgctgagacatgcgaagagtgaagtcggatcccttcctcacatatcatatatcataattaactagaaaatgatcatagatgtaaaagctatgattatgaaactccagaaggaaatacaggaatgagtctttctgactttggattaggcaaagccttagatgtgacaacaaaagtataagtggtaaagtaaaaatagagaaaattcatgaaaattaaaaaactttcctgcttcaaaggatatcatcaagaaaatgaaaaggcaatccagagaacaggagaagatattttcaaatcataaatctagtaagcaacttgtatctagaatatataaaggacttttgccattaataaaaagataactatccagttaaagaatggacagaggatctgactggacctttccttaaaaaagacatacgttgaaaaacacaccaaagatgctcaaaaccattagctagcagggaaatgcaaattaaaactacactgcgatatcactttatatctcttaggatggctatcattaaaaaaaaaaacagacaataacaagtgttagggaggatgtagagaaatgggaaccctcacaggtcactggtgggtttataaagatggcataaccactctggaaacagtctggaagttctttaaaagactcaccatagagttattataggacccaaaagaaatgaaaacagatgtccatacaaacacttgtacattaggggtaggtgtgttggctcccagcactttgagaggcctaggtgggcagatcgtgtgagtctaggagttagaatccagcctgggcaacatggtgaaacctcgtctgtaca

SEQ ID NO: 43323 - DNA, 3243 bp, Homo sapiens
ggggcttcctggagcccccgcccctggccgggttctgcctgactcccctttcattcccttgcaggctgagcagtgcagacgggcctggggcaggcatggcggattccagcgaaggcccccgcgcggggcccggggaggtggctgagctccccggggatgagagtggcaccccaggtggggaggcttttcctctctcctccctggccaatctgtttgagggggaggatggctccctttcgccctcaccggctgatgccagtcgccctgctggcccaggcgatgggcgaccaaatctgcgcatgaagttccagggcgccttccgcaagggggtgcccaaccccatcgatctgctggagtccaccctatatgagtcctcggtggtgcctgggcccaagaaagcacccatggactcactgtttgactacggcacctatcgtcaccactccagtgacaacaagaggtggaggaagaagatcatagagaagcagccgcagagccccaaagcccctgcccctcagccgccccccatcctcaaagtcttcaaccggcctatcctctttgacatcgtgtcccggggctccactgctgacctggacgggctgctcccattcttgctgacccacaagaaacgcctaactgatgaggagtttcgagagccatctacggggaagacctgcctgcccaaggccttgctgaacctgagcaatggccgcaacgacaccatccctgtgctgctggacatcgcggagcgcaccggcaacatgcgggagttcattaactcgcccttccgtgacatctactatcgaggtcagacagccctgcacatcgccattgagcgtcgctgcaaacactacgtggaacttctcgtggcccagggagctgatgtccacgcccaggcccgtgggcgcttcttccagcccaaggatgaggggggctacttctactttggggagctgcccctgtcgctggctgcctgcaccaaccagccccacattgtcaactacctgacggagaacccccacaagaaggcggacatgcggcgccaggactcgcgaggcaacacagtgctgcatgcgctggtggccattgctgacaacacccgtgagaacaccaagtttgttaccaagatgtacgacctgctgctgctcaagtgtgcccgcctcttccccgacagcaacctggaggccgtgctcaacaacgacggcctctcgcccctcatgatggctgccaagacgggcaagattgggatctttcagcacatcatccggcgggaggtgacggatgaggacacacggcacctgtcccgcaagttcaaggactgggcctatgggccagtgtattcctcgctttatgacctctcctccctggacacgtgtggggaagaggcctccgtgctggagatcctggtgtacaacagcaagattgagaaccgccacgagatgctggctgtggagcccatcaatgaactgctgcgggacaagtggcgcaagttcggggccgtctccttctacatcaacgtggtctcctacctgtgtgccatggtcatcttcactctcaccgcctactaccagccgctggagggcacaccgccgtacccttaccgcaccacggtggactacctgcggctggctggcgaggtcattacgctcttcactggggtcctgttcttcttcaccaacatcaaagacttgttcatgaagaaatgccctggagtgaattctctcttcattgatggctccttccagctgctctacttcatctactctgtcctggtgatcgtctcagcagccctctacctggcagggatcgaggcctacctggccgtgatggtctttgccctggtcctgggctggatgaatgccctttacttcacccgtgggctgaagctgacggggacctatagcatcatgatccagaagattctcttcaaggaccttttccgattcctgctcgtctacttgctcttcatgatcggctacgcttcagccctggtctccctcctgaacccgtgtgccaacatgaaggtgtgcaatgaggaccagaccaactgcacagtgcccacttacccctcgtgccgtgacagcgagaccttcagcaccttcctcctggacctgtttaagctgaccatcggcatgggcgacctggagatgctgagcagcaccaagtaccccgtggtcttcatcatcctgctggtgacctacatcatcctcacctttgtgctgctcctcaacatgctcattgccctcatgggcgagacagtgggccaggtctccaaggagagcaagcacatctggaagctgcagtgggccaccaccatcctggacattgagcgctccttccccgtattcctgaggaaggccttccgctctggggagatggtcaccgtgggcaagagctcggacggcactcctgaccgcaggtggtgcttcagggtggatgaggtgaactggtctcactggaaccagaacttgggcatcatcaacgaggacccgggcaagaatgagacctaccagtattatggcttctcgcataccgtgggccgcctccgcagggatcgctggtcctcggtggtaccccgcgtggtggaactgaacaagaactcgaacccggacgaggtggtggtgcctctggacagcatggggaacccccgctgcgatggccaccagcagggttacccccgcaagtggaggactgatgacgccccgctctagggactgcagcccagccccagcttctctgcccactcatttctagtccagccgcatttcagcagtgccttctggggtgtccccccacaccctgctttggccccagaggcgagggaccagtggaggtgccagggaggccccaggaccctgtggtcccctggctctgcctccccaccctggggtgggggctcccggccacctgtcttgctcctatggagtcacataagccaacgccagagcccctccacctcaggccccagcccctgcctctccattatttatttgctctgctctcaggaagcgacgtgacccctgccccagctggaacctggcagaggccttaggaccccgttccaagtgcactgcccggccaagccccagcctcagcctgcgcctgagctgcatgcgccaccatttttggcagcgtggcagctttgcaaggggctggggccctcggcgtggggccatgccttctgtgtgttctgtagtgtctgggatttgccggtgctcaataaatgtttattcattgacggtg

SEQ ID NO: 43324 - DNA, 1181 bp, Homo sapiens
cgtctacgccatgactgtcaccagcttcctcctgccctctgtataagccagagcatcggtgagtggacagatcatgagcctgctgatcccgcatcgcggtagcctgttctactatcactcatctgtgctggtgacctacatcatcctcacctttgtgctgctcctcaacatgctcattgccctcatgggcgagacagtgggccaggtctccaaggagagcaagcacatctggaagctgcagtgggccaccaccatcctggacattgagcgctccttccccgtattcctgaggaaggccttccgctctggggagatggtcaccgtgggcaagagctcggacggcactcctgaccgcaggtggtgcttcagggtggatgaggtgaactggtctcactggaaccagaacttgggcatcatcaacgaggacccgggcaagaatgagacctaccagtattatggcttctcgcataccgtgggccgcctccgcagggatcgctggtcctcggtggtaccccgcgtggtggaactgaacaagaactcgaacccggacgaggtggtggtgcctctggacagcatggggaacccccgctgcgatggccaccagcagggttacccccgcaagtggaggactgatgacgccccgctctagggactgcagcccagccccagcttctctgcccactcatttctagtccagccgcatttcagcagtgccttctggggtgtccccccacaccctgctttggccccagaggcgagggaccagtggaggtgccagggaggccccaggaccctgtggtcccctggctctgcctccccaccctggggtgggggctcccggccacctgtcttgctcctatggagtcacataagccaacgccagagcccctccacctcaggccccagcccctgcctctccattatttatttgctctgctctcaggaagcgacgtgacccctgccccagctggaacctggcagaggccttaggaccccgttccaagtgcactgcccggccaagccccagcctcagcctgcgcctgagctgcatgcgccaccatttttggcagcgtggcagctttgcaaggggctggggccctcggcgtggggccatgccttctgtgtgttctgtagtgtctgggatttgccggtgctcaataaatgtttattcattgacggtg

SEQ ID NO: 43325 - DNA, 3859 bp, Homo sapiens
ggggcttcctggagcccccgcccctggccgggttctgcctgactcccctttcattcccttgcaggctgagcagtgcagacgggcctggggcaggcatggcggattccagcgaaggcccccgcgcggggcccggggaggtggctgagctccccggggatgagagtggcaccccaggtggggaggcttttcctctctcctccctggccaatctgtttgagggggaggatggctccctttcgccctcaccggctgatgccagtcgccctgctggcccaggcgatgggcgaccaaatctgcgcatgaagttccagggcgccttccgcaagggggtgcccaaccccatcgatctgctggagtccaccctatatgagtcctcggtggtgcctgggcccaagaaagcacccatggactcactgtttgactacggcacctatcgtcaccactccagtgacaacaagaggtggaggaagaagatcatagagaagcagccgcagagccccaaagcccctgcccctcagccgccccccatcctcaaagtcttcaaccggcctatcctctttgacatcgtgtcccggggctccactgctgacctggacgggctgctcccattcttgctgacccacaagaaacgcctaactgatgaggagtttcgagagccatctacggggaagacctgcctgcccaaggccttgctgaacctgagcaatggccgcaacgacaccatccctgtgctgctggacatcgcggagcgcaccggcaacatgcgggagttcattaactcgcccttccgtgacatctactatcgaggtcagacagccctgcacatcgccattgagcgtcgctgcaaacactacgtggaacttctcgtggcccagggagctgatgtccacgcccaggcccgtgggcgcttcttccagcccaaggatgaggggggctacttctactttggggagctgcccctgtcgctggctgcctgcaccaaccagccccacattgtcaactacctgacggagaacccccacaagaaggcggacatgcggcgccaggactcgcgaggcaacacagtgctgcatgcgctggtggccattgctgacaacacccgtgagaacaccaagtttgttaccaagatgtacgacctgctgctgctcaagtgtgcccgcctcttccccgacagcaacctggaggccgtgctcaacaacgacggcctctcgcccctcatgatggctgccaagacgggcaagattgggatctttcagcacatcatccggcgggaggtgacggatgaggacacacggcacctgtcccgcaagttcaaggactgggcctatgggccagtgtattcctcgctttatgacctctcctccctggacacgtgtggggaagaggcctccgtgctggagatcctggtgtacaacagcaagattgagaaccgccacgagatgctggctgtggagcccatcaatgaactgctgcgggacaagtggcgcaagttcggggccgtctccttctacatcaacgtggtctcctacctgtgtgccatggtcatcttcactctcaccgcctactaccagccgctggagggcacaccgccgtacccttaccgcaccacggtggactacctgcggctggctggcgaggtcattacgctcttcactggggtcctgttcttcttcaccaacatcaaagacttgttcatgaagaaatgccctggagtgaattctctcttcattgatggctccttccagctgctctacttcatctactctgtcctggtgatcgtctcagcagccctctacctggcagggatcgaggcctacctggccgtgatggtctttgccctggtcctgggctggatgaatgccctttacttcacccgtgggctgaagctgacggggacctatagcatcatgatccagaagattctcttcaaggaccttttccgattcctgctcgtctacttgctcttcatgatcggctacgcttcagccctggtctccctcctgaacccgtgtgccaacatgaaggtgtgcaatgaggaccagaccaactgcacagtgcccacttacccctcgtgccgtgacagcgagaccttcagcaccttcctcctggacctgtttaagctgaccatcggcatgggcgacctggagatgctgagcagcaccaagtaccccgtggtcttcatcatcctgctggtgacctacatcatcctcacctttgtgctgctcctcaacatgctcattgccctcatgggcgagacagtgggccaggtctccaaggagagcaagcacatctggaagctgcagtgggccaccaccatcctggacattgagcgctccttccccgtattcctgaggaaggccttccgctctggggagatggtcaccgtgggcaagagctcggacggcactcctgaccgcaggtggtgcttcagggtggatgaggtgaactggtctcactggaaccagaacttgggcatcatcaacgaggacccgggcaagaatgagacctaccagtattatggcttctcgcataccgtgggccgcctccgcagggatcgctggtcctcggtggtaccccgcgtggtggaactgaacaagaactcgaacccggacgaggtggtggtgcctctggacagcatggggaacccccgctgcgatggccaccagcagggttacccccgcaagtggaggactgatgacgccccgctctagggactgcagcccagccccagcttctctgcccactcatttctagtccagccgcatttcagcagtgccttctggggtgtccccccacaccctgctttggccccagaggcgagggaccagtggaggtgccagggaggccccaggaccctgtggtcccctggctctgcctccccaccctggggtgggggctcccggccacctgtcttgctcctatggagtcacataagccaacgccagagcccctccacctcaggccccagcccctgcctctccattatttatttgctctgctctcaggaagcgacgtgacccctgccccagctggaacctggcagaggccttaggaccccgttccaagtgcactgcccggccaagccccagcctcagcctgcgcctgagctgcatgcgccaccatttttggcagcgtggcagctttgcaaggggctggggccctcggcgtggggccatgccttctgtgtgttctgtagtgtctgggatttgccggtgctcaataaatgtttattcattgacggtgaaaaaaaaaaatgacaaaacacacactagatccaccaaaagagaacaatcaagataactaacgaggagccgcgtgccctgctagaagattgccgccaatggcggcgtgccccatgttaccacacgcgtcacccgtccccattgtttggctggccacggggggtggccccccaacattgggcggagggagatcgtagaggacgattccgcgtggggcactccgccgttggttcccatagcgcacgccacgtccccgtggggagccccttcgtgcgtccccgtggcgcgacctcttggtggcgaaggagggcatccccttccttccctccgccgggggttggctccccttccttgggggccctccagttccccccccactcggtcgcaacattccaccaacaccacgcctatcatacggggctcccccctgatgccacagcactctgccaccggcggttcctggctggtgcgggtcgccgcctgcgcacgcgtctgcatgtctctcgcgaccacccccgccgctaacacacgccttgctcgcgccgccccccgcgcccttgcgtcccactcgcgcacccccttctgtcttcccccggcgagccccctcgtgtcccccc

SEQ ID NO: 43326 - DNA, 437 bp, Homo sapiens
ctgaattatgggagcaatttatttttatagcccaaactctcctattctcttcaggaatatattgtcagtggtatcatatctaaactcctcaattgcactgttgcttgttacttccttacgcattagtcctttgtgctggacaaactaatgtcttcatgtccattgccattgccttccctaataaacactccttactcttttttctttctttcccttacttcatatttgccttgaaattatttgcctgtcagatagattgattcatttttagtaaaatttagtttttctaggattccctttgatcctagcaatgggagatatttgatgcaggtgtcaacctttacacttgaaagaaacaaagggactcccttgtagtcagaaaggagatatcttggctatagatcagttaacagagaatcaccttatgttaaaatgta

SEQ ID NO: 43327 - DNA, 521 bp, Homo sapiens
tttagactatcccctttagtttacaacctgacatggttggttatttaaactttgttgagctaattttcaagccatatgaaaaactcatttatatgccttggaaatgtagcagtagagggtgggtatgaccatgatatggggaatgctactgcaggactggtatcctatattctagctctgaggaagggtgatagtatccctttggaacataaaaaataccttcgagatatttttagcacacacagggcccaagttagagaaagccctgctataagaaatctctttaaccacagaataaagaactatatattacacacaagacttggcagcaactcaaattccaaatgttagtttttcttgcattcatcatatatttcatggaaaatttatatcgatctcagatcttactaggaagaaaattctaagccagcataaatgaataagtggatttcaatcttctgaaagggcttttgggtgtggctgagatagctaactttgaaaacttagcaacacaggataca

SEQ ID NO: 43328 - DNA, 298 bp, Homo sapiens
taggaagcaagctaacaagcagcaggctacggctgcctacaagtgtacataggtatctgcctgtccccctaactgggcatcagctccaggccagcagggctttcccctctctttcagtcactgccgtgtcctcgcctaagagagtgtctggcacacagtaggtgctcagtgagttactcattgattaaaaagcctggaaaaccaggctgtgtcgtgaagataataggcagccactgaggtcttactgcatgagaacaaggaaagctcagctcagtgtagattgccggacctaaatttt

SEQ ID NO: 43329 - DNA, 938 bp, Homo sapiens
taggtgtggttttcatttttctaagtgatagaatcccctctttgttgaatttttgtctttatttaaattagcaacattacttaggatttattcttcacaatactgttaattttctaggaatgatgacctgagaaccgaatggccatgctttctatcacatttctaagatgagtaatattttttccagtaggttccacagagacaccttgggggctggcttaggggaggctgttggagttctcactgacttagtggcatatttattctgtactgaagaactgcatggggtttcttttggaaagagtttcattgctttaaaaagaagctcagaaagtctttataaccactggtcaacgattagaaaaatataactggatttaggcctaccttctggaataccgctgattgtgctctttttatcctactttaaagaagctttcatgattagatttgagctatatcagttataccgattataccttataatacacattcagttagtaaacatttattgatgcctgttgtttgcccagccactgtgatggatattgaataataaaaagatgactaggacggggccctgacccttgagctgtgcttggtcttgtagaggttgtgttttttttcctcaggacctgtcactttggcagaaggaaatctgcctaatttttcttgaaagctaaattttctttgtaagtttttacaaattgtttaatacctagttgtattttttaccttaagccacattgagttttgcttgatttgtctgtcttttaaacactgtcaaatgctttcccttttgttaaaattattttaatttcactttttttgtgcccttgtcaatttaagactaagactttgaaggtaaaacaaacaaacaaacatcagtcttagtctcttgctagttgaaatcaaataaaagaaaatatatacccagt

SEQ ID NO: 43330 - DNA, 703 bp, Homo sapiens
aggtgcagtggctcattcctgtaatcccaacactttaggaagccaaggcagaagaatcgcttgagcccatgaatttgaggccagcctgggcaacatagccttgtttctacaaaaaatcttaaaaataaaattagccaatatgtgggcatgcacctgtggggccagctgctcaggaggctgaggcagaaggattgcttgagcccagcaatttgatgctgcagtaaaccatgatgacactactggactctagcctgagtgacagtgagactctgtctcaaaaaacaaacaaaacaaaaactggaaacaacaaaaaaaggactggggttatttaagctagttaggaatttatctttctatatgttaataacagcctaacagattttttgttttaaatatctctaggctagcctcaaggttaagtaattatagaagtttggtatgtattttcttcataatttgaatataattgcttccattgtgactgtcaattgaatgcatggagatcaattgtgataatatacaggattttagtcctatctctactgctgaagtaaccttacacaaaatactttgtaaaaaaatcactaaagtgccagcatttttaaagtgtatatttttctttggcaacctctcatgaaaagcactaactaaaaatatttaataatcttttttgtattacagtgcttcttttgttggaaatata

SEQ ID NO: 43331 - DNA, 467 bp, Homo sapiens
cgtgcttacactctaaacatttctggggaaacgggggttttgctgtgaggtactgggaaacatgaaaaaggtaaaatagctggtaaaaacttgttcagtgaaatcctttgctttttcctttatatagtgaaggagcaaggaattgccaaaaagctttcaagctaatggattttcaaatataggaatagtaatttttaaatcatagaagaaaggattcagtgatttcaaccccgttctcattatttccctttaacaaagcatcatatatttagattggtgatttctagaagttaccatgtttgtattataacatatttgaatctgagaatttctaataacaccatggtaactttgtagtgaaaatcattaatcattaattatatattaaaatgcatcccctcataaaatctctaaagatgtatttttttctgtttgactactgaaataaaatttgatatctcaccacc

SEQ ID NO: 43332 - DNA, 299 bp, Homo sapiens
gaaggacacctcaatggcttaagtgttcttctaaagtgtcaagtcaaaccttcataaacgtaggctggtagtcattttgcattaataaattcattaatagagtggtctggtgaaaagggtcattggaaatttatgataggccttttatcatgagtgacaactgcaaaatattaatgatttagaacaaatcatgttgcctgctgaaaagtgagtagaaagcttgtagggaaatgaaatgtcctgggtttttttgtttgtttgtttgttttttgtttttttaaatgggaaagttgttagga

SEQ ID NO: 43333 - DNA, 384 bp, Homo sapiens
aatcatgtcactctttgcttcaagacctgtggtaatttcccatcatgtccaagataaaatctaaattcaggaaagcaatataaagcattttttcttcatttgcttactatccaattctccagcctcatctctagccattcttccgctcaccctacagttttaccaaacgtgacttgagtcccacaatatgtgtgtgcatgtgtgttatgcctttgcacataatattccccctgtatggaatattattttccactaggatattttactaggataacccacacacatactttaagacttggtttaagcaccatcccctctatgcatataagacagaatatcacatcagttaccaaactgtattctaaaggtttctttcctcatttt

SEQ ID NO: 43334 - DNA, 428 bp, Homo sapiens
ttcacttttacaaaaaaagatgtatgttcttgtgcaggtctcaagagtataatgaaggaggagcaacgtggcttggtctgttttcaacagtgacaggaatgttggagagcactctctttgtctttctccctggactccagaaatcacaaacagtgctgatatcatttgccacagacctagtattcagtgcacatgggaacagaagattgataacaagtgtgtacctgtgaaaactgcctgggcgcagcccttaccaatgacaatccttcatgtttttgtagaagaaaggaattttgcatcttactttaaagcttacgtggggaaaagcttttagatgtatattctttaccagtgctgtccactaaaggtatgatgtgaaccagtgcattgctttaaattttcattacaaagattaatcaaaaaaatta

SEQ ID NO: 43335 - DNA, 484 bp, Homo sapiens
atatcttttcatttggtgactctagcctacctttctccattctttctccttactttatccactcagtgtctcctccctccattcaggagcccagctcttctttttcttttcgctccctcaaacctgttgcaagcagcccgagtctgtgcacaagtctttgtgtgtgtggtgtgtatgtgtgtgtgtatatgttttgggggagaggtaaggaaaagaaaaaagagcttttgctccatgcaagtaggaaaaaaaagataattaataatgaactgaacatcataattggcttctccatcacaagctaatgggctgcatctcttctgactctctttgtgtattcattggaggagctctaaattcacaggacaatgaagacaaacaaggaaataatagactatagacagtgacaaggaaaccagggaacctgtctcaatgtggtcatgctgaactattttcagagcttaaacggactgacaaaaaaata

SEQ ID NO: 43336 - DNA, 471 bp, Homo sapiens
  misc_feature (156)..(156): n is a, c, g, or t
ctggattctatttgagactaatttgtttgaactcagctctcaacatcaacatttatttctcactgtgtttagctgcacaaaactatttaagagaaaattcggcaaatcaccattatcatgtcatagtttccatccaattttttcaatgtgcgtcangcgcacatgagtatatttatcttctgacggttgctgtgaccaaccctctggttacccctaaagctatcaccctgcacatcggctggcccatcgtcactggctacacaggagagtcagaagctggaatatactcaaaagatcatcattagatgtgagtaagaaagcctctcacaaaacagcaggtcatatcaacttactaaatcttccttgaaaaaaaaatttttttaactgacaacaaatacttatagggtaatatttaaaagttaaaatcagctatcttttttcatttctaagttatttaataacattattcat

SEQ ID NO: 43337 - DNA, 308 bp, Homo sapiens
gcctcagcctcctgagtagctggtactacaggtgtgcaccaccacacccggctgatttttgtgtttttagtagagacagggtttcaccatgctggccaggctggtctcgaactcctgacctcaggcgatcctcctgcctcggcctcccaaagtgttgggattacagacgtgagccactgtgcccagccagaactttttatatattaaggttcttggtccttaattgatgttatatgatgtgaatatgtttttctaggtttgccaattatctttttactttgtattgttccatgttacctcatagtact

SEQ ID NO: 43338 - DNA, 890 bp, Homo sapiens
aggctggtatgcagtggcgcgatctcagctcactgcaacctgtctcctgggttcaagcagttctcctgcctcagcctcctgagtagctgggatgacaggcgtgcaccaccatacccagctaatttttgtatttttagtagagatggggtttcaccatgtttgccaggctggtctcgaactcctgacctcaggtgatctgcttgcctcggcttcgcaacattctgggattacagacgtgagccaccgcgcccaaccagtaacgatttttttaaagggcctttcttaattgacagttttaagctgtagacattaatattataacaaacaaaacatgccagttttactgattccgctttttgcttgattcaggaacttttcattgtttggggaagcttttgaatgcagtactgtggaggaaatcatccttaaaatagcatttcacacatagggccaaaattgaaattgtcaaggaaacccctcagcatctaacgtcatcttgtagaagagctgggcatacctcttcctctaggccaattcagaggccactggccacccaagtagagtggggcccactggcatgagtagtccctgtgcccatgcccatggtggtgcttgactttgctttggggcttaatcctagtatcatttggccattaatttttaattaagtttatacttgaataatcagttttactcctgaaaaattttgaagccagcactgactttgtttatattcacttaccttgtatatgaacttatgacattagagtttgtgaaactgtcttaacgtggctcatacacgtgatgtcagagggactggtcagttctttacagggtgaattaatcggcagctggctagtcagagcaactgatgggtggcttttttttct

SEQ ID NO: 43339 - DNA, 829 bp, Homo sapiens
ttcaatcaattgagcgacttataattttatttttggcttataaaaagtttattggtttaggagtatgtttctgaaatgcagatttgaacattctggcaaggaccctaagcaatggtatattctagtctctaggctacttcttagatgcatgggaaaagcaatggctcccactaagggagggtgaaatgccagaattactctagcagctgctggaagaagggattgaaagattcacagaagtgggcatgctggagtagatctaccacgtgaggccaggatactcaccaaatgattacagtgcacaggaaagccataagcagtacagatgcaggcacaccagcatcactaaaaagcacagtgatgcctcttcttcgtaggtcatcggtaacggtagaaaaggtgatcacagaacacagaactaagctaactgatagcaatagagatgatcacaatcaccctgctacccagtgggggtagggggaatagaggacagatgatgatgtgtagctgtcaaaaatcagatagatccaatgatcacaatgaacagcaaagttggagcagtccagagggccaggccaagacagccatggagaaggttaagaaaacacagcatgcctaggggcaaaatagatggacagttaacaaagaactcttcaattcaccatcaaaacaaaccaaaaatgaatgatcaagacactgaaggggctgggcacagtgacccatgccagtaatcccaacattttgggaggctgaggtgggtggatcacttgaggccaggagttaaagatgagcatgggcaacacagtaagaccctgtctctacaaaaaaa

SEQ ID NO: 43340 - DNA, 347 bp, Homo sapiens
tcattagaagatgcttttagtagacacaccagtgaacctaggcagccaatgtaatcaaagggatggaactgaaagagcaggggcagagtgggtttaagtcctggctgtgcaagttagtagctatatggcagcagcagtcacattatttaacctctctgagctgcaacttccttatttataaagtggaggtaataatgcttacatctcagggttgttgtgagaattaaatgaaaagaatgtatgtgaagtgcctagtctatagtagttgctaactaaatgtgggccacgtccagtcatcctcaatcccaacagtggtctggaatgggccatttctgacagtgaatggt

SEQ ID NO: 43341 - DNA, 522 bp, Homo sapiens
tacataaatctaatattcttattttagaaagcgtaaaaagtgcctcaaaaccataacaacttcattaccagtaagaccctcccagtttcctttcatcttaatcttgactgcatctgcctgtggggccccagctttccaaggctttgtagcttctttcagaatgaaggctccttccgtggctggggtgagcagtcttgagatatccgcaagggagactccccagaaaaaactaacagggcctttaataacctcctgttggccgggtgcggtggctcacaccgataatgccagcactttgggaggccgaagcgggtctgaggcagagagttcaagaccagcctgacaaacatggagaaaacccgtctctactaaacaccaaaattagccgggcgtgatggtgcatgcctgtaatcccagctactggtggggctgaggcaggagaatcgcttgaacccagtaagccgagatcacgccattacattccagcctgggcaccacaagcgacactgtgtctaaaaaaaa

SEQ ID NO: 43342 - DNA, 400 bp, Homo sapiens
gagacagggtttttttatgttgtccaagctggtctcaaactccagggctcaagcaatcctcccaccttgtcctcccaaagtgctgggattacaggaatgagccactgtgcctggtctgggttttgtttttttagagatagggtctcattatgttgtccaggctagactcaagtcctttggctcaagcaatcctctcacctcagcctcccatgtagctgggactaaagcgcacaccaccataggcaacctctattatcatttaaaaaaactattcttttactttgattataaaaggaatatatgatcattgtaaaaagtgtgggaaaatatagaaacatttttaaattggggggctggggcccagttaggctttacatctgtaatcacagtgctttaggag

SEQ ID NO: 43343 - DNA, 187 bp, Homo sapiens
agaacctggagcaggagcaaggtgtgtagatgtgaatagggacttgatcattgtcgtttcctctgtggaaaattaaatcccttccctttctttgaaaatgtgaatggctgagaggaaacagagaactgactttttagaaaggcaatcaaggcacagaaaatcctagaagaaaatatatggaagagga

SEQ ID NO: 43344 - DNA, 642 bp, Homo sapiens
gtagagacagggtctccttatgatgcccaggctggtcgtcaactcctgggctcaagcaatcctccctcctcagcctcccaaagtacttggattacaggcatgagccactgtgcctggccagcatgcaaatttattaacttgcacaggtgtcttacaaaatagaactcaaataaatggccagatgattgatgcttttataccatcttggggttatagaaagaatgggagcttggagcttgccagaacagattatggcaggcagagaagagaaggcctggttagcaaaggtggtcttgttatattatgtagataagacaggtagcagccctcggagaaaatagcggtaaaggtctatttcttttagacctttaaaggcatcacactctcagttaatctcccctagatctggacaagggagggcctcagagaaagcctagctgcagccatgcagattttctctacagatacagatctctcccacaaaagacagctttgcagggctacttctgtatgtaggccctctcaacagccatctcaaaatatgtcaaagtatattttggggtgaactattttggtttccttcaaggagcactgagtccagggtccagatttttcacttccttagagaggcactgtagcatc

SEQ ID NO: 43345 - DNA, 522 bp, Homo sapiens
ctcatatcatcaggcattagagtgtcacaaggagtatgcaacctggatccctcacatgtgcagttcacaatagggtttgcaatcctatgagaatctaatgccgccaccgatctgacaggaggcaaagctcaagcggtagtgcttgcctgccactcacctcgtgctgtgtgtcccagttcctaacaggccatggaccaggggttgaggaccccggcctacaccaaattataacaagcttaagacaaagagtagtagaaaaaggtaattataaatactatgcatgaccatatgaccagtggcagaaatgagcactgtaatacttatgaatgttttccttattttaatatgcaaatacttgtgtgtatattaatttttttttctcttttccttttacatttgcctaacatctaacataaaaagtattaaaagtaattaatctgtatgatagcgtttaatttgtaagatatcaaagaaggaatgtgactcaggtagaagggtaataaaagtcactcaagaggcctg

SEQ ID NO: 43346 - DNA, 583 bp, Homo sapiens
gaagtttagaagtaatagacatctgctgtttatatttcctagaatatgtttcacttcttttgacacctcccattttctttggagtaccactcctctctttccttcagtccttttggttggtagactcttggtcaaaaaaatctccaatttgctgctcaagaagaattgaccagtctccggaagggccttaacagggtcctcctggttcaagacagcatttaaaaaataaaaagagaccaggctcagtggttcacacctgtaatactggtgctttgggaggctgaagcaggaggattacttgaggccaagagtttgagaccagcctgtgctatatagtcagacattgaatctatccatacatacatacatacctatctgtattatatctctaaaaatgtcaggtactagaatccataaatacagactagaaattagctatgcctaaaatgatgggtcacatttttaaaaatctaaaacaataccagtatttttgatgcctgtgtgagagcataaatattaagaaaggcaattggtcagcaggactttctgccccagtcatatatgcattttgatttcattcaat

SEQ ID NO: 43347 - DNA, 352 bp, Homo sapiens
atatattttgaaactattgttaagggcataaatgtatttgggattgttatgtcttggtggactgaatcatttgttaatagataatatcactatccctgtcaatattcctctgaaaactactttgtcacatacttatcaaactactgctagtaatctctttttcctctcctctgggattttaattatgttagtgtattagaccccttcgttctgtctcatagacctcatattctttttcttgtcaatatttttttctcttcaggttgggtaatttatattgttctgtcttctagctcatgattccttcatctgtcatctccattttgcaaaaattttcatttgattcttttta

SEQ ID NO: 43348 - DNA, 620 bp, Homo sapiens
actttgttgcctcccagccaaagctgcttgctaacaattttacgatttgacaaaaggaaatactgccctcttgggaggacaaatcatctatgtcatgcaatgcaggagaatatgttaagctatatagagtattcacaagtaaggagtttgtaaacctaggagttgaatgcttaaatgtagaaatatggataactatagtctgagctttgaagctatgggtaaaaagatgaaattaatgtcgttacctaggatgtaactaaatctatatttttgcagaaacttcagtttttttaggtgaaaaaacttcacagtactttattgacagcatcccttgtgctgttctccatattttcaggcaggcccaagttactgctgataataaacacacttaaaattatcccagaatcaaatttgcctgaaaaccaaataaaaaacaaaaggaaggtcccttaagattatgtctttattaattactctcaagaaaaataaggaaacctactgccagccctcatttttatgtttaatgggatgatctgtacttgggtactttaccgcctctctgttggaaattttttatcatttgtgggaaaataataagaaaaataccttggatttattta

SEQ ID NO: 43349 - DNA, 354 bp, Homo sapiens
ggacacggcaagaacaacgttcccctcagtctctaatggacacggactgcccttcccaggcagaacgcacgcactcgcctgcagaaaccttgagttcaccattatttattatgtctgggggatgctgccatcccctgtgatgcccctgattaatgataatgtgcaaacctgaggtaattcgctgacatgttagatctttgtgaggcaccagaatggaagcggcatttttcaaactctgctctgcgggagccccaggggctgttccagctcaggggggaaggggagggcggcagctcccgcggctgctgctccatttttagctattttatgtgtttatttgtttacaatgcttgt

SEQ ID NO: 43350 - DNA, 575 bp, Homo sapiens
acatgtcttattccctctatcacgtgagagcatattttattatttcagtggcaaggcaaatggctaagttttgtcataaaactttcaatctgattcttccacctttgaagcccttctccagctgactggttaggtgatttgtcatataaccgctaaattcagtcaaagaacatggttttaatgagtagccgttttaaagtgattccattaaaagcagctaagtcaacaacctacatgtgattccgattataatttattatataatatcacactgctgaaagaaagaaatcagggcacaaaattgtatattcattatgatctcaatattacaaaaatatgcataggggaagataagagggaaagacagaaaatcattcttttggggtgatgaaaatgatggttatgtgttgtgttctttatacattcctgtatttttcgtgttttcaaaaatgagcatgtgttacttctataatcagaagaatattttaaaactaatctaatctggaaaataaagtcattatctccatcaatgaggttgtcaatgagataaaagatgtgatttcatttcataaatc

SEQ ID NO: 43351 - DNA, 414 bp, Homo sapiens
gatccagatgtaaaatagattttctaagtaggctaaaatgtttgagaaccactaacctatgaaactataaacttaataagaatataaagtagaaacaaaactatggtcccttaaaaaccctaatttctcctagcctgaccaacatggtgaaaccccgtctctactaaaaatacaaaaatcagccaggtgtggtggcgcacgcctgtaatcccagttactcaggaggccgaggttgcagtgagctgagatcacgccactgcactccagcactccagcctgggtgacagggcgagactccacctcaaaaagaaaaacaaaacaaaacaaaaccctaattcttcaagtacagtctgtgaaaaaacacatcacaactcctcggagtgtttgcagtggaaattcctaagtcctgcccaa

SEQ ID NO: 43352 - DNA, 291 bp, Homo sapiens
cttaaatcgggaaaggagagtaagagaaagcactcaacggagtcagaggtgtcttgcagcctagctctttccacagacaagctacatgggcctatcatctaaccttttcaagcttctccgactgcttctgtgttggagggatttgggctagaggatctttttatttttttttattttattttggtgacggagtctctcactgtcgcccgggctgaagtgcagtggcgcaatctcagctcactgcaacctctttctcctgggttcacgcgattctcctgcctcagcctccca

SEQ ID NO: 43353 - DNA, 521 bp, Homo sapiens
  misc_feature (1)..(1): n is a, c, g, or t
  misc_feature (4)..(5): n is a, c, g, or t
  misc_feature (36)..(36): n is a, c, g, or t
  misc_feature (53)..(53): n is a, c, g, or t
  misc_feature (70)..(70): n is a, c, g, or t
nggnncagaggagggttctgggtctggatctcttcntaaggagaaccagggantggccctggcctgtganttgggtctcttcctgaggaaaccaggtcactatagtgaccctagtgacaggaagaaagggagatgggtgtggctgccaggactttctccagtggaaaagggattccctctaggctgagcctcccctgggccttagggcctcacccttcccttcccccacacctgtcctggcaggtaaggctgcttcctgcttcctgggcccagatggcagccgcaccacccagctgatctccagcagccctccccctccccaagggtggcttccctgcagaagaatctgcatggcacgctgttgtcttctttctggggtccatctcctgtactggggagggagaacctcagaatctcctggaattctttaccattcagaaaccagcctcccctctgaagaatcccaaggcccagctgggctcaatttggatctgttctttgttttaaaaatgtgtatttat

SEQ ID NO: 43354 - DNA, 635 bp, Homo sapiens
tggggagctgagttcacagacaaagaaaggctggcacttcctttttctcacttgaatggggtccaaggcacagccttgtcctttctctgctgtttttggagtggcctgaaaaccgggccttccccactcctggacactggcactcagccagttactgaaggcgtttgctgggacctccttgcctcagacattgactggcctgcctgggtttgaaccctcactttgccacttctagcttaggcggaagtatcccgctctctgggccgtggtatcctcacctgcacctggggagatggcagtgctgacatcccaaggttgtaggatggccctgactgcatgagatcctgggtggccagccctgagaatccattattattattattattactgttattttgtttttgagacagagtctcactctgttgccaggctgagattgtgccactgcgctccagtctggatgacagagcaaaactccatctcaaaaagaaaaaaaaaaaagagatgatatacagatagcaaacagtatctgaaaaaattgcacaacatcatcttagtcaatgggaaaatgcaaattaaaactgcaaagagatactttgacaaacccactaaaatggccagaacttttcaatgga

SEQ ID NO: 43355 - DNA, 349 bp, Homo sapiens
tgggattacaggcatcagccaccgtgcacggcctgattattgtcttaaaaggtgaagctaatgttttaaagtagggggaagtaagacatgacttcaaccctatattgaatttgtggttcaatttacagaaaattgatgtgaaaatatgtgtgtgtgtgtgtgtgtctgggtgtgtgtgtgtgtgtattaaataaagcacttgcaagaggacctggtatacagtaagcacttaactggatattaggtcttaaatagctattatctttattgtattaatccaccttatctatgaatattatttttcttcacttgtttgtgtcttatctctttaataaagttttataatttt

SEQ ID NO: 43356 - DNA, 257 bp, Homo sapiens
atctgtcagacctgtgattaaacaaaaacaaatcctaggaacaaaacattctgaatagatgtcaatatttgtgtaacacggctgggcaaggtggctcatgcctatatcagcactttgggaggccaatgcaggcagatcatttgaggtcaggagtttgagagcagactggccaacatggtgaaaccccatgtctatgaaaaatacaaaaattagctgggtgtggtggtgcatacctgtaatcccagttactggggagg

SEQ ID NO: 43357 - DNA, 418 bp, Homo sapiens
tggacttgttggttccattccattcaaaagttctctgtggctcctttccagttcttagtttgtatattattcttgaaaagttttaagtacttacttgtgtatcaagcacaacagtaggtgctttatttgtataatctcatttaatcataatacctatctcatacagccatcagtccaatttaacagacataaatagaagctaagagattaagtacactgagcttatacaagatcacaataatttccgttaagactctaaaacccttggctcttccaactataccatgaaggttctctacagaatctgttgttctctataaattcaaacggggagaaaaggaaacaacagggaaaagggattgagctttcttttgaaagcagtgactgtcaggcctgcatccattcctacaattgtttt

SEQ ID NO: 43358 - DNA, 391 bp, Homo sapiens
catgacgtgttaaggttggagcaaaaataattgtggtttttgccgttatacaacaaaaaggcaaaaaccgcaattacttttgcaccaacgtaataggttgcctttttgtctccactgaattaagtcctactggaagtacttcccttgtggaaattacattaagattgtatgtattagccgaggcgggtggatcaccctaggtcaggagttcaagacaagcctggccaacatggggagacccagtctctactgaaaatacaaaaattagctgggcatggtggtgagcgcctgtaatcctagctactcgggaggctgagacaggagaatcacttgaaccagggaggaggaggttgcggtgagccgagatcgtgccattgcactccagcctggg

SEQ ID NO: 43359 - DNA, 406 bp, Homo sapiens
gaatgtacttaacacaaagaatagggtccccaggagagcacttaaagggcaagcagaggaagcctaggtaggttgggttggggggggggacctacaagggccaggaagtttgtaggattgccatgagtgaggagtgtcactaatgctgggaaaggagggtggacattctgtggtttttttttttgagggagtctcgctctgtcacccaggctggggtgcagtggcgtgatctcagctcactgcaagctccgcctccccgattcacgccattctctgcctcagcctcccgagtagctgggattagccaccacgcccggctaattttttgtatttttagtaggtttcactgtgttagccaggatggtctcgatctcctcacctcatgatctacacgcctcggcctccc

SEQ ID NO: 43360 - DNA, 1075 bp, Homo sapiens
gcagcttgagtgtttcaaattaactttacattgcatttgtcactagaaccaaatccaagaatgattgcgtaggtcagtgagacacagaagaggcaactcaacaaagcccatgacatacagtgcatggctcacaatcccaggagatgagggcagcacagctgcagagcaacacagagtggggggaacatccaggatgcacattcaaccagtaggtggggagcaagacagacagggacctgtgggccaaagcgtttcttggggtctagggaattgaccaaggaggtgtctcttggggagttgtttctggtggatttagagcaagcaggcactagttctgtgaagtcgcactgtgattaagaggtggtctgtaccatccatgtggggtgtaagggtcagtggtacaagtcaaattggttatatctagctgtcccacagggaggtggtcaccagaatgcagttgtgtaataaatatatgtgagttgaccacatggaggaactgggagaaagtggagaactagaaactctgttgagtttgaataaagttttcttccgttatgagaaagttaaatccttaaagaaaatgcatgctaaggtaacatataattataagaactcagtataagaggcaactctagaattaattaaattattgtatatggagatgacaggtagtggattgattattctcctgtagataaccatttgtccctgctttttctgttaagtgttcaccacttgtatcattggctggcaatacctggtttgtcatagtttcacattaccttaaacagatgcccagactgggcacagtggctcatgcctttaatcctagcactttgggaggctgaggcgggtggaacacctgagatcaggagttcaagatcagcctgaccaatatgggtgaaaccctgtctctactaaaaatacaaaattagccaagcgtggtggtacatggctgtaatcccagctactcaggaggctgaaacaggagaatcacgagaacctggggaggtggaggttgtagtgagccaagatcacaccattgctctccagcctgggcaacaagagtgaaact

SEQ ID NO: 43361 - DNA, 404 bp, Homo sapiens
ttctctcctctttggcctggtttttgcatttttccacctgaccactacttcatgccctttttggagtcttggctgctgctggggtctcccagggatgctgattccccgtccctgcctccctccccctcccccagcctcccctgtctctgcggcagcctcctgggccttgtccagggtgctcagcgcacagcagccgcctccttgctggtttgccacacagccccagggtagtcatcccaacagggcccaggtgggatgcccgaggccagggagggccattggcctatcctcagaccctggggccaagggcctccctggaggctgtgcacacatgcttttttctctctgtcgcctgggctggggtgcagtggcacaatctcggctcactgcaacctccacttcct

SEQ ID NO: 43362 - DNA, 298 bp, Homo sapiens
ggtgacttaacgaggctcctgaccttcagtagccaattcaaatcacaatatcaaatggaatctacctgagaagcatccttggggcaaaatcccttttgttacatgttgattcttaataacttcaattatgatgatacttacgataattgcaaaaggtaaaacttgtcattcttacctaatgagtctgagagcaagaaattttgttttgtactgtcacaaattccctacctttctaggaaagtagagaacaaaatgttcaaaacaaatgctttatttagtcaatgatatgatgtataac

SEQ ID NO: 43363 - DNA, 341 bp, Homo sapiens
agagatggggtttctccatgttggtcaggctggtctcaaactctgacctcaggtgatctgcctaccttggcctcccaaagtgctgggattacaggcatgagccactgcccctcgccaaatttcttgtgatttttaatctttacttttgcttaaaaaattcattggtatgtgtctatttttttcatttattacaaaaatcatttaggagaaaacatatatatttgaatgtataaaaggatttttctcacagttgagatcaatctgttatattgacattattttctataaattcaattctcttagacacatataaagagcagactgtgcttttgggttggtaa

SEQ ID NO: 43364 - DNA, 728 bp, Homo sapiens
ttccctagaggacctcacagagcctttaatttgctgacaagcacatgaatctgaagggaaggtgtatagaatgatctgataggtttcctccatgtttctacagtccttgtgtgcactctggcatgaccatcagcatgtggcagtgtggtgttggatttggagtattttccatgcctgattgtaaatccctcggggtagggaccatgtcttcatctccctaggtcgtagcgtgagaaccggcacgtgtttcccgcttgacaggtgtcccagccgtggaggcctttgcgatctgttgagatggcctcatgtttcttcttgcccccacaatgtgattcagcaaaaagacaactgggtaacagacgcatggagcagtatttcttggatcccatggggcttgctgtgttgagactgggctttcgagtctgaattcaactgagagtgaggtgttgctgatgcagagagactcatgggcccagccccttgtcctctgtaaagctgggaacagaagctaagtctggagagtcgaaccccagagttttagagatagaactgataggcaggtcgccgttctcctgggaccccagtctttgtggcctttcccagcagctgaactttggacccctctctctgtgacatcctgctcctaacctggccacatgatgctgcttgagaatccagccacagcctgagccaggacagctctcaagagaggaggacaggctgtggga

SEQ ID NO: 43365 - DNA, 474 bp, Homo sapiens
  misc_feature (448)..(448): n is a, c, g, or t
agctttctaataagacctgttggtttgaatactccagaaccacagataaataacactatgagatctcctggttctgaagctgtggggtttggctagacctgtaacattctattcagttggtagagagatccccagagattaggtgacagatttctggcctgcacttaaactatgacctggacaggtcattttgtcttgctatctgtaaaaggagaaaatcatatttagtgcagcttttatttttaaatcatggtctttatgtagaccatgctttttagaagcaaagttatgtaccttcaaagtagcatattctcttactttgttataataatacataccattatgttggtacaaatttggaagaatgtattattaccagcaaagctgtgctctagcccaggctggagtgcagtggtgtgagccgagatcgcgccactgcactccagcntgggtgacagagcaagactccatctc

SEQ ID NO: 43366 - DNA, 342 bp, Homo sapiens
tttgtatatatttacattttgaaatgggaagactgaaaaagagggaagctatatacttgtttctgctttggtctgaaaatttggtagttgaatgtacttctttttgaaagcatctttttggctgggaggagaggctcatgtctgtagtcccactaacttgatttggaaggctaaggtgggaggattgggtgagcccaggaatttgagagcaccctgggcaacatagggggaccccagtcttttaaaaaataaaaaacttggctgggcatggtggcacatacctgtagtcccagctactcagggggctaaggcaggagtgtggcttatgcccaggagctcaag

SEQ ID NO: 43367 - DNA, 660 bp, Homo sapiens
ctaatgcatataaaacaaatttagaagtatataaccatgagtgaaaccacacgttaatctacctggaaacaaatacaaatagtcccctacatgtccaaacagtgctgcctctgcttgcttcaccaacaccactacttgatgaagactccctagatcctctttttcttgatctttttccttctcttttctttttcttgttctttttgtttctgaagccttggaagccttcaattcatattcataggagtctactgtgttcatggtgcctgggacctcatagtaataaaagtctttgggaatcttattggaatcaggtacaccctggaaacactcaaattcatcagggaaacacccagacagtataatagaagggtgactgtgatagggcagaattcccaagatgggcccccaagattccccacccctgggtgcgcccattctgtatgaatcgtgactgtgagtgggatctgtgaatatgatggaatatcactccagtgagtatcttatgttatatgggaaaggggtttgtaagcataattaaggtccctaatcagttgactctgcattcatctagtgggagatcatcttgggtgggccagacctaattgaaagagcccttaaaaaagataagaagcagcagcagatgctttccagttagcc

SEQ ID NO: 43368 - DNA, 681 bp, Homo sapiens
tcacagcctttttctggattctaagataatggtaattaaagcaacatgaacacataatcatacatgaggctttcaaattacctattttcctcccaaaccttatattgcttatgaaagactgacatttatgggtgaaaaaaattatcccaatactattacattggcttgaaaatttttagattatgctaaggaaattttcaggcagacatatatctactattattaaaagatgcttcttagagctagtatgtagctaaactaattttgtaccttaagaaaaaaacttttaaaaagtaataataatgatgtacaaacaccagtaagcacaaaagagggtaagattttaaagtcaactacaattaacaccaagaactcacaactgtctggcctaaaaacctgttcttgaagtaagaacatgagtccttgactaatatgaggttatctaattttacattatcattttaaaaagaaaatgaaacaattagggcctattagcaataaccttttctaactctctgggcagccactggcacaaatgtccaagatgacagcagcacagcacaatcagaaagactgaacctgcatgagccaaggctttccttgcaacctttcctctatcaagtaaaaatggcagacccagttagactcacagagcactggccctatggtttcaatgataaa

SEQ ID NO: 43369 - DNA, 467 bp, Homo sapiens
agcaaacgttaattaatacgacgttatctagaggagataaagcattaatacttgaactctatatagtaaattaatgagagaaatttagaataaacagatgaagaagaggggtcatgtacacagtctcttcccaactcttacatctttcattaaaaaaatttttttttaattttagtttttccagaaacgggttttgctatgttgtcccttctggactcgaacttctgggcccaggtgatcctcctttcttggcctcctgagtaactaggactacaggtgtttgccatggagcctgcctgccttagatctttccctttgttaaggatctgaacttttcacctcttctatctaggttatggagccctattatcttcttgtagttcctgttattaattgtccctcactagactgagttgctttaagggtaaggactgtttctttttcccattttgtagtcacagcatcca

SEQ ID NO: 43370 - DNA, 380 bp, Homo sapiens
tgatattatgtctttgcttactcatgttcgcaagagtggtgttaatggataaacataccaccgttacacctgaaaacgggcccccaaacttagtcaaataatgtattctgttcagaaatacattttcaaggttttgaaaaataaccaatattcaaactagcctcaatttatcttaaaacagatgctatcctagttctttagacaagcagtccccagtcacttctcccacgggggagaagtgacaacagataacatttacacatgtgaagcattcccatgggcagagttacttgttctttttctttttttttttctttttttttttttggaaacagggtctcgctctgttacccaggctggagtgcagtggcacaatcaca

SEQ ID NO: 43371 - DNA, 312 bp, Homo sapiens
ttagtcctagccaaaattgacaaatgggatctaattaaagagcttctgcacagcaaaagaaactaccatcagagtgaacaggcaacctacagaatgggagaaaatttttgcaatctacctatctgacaaagggctaatatccagaatctacaggttgacatttcattacttatctttctccccctcaagacggcaagctctctgagggcagagtccatgagttaggtacctattttctctctagcacctggcacaggcctgttgcttttctagttatctaatgagtgataactgatggcagatccatcctgt

SEQ ID NO: 43372 - DNA, 1610 bp, Homo sapiens
aagcacactgcttattaaagtacactattcaggcatatcatgtaggtttactttctgtgtttctagagaccaagaagcgggacgttcaccatgggaagaaaatcgctgtaccttctgattgtggggatcctcatagcatattatatttatacgcctctcccagataacgttgaggagccatggagaatgatgtggataaacgcacatctgaaaactatacaaaatttggctacatttgtggagctcctgggacttcaccattttatggattcctttaaggttgtcgggagctttgatgaagtcccaccaacctcagatgaaaatgtcactgtgactgagacaaaattcaacaacattcttgttcgggtatatgtgccaaagagaaagtctgaagcactaagaagggggttgttttacatccatggtggaggctggtgcgtgggaagtgctgctctaagtggttatgacttgctgtcaagatggacagcagacagacttgatgctgtcgtcgtatcaaccaactacagattagcacctaagtatcatttcccaattcaatttgaagatgtatataatgccttaaggtggttcttacgtaaaaaagttcttgcaaaatatggtgtgaaccctgagagaatcggtatttctggagatagtgcaggagggaatttagctgcagcagtgactcaacagctccttgatgacccagatgtcaagatcaaactcaagatccagtctttaatttatcctgcccttcagcctcttgatgtagatttaccgtcatatcaagaaaattcaaattttctatttctatccaaatcactcatggtcagattctggagtgaatattttaccactgatagatcacttgaaaaagccatgctttccagacaacatgtacctgtggaatcaagtcatctcttcaaatttattaattggagttccctgctccctgagaggtttataaaaggacatgtttataacaatccaaattatggcagttctgagctggctaaaaaatatccagggttcctagatgtgagggcagcccctttgttggctgatgacaacaaattacgtggcttacccctgacctatgtcatcacctgtcaatatgatctcttaagagatgatggactcatgtatgtcacccgacttcgcaacactggggttcaggtgactcataaccatgttgaggatggattccatggagcattttcatttctgggacttaaaattagtcacagacttataaatcagtatattgagtggctaaaggaaaatctatagtaaaacatgtagctataacatattttaaaaataaaatctgaaaacctcagaaaatttgcattagaaattggtctttcttagaatggtctagttaagttccacatgtagcataattcttaaataggcacttttctgttttttttttcttactgtgggatttcatttcaattttctacattgtctatctgctttttctgagattttccttcttacactgttaatcttattttaaaaaatattacattcttgtatactttatttttgtgagttggctactatttacgatgcaagagaataaatgtgagcaaatattgcctgtc

SEQ ID NO: 43373 - DNA, 1926 bp, Homo sapiens
tatgtttgagctactctgtgacatttaatcattaatagaagatttggggtatacactacagatgggccctgtttgctgaaatgttggggccaaacaacttgatagagcctatgatgttcctttcaagctttctaaagtttccaccaacctcagatgaaaatgtaactgtgagaagtaaatttaacaacattgttgtctgcatatgtgtgccaaaatggaagacagaatcatgaaaaagaagcttattttataaccatggtggtggctcatgtttgagtagtaatgctccttggtctggccactgaagaatgacagagcccagggcccccggtcccatctgccatcactgctttggagcccagggtaactctgccagtaacagagaccaagaagcgggacgttcaccatgggaagaaaatcgctgtaccttctgattgtggggatcctcatagcatattatatttatacgcctctcccagataacgttgaggagccatggagaatgatgtggataaacgcacatctgaaaactatacaaaatttggctacatttgtggagctcctgggacttcaccattttatggattcctttaaggttgtcgggagctttgatgaagtcccaccaacctcagatgaaaatgtcactgtgactgagacaaaattcaacaacattcttgttcgggtatatgtgccaaagagaaagtctgaagcactaagaagggggttgttttacatccatggtggaggctggtgcgtgggaagtgctgctctaagtggttatgacttgctgtcaagatggacagcagacagacttgatgctgtcgtcgtatcaaccaactacagattagcacctaagtatcatttcccaattcaatttgaagatgtatataatgccttaaggtggttcttacgtaaaaaagttcttgcaaaatatggtgtgaaccctgagagaatcggtatttctggagatagtgcaggagggaatttagctgcagcagtgactcaacagctccttgatgacccagatgtcaagatcaaactcaagatccagtctttaatttatcctgcccttcagcctcttgatgtagatttaccgtcatatcaagaaaattcaaattttctatttctatccaaatcactcatggtcagattctggagtgaatattttaccactgatagatcacttgaaaaagccatgctttccagacaacatgtacctgtggaatcaagtcatctcttcaaatttattaattggagttccctgctccctgagaggtttataaaaggacatgtttataacaatccaaattatggcagttctgagctggctaaaaaatatccagggttcctagatgtgagggcagcccctttgttggctgatgacaacaaattacgtggcttacccctgacctatgtcatcacctgtcaatatgatctcttaagagatgatggactcatgtatgtcacccgacttcgcaacactggggttcaggtgactcataaccatgttgaggatggattccatggagcattttcatttctgggacttaaaattagtcacagacttataaatcagtatattgagtggctaaaggaaaatctatagtaaaacatgtagctataacatattttaaaaataaaatctgaaaacctcagaaaatttgcattagaaattggtctttcttagaatggtctagttaagttccacatgtagcataattcttaaataggcacttttctgttttttttttcttactgtgggatttcatttcaattttctacattgtctatctgctttttctgagattttccttcttacactgttaatcttattttaaaaaatattacattcttgtatactttatttttgtgagttggctactatttacgatgcaagagaataaatgtgagcaaatattgcctgtc

SEQ ID NO: 43374 - DNA, 1872 bp, Homo sapiens
tatgtttgagctactctgtgacatttaatcattaatagaagatttggggtatacactacagatgggccctgtttgctgaaatgttggggccaaacaacttgatagagcctatgatgttcctttcaagctttctaaagtttccaccaacctcagatgaaaatgtaactgtgagaagtaaatttaacaacattgttgtctgcatatgtgtgccaaaatggaagacagaatcatgaaaaagaagcttattttataaccatggtggtggctcatgtttgagtagtaatgctccttggtctggccactgaagaatgacagagcccagggcccccggtcccatctgccatcactgctttggagcccagggtaactctgccagtaacagagaccaagaagcgggacgttcaccatgggaagaaaatcgctgtaccttctgattgtggggatcctcatagcatattatatttatacgcctctcccagataacgttgaggagccatggagaatgatgtggataaacgcacatctgaaaactatacaaaatttggctacatttgtggagctcctgggacttcaccattttatggattcctttaaggttgtcgggagctttgatgaagtcccaccaacctcagatgaaaatgtcactgtgactgagacaaaattcaacaacattcttgttcgggtatatgtgccaaagagaaagtctgaagcactaagaagggggttgttttacatccatggtggaggctggtgcgtgggaagtgctgctctaagtggttatgacttgctgtcaagatggacagcagacagacttgatgctgtcgtcgtatcaaccaactacagattagcacctaagtatcatttcccaattcaatttgaagatgtatataatgccttaaggtggttcttacgtaatagtgcaggagggaatttagctgcagcagtgactcaacagctccttgatgacccagatgtcaagatcaaactcaagatccagtctttaatttatcctgcccttcagcctcttgatgtagatttaccgtcatatcaagaaaattcaaattttctatttctatccaaatcactcatggtcagattctggagtgaatattttaccactgatagatcacttgaaaaagccatgctttccagacaacatgtacctgtggaatcaagtcatctcttcaaatttattaattggagttccctgctccctgagaggtttataaaaggacatgtttataacaatccaaattatggcagttctgagctggctaaaaaatatccagggttcctagatgtgagggcagcccctttgttggctgatgacaacaaattacgtggcttacccctgacctatgtcatcacctgtcaatatgatctcttaagagatgatggactcatgtatgtcacccgacttcgcaacactggggttcaggtgactcataaccatgttgaggatggattccatggagcattttcatttctgggacttaaaattagtcacagacttataaatcagtatattgagtggctaaaggaaaatctatagtaaaacatgtagctataacatattttaaaaataaaatctgaaaacctcagaaaatttgcattagaaattggtctttcttagaatggtctagttaagttccacatgtagcataattcttaaataggcacttttctgttttttttttcttactgtgggatttcatttcaattttctacattgtctatctgctttttctgagattttccttcttacactgttaatcttattttaaaaaatattacattcttgtatactttatttttgtgagttggctactatttacgatgcaagagaataaatgtgagcaaatattgcctgtc

SEQ ID NO: 43375 - DNA, 1065 bp, Homo sapiens
aagcacactgcttattaaagtacactattcaggcatatcatgtaggtttactttctgtgtttctagagaccaagaagcgggacgttcaccatgggaagaaaatcgctgtaccttctgattgtggggatcctcatagcatattatatttatacgcctctcccagataacgttgaggagccatggagaatgatgtggataaacgcacatctgaaaactatacaaaatttggctacatttgtggagctcctgggacttcaccattttatggattcctttaaggttgtcgggagctttgatgaagtcccaccaacctcagatgaaaatgtcactgtgactgagacaaaattcaacaacattcttgttcgggtatatgtgccaaagagaaagtctgaagcactaagaagggggttgttttacatccatggtggaggctggtgcgtgggaagtgctgctctaagtggttatgacttgctgtcaagatggacagcagacagacttgatgctgtcgtcgtatcaaccaactacagattagcacctaagtatcatttcccaattcaatttgaagatgtatataatgccttaaggtggttcttacgtaaaaaagttcttgcaaaatatggtgtgaaccctgagagaatcggtatttctggagatagtgcaggagggaatttagctgcagcagtgactcaacaggtatgttcataatttctatgctttttaaaaatagcgtttctacgctgttttaaaaacatatttataaacatattgaatgcatgtattaaaaatatgaatgcaaataggagatattaattttttgaaacaaagagaatattgagaagaaatgactaaaacattataatatcaatccctgcttctgtcatagatttttttttctttcttaagggaatgttaattctttggataaatcattcatttaaaattatagcctgcatgtggtagctcagcactgcaatcccagcgctctgggaggccaaggcaaagggatcacttgagaccaggagtttgatagcagcttgggaaaaacagtgagaccctgtctctaca

SEQ ID NO: 43376 - DNA, 1872 bp, Homo sapiens
tatgtttgagctactctgtgacatttaatcattaatagaagatttggggtatacactacagatgggccctgtttgctgaaatgttggggccaaacaacttgatagagcctatgatgttcctttcaagctttctaaagtttccaccaacctcagatgaaaatgtaactgtgagaagtaaatttaacaacattgttgtctgcatatgtgtgccaaaatggaagacagaatcatgaaaaagaagcttattttataaccatggtggtggctcatgtttgagtagtaatgctccttggtctggccactgaagaatgacagagcccagggcccccggtcccatctgccatcactgctttggagcccagggtaactctgccagtaacagagaccaagaagcgggacgttcaccatgggaagaaaatcgctgtaccttctgattgtggggatcctcatagcatattatatttatacgcctctcccagataacgttgaggagccatggagaatgatgtggataaacgcacatctgaaaactatacaaaatttggctacatttgtggagctcctgggacttcaccattttatggattcctttaaggttgtcgggagctttgatgaagtcccaccaacctcagatgaaaatgtcactgtgactgagacactaagaagggggttgttttacatccatggtggaggctggtgcgtgggaagtgctgctctaagtggttatgacttgctgtcaagatggacagcagacagacttgatgctgtcgtcgtatcaaccaactacagattagcacctaagtatcatttcccaattcaatttgaagatgtatataatgccttaaggtggttcttacgtaaaaaagttcttgcaaaatatggtgtgaaccctgagagaatcggtatttctggagatagtgcaggagggaatttagctgcagcagtgactcaacagctccttgatgacccagatgtcaagatcaaactcaagatccagtctttaatttatcctgcccttcagcctcttgatgtagatttaccgtcatatcaagaaaattcaaattttctatttctatccaaatcactcatggtcagattctggagtgaatattttaccactgatagatcacttgaaaaagccatgctttccagacaacatgtacctgtggaatcaagtcatctcttcaaatttattaattggagttccctgctccctgagaggtttataaaaggacatgtttataacaatccaaattatggcagttctgagctggctaaaaaatatccagggttcctagatgtgagggcagcccctttgttggctgatgacaacaaattacgtggcttacccctgacctatgtcatcacctgtcaatatgatctcttaagagatgatggactcatgtatgtcacccgacttcgcaacactggggttcaggtgactcataaccatgttgaggatggattccatggagcattttcatttctgggacttaaaattagtcacagacttataaatcagtatattgagtggctaaaggaaaatctatagtaaaacatgtagctataacatattttaaaaataaaatctgaaaacctcagaaaatttgcattagaaattggtctttcttagaatggtctagttaagttccacatgtagcataattcttaaataggcacttttctgttttttttttcttactgtgggatttcatttcaattttctacattgtctatctgctttttctgagattttccttcttacactgttaatcttattttaaaaaatattacattcttgtatactttatttttgtgagttggctactatttacgatgcaagagaataaatgtgagcaaatattgcctgtc

SEQ ID NO: 43377 - DNA, 331 bp, Homo sapiens
ctattacggtaaactcttttgtagtctgcttcttaacttagcaaaatattaggaaccgttttcccacgtcactagctcttctgaaacagcgttttaagtggccatgtagaattcaccgttgaggatgagcctgcatggtcgtgtgattcggtggctctccctttttgattgtcatgaataatggcagtgattatttttccacacgtatcgcacacagccttgattatttccataggaagtgttaggtaattgtgaatggatctttttcaatgagtgtttaattagcagaatttatctctcaaccatgccttccttcagcgtgtggaagaga

SEQ ID NO: 43378 - DNA, 664 bp, Homo sapiens
gcgagaaatctcaggcagaacttgtgaggatgctggaaaaaggaaattcattgtatatgaggatctctaaaaacttcccaaacgaatcagcctttccaaggaaaagaaatgccttttcttcaggagtccttaccttttttttttgagatgggagtctctctctgccacccaggcttgagtgcagtgatgcgatcttggctcactgcagcttccgcctcccgggttcaagtgattctcctgcctcatctcccaactagctgggactacaggcatgtgccaccacacccagctagttttttttgtatttttagtagagacgggggtttcatcgtgttgggccagcctggtctcaatctcctgacctcaagtgatcctcctgcctcggcctcccaaagtgctgggattacaggcgtgagtcaccatgcctggcagtagtccttaccttttttgtcatttatagacttgctcccatctggggaaggattcaaatcatcagtcatttctgaacaccaaagactatatgaatgctgactccaaagacagcatccattaaagtgcatatcatcataataaaaatatatgactgctggatttctttgctgagagatgctttgaagtacttttgtactattagcatattaaatgttgagaaaattaaagagtt

SEQ ID NO: 43379 - DNA, 478 bp, Homo sapiens
ccggggtccctgcctgacatgtctcagacccaccctggcatatctttggagtctacttatctttctgcgtggcctcttagtgctggtgagggctgcctgggccctttctgacaggctggctccaatagggactgcttagacctgtttacacagttacacttttggctaacctggatctgggggacttgctaccatgatggacacatgttccttggtgagcaggtctgtgcaaacctaccctccaaggccaagggagctgagagcgccagtttctcagaaagaaacatttattagggacttctgaacagaaccatgtctcaggcagaaatgagatggtggtctctacacccaacctccagaaagtattctttacttgttgttttgcagacgacaatgcttgtacagaaactattcttttcttttttttcttttgagacagcctggacaagaaagcgagactccgtctccaaaaaaaaaa

SEQ ID NO: 43380 - DNA, 385 bp, Homo sapiens
actcattggcctacagaatttagtggcataaagttgatatgtagaaaagggccattgattaagtgataggcagattgatggagggatcaattgatttgctgccaagccacatcccatgtaagggaattttcagagtatgggtggtctggcttccattctttctctgccatttttaatgaattgtttctaatgtattatggatgtataatgcctgaattcatttcagcccctttgaacatattgatattttggcctgaagtcttagtaagaatgatttctgtattatgactttgagtttttatttgtaacttataacaaattactcttgtagaaaatcttttgttgaaataaattcagttatttattatttcttattatttccata

SEQ ID NO: 43381 - DNA, 464 bp, Homo sapiens
gccaatggccagcactaatcaccagccatgtgagggacaccttggacctcccagccccagctgagccagcagataactacagcagctgcacgagagtcccaagagagaccaggagaagaactactcagattgccaagccacagtgctgtaccattaaattttggggtggttcacaacataataataggtaatagaaacagaaatcttgctccgatccacactcaaacaaaccaactatttaaaaaattatgaaacaatcaggaaattttgctggatgctggctatttaatgatataattacataattgttaattttgttaggtttgataatgatggaaaccacattttttcatgttgtttttttgagtccttattttttaaaggtacaaactgaaacatttatggatgaaaggaagtaatgtctggtatttacttcaaaataatccaaagagaagtggggatat

SEQ ID NO: 43382 - DNA, 488 bp, Homo sapiens
gcaggtagatgtagctgaccaatggactataaggagaagttatgtggaccttgaaatcaaatcagcagcagcataaaacagaccaggaaaaccgtgcaggcccccgggagctcatgttctcatacacaacttcaaatgtgaccaagggggataaatagacaaagaagaacctcctttctgcagtcaaagctaggagacaagaaggacaatggatttacctttttttttttctttctttctttctctttatttttcttttttagacagtctcgctctgttgccctcgctctgttgctgaagtgcagtgacagaatcttggctcgctgtaacttttgccttctgggttcaagcaattctggtgcttgagcctcccaagtacctcccaagtagctgggattacaggcgcctgttgccacgcccggccaacatggtagacgctgtccctagtaaaaatacagaaattagctgggtgtgggtgtgggtaccga

SEQ ID NO: 43383 - DNA, 405 bp, Homo sapiens
tttttctcatgtaatttgccaactgcacccacaggtcacttttttttttaagctttacctcccttggattttgtgatggtgggagacaggacagaataactgacatggaaaaggggtaacaccaaaggcatcattgaaagaaatggaaactgactccagatacccaagactagctgccccatggggaatcaaaacacacactttgtgctctacccccaacccctagcaagggccacttatgaccctatgccaatgtcacagtaccatgtgttcgaggaaaatagctttgtatttgctctaaggtcttgagaaaacaatttccatttcttttttttttttcccttcccaaattctaattctgtaatctcattagggacaaatgcaacagttcccagaaccccaaaa

SEQ ID NO: 43384 - DNA, 449 bp, Homo sapiens
ctacagcagcctcacaacttaattgtctcacacaggactattcctactgttaagagatcacagctaaggcttgggcaccttgacctgctgtagaagctcagttaatgtacttttcatcatctgggccctggtattcccctgtaaatactgaagtagacccagtgacctagtgcccaagacacaaaatattcagcctccgtaacatttgtctaatgacatggttctagctttgctcactcccattaatttcaagtgagtactggctaggcagtctatagtgacttgattacactgtctttcttgtcctgtgctgtcctgagaatcctggatttgaagcagcctatgaataaggtttgaaaaatatttatccaactatgccgacatatgatgttctagcactgcatctgtcatctatcacccgcaccttaataaatgataattacttgtgc

SEQ ID NO: 43385 - DNA, 413 bp, Homo sapiens
tcaacgaccacttacacatatttttttcctaaacttcatgctcttcaaaattgagaaaaaaaaattaagaactattcttgtcttcaagaagacaaagaatacagtctgcctgaattgtgaattcaaaggtatattctctcattcaaattactatttctattgtgtagaatttctcctctcattcaaaagaaagaaatgtgaatcttctcatagggagggatgtgtagcatttatgttctggaaaaatcctctgtgatgagccgcattgtgcatgtgatgcccacacccttctcaggatgtgaatcgcagagtccatcatatcagtgagccaagaagcttgggtatgtttgccaatgacttaatacacaagagtgtgtgttttggaaattatatctaacataatgttcattttg

SEQ ID NO: 43386 - DNA, 482 bp, Homo sapiens
aaccaatattcccctcacttcatgggtgttacaaacctcttatcatctgtttacgtctcactcttactgtagaacctctagaaaggcaggtggcttccagctcctcgcttttcctgagggatgatctgaccacccattcttacacatgtcatctttcccacagtggcagtgcagaggagacaaaagcagaacaaaagcagacagcggccaggtctgagggtgataggctactcactgggtcctagtgttctgaactacaccctacaggaaagtgctactcagtgcccaggtgacatcgtcacaaggggaacacagtggctaagagggcaggggctcagtctcacagacctggtttccatcccacttgctctcaggaaccctgggcaacaactgtgaccacagtgtcttcctctggaaagtgcccagcagtgttgggctcacccgtagctgcacaataaattgtcatgagtgctttccactgt

SEQ ID NO: 43387 - DNA, 411 bp, Homo sapiens
tatgtaattggaatcatacagtacatactggcttcttttgatgaacattatataggcgagatccacttatattgttgctggtagttgtactttgttcattgtttttgctctaaagtattccatcatgtgaatatagcatagcgtatcatattcactataggtaaacatttgggttagttccatctggagttgttatggatagtgctgcaatggacattctttgcatgtctcttcatacacacatgtgcatgcacatgcacacggcatgtcatttctgttatacacccgtgcatcacgttctgctttaactgggtcctgccaaacagttttctatccttataccttttacctacatttatctcatgagttctcttatcaccccactttttgttgagacaggatcttatttgg

SEQ ID NO: 43388 - DNA, 201 bp, Homo sapiens
gccactacaccccagcctgggcgacagaggaacaagtccctatctcaaaaaaataaaataaaataagttttttaattagctggcatggtggcacatgcctatagtcccagctacttgggaggtaaaggcaagagcattgcttgagcccaggagcttgaggttgcagtgagccatgatcacactactgtattccagcctcag

SEQ ID NO: 43389 - DNA, 273 bp, Homo sapiens
aacagttgcctgggcgtgtggcaggaaggatgtggggagggcagggaagaagatcaaagggcatgagaaaactttttagagtgatggaaatattctatattttgtttgtggtggtagttttacagctatatgcatcactaaaattcatcgaattgtgcacttaagacaggtgtattttattgtatgtaaattttattttatgtaaaactgtacacttaagacaggtttattttattgtattttattgcatgtaataaagctggaaaaattcat

SEQ ID NO: 43390 - DNA, 375 bp, Homo sapiens
ctccagtctggtgacggagcgagactctatctcaaaaaaaaaaaaaaaaaaaaaaaggactcatcactccataataaaaagataaaccatcccattttaaaatgggcaaaggatctgaacagacatttatcaaaagaagacaaacaaatggccaataagcatatgaagagttgctcgacattcttagtcatcaggaaagtgaaaaccaataagataccacttcacaccgtagggtggttatagagacagatatgaacaagtgttggcaacaatgtagagaaattggatgcttcatgtactgctgcaggaaatgtaaagtcttgcagctgttttagcaacagcctggtggttcctcagaaggttaaacagaattat

SEQ ID NO: 43391 - DNA, 460 bp, Homo sapiens
actcctcataaactcgctctgcagagccaacctgaaagaatgaattcagcaattcagttattctagtaaaaccgcgatgtatttttttcccaacagatgctgtcagaaagacaccggtttggcaacgtgactggcttcttgccactgctgagaaagctgacatcaagataaaaccggccttcacttccccatgctggacctctttcctaacagactgtggcaaaaggaaatgcttaaacactccagcagcatctttagaggctggctctaaaagcggagtttggatatttaccagaaacatgcaaactgctgtggaaaaggaacggaaagagctgctgaccatcatttctagataagaactgtacacttctagacaacacaaaccttaacacacaacaggcatgcattacaaatttaatgaaccacaaattcaaattcagctggtgtttactgagtgcta

SEQ ID NO: 43392 - DNA, 497 bp, Homo sapiens
catgcctatgtaactagcttccataagaaccttggatactgtgtaagtctctagtcagactcatactggtagacaatattgcccatgtgctgtcaaaatttgaagctacaggaattcagcacatcctggtaactccacaggagagggctcccggaagcttgtgcttggcttccccaagacttgccacatgcccctttgccctgagccaattttactttgtattctttcactgtaacaaatcaaagcccagagtaggactgtttgctgagtccttccaagtgaatcaccaaacacagaggtggtcttggaaactctgacatagtggcattatatgaaattagttttctttaaggtgatgtgacctgtgactacgatcagaaggctgtttataaaacacctttccctcatctgttttccttaacagttgcctttgagattcctgtatttctgcatgaataaatccataagggaacagaaataattatgccaaaaaatga

SEQ ID NO: 43393 - DNA, 268 bp, Homo sapiens
agtaatgaggtttttgctgtgttgttcaggttggtcttcaactcctgggctcaagcaatcctccccactcagcctgctgagtagctgggactacaagcgtgagccaccatgcccagtggttttctgtagtgtttaattaatttggattgtttcctggcctttttttttttttttttttgagactgagtctcgctctgtcccccaggctggagtgcagtggcgcgatctcggctcactgcaagctccgcctcccgggttcacaccattc

SEQ ID NO: 43394 - DNA, 2903 bp, Homo sapiens
atagggaaaatattgccagcgttttcagtcattctgtgcatgctgctttaagcaagagatttatatttgttgagaggaaatattgctacttcctgcacttccaccctctgcagccggcaccgtccctactgttgccattaattggagctgtccttaagatggtcaccatattcttattcaggctgttgtcattttccccagagatggtttgtttaacgaatgataggctctgtgcctggggatgttagcagactctggggtttgtacagtgatgccttctccctggcccagagctgaatattcatctagaattaaagttggatttgatataacaaatttctttctatacaggttttacataagagagacagtaataatgtcaaggatagcctgtgtgggcagaaattggtagtcgtgcttttgaatgtcagctgtagagccaactctgattatctagccattgatcatacaaattgatagaaacattagtcagtaattttagcttcttgccaaattgttcacaacatctaaatgtaatgtgatgtgatgaagataagtagtacaaagagaccaaaataatttgggagaattaggaatgatgacaattttttttaacaacttacctctaatagggttacttggatgagccaactccgcttccttcccatggataggaagggactctgtgtattattcaggtttattggcacgaagatacttgttttaagttccttgagaacccatgatggacagttgacagaatgcttaaacctgtcaaaagatgagtgattttgtgtgggaaaagccttcccaggcgtctgtaccgaaaggagcagcaaacaaggggctaatccatgagcagtgttctgtaggctctgtgacatctttggtttataggattttggagccttttatgatctggaactatttgaggggtttcattataggccttggttctctccaggggccagatgagtttattgtggaatctttgaaaggacaaggcctctgtgaatgaatcagtcccagggaagcatttggtggtggcggcagtggaggattgcccggtgaacctataaatcagcagtctcttgggcagaggagcaagcccctcgaacatgatttcaaacaagcaggtcctcttctctcatctcatgtccttagtctctgttaatgaacatactggatgtggagtttaataaattacctactatcatctggccacttagattattatcacaccactgtggactgttcctggggggagaagaacagaccgatttgaaagattcaagggagaaagattaaggatcaggattgcatgaaagaagaaaatccttcaatatttaaaatgtttcttacaatacccacggagcacttttatggttccagccgagcgttcctgaaatgaactgaccattaacagcgcctctttgataggttaccctgatgctgctaaagtaaagccttaagtgtgtttttgggacaacgtgctgcttattccacctcagccacatatgtgtttgtgtttaggatattgtaaatctttgctaagtagtgttttccttggtgaatgaagtcattgttgtcttcaagtgtaccatctgcctagcaaaaaattgctacaaactttctcttatgcaatagtccttggtacttctaatatttttagcaagagacaattttctgtactagaatcttccactgccagaaaacacagtgccagtaaggttctacataccactgaccatctgcttaatagacatgtatttcctttgagtaggacattagcttttgattataaagctcaactagtataagcaaaaatataacatctagaagcacagttttagccaggatgtttaaaaattacagttttgtgagacttaagggtctttttaacctaggtaagtttatatgacctaacttaattgtagccatattctggtaccttccattttgaaaagtagaggttgcttaagcaagcaatggataataagagacttttcctgaggcacctgtttggaatctggttttctcagcggcagcttgacatgtgcacccttttgtattaaacactgcaagggtgatgcaggggagcaggaaagccatcctaaactcactactgagtacgattcagtatgttcctgtggatgtctgctgtgactaatataaatttcttgcagaatcagctacacttaattatgttgctgatagacaagcatccacgcttcagctggcactaagtgttttcattgtaggatcagcagcaggttaaagactgaacggttagtgaagacaaatgtcttaagaggctgcgatgtctaggttgggcttgtgacttcttagtggcctagccttcttgatggcaccttgaaagtgaacttctagaaatctacatttaaaaggcaaagctttaaaagcagagctagtctattctagttactgatgcaactaaaattctgtatttcttaagatggagccactgacgagatgtcacagtatagagcctgcagtctcaactcattgtgatcctaatggtctgggtgattggatggtttgagttgttagggattttgagtttttcattttattgcatatctgggttggatgttagactaaaggaaacccaggaatatttacctggtgttacatttaatatttaatgtaactggtctagcaacattaagggggatttctgaagccaactccggaggctgtgggctgcacattttgcactgtttttatatacttgtattcatatcctcttatcacctcagactcagacacaaggccttttacatggaaattttacaaattacttccatttatgtaaaataacgtcctgtgaccaagttgtttaaatggaaaataaagtgctttctttaaggaaaaaaaaaaaa

SEQ ID NO: 43395 - DNA, 2619 bp, Homo sapiens
tgagaggtcaggtaaaatgagaagaaagaataattggatttgatataacaaatttctttctatacaggttttacataagagagacagtaataatgtcaaggatagcctgtgtgggcagaaattggtagtcgtgcttttgaatgtcagctgtagagccaactctgattatctagccattgatcatacaaattgatagaaacattagtcagtaattttagcttcttgccaaattgttcacaacatctaaatgtaatgtgatgtgatgaagataagtagtacaaagagaccaaaataatttgggagaattaggaatgatgacaattttttttaacaacttacctctaatagggttacttggatgagccaactccgcttccttcccatggataggaagggactctgtgtattattcaggtttattggcacgaagatacttgttttaagttccttgagaacccatgatggacagttgacagaatgcttaaacctgtcaaaagatgagtgattttgtgtgggaaaagccttcccaggcgtctgtaccgaaaggagcagcaaacaaggggctaatccatgagcagtgttctgtaggctctgtgacatctttggtttataggattttggagccttttatgatctggaactatttgaggggtttcattataggccttggttctctccaggggccagatgagtttattgtggaatctttgaaaggacaaggcctctgtgaatgaatcagtcccagggaagcatttggtggtggcggcagtggaggattgcccggtgaacctataaatcagcagtctcttgggcagaggagcaagcccctcgaacatgatttcaaacaagcaggtcctcttctctcatctcatgtccttagtctctgttaatgaacatactggatgtggagtttaataaattacctactatcatctggccacttagattattatcacaccactgtggactgttcctggggggagaagaacagaccgatttgaaagattcaagggagaaagattaaggatcaggattgcatgaaagaagaaaatccttcaatatttaaaatgtttcttacaatacccacggagcacttttatggttccagccgagcgttcctgaaatgaactgaccattaacagcgcctctttgataggttaccctgatgctgctaaagtaaagccttaagtgtgtttttgggacaacgtgctgcttattccacctcagccacatatgtgtttgtgtttaggatattgtaaatctttgctaagtagtgttttccttggtgaatgaagtcattgttgtcttcaagtgtaccatctgcctagcaaaaaattgctacaaactttctcttatgcaatagtccttggtacttctaatatttttagcaagagacaattttctgtactagaatcttccactgccagaaaacacagtgccagtaaggttctacataccactgaccatctgcttaatagacatgtatttcctttgagtaggacattagcttttgattataaagctcaactagtataagcaaaaatataacatctagaagcacagttttagccaggatgtttaaaaattacagttttgtgagacttaagggtctttttaacctaggtaagtttatatgacctaacttaattgtagccatattctggtaccttccattttgaaaagtagaggttgcttaagcaagcaatggataataagagacttttcctgaggcacctgtttggaatctggttttctcagcggcagcttgacatgtgcacccttttgtattaaacactgcaagggtgatgcaggggagcaggaaagccatcctaaactcactactgagtacgattcagtatgttcctgtggatgtctgctgtgactaatataaatttcttgcagaatcagctacacttaattatgttgctgatagacaagcatccacgcttcagctggcactaagtgttttcattgtaggatcagcagcaggttaaagactgaacggttagtgaagacaaatgtcttaagaggctgcgatgtctaggttgggcttgtgacttcttagtggcctagccttcttgatggcaccttgaaagtgaacttctagaaatctacatttaaaaggcaaagctttaaaagcagagctagtctattctagttactgatgcaactaaaattctgtatttcttaagatggagccactgacgagatgtcacagtatagagcctgcagtctcaactcattgtgatcctaatggtctgggtgattggatggtttgagttgttagggattttgagtttttcattttattgcatatctgggttggatgttagactaaaggaaacccaggaatatttacctggtgttacatttaatatttaatgtaactggtctagcaacattaagggggatttctgaagccaactccggaggctgtgggctgcacattttgcactgtttttatatacttgtattcatatcctcttatcacctcagactcagacacaaggccttttacatggaaattttacaaattacttccatttatgtaaaataacgtcctgtgaccaagttgtttaaatggaaaataaagtgctttctttaaggaaaaaaaaaaaa

SEQ ID NO: 43396 - DNA, 1433 bp, Homo sapiens
  misc_feature (29)..(29): n is a, c, g, or t
aatacagatacaatcgagctcggtacctnaacattcgtgtctactcaaaggaaacatgtctattaagcagatggtcagtggtatgtagtgttttccttggtgaatgaagtcattgttgtcttcaagtgtaccatctgcctagcaaaaaattgctacaaactttctcttatgcaatagtccttggtacttctaatatttttagcaagagacaattttctgtactagaatcttccactgccagaaaacacagtgccagtaaggttctacataccactgaccatctgcttaatagacatgtatttcctttgagtaggacattagcttttgattataaagctcaactagtataagcaaaaatataacatctagaagcacagttttagccaggatgtttaaaaattacagttttgtgagacttaagggtctttttaacctaggtaagtttatatgacctaacttaattgtagccatattctggtaccttccattttgaaaagtagaggttgcttaagcaagcaatggataataagagacttttcctgaggcacctgtttggaatctggttttctcagcggcagcttgacatgtgcacccttttgtattaaacactgcaagggtgatgcaggggagcaggaaagccatcctaaactcactactgagtacgattcagtatgttcctgtggatgtctgctgtgactaatataaatttcttgcagaatcagctacacttaattatgttgctgatagacaagcatccacgcttcagctggcactaagtgttttcattgtaggatcagcagcaggttaaagactgaacggttagtgaagacaaatgtcttaagaggctgcgatgtctaggttgggcttgtgacttcttagtggcctagccttcttgatggcaccttgaaagtgaacttctagaaatctacatttaaaaggcaaagctttaaaagcagagctagtctattctagttactgatgcaactaaaattctgtatttcttaagatggagccactgacgagatgtcacagtatagagcctgcagtctcaactcattgtgatcctaatggtctgggtgattggatggtttgagttgttagggattttgagtttttcattttattgcatatctgggttggatgttagactaaaggaaacccaggaatatttacctggtgttacatttaatatttaatgtaactggtctagcaacattaagggggatttctgaagccaactccggaggctgtgggctgcacattttgcactgtttttatatacttgtattcatatcctcttatcacctcagactcagacacaaggccttttacatggaaattttacaaattacttccatttatgtaaaataacgtcctgtgaccaagttgtttaaatggaaaataaagtgctttctttaaggaaaaaaaaaaaa

SEQ ID NO: 43397 - DNA, 1043 bp, Homo sapiens
gctcatctgtcctgagtacacatatgccaagtcttaaggtatctaccgagtattttatgtaactagcttatgcgtaaccatattctggtaccttccattttgaaaagtagaggttgcttaagcaagcaatggataataagagacttttcctgaggcacctgtttggaatctggttttctcagcggcagcttgacatgtgcacccttttgtattaaacactgcaagggtgatgcaggggagcaggaaagccatcctaaactcactactgagtacgattcagtatgttcctgtggatgtctgctgtgactaatataaatttcttgcagaatcagctacacttaattatgttgctgatagacaagcatccacgcttcagctggcactaagtgttttcattgtaggatcagcagcaggttaaagactgaacggttagtgaagacaaatgtcttaagaggctgcgatgtctaggttgggcttgtgacttcttagtggcctagccttcttgatggcaccttgaaagtgaacttctagaaatctacatttaaaaggcaaagctttaaaagcagagctagtctattctagttactgatgcaactaaaattctgtatttcttaagatggagccactgacgagatgtcacagtatagagcctgcagtctcaactcattgtgatcctaatggtctgggtgattggatggtttgagttgttagggattttgagtttttcattttattgcatatctgggttggatgttagactaaaggaaacccaggaatatttacctggtgttacatttaatatttaatgtaactggtctagcaacattaagggggatttctgaagccaactccggaggctgtgggctgcacattttgcactgtttttatatacttgtattcatatcctcttatcacctcagactcagacacaaggccttttacatggaaattttacaaattacttccatttatgtaaaataacgtcctgtgaccaagttgtttaaatggaaaataaagtgctttctttaaggaaaaaaaaaaaa

SEQ ID NO: 43398 - DNA, 294 bp, Homo sapiens
tggaaaacagatagtctagtgacaactgatttagcaaacaggagaaaccgtactgtaaaactgcagagaggagcactagcaagaggctctctgccccttccctgtttggtctcgaaacactaacagcctggctcctactccctaaattgggggtggcagtatacctctgggtaaactgagcagtcggaagatgaagtcatgtgggggtgatcctcaaatgataaaattcattccttatcttgcccccactcctcacctaactgccagtcaactatttaatgtgaacaaaaagcc

SEQ ID NO: 43399 - DNA, 461 bp, Homo sapiens
gggttggccactagcattaggtaaaactgctgaattgagcccagcatgtggaatcagtatttttgattcagggattcaagctctttgtccttttttccttcctcctagactgattcatagaatgttccctcccccaggaagaaggtctttgtaaaggcgactttgttctcacttgtttgatgcatcaaacttccattgagtgctgtgggcaaggccctatatgtggcagtgggactatatggatgaattttaaatagttttgccttaaagaaagtctttgatgattgagactgaacttatgaaccatattgtttccttcggccctttcagttattgagctttttatggtatgaaaagattcatttctaccttaggatcagaatgaaaacaagaaaccaatctgtattttaaaacgaagagaaattattttgggaacttggtacaaaagtgttggaaagggc

SEQ ID NO: 43400 - DNA, 200 bp, Homo sapiens
gggttacttctggaatatatgttacctacaatacataaagagagtagaccttacagccacacaggccagacttaaatgagctatgtaaacctagtcgattttgtgagctatgtaaagtcagtcaattttgtgagctatgtaaagccagtcaattcgtgtgtgaatttttgggagctatgtaaagccagtcaattcacgtg

SEQ ID NO: 43401 - DNA, 445 bp, Homo sapiens
actttaagttctagggtacatgtgcacaacgggcaggtttgttacatatgtatacatgtgccgtgttggtgtgctgcacccattaactggtcatttacattaggtatttctcctaatgctatccctaccccctccccctcaccccacgtcaggcctcgctgtgtgatgttccccaccgtgtgtccaagtgttctcactgttcaattcccacctatgagtgagaacatgtggtaagtcttattttctatttttaacatcacgattgtgttccatgcttaaagatctaagtgtttcttgagaatttaatggtaaaaacactatgaagaaattggcttttaaaaactaatatatgtctgtgtgtgtataaaggagattgcattttctatgaaaatttgtctcataaagttgagtttcccctaccctcatgaaaatcctgagaatatcc

SEQ ID NO: 43402 - DNA, 409 bp, Homo sapiens
cagaaagaataaactggatgcacctcctatctccagaggtaactaaaaagatacacctgggaaggaccactctaataagggtttttgatgaaatggatcagagtcaaaaagggaagcacttgccgaaataggagatgcttctaaaaactcttgattttccctttggctttgcttttgaaaaatggaagctgtcttgtggggatttggagagtgattgaaggtgctgattagcagctgatgaactgaaagggagtgctagaaggaatggaattggagcccatagaagagcttgtggctctaaaggggaaaacagcaggaggcaaggtctgtctggttcttgctgcatccctagtgcctagcatggtgcccagcacaggccagggtaaaatcgttttcttctgactaactg

SEQ ID NO: 43403 - DNA, 247 bp, Homo sapiens
atggagaacacactgtgaatgggaaattgtgctctgtgcttttcattatctatctttacaccaactatgtgtagtattactttcttcattaagaaaaattaaaaataggccaggtgcagcagttcatgcctgtaatcccagaactttgggagtctgagtcaggaggattgcttgagcccaggatttgaggcagcagtgagctgtgatggtgccattgcactccagcttgggtgacagagtgagaaga

SEQ ID NO: 43404 - DNA, 360 bp, Homo sapiens
aaaaaacaccaacagggagttgagtaaaatgaattttcatccatccatccattggagagcaacaaaatcatttagaagaactaagtctggatccaagtaaagactcattagcctgagacaaagttaaaggtactcggtgccgacctgactgtaaatacttcagtagaagtcttgcagtagtgtttggttataaaattatcacccagggtgatccagagtgttcttactatttgaaaaattaatatcaaaataaaaatacaaaaatggaattctctttttggggaccctaaagtacacaaccagtgacccagattgagaaatatttctttaagctagcaaggacttaagtgttgcttgggg

SEQ ID NO: 43405 - DNA, 308 bp, Homo sapiens
tttgtaaatgtgtaacctttaccatataaagtaaattgcccactcaaattattccataaattttgattttttttctcatcagaagtagttcaatcttaaattttatgaaatttatattcaagaatttctttgcatagattgtcataaaatgttttccattagaatgatattttacttgtagtaagataataaagagttctctgagctattcagatgtttactttggaataaaatactgttaaatctagattaccagcagttacctttttagtttgtagaaaattggaatacaggtctaaactttacaa

SEQ ID NO: 43406 - DNA, 1216 bp, Homo sapiens
tgccaaatccccctctgcgagaaacacccaagaatgatcaataaaaaaataaataaataaataaataaagaaggaatggaaggtattatgggttgaattgtgtcccccaaattcatatattggggtcttaacccccagtatcacagaatgtgaccttgtttagaattagtggtgttgcagatgtaaatggttaagatgacatcatactggagtagggtgagctcctaatccaatatgacttggtgtccttataaaaaaagaaatttggacacagacatgcacagagggataacggcatgtgaagatgaagacagagattggggtgatgtagcagaagccaaggaatgcaaaagattgcaagcagaccaccagatgctaggatggagatgtgggatagattctccttgaaagctctgagcaggaatcaatgctgtggacatattgacttcagacttctagtctccaaaactttgaaacagtaaacttctgttgttgaagccacataattcatggtacccagttatggcagctctagcaaactaatccagaaggacttaggcacaaaatgttcatgaggaattcaggacaaatgcatgtggcttaagtaggattcagtaagtgcttataccctgtgcaaagtgtattaatttacctatctctttcctgttgatttttgttgtgtgtttaagattgactcaataagctgtgtgatgtaagcatttcaatttggtttgtgaaacttcctgtttcatgacatgcagattagcttgcaagatcgtatacttagaagctttttgtcacattagtgccatatcccaagttcataagacctttagaacctcaaatctagttgtttttgcactcctcaaagtactgtgtggatctttatgaaaactgtaatatttccttatatttaagttttgttataatagaaaacaggtttaaggctgagtgcaatggctcatagctgtaatcccagcactttgggaagccaaggtgggaggattgcttgaggccaggtgtttgataccagcctgggcaacatagcagcaagaccctgtctctacagacaaaattaaaaaaataaattagctgggtatggtggcacatgcctctagtcccagctactctggaggccaaggtggaaggattgtttgagaccaggagttcaatcaaggttgcagtgagccataatcgtgacactgcatcctttttc

SEQ ID NO: 43407 - DNA, 645 bp, Homo sapiens
ctacaggcgccctgccaacgaggaatggacattctcctacgtctgcttgcatggggcttcccctgcacccctcacaggggtgcccctgccaccagttaacaagacagtcactgacagatggactctggaagccggcagatgtgctgatgccttgatcctttccactgtcaaaaaaaatagccaatctcctagaacctccttgtgaactagaaggcaggaaagcttcatttgaaagggcaccagttcccgtacccactcactccccagatgaatcaggaaactcaggactgatgtttgggtatttaaccctaacccaaggtcctcagcctgactcctcagggaggacaactgatgccaggatgagtttcaaatgtcacctggctagtggggaagccctgacacctcccccaagggagccttcccctttagagacccccaacttccctctattttctctaatgcataatgggggccctgagagttgcaaagaaacgtttgacttttccaccaaaatacaatccttgcctcgtctttgtgtatctttggttttttgtggtctttcttggagatggcgtcttgctctgttacccaggctggagtgcagtggcatgatcatggctcactgcagcctcaatctcctggact

SEQ ID NO: 43408 - DNA, 199 bp, Homo sapiens
tgaagcttcccttttcagtcagcatgtgaataggaatagatttgtgtggatttacacatctacccacattttattatgatttccccggggcgggggttgtctttgtttttattgatggccaatgttgttaacaagagttacagactcgtatttgatatcaaatgtagcagctataataccttttaaaaactttaccaaa

SEQ ID NO: 43409 - DNA, 616 bp, Homo sapiens
catcctcggcgtcagaggtctctgtcttcctcttctctctgcgctcctgatttagcggtctctagttagcgctagggcccgggattcaaacgacttcggagggggcagctgaggagaaagggaaggatagtggaagtgggggtcagaccggaggtcaggccctcgagggcccgcggcgcaggaggctgcccaggcctgggtggggggcgtggcagggccgcgagcgggtcggaggcctctggtcctggatcctcgaagccgcttaactttcccctagtcttcctgccccgaggtgtgtcttccttggggcggaaacgccgcggcctcggcgagggctcctcggcgacacccctaccccgtcttttctggcccggagagacttcgggaaggtcagagcttccagtgccgcgagaggcggatgccctccagtccgggccgcttccaccgggcggggtggcctcctgggcttgttcctgggttgggggaacggacttgggtccactttggcctgagaaaattacaatttctttcgctgaagtaaggagcggcctctgcccgctttctcggatccctgcgtgtgtagtgagaggtcttggaaggatccttgcgcctctcc

SEQ ID NO: 43410 - DNA, 387 bp, Homo sapiens
cagctggttcaaggtatggctagacagcaaaaggcatggcaccctcccctgctgaggcttccctgtggttgggggactctgatggtgggcagtgtttactccaggccaccccagaaggccatgcagtcagggcctccctcaccatccgcacgtctgggcagttccctggctggagaaggacttcagtcctggccagaattgagccactgccaggaatccctgaacgtcagtacccggaccacttctgcccttgtgggcctctgagctgggtcgatttatcaagggtagggattttagaggcaggttcagggcagcccttctgcatcagatgtcaagtaagtagtttttttttttgagacagagtttcgctcttgttacccacccagg

SEQ ID NO: 43411 - DNA, 733 bp, Homo sapiens
aggggacctgactgctaattaattagcggtcaccttgggcaaagtggcgtaatctccatctgaggcatcttgattctcagggaagtggaatttggacttccagacaccctcagtgcctctggccttgctccctcctatccatttagtcctgcctgcatcactttgatgctgaaatttcttttagtttctcttactgcctttagaagggaacctaaacatcttaatctggctttcagtgtctttcaggatctgaaaatcatcctgataggtttaaaaagtgggatctgttttgcatttgtgtgcaggttaattgccctagcccctggagaggctgtgggggggtacgagaaagaggacccagacacctctacccaccccgcccaccccagggtgtggagcaaacccagtaaatggttagactcccaagcaatcaggcagcctgtcctctttgctctagagatgaaaaacaaaggcccagagagtggatggggcttgcccaaagtggcacagcaagtaggcagcagagctggagctagaaaccatttccagcttcgagtccagggctgttcctaaaccccactggactctctggagcgttgggtatcctgggattatcatcctgacacccatagggtaaatgtgtgtatccagtgggatgaggaatgccagcctctttacaagcaagtattgtactaaagtttggactgacttttacttggatacctactagtta

SEQ ID NO: 43412 - DNA, 396 bp, Homo sapiens
gaaatgatgagggtttgtgctgtggcagtgaagaagggaaaagagatgtaagtgtctaggtagatgtgatgcgttcattgaaataggtattagaggagaaacatgtttggagaggagcaaagttctggacaagttgggactgcaacatcagtaggacctctaaatggagttgtcttaggcagttggagatgtgacaggacatgcaaacatctattaatttgtcacaaaaatgttaagggcaatgtccacttcttcctttggtatccttatataacatccatcctagcccaatcagcctgagaccaccagggatgaatgtatagtctgatttgtgaatgcttataaccaggaagaccacacaccagagaactgtgggcatcttaccaacaaagaaaa

SEQ ID NO: 43413 - DNA, 781 bp, Homo sapiens
gctcagtactgtatgatattaggagcccctgacttcatcttctaatgagttggtcctacatgggactatggctgtgtccgaatgctggctgcccaagaccactgcactgcctgagttcagtcattcctcacagaggtgccgaggtcagccttcctcgaccagagtggttctcctgcagtgaatgaccttagactctggagatgtgaatgaaatcctagctatcttcttaaaatccttcaaagaagggattaagtcacagtaataaccaggtacctactgcattagtttcctgtgattgccataataaattaccacaaaactagtaattttggcttaagacaacacaaatttattttactaggagctgtgtaggtgaaatgtctaacatgggtctcactgaggtaaaatcaaggtttcggtagtgttgtgttcctttctggaagccctcgaggaaaaatccacattcgtgctttttccagcttctagaagccactcacattccctggctcgtggtcccttccttcatcttcaaagtcagcatcttctaatctctcgctcactgtgcttccatagccacatctctttctctgactctcttcttcctcctccttccaattaaaggaccttcatgatgacattgggtccacctggatactccaggatagcctccctactttaaagtcaggtgattagcaactttaattccatctacaaccttcattccccttgtcatgtaacttaacatattcacaactccagggatgaagatgtggccatcttg

SEQ ID NO: 43414 - DNA, 473 bp, Homo sapiens
tacttcttttcctttgcttagaactttgtggattacagactgattatacatctgtaatcctgcaggagactgtgatggactgaatgtttgggtcactctaaaattcatatgttgaggttggatgtggtgtctcacatctgtaatcccaacactttgggaggccaacgtgggcaaatcacttaagctcaggagtttgagaccaatctgagcaacacggtgaaatctcgtctctactaaaagtacaaaaagttagccaggtgtggtggtgcacacctgtggtcccagctactcaggaggctgaggtgggaggattgtttgagcccgggaggtggaggttgcagtgagcagagattgcgccactgcactacagcctggcaacactgtgtgagatgccatctcaaaaaaaaattcctatgttgaacccaaacccccgtgctgtgattaggaggtggggcctttgggaggtgaataga

SEQ ID NO: 43415 - DNA, 578 bp, Homo sapiens
tactgcactccagcctgggcaacagagtgagaccgtctcaaagaaaaagagttctttccctgccactgctgagttgagtggaggcagaggcttgggtgcattcaagattcagcttcacccgtagaccaccaccatggccacggaaggtgttgctgctggaggtgtggtggctgttaatactgctttacaagaggtgttgaagactgtcctcacccatgatggcctagcacgtggaatttgcaaagctgctgaagggtcaggcccatcttttgtgtgtttgcatccaactgtgatgagcctatgtcaagttcatagaggttctttgtgctgaacaccaaatcaacctacttaaggttgatgacaagaagctagggggaatggttaggtctctgtaaaattgacagagaggggaaaccccgtaaagtggttcgttgcagttgtgtagtagttgaagtacttcaaatgcaagaaatgaacgaataaaactctggctaacccccctgccccccaacacacacacagacacacacacacacacactcacagtcacactcactctgggcatgttggctcaatcc

SEQ ID NO: 43416 - DNA, 413 bp, Homo sapiens
tagataaagtctcagataacaaccccaagaagaatagttgaacagtctgtccagtaggcatggtaatgacctttagtttcttctttggtgattaatctttgcaggttactgagatttcagacaggggatttaaggcaattgtgtttcttttggaagaacttttctcagtcagataaggaaacttcagagagcttccctctctgttcttggggcaagtggaggggagaaacaaaggaatgtcagagagacattgatgttaaggaagtttctaatgacttacaatttcctttagttcaaagtgctcagaaagccaaagcaccacattttgggatatcgttttctgagccccaacaccagtctcactattaacactgtgagatctacattaccaaagagagttttgttctcagtgg

SEQ ID NO: 43417 - DNA, 626 bp, Homo sapiens
ctgtccagccaggtctggtgctgaagtcgcctcaccgttctgattacttcctctagttgtgaaggcagaggaggggctgttttggaaagtgactattctggcttttggttgggttctttcttctttttctacaatcgagttagcgtgtactattggttttcttattattaaacattgcataagttaccttttttgtaaaaaaaaaaaaagtattaggtgatgtgccagtactgaaagtgcagtatctaacccaactagaacgtttgttttatttttagaacaagtgcaccctttgttatatatttagtatattggtacccaaatacagaaaaaaactatagttctgtactatgtcctccaaactgtatattattgttcttaatttccagctgttgatataatggttaccactggatgagaaattcagtggtgcagacctggcttctgctgtttccagaagtgttcttttgtaccttattctgtagtagactgttataaaaagatgacacacacgctttattttttcttttgcaaataatagaaaaaacacaaccacagaaacaaacaaataatggatgtgcaagaatgccatctattaaaaacatggttaatatttaaaaaaaaaa

SEQ ID NO: 43418 - DNA, 522 bp, Homo sapiens
tatcacccaaaatgtgccccctagaggcaatcatagttaatgttttggtgcgttctaatcttttcccccatgcatatgtaactttttatatagttcagatcataccacacatgcaatttatcttactcttttcccataatttgctactgtaattttctcatgctattgaaatgtttttgtaaatgtcaagtttttaatagctgtgcattatcttattaaatggatatactatcctctattgttaaaatttaggttgtttcaaattgtccccataagtaacacttagtgagttttttttttttttttttgagacagggtcttgctctgttgcctaggctggagtgcagtggtgcaatcatggttcactgcaacctcctcctcccaggctcaagctattatcccacttcagcctcccaagtagctggggccacaggtgtgtgccaccacacccagctaatttttgtattttttgtagagatgggattttgccatgttgcccaggttggctctcgaattcctggg

SEQ ID NO: 43419 - DNA, 658 bp, Homo sapiens
acccctttctctgactaggaaagggaactccctgaccccttgctcttcccgagtgaggcaatgcctcgccctgcttcagctcgcgcacggtgcgcgcacccactgacctgcgcccactgtctggcactccctagtgagatgaacccggtacctcagatggaaatgcagaaatcacccgtcttctgcgtcgctcacgctgggagctgtagaccggagcttattcggccatcttggctcctccgttccctctatgagtccaaccaggatggcgacttgactggattttacagtttcattgacacgcatgagctctatcaaacttctgggagtttttctgaaatgtttacatggaaggcacctggagcccattgaatttccctcttcaaatgcttaagttttcttctgtcttggtggctactgcctccttctcactttctgccttaggtcaagataaatgagtttttccccaagaaagccatatggatctctgaggttttgaactctaaccaatgctatctcgttgattgcctttggatttcagggtcttattttacgtcaacctcagcctctctcttctgcagttccatatccacatgagctacaagagtcccatgtaggtcccttcctctgctaatagctgcctcattgtactgcttct

SEQ ID NO: 43420 - DNA, 296 bp, Homo sapiens
aaacaggctagaacaattttaaagggagtcaaatgtatagcccaaatatgtggaagacttgtagactggtctggaactcctaacctcaagtgattcgcctgccttggcctaccaaagtgctgggattacaggcgtgagccaccgtgtgaagccccacctaggtttttaatcaggttcatttatgtaaataaaaaatggaaacacgtttagttgtgattggtgagtgtagttgatttctcattggctggcaaaaatgagttctggttggtcaatacagctgaaccctgattgattga

SEQ ID NO: 43421 - DNA, 401 bp, Homo sapiens
cactctgcataggccttggtaccctgaactttgttttggaaagaagcaggtgactaagcacaggatgttcccccacccccatgcccagtgacagggctcatgccaacacagctggttgtggcatgggttttgtgacacaaccatttgtctgtgtctctgatagcattgagaaaagtgaaagggcagttttgaaggtaaggaaaatagtggcatttgcttggatccactggctcatgccactgtctgggttggttagaagcactggaaaagtcaaaccataactttgagaattaggtgatcagggaatcagaaggaaagatgcaaactttggctcttttaggcgaatcatgtgcctgcagatgaggtcatttattatcttttacacagtctataaaattata

SEQ ID NO: 43422 - DNA, 153 bp, Homo sapiens
caaaatgctatctaattctggcctcaaactacctgtaagtagttttatgtctttctctctgagaaataatctttgcttcaccccgcattactgatggacacgtacgtaagtatgtaggtagatgagtgaaaggtctggaagaatacacgccct

SEQ ID NO: 43423 - DNA, 190 bp, Homo sapiens
taggcgtgagccaccgtgcccggccacattaatctttataaatgtgaatttctaaaaaatttaagtgttggcccacttggtttctcaagttgcctgcctgaccctcttcgaagttgtacttttcttcttttctttcctttccgtactattctaaagctttttaataaactttcactcctgatctgaaaaa

SEQ ID NO: 43424 - DNA, 312 bp, Homo sapiens
gaatttgagcagcaagataaaaaatgatagcattggattttcacccacagaataacgtaatagccagaagtccatagttatataaataaataattttaagaatacataggagagaagggacaactctttcttaagtagaattccaaagaatacatataaaaggaaagtggaaaacagaaccaccattggggaaataactgttatagacaagattcacagattggtgctaaaattagtgggcaacgatttgaggagaaacggaatttgcgtagtctcagcatatctcacttaaaatgcttatttgctaccaag

SEQ ID NO: 43425 - DNA, 167 bp, Homo sapiens
cttgggaggctaaggcagaaggatcacttgagcctgggaggtcaaggctgcagtgagctatgatcctataagtgcactgcagcctgggtgacagtgcaaaaccctgccccgcctttcccctccaaaaaaaaaccccaaaaaaacccccacaaaaaaccaacaacaac

SEQ ID NO: 43426 - DNA, 454 bp, Homo sapiens
  misc_feature (412)..(412): n is a, c, g, or t
catcatttgagatgtcttgcttctttaaaaaaagaagagaccagcaattcttgggtacaagatgatctcaaatggcacagcaaaattaaaacatcatatcctctgttaatttgctaataagagacattaagagcatgagagcccttcaggtggacagagggcaacacactccaggctgatggaagacagacgatgaagatgtgattaaaaccctaaccaaactatttctgcatgagcaagcggggcactgtcgatactctcagaatcacagcagccactccttataaaccgctccgaacttgctgatatgctctgtactgtatacatagctcacgtgacacaaaacacaaaccaactgctgagagaggtaattcagtgaataaaatgggatcgcgcgccagcgccccttccntttttctatacataaatattgaggagctactaatctaggaac

SEQ ID NO: 43427 - DNA, 628 bp, Homo sapiens
agttcgaaaccagcctggccaacatggcaaaactctgtctctactgaaaatacaaacattagctgggcgtggtggcagacgcctgtaatcccagctactcaggaggctgaggcaggagaatcacttgaacctgagaggtggtggttgcagtgagctgagatcgcactactgcacttcagcctaggtgacagagcaagactccgtctcaaaaaaaaaattttttttgaagctgtggtatttctttggtgtttattccaaataaaagctgtattactagaaactgttctttgggtccatttctaactgataactcattatttcaggttgaactattcaatgaataaatacttactctggctcataggtttaacccacccctctccttacagagcatgagagcccttcaggtggacagagggcaacacactccaggctgatggaagacagacgatgaagatgtgattaaaaccctaaccaaactatttctgcatgagcaagcggggcactgtcgatactctcagaatcacagcagccactccttataaaccgctccgaacttgctgatatgctctgtactgtatacatagctcacgtgacacaaaacacaaaccaactgctgagagaggta

SEQ ID NO: 43428 - DNA, 985 bp, Homo sapiens
gctgtggccatgtttattggagtgttggatctattctttatcatcctatcttatatctttatccttcaggcagttctacaactctcctctcaggaggcccgctacaaagcatttgggacatgtgtctctcacataggtgccatcttagccttctacacaccttcagtcatctcttcagtcatgcaccgtgtggcccgctgtgctgcgccacacgtccacattctcctcgccaatttctatctgctcttcccacccatggtcaatcccatcatctacggcgttaagaccaagcagatccgtgacagtcttgggagtattcccgagaaaggatgtgtgaatagagagtgaggaataagtggaaaaagagtggggcacagtgaatgctgtagtgggccagggctgtgctgagagtagatgggtgctagactccacgtttagttcttttcttgtattatggaaagaataaatgatgtcctgaagctcagtgccaacagtctgtttagaatttgtgggtctttgccctctggtagcctctggattgaacctggtgactgtgctgtctcctcacagagccctgactcctgtcagtaaacttgacagagtcttgaccctccggcctcatggtgactttgctgaaggacacaaagatgcttccaagttcatttgcctaagagaagactgtgaaaatctgaatttccatctctgacttgttggaaatttggtgaattatccactcagattcccgagttaggacctctactccatccagtgcaggagttctgctacattctaacagttgaaccctagactctacctaaacactgtcagtgctggtgcacatgcatcctttaggcctatttattccaagtgagacagctctgcttgttagaaggttatttcttcaactaagccagtctgtattctttgacttctttttacctcctcatcctcatggctattccatctcattaaatactttgaagaa

SEQ ID NO: 43429 - DNA, 374 bp, Homo sapiens
tttattctcctagagaatatcacactaatttaggttttggggccaatttctgtgtgtccatttgatacaatctaactatttgaaaagtgaaaaattcagttctttaatgtgccgtttttcttactgccaccaagatactgatttagctgttggaatgctgagcccaaactcctagccattatgatacatgacctctgggggcagagttgtgctattatcacttttacttagtctccttccccttggcccctctactccagcaaacctagccctgtgctctccctgtaggtggttaataaatgctgtgggtgcaagagattattttctccaaagtacttggttaccagctacctatgtcaaggagttaaaagaga

SEQ ID NO: 43430 - DNA, 391 bp, Homo sapiens
gatccacccaactcggcctcccaaagtgctgggattacaaatgaatctcttctttttgaagtcaactgtatcacgtcgcataacctaatcacaaaagtaatatccacaaaattaatagtcctacagatgatgtagggtgtgtacagcaggaagcaggaaatcttgggggttgtcatagaattctgctaaatatgcctagagacacacatccttaactggactttaggtttatcatttgtgttctctggcctcagtgttttcaatttgtggatcatgtaccaatagcatcagcattacctaggaattagtaagtaatgcaaattagcagctcccactcagaaatcaaaacttgaagtaggggtaggaagacatcagaagtctgtgtcttaat

SEQ ID NO: 43431 - DNA, 202 bp, Homo sapiens
ttcgtgtgccacaccccgagcagcggctgctggtcagcaaacaagggctgagacagacaaaggcagggatagcgcctgatctgggacagacagacaaaggcagggaccgcgcctgatctgggacagacagacaaaggcagggactgcgcctgatctggggcactctgtgtctggcaccacacacatcgcgaacgttctgtct

SEQ ID NO: 43432 - DNA, 461 bp, Homo sapiens
aagaggctgggacagggggaggatgaacttggagaagccatgactggaagcctgtgtcccatggcattgtcatctgtgtgtgtgccccatcttgactttgagctccacacaggacaggactctgactcatctttgttatagatctcagtgagtgcaaggcacgaagaagaaggggtgtcaatgagtgcttcataaatgaatgattggatgaatgaatgaatcatctgtttctccacttccattctgtggtctccggccaacattccctcccatttacctctcattaaactctttttgcagcagcactttctcttagttcttcctgtcatttgctagacttcagctttgtgatctttgggtcagacaccatgatgagagatgcagatcgcaactgagcgtcatttaaatattcagaagagctgaggctccgcaggctgaattctgaatatgcagataattca

SEQ ID NO: 43433 - DNA, 146 bp, Homo sapiens
atgtatcccttctgtgattatatatatatatatatatatatatatatatatatatatatgtaaatatatattcacacatctctatatattttaatgtattgcacatgtatatttaaaatatatacgaaagaactctaaatcctgca

SEQ ID NO: 43434 - DNA, 912 bp, Homo sapiens
tctaggactggtcagatgacttttttttttttctacataagaaagcaagttgctggccaggcacggtggctcatgcctgtaatcccagcactttgggaggccgaagcgggaggattacctgaggtcaggagttggagaccagcctggccaacatggtgaaaccctgtctctactaaaaatacaaaaattagctgggcgtggtggtacacacctgtaatcccagatactcgggaggttgagggaggagaattgcttgagcccgggagatagaggttgcagtgagctgagatcatgccactgcactccagcctggctgacagagtgagactgtctcaaaaaaacaaacaaacaaacaaagaataatggtagcttttcttatttatagttttctttcttccccccagatttccaagagtaaccatatattagttttatcattagaaaaaaaaacctaaacattaaaaaaattcttggaacaccatctgtattcctccattatgtcatttttcataaaacagtcagctcagcttgattataccaaatagatctcttggtacctaagactcagggaaaactaatggattgaaacgactaagatcagagagcagaatctaactagccatgcttacctctcaaaatgataccttgttaactaagcatggaattagataactagttgttataaaaggcagactatagaaatatatttaggccagcctgggcaacatagtgagaccccatttctacaaaaaaattttttttaattagctgggtgtggtggttcacacctgtagtctcagctagtaagtagcatgaggtgggaggatcgcttgagccctgaaggtcaaggctgcagtgagccatgatcgtgccactgcactccagcttgggtgatacaccaagaccctgtct

SEQ ID NO: 43435 - DNA, 234 bp, Homo sapiens
aaaaaaaaaaaaaaaaaaaaaacctggaaagaaaagaaataaagtgactactgcaatagataaaataaattgcccagctgcctccaggtttgctattttttcattatcagtgttttcttgacagtgttaaaacatttggccccctaaattcacagtttattggaacacttgatgaaagctgaatctctgtagtcatgctgttagtgactcactcttcctttgaaatgtctaatg

SEQ ID NO: 43436 - DNA, 776 bp, Homo sapiens
tacatctcattctggaggaagagatggcaccacatgaggagcaggcagggagtcaatcccaggtgcacttaggagagaagaaaggcacatccacctggtaagccgctctgaaatgagtagcgtgcagggtgatgttgagctctattctgcagttcgatcaacatgcttctacctctcggccctcacatagcagcctgcctggctgccatctgccaagcttttgctttcctttctgttttgcataaggcttttgcttttaatatgctgctactgagtacagaaaaacaagagcgtaccagacttcagggatctgcctgtttcttttctgccttttaatagagcttagctcttttgccacttgttattgtcaagtacaacatgagttcagagaaagaacactgcacctgaccggggatggatgccacgccttgaagaaattggcaggaaacagaagaggtttataggatcttctcttctgccactcccatcttggaaacaagtggaagtacatttgcaaaattatattgaaaaaaatgagaaaatgcatttttctttatagtcaacccttctgacatggacctagtttcaaatgaagttatgaggaaatggcccttatgactaaatgttgattcatgtgctgtgagctgtgaacccaggatgagaaatgggaggaaatcaaactaaggaatggaaagggggaagtgctctgggtgccttgcctaagagactgaaccctcaaatcttggaaataaaccatattttgtaaaccaaaaaat

SEQ ID NO: 43437 - DNA, 268 bp, Homo sapiens
ttttggaggagtgtcagggacctccctgctctggctgctgacagtgaagcctagtggggaattctctggtctccctaaaaacattactgggccagatgtggtggctcatgcctataatcccagcactttgggaggctgaggtaggcagatcacctgaggtgaggagttcgagacaaccctggacaacatggcgaaaccctgtctctactaaaaatacaaaaattagccgggcatggtggcacgtgcccgtattcccagctactcggaa

SEQ ID NO: 43438 - DNA, 382 bp, Homo sapiens
ggggtttggtgaaactcaccagaggctgaaccctctccagcataacacagggattgggaggagcagggcggcattaggccagatgtatagcccagtgctgctctctctggacttgtttgctagctgagctcatccatttacataattttcagtgccatttctcagctaatgagtcctgaacttttgtcttgaggctagaattctccttcaaacagcagttttaacactcaacttctttcttgttttttccacttgtcaactcatgaacacctcaaccttgttacatccaaagccaaactcatggcttggagtggtaggtgatggctgtaatcccagtgctatgggaggcagaggtgggaggattacttgaggccaggagttg

SEQ ID NO: 43439 - DNA, 503 bp, Homo sapiens
acctaatatggccccatgtccactcagatacccccactcccacactgcctgtcatcccccttgatggagaataacctgcctttagtgttacgtgaaggaagattcagataaatactttgaatgctgaaagacaggaatgcgggacctagtttggtatggggtaccctgtaccgatgctttagcaaggaccagcagacttgttgccttgaggcagcttcagggcagacctcagaggcaactggatttacttgagaaccttcttgctttctgtttcttgcagctgcagctgttggacttgtgccccaggagcacgttcctctatggccacagtcctgggagtcctctgctcctctctcctccctactcccaaactccagacagcttggttagggcccttagccaagcctaactgacctttgagtacttcagcctcttagcatttcccagcttcttcccagaatgacatttgccaaccaaatagcacaagggaaggaagagtacaa

SEQ ID NO: 43440 - DNA, 663 bp, Homo sapiens
ttagcactgcagggctctgcgcgggaacgctaacctggtccggagcgagtctgggtctcagccccgcgaacagcctttcacgagtcttcaagctttcaggctatcttctagtcaagatgagtgataagccagacttgtcggaagtggagaagtttgacaggtcaaaactgaagaaaactaatactgaagaaaaaaatactcttccctcaaaggaaactatccagcaagagaaagagtgtgttcaaacatcataaaatggggatcgcctcccaacagcagatttcgacattacctgagagtcttgattttaggcttgttttttgtaaacccatgtgtttgtagagattttaggcgtcttcggatatcttctcacctatgttccctggctaagaagtcagaggtagccaatgtttccttaaattcatttttaaacttaccattggtgcatatgttccagatggcagatgctgtcaataatctcaccattgatgacctttgtgtatgtagttcttgcatcctatactggataagcctgttttaacctgctatgatgggtgcttccattgcttcataatcttcatgaagttgcatgcttttgcagcttttcacagtttatttgcatttctaatgtagtaataaagtaaccaatataatcattatctg

SEQ ID NO: 43441 - DNA, 739 bp, Homo sapiens
  misc_feature (678)..(678): n is a, c, g, or t
ttagcactgcagggctctgcgcgggaacgctaacctggtccggagcgagtctgggtctcagccccgcgaacagcctttcacgagtcttcaagctttcaggctatcttctagtcaagatgagtgataagccagacttgtcggaagtggagaagtttgacaggtcaaaactgaagaaaactaatactgaagaaaaaaatactcttccctcaaaggaaactatccagcaagagaaagagtgtgttcaaacatcataaaatggggatcgcctcccaacagcagatttcgacattacctgagagtcttgattttaggcttgttttttgtaaacccatgtgtttgtagagattttaggcgtcttcggatatcttctcacctatgttccctggctaagaagtcagaggtagccaatgtttccttaaattcatttttaaacttaccattggtgcatatgttccagatggcagatgctgtcaataatctcaccattgatgacctttgtgtatgtagttcttgcatcctatactggataagcctgttttaacctgctatgatgggtgcttccattgcttcataatcttcatgaagttgcatgcttttgcagcttttcacagtttatttgcatttctaatgtagtaataaagtaaccaatataatcattatctgaaaaacaaaaaaaancgggctctatccggggccggcaacgcggttcgaatggccctggccataccggttccggacc

SEQ ID NO: 43442 - DNA, 877 bp, Homo sapiens
  misc_feature (13)..(13): n is a, c, g, or t
  misc_feature (76)..(76): n is a, c, g, or t
  misc_feature (78)..(78): n is a, c, g, or t
  misc_feature (80)..(80): n is a, c, g, or t
  misc_feature (719)..(719): n is a, c, g, or t
  misc_feature (726)..(726): n is a, c, g, or t
agagagagagagngagagagagagagagagagagagagagagagagagagagagagagagagagagagagagaganananagagagagagagagcgagtctgggtctcagccccgcgaacagcctttcacgagtcttcaagctttcaggctatcttctagtcaagatgagtgataagccagacttgtcggaagtggagaagtttgacaggtcaaaactgaagaaaactaatactgaagaaaaaaatactcttccctcaaaggaaactatccagcaagagaaagagtgtgttcaaacatcataaaatggggatcgcctcccaacagcagatttcgacattacctgagagtcttgattttaggcttgttttttgtaaacccatgtgtttgtagagattttaggcgtcttcggatatcttctcacctatgttccctggctaagaagtcagaggtagccaatgtttccttaaattcatttttaaacttaccattggtgcatatgttccagatggcagatgctgtcaataatctcaccattgatgacctttgtgtatgtagttcttgcatcctatactggataagcctgttttaacctgctatgatgggtgcttccattgcttcataatcttcatgaagttgcatgcttttgcagcttttcacagtttatttgcatttctaatgtagtaataaagtaaccaatataatcattatctgcacaaancaaaaanaaaactcccgaggacatctattgccgcgggcgcaacacagcaccgccttgaactgggcactggtccatagcggttcctgacccaagtttcttgtcacaagggaaactctgcggcaccccaaaaggagcgaataattcgacaaccggtaacg

SEQ ID NO: 43443 - DNA, 712 bp, Homo sapiens
  misc_feature (13)..(13): n is a, c, g, or t
  misc_feature (76)..(76): n is a, c, g, or t
  misc_feature (78)..(78): n is a, c, g, or t
  misc_feature (80)..(80): n is a, c, g, or t
agagagagagagngagagagagagagagagagagagagagagagagagagagagagagagagagagagagagaganananagagagagagagagcgagtctgggtctcagccccgcgaacagcctttcacgagtcttcaagctttcaggctatcttctagtcaagatgagtgataagccagacttgtcggaagtggagaagtttgacaggtcaaaactgaagaaaactaatactgaagaaaaaaatactcttccctcaaaggaaactatccagcaagagaaagagtgtgttcaaacatcataaaatggggatcgcctcccaacagcagatttcgacattacctgagagtcttgattttaggcttgttttttgtaaacccatgtgtttgtagagattttaggcgtcttcggatatcttctcacctatgttccctggctaagaagtcagaggtagccaatgtttccttaaattcatttttaaacttaccattggtgcatatgttccagatggcagatgctgtcaataatctcaccattgatgacctttgtgtatgtagttcttgcatcctatactggataagcctgttttaacctgctatgatgggtgcttccattgcttcataatcttcatgaagttgcatgcttttgcagcttttcacagtttatttgcatttctaatgtagtaataaagtaaccaatataatcattatctg

SEQ ID NO: 43444 - DNA, 389 bp, Homo sapiens
tcatcaaaaggatgtaggccaggtatctgccttctcttagaaaactcatgcagcagtgcttagctggatgacataataaactgcttcgtgggatggcagagccctgtgtccacttatgtggaaggatttaagaatttttttttttttttgagacagggtctcactctgtcacccaggctggagtacagtgatgtgatcatgtttcactgcagcttcgacctcctgggttcaggtgatcctcccacctcagcctcccaagtagctgggactacaggcacgtaccaccacacccagctaatttttgtattttttttttgtaaacatggggtttggccatgttgcccaggctggtctcaaactcctaagctcaagtaatcctcctaccttgg

SEQ ID NO: 43445 - DNA, 984 bp, Homo sapiens
agctcctcaaagccttacctgttttgcctaagaggagtgtccttcattcgtacctatagaaacactacttggcaacagtgaatgttctctgacacatgtaataggttgttaagtttctctatttagagtccattggtagtcaagaccacctgggtgctgtttgcaagacataactatcatggaagtatttaatactatactattggtatagcaggtacatgatatgctattagtgctgtagaaatgttatgttagagacgggaacctgaagcccctccttgtggcacatagacaacctttgttttttcctataatcctttccaccttttccttggggtaatgcccctccaagtgtgctctcccctgggactcagctgcctaggccttccttcttagccactattagctgagagcagaggcagcagctctggctggcagtggcccctggagctttgacatctggaggggatgaggaccccgttcggatgactcctgcccttccctacccaggctgtttgactcttgatctcgcctagtactttttctcaatatctaattcctgagcctgcgattgagttgtcctgcttggacacagcccttgtgttccacatgtgtggtctgatccagtgacaaagaagttgccatttaaacatctcatcttgaagaaccattctgcctttcatgcttcatgtattgaacactgaaactgataggagtcttagctttccctgtgtgtttccaagggtttaatacatacataatgatcaagagaacctgatttaacattttgctcaccctagtattaaaaaaaaaaattctggagaaggtaataaagactaagtttaaagaatgtcttggcagttgttaaaggaaattttaattaaatcccaaaatagtgggtacatgagaataattccatttgagggtaactgttgggtgtcctcattaaagcctatacaatgcatcgtatgaattttctcctgt

SEQ ID NO: 43446 - DNA, 506 bp, Homo sapiens
gagaagttcatatattcttgccacttagataatgatcgtgggggatactgttgtagaggagtctagcaaaacaatccctcctagactttgtggtcagtcagcaagcgaagaatgtgggggcctgtgcagctgggcacctgaccgcgtttgctgcaaaggagcagcccccgtctggaggggtaggcactgtggggtgggggcctggctttcttggctgtgagagagaaaatggcagaagcattatggaaagacaaccgtcactctgttacaagcagagaccaaggacttggaacgtcctccaaactctgggcttgagaaatgaaggccgaagtcgctgctgagaaagccactaagaaaggagtttgggagatgccaccaggcagccgtcgggggaggcaaaagcgcctcacgcattctgttccttgttgcttctcggtttgtagataaacatgaaatcaaagcttgataaagcataatctgaatgtgctgctcattctctttttctc

SEQ ID NO: 43447 - DNA, 2134 bp, Homo sapiens
agccccggacagcgcaggctgcggcttttcgtcctccactgagtcctgccggtggcccgagcccggtggcctcccggcgaccctcggcgcgaggcgacatggcaggcggccacagcctcctgctggagaacgcgcagcaagtggtgctggtgtgcgcccgcggcgagcgcttcctggcgcgggatgcgctgcgcagcctggcggtgctggaaggcgccagcctggtggtgggcaaagatggatttataaaagctattggtcctgctgatgttattcaaagacagttttctggagaaacttttgaagaaataattgactgctctgggaaatgtattctaccaggtttggtggatgcacacacacatccagtatgggctggtgaaagagttcacgaatttgcaatgaagttggcaggagccacctacatggaaattcaccaggccggaggagggatccactttaccgtggagcgcacgcgccaagccacagaggaggagctgttccgctccttgcagcaacggctccagtgcatgatgagggctggcaccacgctggtggagtgcaagagtggatatggcctcgacctggagaccgagctcaagatgctgcgcgtgattgagcgcgcccggcgggagctggacatcggcatctcggctacctactgcggggctcattcagtgcctaagtaatcaggaaaaactgctactgaagctgctgatgacatcatcaataaccacctcccaaagctgaaggaacttggcagaaatggggaaatacacgtggacaatatagacgtattttgtgagaaaggtgtctttgatctcgattccaccagaaggattcttcaacgtggaaaagatatagggttacagattaacttccatggggatgaactccacccgatgaaggctgctgagcttggggctgaactgggagcgcaggcaatcagccacctggaagaagtgagtgatgaaggcatcgttgccatggcaacggccaggtgctctgccatccttctgcccaccacagcctacatgctgagactgaaacaacctcgagccaggaagatgttagatgaaggagtaatagttgctctgggaagtgatttcaaccccaatgcatattgcttttcaatgccaatggtcatgcatctggcctgtgtaaacatgagaatgtccatgcctgaggccttggccgctgccaccatcaatgcagcttatgcactgggaaagtctcacacacacggatcgttggaagttggcaaacagggagatctcattatcatcaattcatcccgatgggagcatttgatttaccagttcggaggccatcatgaattaattgaatatgttatagctaaaggaaaactcatctataaaacatgatagatttgaaaagagaagactttttgactatatgaaataagtcaatatagttatattaaaagttaaaacaccttaatatttacaagaattatatcacttaaacctaaatgtacttcaatgtctttttaagtcactcaaaaaacccaagggatagatttattttcatttaacacatgcatttgacatataaacaggtaaacctattgtgattaaaatcacaaaacatccaattagttcacaaatattggttacaaatattctgtagattaatatggtggggtatcacaaaaatgcctttgtggggaaaagtaggcttggcttaaaatttccattttgtgtctgtatttcacatctcagtttttaaactatatttagtgaacattgagggatcgaaagaaatctaagtgatacgccccaatgaagctaaaatatagccttctgttaagcaaatagtatttcctttccccaagtagttcattttctagatgcttgtcaaatgaattaatgtcctctgatgaagagtgtccttccgtttctaaggtcttctcaatctcagcaatagagcttcccagcagcgttcaagacacatcatttatacacaggcacaggggccttcctgaaatgggtgcatttttaccaactacaatcatgtaatttttttggaaattttttaaaattttcgattctttacattacaattgggtgaaacacattttacagctctcaataaatgtttgctgtcgctctta

SEQ ID NO: 43448 - DNA, 2070 bp, Homo sapiens
agccccggacagcgcaggctgcggcttttcgtcctccactgagtcctgccggtggcccgagcccggtggcctcccggcgaccctcggcgcgaggcgacatggcaggcggccacagcctcctgctggagaacgcgcagcaagtggtgctggtgtgcgcccgcggcgagcgcttcctggcgcgggatgcgctgcgcagcctggcggtgctggaaggcgccagcctggtggtgggcaaagatggatttataaaagctattggtcctgctgatgttattcaaagacagttttctggagaaacttttgaagaaataattgactgctctgggaaatgtattctaccaggtttggtggatgcacacacacatccagtatgggctggtgaaagagttcacgaatttgcaatgaagttggcaggagccacctacatggaaattcaccaggccggaggagggatccactttaccgtggagcgcacgcgccaagccacagaggaggagctgttccgctccttgcagcaacggctccagtgcatgatgagggctggcaccacgctggtggagtgcaagagtggatatggcctcgacctggagaccgagctcaagatgctgcgcgtgattgagcgcgcccggcgggagctggacatcggcatctcggctacctactgcggggctcattcagtgcctaagtaatcaggaaaaactgctactgaagctgctgatgacatcatcaataaccacctcccaaagctgaaggaacttggcagaaatggggaaatacacgtggacaatatagacgtattttgtgagaaaggtgtctttgatctcgattccaccagaaggattcttcaacgtggcttggggctgaactgggagcgcaggcaatcagccacctggaagaagtgagtgatgaaggcatcgttgccatggcaacggccaggtgctctgccatccttctgcccaccacagcctacatgctgagactgaaacaacctcgagccaggaagatgttagatgaaggagtaatagttgctctgggaagtgatttcaaccccaatgcatattgcttttcaatgccaatggtcatgcatctggcctgtgtaaacatgagaatgtccatgcctgaggccttggccgctgccaccatcaatgcagcttatgcactgggaaagtctcacacacacggatcgttggaagttggcaaacagggagatctcattatcatcaattcatcccgatgggagcatttgatttaccagttcggaggccatcatgaattaattgaatatgttatagctaaaggaaaactcatctataaaacatgatagatttgaaaagagaagactttttgactatatgaaataagtcaatatagttatattaaaagttaaaacaccttaatatttacaagaattatatcacttaaacctaaatgtacttcaatgtctttttaagtcactcaaaaaacccaagggatagatttattttcatttaacacatgcatttgacatataaacaggtaaacctattgtgattaaaatcacaaaacatccaattagttcacaaatattggttacaaatattctgtagattaatatggtggggtatcacaaaaatgcctttgtggggaaaagtaggcttggcttaaaatttccattttgtgtctgtatttcacatctcagtttttaaactatatttagtgaacattgagggatcgaaagaaatctaagtgatacgccccaatgaagctaaaatatagccttctgttaagcaaatagtatttcctttccccaagtagttcattttctagatgcttgtcaaatgaattaatgtcctctgatgaagagtgtccttccgtttctaaggtcttctcaatctcagcaatagagcttcccagcagcgttcaagacacatcatttatacacaggcacaggggccttcctgaaatgggtgcatttttaccaactacaatcatgtaatttttttggaaattttttaaaattttcgattctttacattacaattgggtgaaacacattttacagctctcaataaatgtttgctgtcgctctta

SEQ ID NO: 43449 - DNA, 1636 bp, Homo sapiens
agccccggacagcgcaggctgcggcttttcgtcctccactgagtcctgccggtggcccgagcccggtggcctcccggcgaccctcggcgcgaggcgacatggcaggcggccacagcctcctgctggagaacgcgcagcaagtggtgctggtgtgcgcccgcggcgagcgcttcctggcgcgggatgcgctgcgcagcctggcggtgctggaaggcgccagcctggtggtgggcaaagatggatttataaaagctattggtcctgctgatgttattcaaagacagttttctggagaaacttttgaagaaataattgactgctctgggaaatgtattctaccaggtttggtggatgcacacacacatccagtatgggctggtgaaagagttcacgaatttgcaatgaagttggcaggagccacctacatggaaattcaccaggccggaggagggatccactttaccgtggagcgcacgcgccaagccacagaggaggagctgttccgctccttgcagcaacggctccagtgcatgatgagggctggcaccacgctggtggagtgcaagagtggatatggcctcgacctggagaccgagctcaagatgctgcgcgtgattgagcgcgcccggcgggagctggacatcggcatctcggctacctactgcggggctcattcagtgcctaagtaatccttggccgctgccaccatcaatgcagcttatgcactgggaaagtctcacacacacggatcgttggaagttggcaaacagggagatctcattatcatcaattcatcccgatgggagcatttgatttaccagttcggaggccatcatgaattaattgaatatgttatagctaaaggaaaactcatctataaaacatgatagatttgaaaagagaagactttttgactatatgaaataagtcaatatagttatattaaaagttaaaacaccttaatatttacaagaattatatcacttaaacctaaatgtacttcaatgtctttttaagtcactcaaaaaacccaagggatagatttattttcatttaacacatgcatttgacatataaacaggtaaacctattgtgattaaaatcacaaaacatccaattagttcacaaatattggttacaaatattctgtagattaatatggtggggtatcacaaaaatgcctttgtggggaaaagtaggcttggcttaaaatttccattttgtgtctgtatttcacatctcagtttttaaactatatttagtgaacattgagggatcgaaagaaatctaagtgatacgccccaatgaagctaaaatatagccttctgttaagcaaatagtatttcctttccccaagtagttcattttctagatgcttgtcaaatgaattaatgtcctctgatgaagagtgtccttccgtttctaaggtcttctcaatctcagcaatagagcttcccagcagcgttcaagacacatcatttatacacaggcacaggggccttcctgaaatgggtgcatttttaccaactacaatcatgtaatttttttggaaattttttaaaattttcgattctttacattacaattgggtgaaacacattttacagctctcaataaatgtttgctgtcgctctta

SEQ ID NO: 43450 - DNA, 2189 bp, Homo sapiens
agccccggacagcgcaggctgcggcttttcgtcctccactgagtcctgccggtggcccgagcccggtggcctcccggcgaccctcggcgcgaggcgacatggcaggcggccacagcctcctgctggagaacgcgcagcaagtggtgctggtgtgcgcccgcggcgagcgcttcctggcgcgggatgcgctgcgcagcctggcggtgctggaaggcgccagcctggtggtgggcaaagatggatttataaaagctattggtcctgctgatgttattcaaagacagttttctggagaaacttttgaagaaataattgactgctctgggaaatgtattctaccaggtttggtggatgcacacacacatccagtatgggctggtgaaagagttcacgaatttgcaatgaagttggcaggagccacctacatggaaattcaccaggccggaggagggatccactttaccgtggagcgcacgcgccaagccacagaggaggagctgttccgctccttgcagcaacggctccagtgcatgatgagggctggcaccacgctggtggagtgcaagagtggatatggcctcgacctggagaccgagctcaagatgctgcgcgtgattgagcgcgcccggcgggagctggacatcggcatctcggctacctactgcggggctcattcagtgcctaagtaatcaggaaaaactgctactgaagctgctgatgacatcatcaataaccacctcccaaagctgaaggaacttggcagaaatggggaaatacacgtggacaatatagacgtattttgtgagaaaggtgtctttgatctcgattccaccagaaggattcttcaacgtggaaaagatatagggttacagattaacttccatggggatgaactccacccgatgaaggctgctgagcttggggctgaactgggagcgcaggcaatcagccacctggaagaagtgagtgatgaaggcatcgttgccatggcaacggccaggtgctctgccatccttctgcccaccacagcctacatgctgagactgaaacaacctcgagccaggaagatgttagatgaaggagtaatagttgctctgggaagtgatttcaaccccaatgcatattgcttttcaatgccaatggtcatgcatctggcctgtgtaaacatgagaatgtccatgcctgaggccttggccgctgccaccatcaatgcagcttatgcactgggaaagtctcacacacacggatcgttggaagttggcaaacagggagatctcattatcatcaattcatcccgatgggagcatttgatttaccagttcggaggccatcatgaattaattgaatatgttatagctaaaggaaaactcatctataaaacatgatagatttgaaaagagaagactttttgactatatgaaataagtcaatatagttatattaaaagttaaaacaccttaatatttacaagaattatatcacttaaacctaaatgtacttcaatgtctttttaagtcactcaaaaaacccaagggatagatttattttcatttaacacatgcatttgacatataaacaggtaaacctattgtgattaaaatcacaaaacatccaattagttcacaaatattggttacaaatattctgtagattaatatggtggggtatcacaaaaatgcctttgtggggaaaagtaggcttggcttaaaatttccattttgtgtctgtatttcacatctcagtttttaaactatatttagtgaacattgagggatcgaaagaaatctaagtgatacgccccaatgaagctaaaatatagccttctgttaagcaaatagtatttcctttccccaagtagttcattttctagatgcttgtcaaatgaattaatgtcctctgatgaagagtgtccttccgtttctaaggtcttctcaatctcagcaatagagcttcccagcagcgttcaagacacatcatttatacacaggcacaggggccttcctgaaatgggtgcatttttaccaactacaatcatgtaatttttttggaaattttttaaaattttcgattctttacattacaattgggtgaaacacattttacagctctcaataaatgtttgctgtcgctcttattgttgttgtttcctttcagcctggaagtagatcagcagcgttgtctattagagt

SEQ ID NO: 43451 - DNA, 1263 bp, Homo sapiens
agccccggacagcgcaggctgcggcttttcgtcctccactgagtcctgccggtggcccgagcccggtggcctcccggcgaccctcggcgcgaggcgacatggcaggcggccacagcctcctgctggagaacgcgcagcaagtggtgctggtgtgcgcccgcggcgagcgcttcctggcgcgggatgcgctgcgcagcctggcggtgctggaaggcgccagcctggtggtgggcaaagatggatttataaaagctattggtcctgctgatgttattcaaagacagttttctggagaaacttttgaagaaataattgactgctctgggaaatgtattctaccaggtttggtggatgcacacacacatccagtatgggctggtgaaagagttcacgaatttgcaatgaagttggcaggagccacctacatggaaattcaccaggccggaggagggatccactttaccgtggagcgcacgcgccaagccacagaggaggagctgttccgctccttgcagcaacggctccagtgcatgatgagggctggcaccacgctggtggagtgcaagagtggatatggcctcgacctggagaccgagctcaagatgctgcgcgtgattgagcgcgcccggcgggagctggacatcggcatctcggctacctactgcggggctcattcagtgcctaagtaatcaggaaaaactgctactgaagctgctgatgacatcatcaataaccacctcccaaagctgaaggaacttggcagaaatggggaaatacacgtggacaatatagacgtattttgtgagaaaggtgtctttgatctcgattccaccagaaggattcttcaacgtggaaaagatatagggttacagattaacttccatggggatgaactccacccgatgaaggctgctgagcttggggctgaactgggagcgcaggcaatcagccacctggaagaagtgagtgatgaaggcatccccaccacagcctacatgctgagactgaaacaacctcgagccaggaagatgttagatgaaggagtaatagttgctctgggaagtgatttcaaccccaatgcatattgcttttcaatgacacatcatttatacacaggcacaggggccttcctgaaatgggtgcatttttaccaactacaatcatgtaatttttttggaaattttttaaaattttcgattctttacattacaattgggtgaaacacattttacagctctcaataaatgtttgctgtcgctctta

SEQ ID NO: 43452 - DNA, 472 bp, Homo sapiens
caacctcgagccaggaagatgttagatgaaggagtaatagttgctctgggaagtgatttcaaccccaatgcatattgcttttcaatggtaattatttttttcatgtacctttctgagcagagtatctaccaagcatataaataatttaaaaatatttcactagcttttaaaacagtataaaaaatctaaaaatatttttctgtgaaacaagaaaaaaaggggtagacagcagtgtaattggatttttctgtcccacataaatgcctgcaggcatagagagaggagagaagcttctacatgcattattttctgattcagctttgagtattgtagttttacagtaacccatttcctttctccagagaatagcataaactccaagaggtcttagtaagtatggaagtgaacttcattgtgtgcagtaagtggtcttgaaaagttgtcaataaatattaaatacgcaatccctata

SEQ ID NO: 43453 - DNA, 1170 bp, Homo sapiens
catctatcagatgggaatagtaatactcattttacctatttttaccaggtggttgtaggaacaggattcattcattccttcattaatataatgaacactttgagaccccactatataacagggccatacatatgacaaggtgatagatggaaagacgttttgcagaatttttgaagacttgcaatgtttttgaagactacaggatagtttgtgatttttatattaaggtcgtatcaactctttatgtcaatatatcaaagtaattgacacttttagagctctgccaatcagtgggccatattcatagaatgtcagtaatctgtctgaatacaagttatagttggtctttagctgttctgtctctgaggagctagaaataaaatattaggttctaatttttttttgttcaaacactgatcatgtaacaaactgcaaatccatgttttcagcaggttcgccaacctttgagttgaatgcagacctttctttagaacaacctaactttgagtacaggcaaagtattaaatggaatagcttttcctcccctacaaagtggatttgaatacagtccttagaaaaattcttcccctgccaaaaaaggtccttcaatctcctttattatttttcttttgaagaatcaaacttgtccatctctcccctcccaagtgactttcctcactcatgtaatcattttcttcataaatgcccttttactatcccacagaaaaagtaaagatttaaaaaatcatttttaaggtacatccaagatttcatagcaatattttatttgtgttcacagtgcaagataaatctgactttctcaatatttttggtcttcatatggcatctgaaacagttgttcacattcacacatttatgtttcaccatatgcatactgtgtacagctctgttgttctaaaatattttattggttttcctttatatctcaacttttgatgggtgtccttgaagaactttcatgaaaaaaatgtaaatgtgaatgattcattcattttgaacatatgtaactattttaggagattttcaggagattttaccctacatggagtacactgttcttagcagggaatgtgctttatattactattctactcacagctggatgctgcagatgtattaacattgtaaacatgtactttttctattcta

SEQ ID NO: 43454 - DNA, 233 bp, Homo sapiens
caactcagattaatccagaaacttgctttaatagtctttttagggccgggcgcagtggattacaggcatgagccaccgtgcctggccacctcccatattttaaaaactctccgaatgtgaggataaaagactattagattgatcaggtacacagagtttgcaaggtggtatggcaaaaggatcacagattcttacaaggtcattataagtactgctttggctaggaaaatgat

SEQ ID NO: 43455 - DNA, 466 bp, Homo sapiens
agtaataaaaataactatacttatgataatttggtaacagatacacattatctacaaaatgtaaattatggctgggtacagtggctcacacctgtaatcccaacactttggaagcctgaggttggaggatcacttaagcccaggagttccagaccaggccgggcaatatatcaagacccccatctatttttttaaaatgtaaattatgacattaataacataatgtgagtgagaagtttaagatttatcatatgcaagtgaagttcttttcagcttaaaatagacttataactatgagatgttttacataagcctcatggtaaccacatacacacatacacacacacatgaatagacctgtagtgggtacacaaaagagaaagagaaagaaagcttaccactatgaaaaaaattatcaaattacaaagaagacagcgagagaggaagaatagaacaaaagtactac

SEQ ID NO: 43456 - DNA, 1637 bp, Homo sapiens
aaccaccagcatccgtcttcttcctttccagccagacaactctccctggccctaatgggtttcaggcagagatggtttcctgagggcagcaccagtcagaatgggtggagcaggccccagagcttctaatggtcccagctgagtcccccaaggctcagcacgtgatcctgccggtcgtacacacagccccagctcgagcactgtgcggccactctctctccaagtactctctgcccgggagcccacttcatcctgcttcatcagtctctgaagctgagagaacacccttgtttgtttctgcagacattcctttgcttcagcactcaccgctccccagaccacaaaggtgtatggacttagcaaaaccagtcataatgatttttctatatcaaaaccagccctaacaatttttatacaacttttaaataaaaacagtggaaaatacaataaataagtcctctaaataaagctgtggtatgaagtttaaatgccccaagtcagaagtcaattggatgtctctgtctgagctgagagcacatgacatacaacgaaaccacatggacagacacaaccccgaatgccaattccagtgtcctgtgcagtgatgaccacactgttagaagcattttaactcttgtttttacaaactttcttttttacatatatgttagcggtcaaagaactctgtttttcttggtccaaaccagaggaaatttattgtccaaaccagacccaccccaatgcatttgcctctgatgtgagaaagaaacactagggcttcaaccagatgaggggcgtttaggaaaacccacagctgaagtcacattcaatgcggaacactgggcacctccccctaaggtcaggaacaagacgagggtgtccgctcttattcctttcagcctcggcactgatggtcctagggcaactctatgttgacgcctctgaggaactgccgggctgcagtgaatccaggtgacctcacagaaacttgtatgtgagcattcgcagcggcatcattcacagtggccaggaggtggaaacaaccccgatgtccatcaactgatgaaccaaccgatgaacacagggtgacctgtccatacagtggggtctcagccacagagggagcaaggccgtgaaacctgcagcgggagcaaggcggtgaaacccgcagagggagcaaggccgtgaaacccgcagcgggagcaaggcagtgaaaccctcagagggagcaaggccgtgaaacccgcagcgggagcgaggcgcggaaacaggccatgacacggacgagccacaccatggatgaccccacggacacgccaccaaagcaccatcatgctgagtgacagaagccaggcacccagaccatgcaccgtatgattcctttcacgtgaaatttcccagaacagggaaatgcagagcgacagaaagcaggttagaggttcccaggggctgggggttgggggaatggggagagactacttaacaggcagagacttgtttttggggtggtgaaaatgttctaaactgactatggctgcacaactctgtgaacacactaaaaacactggcttggacaacctaaatggtcggatgctgacttaggtctcaataaagctaaaaaataaggtgaaaaaaaa

SEQ ID NO: 43457 - DNA, 390 bp, Homo sapiens
caaaaacgccactgcaacaccacacgccattctaagccaactgacaagcctacaggcaactccaaaactatagaccacaaaagctctacagataatcatgaggctcctcccacttctgaagaaaactccagcaaccaagggaaagacccaatgatccggaaccagcgctctgttgatcctgctgactccactaccacacataaagaatccgctggaaaaaaacatataacgccagcacccaagagcaaaataaactgtcgtaagtccacaacaggcaaatcaacggtaacaagaaaatcagataaaactggaagacctttggaaaagtccatgagtactttggataagacaagtaccagctcacataagactacaacttccttccacaac

SEQ ID NO: 43458 - DNA, 372 bp, Homo sapiens
aagcaatatacagaaagaaaaatattctatgacctttcttatatgcagaatcctacaatataaagttgaataaatagaaacagagagtagaactgtagttattatgagaggaagaaatggagatgtggatcaaaggctacaaatttgcagttaggaagaatgaatatgtctaggggcctaatgtacagtatgaagactgtagttaataatattctactgtatactgaaaaatctgctaagagagtatattttaggtgtttttacctcacagatgcacacacacacacacacacacacacacacaaaccttctgcctttgatgttacagatttaatacagtttatttttaaagatagatccttttataggtga

SEQ ID NO: 43459 - DNA, 422 bp, Homo sapiens
cccaaactagtacaataaacctcctgtcaccaatttctccctcctccagcccacccagcacactgctacctgatttcctgaaaacctaattcaagaggaaacacactgatttcacccttgctcaagaattcatggcagggctatgcacggtggctcacgcctgtaatctcagcactttgggaggccgagatatgcagattgcttaagctcaggagttcaagaccagcctggacaacatggaaagaccctgtctccacaaaaagatgcaaaaaattagccaggtgtggtggtacacacctgcagtcccagctacttgggaggctaagctgggagactcacttgagcccaggaagttgaggcggcagtgagctgtgatcatgccactgcactctagcctgggtgatggagtaagactctgtctc

SEQ ID NO: 43460 - DNA, 373 bp, Homo sapiens
ggggaacttgcagagagaaaaaggccatgtggggacaccagagacagtggccatctgcaagacgaggagggaggctcaccagaccctggccctgcctgcaccatgaacttggactttcagtctccagactatgagaaaatatgattctgttgttgaagccacccaggcctttcccctgacataaatgcccacctggaaggaacctttacctatttctctggcgtgtgttatctatgaatatgttctaagacttattcataacacttcagttatttttaagcacctatgatgaaaaagacacagtactggacacagaggtgaattttctagcctgatggactaggaagaagtgacacttaagatgagccttgct

SEQ ID NO: 43461 - DNA, 756 bp, Homo sapiens
tgagagcccctgactgttttcttgcgctggcccagggcttctggaactacagtctggggtcaggtgaccctggcccagagtcagctgctccacaggggtatctggagcctggagcccaggccttgcctttgtcggggagcagccaggaaacgccctagggacggcagccgctcttggcctcggaggcacctggggagctgtcaggtggatttggggccctttcctccaaagctctgattcacttatgccaggaggagcccaggcatgcttgttccaaaggaacagctggggaccgggagcctgtttaggagcctggggcatccacacactcacctgggcctggctccgaaggtcgctgaaccctcatcacctggtttagggggctggaaccacctcgcctcatctgatgcttcacccaatgagctgggcagagagggcaggtgccccattggacccagcaggaccccagcatggaaagcggcagccccaactccagggcccggggccaggctgcagccccaggtgggctctcaggggcctgctactgcagcttagcccctgacgagatttgccgctgcccaccaacccactgcatccagactggactcttcaccctggttcctcttagtaacccaggactttatttgtttgccacctctgtatgctgcccacagtgttatttgcttactgtttttatttaaatagattttctgacaattcacttttttacttagccctgtctgtgaatttgccgtc

SEQ ID NO: 43462 - DNA, 434 bp, Homo sapiens
cgtggtggcgtgcacttgtaatccccgctatttgggaggctgaagtaggagaatcgcttgaacccaggaggcggaggttgcagtgcgctgagattgcaccattgcattccagtctgggcaacaagagcaaaactccgcctcaaaaaaaaaaacaatagaaatatgcattctctgtgttttggagtttgttaaagagatttccatattttgtaacagtgccccccttctcctgcccctgttatgataaattggctagtctctgtgaaggctggtgaggtttccacgaactagaatggtatgacttccttgggcttcaggtatggccactgcattggagtttgtttggtcagaccacttcctgagcccaggaactcaaggctctggcttgtttagggaggtggcagtggcagtatctccggaaatgactcttgaag

SEQ ID NO: 43463 - DNA, 599 bp, Homo sapiens
agctactcgggaggttgagacatgagaattgcttgaacctgggaggcgaaggttgcagtaagccaagatagtgccactgcactccagcctgggtgacagcaaggcgccatctcaaaaaaatgaaaacaatagaatacaattgtgggagactttaatacatcttgaaaattaaactggtttatcagttaaataggaataatgaattttaactgtaaaataaataagacttgattcattttcatagaaatgtatgtatttggccatcttttataataatggaaaaattaataaaaagagctatcattaaagcaaggcaaacaacaataacaaaaagagaaatggtgtccagatcctggtttctaaataccactctccactaaaaggaatttggagaaatggctgattctggggttgtgataggtaagacacagaatgagtatggtatcagaaacctagaaaatgttcaaaaaattaagagtgcccacttcaaaagcacctgtactaaaattggaacaatagagagatgattagcatggatgacacacgaattagtaaagcatttcatattcttgtaaactgtgtatgttttatcacagtaa

SEQ ID NO: 43464 - DNA, 573 bp, Homo sapiens
cttggctcacttggcaccttggctgagtacagcaggcaaaagcccataccaggcagcatgttgtggatggtttagttctccccgcctccctgtttcttggaaaagctacagggtccctgtagggcaaaattcccaggcgccttgctgcagacagagtaagacaaaaacaccaggaagcaggattccgtgcccatctctgcagtttgggttcacaaaagggggtgccgtcatccctgggtggaggagggagtgttggttttttgtttttgtttttttaacatgtatgaaactgacatcttctcaaatcttgttccacccccctctggaagcccccatcacccacccctgctatggacaccacacctatgccaggcccccccccccaccccagtctcattctggggtctgcccatgctgtgggaaagaatagggaggcctcccaaatatatgcaaattgtccccattccgtgggggcacctgacaatgacccgggtggagatggggcatggaggagtaggaagacccagccctatttgactggggagaggaggatctggagtccttcatgcccag

SEQ ID NO: 43465 - DNA, 231 bp, Homo sapiens
cttggctcacttggcaccttggctgagtacagcaggcaaaagcccataccaggcagcatgttgtggatggtttagttctccccgcctccctgtttcttggaaaagctacagggtccctgtagggcaaaattcccaggcgccttgctgcagacaaggtaggccgagagacaaggtagagccgagagacaagtagagccgagagacaagtagaccgatgctgctagaccgagg

SEQ ID NO: 43466 - DNA, 744 bp, Homo sapiens
acaaatgtttatttgcataatttgtccccctgatattttgctgctaaaatggaaatttagaagatctaccatggtggcagcctttcaacaggagtgagagagatgaggaaaggaaattatgggtaaatttccctcaatcaaaagcagggaatccaaagatcccccgccctaccccatcccaaatttaaatggttggcagctgcattggtaggagcttctgaagacatgtgaagcatagctgaagaggtctatggaataattaagtgctcttccttttgctgtaggcaaacagggctcattcccctttagggaacatagggatcactcactgctgctcttgagcatttagcaggattcttattgctatttacattctgacagctgaccagaaaggcagttatgtaaaatgaattttaaaataaaaaaagctttcttcccaaaacttgaatgtaagacagatacaatgggctttaaataaatacaggtaaatataatcaaacaaatacacaatacaatggcttgttggttagtgttttttaagctcttcatggttttaggcccagttataccacttttttttttttttaaatgataacatcaaaagtctaaatttagttcaaaaacaggctggccatgatggctcacacctgtaatcccagcactttgggaggctgaggcgggcggatcacataaggtcaggtgttcaagaacagcctggccaacatggcaaaaccccatctctac

SEQ ID NO: 43467 - DNA, 360 bp, Homo sapiens
taggtctcactatgttgcctggtctcaaacttctgggctcaagtgatcctcttgccttgcctcagccttccaaagtgctgggattacaggcatgagccacggtgcctgtttcacccctgccttttaagtaacagccacagttgctacaaacataggaaggcacagggcaggtgggtctcagtttcaccatctgtcacacaggaagcccagtttctccaccctcaatcctggggcctacaatccagcctccacatctcagcccaggtgaactttctcaaacctctagtgtccttgccctctcatcaaccttctatggctccgtactgccctttcctgtgttcccactgccaagttgcttcc

SEQ ID NO: 43468 - DNA, 379 bp, Homo sapiens
ctagaaaagaatctgagtttgatccacagggctgtgagaagccatcagagcttttgtcttattcatttaccatatgtctgtcaagtacccttcagtgagtctggtatgtgtcctgtggaaatattttttacctccaatttttattaaattatggacaaaaaaagtaagagagccagatgggaaagaagtagtgctttggccatgagtcaaggcatgctctgtgggcatgagtacagccttgctagtgtggaacttgtgttcaatgtagtttaaggccttaccataggagaaagcagggcctctagagacacagtgccccacccttccactcagttggccccaggaagggtggctactctgggaaggtgaaggtctgact

SEQ ID NO: 43469 - DNA, 482 bp, Homo sapiens
gggctggttgtgaactcctgacctcaggtgatccacctgccttggcctcccaaaatgctgggattacaggtgggcaccaccatgcccagccggattttggagtattttcataacacttactggtgagcatccctaatctgaaaatcctaaatctaaaatgctccaaaatttgaaactttttgagcaccagtatgatgccccaagtggaaaatcccacacctgatctcatgtgatgagtccaaactgttgtatgcacaaaattatttaaaatattgcataaaatgaccttcaggctatgaatagaaggtgtctatgaaacataagtgaatttcgtgtttagacttgggtcccatcctccacatatctcattttatatatatgcaagtattctcaaatccaaaaatatacaaagtctgaaacacttctggtcccaagcattatgaatgagggatactcaacccgtagtccttcttttaggggaa

SEQ ID NO: 43470 - DNA, 550 bp, Homo sapiens
tcctcagatgatcacacccactttgcttcactttcatgtccagagctgcttagactgatttctgcaaagtgcacaggcattttcatgctgaggataaaggaccatgatcgcttgtctggacccagaaaatatttcccatttgctacacagatgccgtctcatccttccagagttcaagacttcagcagaaaaaaaaatcacctcattaaaggaaaattgtgccttatccccactactcgaagatgcaaccatctgcctggtcacagccacttttttcctttttttctcactccatcgtatgtgtgtgtggtggggcaggggataaggggaataatctctctccagtataagaagggatcaagaagcaacaggactgcgggatgggatagaaaataattttcatcttagcaatattgagtattccagtacatgagtattgtatgtttctcaattcacttagatccttaatttcccttagtcatgttttgtgattttcagtatacaaatcttgtactctgtattaaaccattcttgcattgctgtaaagaaa

SEQ ID NO: 43471 - DNA, 634 bp, Homo sapiens
tcctcagatgatcacacccactttgcttcactttcatgtccagagctgcttagactgatttctgcaaagtgcacaggcattttcatgctgaggataaaggaccatgatcgcttgtctggacccagaaaatatttcccatttgctacacagatgccgtctcatccttccagagttcaagacttcagcagaaaaaaaaatcacctcattaaaggaaaattgtgccttatccccactactcgaagatgcaaccatctgcctggtcacagccacttttttcctttttttctcactccatcgtatgtgtgtgtggtggggcaggggataaggggaataatctctctccagtataagaagtgtgtggccctttacagggggtcccagagagccttctttctgctatgcgaggatacaagaggaattcaacaatctgcaatctggaagataaccctcccagaacccaatcatgctggcaccctgattttgaactttcagcctccagaactgtgagacatcaatgtattttgtttttgcagttttttatgaagttgaacatacacatatcctaagagccagttatttcgatcttctttatcaaagggaaataaaaacatatttcttcaaaaagacttgtata

SEQ ID NO: 43472 - DNA, 256 bp, Homo sapiens
ggagcagctgggaggagagaagggttgtggttttctgggaaactgctccgtcccctttcttccctggccctgtccaccagtgttagcctggagcaaggcctcacttgtctggggcacttgaagctgctacaggttgggagaagtggtaacagcttggagtcctcactcagggcagtgagcacagccagctcttcctgggcccttcccagcaaaaggagccactcccaaaacccctaggtaaccgtgagaggactcc

SEQ ID NO: 43473 - DNA, 2205 bp, Homo sapiens
gaattccggctcccgcggctgcaggcgcgcggctagagtgcctggcgggctccggcttccgcgtccgccccggccccggtccagacttagtcttcagctccgcgcccgctccgccgcggcccaccgcgcccgccggcagccgagcccccagcgacgcccgcacagctccgggtgcccagacagggggccatgccgtgccggagggaggaggaagaggaagccggcgaggaggcggagggggaggaagaggaggaggacagcttcctcctactgcagcagtcagtggcgctgggcagctcgggcgaggtggaccggctggtggcccagatcggcgagacgctgcagctggacgcggcgcagcacagcccggcctcgccgtgcgggcccccgggggcgccgctgcgggccccggggcccctggctgcggcggtgccggcggacaaggccaggtccccggcggtgccgctgctgctgccgcccgcgttggcggagactgtgggcccggcgccccctggggtcctgcgctgcgccctgggggaccgcggccgcgtgcggggccgcgctgcgccctactgcgtggccgagctcgccacaggccccagcgcgctgtccccactgccccctcaggccgaccttgatgggcctccgggagctggcaagcagggcatcccgcagccgctgtcgggtccgtgccggcgaggatggctccggggcgccgccgcctcccgccgcctgcagcagcgacgcgggtcccaaccagaaacccgcacaggcgacgacgacccgcaccggcttctgcagcagctagtgctctctggaaacctcatcaaggaggccgtgcgaaggcttcattcgcgacggctgcagttacgtgcaaagcttccccaacgcccgctcctgggacctctgtcggccccggtgcatgaacccccttcgcctcgcagccctcgcgcggcctgcagtgaccctggcgcctccgggagggcgcagctcagaactggcgacggcgttcttgtgcctggcagctaacacgcccggggtggccacagcgccagcctcagactggagggcaaggggttcccttgagggctgcagttctactcaggctggtggagaactctggcttttggaagcgagagtaaaaagctaatgacgaggaaccgaaaaatcgcgagtgtttcgcgggtaactggggttgagggccaaaatatttggaatgaaggacttggccctatttaaggcagattttacagagcgcacctcaaacgtacaagtcagtaggactccttatttggcgtgacccgacctggccgcggagcctgcatttcctcgcagcctctcagtgccctccagccccgcgaccatgtggccacaatccacgcttctccggatcgcggtgcgccggaaccacggaggatgatgccagttacttgctttaccttttcagggctggctcctgatccactttgggggaggagaacatgagtagataatttcagggtgcagcccaatctgccagacttaaaaaaaccatcttgtgtctttggaggtgctgcttaatatcaaacatgcggtgccatgaagggaccctttgggggttgaataggagttaacccctgcgctctctttgcaactgtctctcttctcagagtggtgggggaaggctgtacgacacgggtggggaaaggaggtgggggcggggagtattgaatggtggtggaagggtagagaggcgcggagtgaaccccacgccctgtctaaagtgtattttcagagccggcccgcctctcctcggttcaaggtcactgtttcctgggcacgcactgggttgcgggacagagtagccaggttctgccggtgctcggagaagagcgcagtgttttgcaagtgctggagtctcctgaggacacgcgcgtcgccgccaccgcgggtgtgggaaagcgcggacgtgctgggcggctgtgcttcgtcaatggcttgttcatcatccagatgtggctactgacatatctacacttcgcaccggagtgtctggaattgtggctatcctgattataggattttaacttaactgaaatgcctgctttgaataaatgtgttgggttttttgtttggttttattttatacttgccatcagtgaaaaagatgtacagaacacatttctctgatctccataaacatgaaaacacttgaaatctcaaaca

SEQ ID NO: 43474 - DNA, 2655 bp, Homo sapiens
gaattccggctcccgcggctgcaggcgcgcggctagagtgcctggcgggctccggcttccgcgtccgccccggccccggtccagacttagtcttcagctccgcgcccgctccgccgcggcccaccgcgcccgccggcagccgagcccccagcgacgcccgcacagctccgggtgcccagacagggggccatgccgtgccggagggaggaggaagaggaagccggcgaggaggcggagggggaggaagaggaggaggacagcttcctcctactgcagcagtcagtggcgctgggcagctcgggcgaggtggaccggctggtggcccagatcggcgagacgctgcagctggacgcggcgcagcacagcccggcctcgccgtgcgggcccccgggggcgccgctgcgggccccggggcccctggctgcggcggtgccggcggacaaggccaggtccccggcggtgccgctgctgctgccgcccgcgttggcggagactgtgggcccggcgccccctggggtcctgcgctgcgccctgggggaccgcggccgcgtgcggggccgcgctgcgccctactgcgtggccgagctcgccacaggccccagcgcgctgtccccactgccccctcaggccgaccttgatgggcctccgggagctggcaagcagggcatcccgcagccgctgtcgggtccgtgccggcgaggatggctccggggcgccgccgcctcccgccgcctgcagcagcgacgcgggtcccaaccagaaacccgcacaggcgacgacgacccgcaccggcttctgcagcagctagtgctctctggaaacctcatcaaggaggccgtgcgaaggcttcattcgcgacggctgcagttacgtgcaaagcttccccaacgcccgctcctgggacctctgtcggccccggtgcatgaacccccttcgcctcgcagccctcgcgcggcctgcagtgaccctggcgcctccgggagggcgcagctcagaactggcgacggcgttcttgtgcctggcagctaacacgcccggggtggccacagcgccagcctcagactggagggcaaggggttcccttgagggctgcagttctactcaggctggtggagaactctggcttttggaagcgagagtaaaaagctaatgacgaggaaccgaaaaatcgcgagtgtttcgcgggtaactggggttgagggccaaaatatttggaatgaaggacttggccctatttaaggcagattttacagagcgcacctcaaacgtacaagtcagtaggactccttatttggcgtgacccgacctggccgcggagcctgcatttcctcgcagcctctcagtgccctccagccccgcgaccatgtggccacaatccacgcttctccggatcgcggtgcgccggaaccacggaggatgatgccagttacttgctttaccttttcagggctggctcctgatccactttgggggaggagaacatgagtagataatttcagggtgcagcccaatctgccagacttaaaaaaaccatcttgtgtctttggaggtgctgcttaatatcaaacatgcggtgccatgaagggaccctttgggggttgaataggagttaacccctgcgctctctttgcaactgtctctcttctcagagtggtgggggaaggctgtacgacacgggtggggaaaggaggtgggggcggggagtattgaatggtggtggaagggtagagaggcgcggagtgaaccccacgccctgtctaaagtgtattttcagagccggcccgcctctcctcggttcaaggtcactgtttcctgggcacgcactgggttgcgggacagagtagccaggttctgccggtgctcggagaagagcgcagtgttttgcaagtgctggagtctcctgaggacacgcgcgtcgccgccaccgcgggtgtgggaaagcgcggacgtgctgggcggctgtgcttcggtaggcgaccaccgcccctggccgcgctccgggctttcacggaaactcccgagaccgggccctgggttcctcctctcctactcggctctgcagtcctactcaagcgggtggctctgggatcctgggggcctgggttgggggctagggagacgccatgtgatggacactccagggacacacagcctagcacagcagcttataatgggctctccggggccatttgcaataacagctgcaattccctggatagacgagttgatttcctccctctgcccctcccccagccatgccagctggcctttgtaagtgcaggaaaccgagtagaaaatgtgaccctccaaatggagaagctgccagctttgccattgtgaaccatggtgaagtgcttggaacatactgttcactcactctaaaggcgctgagactgtgctgttgttctcgtttttatagtcaatggcttgttcatcatccagatgtggctactgacatatctacacttcgcaccggagtgtctggaattgtggctatcctgattataggattttaacttaactgaaatgcctgctttgaataaatgtgttgggttttttgtttggttttattttatacttgccatcagtgaaaaagatgtacagaacacatttctctgatctccataaacatgaaaacacttgaaatctcaaaca

SEQ ID NO: 43475 - DNA, 1696 bp, Homo sapiens
gaattccggctcccgcggctgcaggcgcgcggctagagtgcctggcgggctccggcttccgcgtccgccccggccccggtccagacttagtcttcagctccgcgcccgctccgccgcggcccaccgcgcccgccggcagccgagcccccagcgacgcccgcacagctccgggtgcccagacagggggccatgccgtgccggagggaggaggaagaggaagccggcgaggaggcggagggggaggaagaggaggaggacagcttcctcctactgcagcagtcagtggcgctgggcagctcgggcgaggtggaccggctggtggcccagatcggcgagacgctgcagctggacgcggcgcagcacagcccggcctcgccgtgcgggcccccgggggcgccgctgcgggccccggggcccctggctgcggcggtgccggcggacaaggccaggtccccggcggtgccgctgctgctgccgcccgcgttggcggagactgtgggcccggcgccccctggggtcctgcgctgcgccctgggggaccgcggccgcgtgcggggccgcgctgcgccctactgcgtggccgagctcgccacaggccccagcgcgctgtccccactgccccctcaggccgaccttgatgggcctccgggagctggcaagcagggcatcccgcagccgctgtcgggtccgtgccggcgaggatggctccggggcgccgccgcctcccgccgcctgcagcagcgacgcgggtcccaaccagaaacccgcacaggcgacgacgacccgcaccggcttctgcagcagctagtgctctctggaaacctcatcaaggaggccgtgcgaaggcttcattcgcgacggctgcagttacgtgcaaagcttccccaacgcccgctcctgggacctctgtcggccccggtgcatgaacccccttcgcctcgcagccctcgcgcggcctgcagtgaccctggcgcctccgggagggcgcagctcagaactggcgacggcgttcttgtgcctggcagctaacacgcccggggtggccacagcgccagcctcagactggagggcaaggggttcccttgagggctgcagttctactcaggctggtggagaactctggcttttggaagcgagagtaaaaagctaatgacgaggaaccgaaaaatcgcgagtgtttcgcgggtaactggggttgagggccaaaatatttggaatgaaggacttggccctatttaaggcagattttacagagcgcacctcaaacgtacaagtcagtaggactccttatttggcgtgacccgacctggccgcggagcctgcatttcctcgcagcctctcagtgccctccagccccgcgaccatgtggccacaatccacgcttctccggatcgcggtgcgccggaaccacggaggatgatgccagttacttgctttaccttttcagggctggctcctgatccactttgggggaggagaacatgagtagataatttcagggtgcagcccaatctgccagacttaaaaaaaccatcttgtgtctttggaggtgctgcttaatatcaaacatgcggtgccatgaagggaccctttgggggttgaataggagttaacccctgcgctctctttgcaactgtctctcttctcagagtggtgggggaaggctgtacgacggtccgagttctgtccgagcata

SEQ ID NO: 43476 - DNA, 713 bp, Homo sapiens
ggatgactgaaacacatggtgtaggtatgaaagtgacaccttcattctctgttttgctgtgcacactcatgtcttgaattgaactgaatggatttgagacgtttctgatggtgtaatgtaagagttttggcaaagtcacttaatttccacatgcagtcatgcctagagatgtgctcattgggcttatgagaattagtctttataagacatttcatttaatatcctgacatgagcttacgaggtatcttaacatgctgacaaatttttattttgcttgccttgctaatggtgagcactacaagaggaaaaccagtatgtggtcatcgtcatagtatatagacaggatgcattacagtaaattctcctccctaaggaattttgctaataagtagcagttatattcttgtgcatcatattctctaaaatgcttttgttgaattttttggttttattgttcattgtttatgggttttcaataaagactgatttacattgcatatattctgtagtcattacattacattacatagatattttttgtccatgaccatagtcttacatgtaaggcacaagatagtcacaaaataatttaatgacaggtgataaatacagtcattgatgaaaggaaattgtcttcaaatgttgtgctgtcattgctcacatgagctattgtaataattgtggccattgtaatgagacttggtactgtttta

SEQ ID NO: 43477 - DNA, 1037 bp, Homo sapiens
ggcacgaggagggttctgccctagtgaaggttacaacttaggaggacataggtaattacaatatagtgcataaagtggtaatgtgacaattgaaactagattaatgtttcatttggattttcttacatagatttgtacatgtaagtttcttcaccatatatttattgtatgatgtaaagcaaattgaagtattgaacagcaggtctgaaataacacaaaagagctcatttacctgatcttttgtattgagtaatgagctatcacaattggcatgctgaaatgatgtgtctgtctttatgtgtagtgagccccatgttttggtagatggttttcaaagctgtccaccgtcagggcttctcatccctgtctgtgcatgctgctccacccatcagcagtctaggctgttttcctaatcctagattggactgacctggtgacttacactgactgatgggtagcctggaaggaactgcctgggacttctgggctcaggccttgtctggcagcattcactttctctgtctttggagctagccatcatagtaccctgctgaagagagaggccactgtatgaggcctgaagccatcttggatgtttcagctccactcaagctgaatgcacctgcgtgactgagctcgagacagaccagaagaaaacccacctagctgagttctagccaacccacagaatcatgaggaattttgctaataagtagcagttatattcttgtgcatcatattctctaaaatgcttttgttgaattttttggttttattgttcattgtttatgggttttcaataaagactgatttacattgcatatattctgtagtcattacattacattacatagatattttttgtccatgaccatagtcttacatgtaaggcacaagatagtcacaaaataatttaatgacaggtgataaatacagtcattgatgaaaggaaattgtcttcaaatgttgtgctgtcattgctcacatgagctattgtaataattgtggccattgtaatgagacttggtactgtttta

SEQ ID NO: 43478 - DNA, 981 bp, Homo sapiens
ggcacgaggagggttctgccctagtgaaggttacaacttaggaggacataggtaattacaatatagtgcataaagtggtaatgtgacaattgaaactagattaatgtttcatttggattttcttacatagatttgtacatgtaagtttcttcaccatatatttattgtatgatgtaaagcaaattgaagtattgaacagcaggtctgaaataacactgctgaaatgatgtgtctgtctttatgtgtagtgagccccatgttttggtagatggttttcaaagctgtccaccgtcagggcttctcatccctgtctgtgcatgctgctccacccatcagcagtctaggctgttttcctaatcctagattggactgacctggtgacttacactgactgatgggtagcctggaaggaactgcctgggacttctgggctcaggccttgtctggcagcattcactttctctgtctttggagctagccatcatagtaccctgctgaagagagaggccactgtatgaggcctgaagccatcttggatgtttcagctccactcaagctgaatgcacctgcgtgactgagctcgagacagaccagaagaaaacccacctagctgagttctagccaacccacagaatcatgaggaattttgctaataagtagcagttatattcttgtgcatcatattctctaaaatgcttttgttgaattttttggttttattgttcattgtttatgggttttcaataaagactgatttacattgcatatattctgtagtcattacattacattacatagatattttttgtccatgaccatagtcttacatgtaaggcacaagatagtcacaaaataatttaatgacaggtgataaatacagtcattgatgaaaggaaattgtcttcaaatgttgtgctgtcattgctcacatgagctattgtaataattgtggccattgtaatgagacttggtactgtttta

SEQ ID NO: 43479 - DNA, 425 bp, Homo sapiens
gacttataaacaacagagatttatttcccagagtcctggaggctggaagtgggagatcagagtgccagcatggtcgggctctggagacagtaagtgaggggtgcctcacttactcagcccacagctctcaaccccttgtgggtaggggtgcatgcaggtgagcatgttcaggagccggggcaagcgcttctgggcaccagcaggagcaaaactcagtgcgggcccatggcagcatctgggaggggattatctgtgacccccgaagccccagcgggtgtatgttactgtgggctctttcagctttgccttccgtggatgccttaagtgttcaacagctcactggccctctgtctttttgtgtgaggcagtagctctctgtcagggaggacagagggtcagtgtgacagccttagtgctcccgtggt

SEQ ID NO: 43480 - DNA, 390 bp, Homo sapiens
gcagacataatattactgttagcaatttgtagttatacaaacacagctgagaaacaaaacttttcccgtaaagtggaataaaaacaattacctacctcaaagaagtagtttacaaaatatatgagattactgtagcacctagctcctggtaaatgtttaataagtttcagttgctgataagattagcattatcaccaggatgtcatttctgagaacaggcatttgtgtctcttcattcactgtggtatcttttggcctacaacagtgcctggcacataacatagactcaggaaatagctgttggatagagcagtgctcccaccgagtgtgtggcctcagctaagttcctcaacctgcttctaccatgctttcttcatttgaaaatgagga

SEQ ID NO: 43481 - DNA, 392 bp, Homo sapiens
tataatagattcttgattggcctccttcccgttttccactgtttgatatatatattatgccccaccttccctcaacagtcagttctctttatttatgcatttatttatttttgagacagagtcttgctctgtcacccaggttagagtgcagtggcaccaacgtggctcactgcagcctcaacctcccaggatcaagtgattctccacctcagccttctaagtagctggaactacaggggctcgccaccacacccagctcatttttaagttttttgtagcaatggagtctcactatgttgctcaggctggtctcgaactcctggactcaagcaatccttcagtttcagcttcccaaattgctgggattaaaggtgtgaaccaccacgccccac

SEQ ID NO: 43482 - DNA, 909 bp, Homo sapiens
agaatatctactatagcaatttaaactaatcactggggaaagattcacatgtttattctacaaaaacccgttgaacaacctcatgtcaggcattaggaaaattctggtatgctaccagtgaaacaagatataatcccttttatcaaggaacatactagctctggtgaaaagaggataaacaacaaaaacacaaggaaggcagacaacagtttttatgtaattagtatcagctgtacagacctttataacaaatgcctcaggtttctagagcacttgggagtaaatggaactaagaaggtagacaaatcaatcaaaaaaggaaggaagacaaactatgacattaccaaattactgcattgataatccttccaaatagtcaaaaaaaattaatttatggcaaaaaaccaatttgaatattcatgaatttaatgtaaaagaacattttaaatctatcaaatcttaccaagtatacatttagaaaaaaactgaaagaagcaaaaacaagttgaatctatggacaagagatttggggaaatagccacaagcagggaaaatttgaaggagaaagaaaaataggcaagcaaaagggaaagaatagaagtaaagaaaaaaggagaagggtaccacttccaaatttcacatttgtatcccagaaactctgagttaaaccctgtattacaggaaaatatttcagatggttagattcaaaatgtttatcccttgcaagcaagccagccatttcaatatccaacataaaggcccagcatccagtatgttagtgttattttgaaaaaacacagcaacctctatgtagtcaggtctttggacttcatctgcctttatctagtctcaccccttctgcttttatttttctgagattgcttgaagagacttttcttttattttcct

SEQ ID NO: 43483 - DNA, 422 bp, Homo sapiens
gctgagactacaggtgtgcactacaatgctcagataatttttcattttttttttatagacacggggtctcgctctgttgcccaggctagtctaaagctcctgagctcaagtgatccacccacctcggcctcccaaagtgctagcattataggtgtgacccactgcactcagcttgttttgtatattacaacattttgagcacttcctttgggccacaggctgagctgcaagggggaggggagggtgccacctcccctttgcctgggtctcagagcccagcagcctggaggaggaggatggctcctgagggcggggtccaggctccccagcactgagacctgatcctgtcttccccgggatccccagagtgttctgagtctggggccttgctgggccgtgagccccctggtcgctatgtggcg

SEQ ID NO: 43484 - DNA, 455 bp, Homo sapiens
ggaaaggcgggcaaagctgtggggagcggtggagtggaaggaacaaaggaggtcagtactgggaacgctgaaggtgggaggccatttcataacattacttgttgatgaaattgccatggataccttctttgcccatcagcaggcctagcgtcttggcagtcatggtgacaatgacgttgaaggtgggggctccaccgatgctcttcatacaaagatccgtggtcaattccccatcctgcagcagtgagtccaggaccacagtatatttctggccccccagtgtcagcccattcatgacaaagcttgaccagtctttgccaaccaggacaccaacctcagctggcgtgatgttgaggaaggttttccctgggacggtggcacagatggaaggtgggtccttgttgcccacaatggccgtgtcctaacaggtcccgtccgccacgaggctgtagatg

SEQ ID NO: 43485 - DNA, 404 bp, Homo sapiens
ggattacaggcatgagccaccatccctggcccctttttttttttaattgaaaagaaaaataggactcaattggtattttataagtgaagagcttattacagtggtaaatatttaggggttatatatttaaatccacaagtaatcatatattgaatagaatgaccaatattgtctttttatgatgaaataatgatctttacatacagaacagtaagccttatatcaggcatttgatataatttgtttctaaatagacctatacttaatattcactaacaggtggttcatgattaacgtgtttgcttttacctcctatgcgaatgaataaatgtgttaaggtatgttagagtatatttgagttttacctgggattttaacgtagaatagatttgatactctatgta

SEQ ID NO: 43486 - DNA, 616 bp, Homo sapiens
aagtaaatatagttcaaaattgaaaacttcaattctaaggcttttaccaaaactgacctcattaatttttagttatacatcaaaaatttttatacccataaagaccaacacatcttaaccccaatgaagttctaaatgatgtgagccccttttacgttaacgcatttttgaaagatgaggctttatcaatactaagtatattcagaggaatgtgtacatgctgtttcataatgcaaattttaaaaataactttaaacaatggaaatactgtaacaacaaatgtacagttttccaaagtgactgcataaaaagaaaaaagtactcagatgaaaagatacaattatttactttaaaaatcaggtggatcactttacaattgctggtgctttaggattttttccctaaaaacttaaaaatttagactacattgttatgtagcaaaaacaatcaacgaagaggtaggattaattattatttaaatcaatggcaatctgtttaaaactttttggctctgaagacaacaagtacctttatttataaataattcaccagcctcattgaccaatcctaggtaagtcttcttcaatcaacacagagctaaaataagttggatctg

SEQ ID NO: 43487 - DNA, 342 bp, Homo sapiens
ccaaagtcgctgtgacattgttgggtatcttttcagcaataccccactcccggtaccaatttactatattagtctgtttttatgccactgatacagacatacccaagactgggaagaaaaggagctttaatttgactgacagttccacaggctgaggaagtctcgtaattatggcggagggcgaaaggcacttcttccatggtggcagcaagagaaaatgaggaggaagcaaaagcagaaaccctgataaacccattagatctcatgagacttattcactatcaccagaatagcacaggaaagaccggccaccatgattcaggtacttcccctgggtccctc

SEQ ID NO: 43488 - DNA, 1174 bp, Homo sapiens
ccgagatcatgccactgcactccagcctgggcaacagagcgagactgtgtcaaaaaaaaaaaaaagagaagaaaaacaatttttaaaaccacagctgtttttaaaatatgaattttaaaatagtacaatgtaactactatttacaaagctttgacatggtattaggtagtgtaggtaatctagaggtgatctaggttatatgcaaatactatgccattttatataaaggacttgagcacacacacattttgacaatgtgggtcctggacccaaacccctgaggatgcggagggactgactattttacttcttacagcctgggtaaggttcaacatgtggtatatcatttgaaaggtgtagaaacagccattaagagtttaagtgaccttcctaaggcctgtggtctttccactagacctcaaaactcataccattacattctcgttaatgtaatttgcaaaaaaaaaaaaaaaaaaagattaaatctactcagaaaatgaactgttttgaaaatttggtgcaaaatcacctgggttccttaaatatattatacctctaaaagcctatgggaaagccaacttaaacacactctggatgtggtgtcaaacagcagtatatgggttctcacacaccactataacttgtcctcttcaccttaatcactcgggcttaaaagctttggggacaaagacaggaaacctactctggggaactcttacgtgggaaaccttacgatttatcccattgtggacttaacattaattctcatatacggaacagaatttaaacggtccttttaaacgggacagacgtggcggcaactggcacacgaagtgaccttggccttctaccacctatcctttttagagaaggaacttacaggtacacgcactacattacttcgccaccaacaattttattcgcaacttgctctttttcgtcccacacacagtaaacaccttctacatgcggggaaaaacccccagagtttcacctttgggaaaccacggaatcgtaagaaacatctctccgtggtccaggtcaagacaattcccctgggtagaggaaaatactgtcggggaatacagtggacaaagggtctttcctcggacgcaactgatggcttctcgtgtgggcagacgacgagacctcctatcgcgttctaaacatcata

SEQ ID NO: 43489 - DNA, 472 bp, Homo sapiens
tcagccctgtagcccacatgacactgggcctcacccaaagccatgaatgaattttataagccagtttcttttcattgaaaataattgggggcagcatgccttgggctgacttgaagagcaagatacatcttcatgtactccttaagcagacaagctctcattgaagcaaagcctacccctaattgctcatacttggaaaagaaagaacatttttcaagggataggttctaggtagaaactttgttaagtgctgtctcactaaatcttcatatcttccatgtttctccctggtcacaccagcttgggagaaaactggactacaattaaaaacaaaactcttttttctagctgtattcagatgccttaagtggaaaatctagccccttaaaatgcctcttaaaacgatcttggagttctcctgggaggcagagattgcagtgagctgagatcgtgccattgcactccagcctgg

SEQ ID NO: 43490 - DNA, 841 bp, Homo sapiens
cgtgcaattagatcttcttgactaagaaaaaatgcagacaagcaattactccgttactttaattactctcctaattataacgataaccttgtcacattatcataattccccaaacagaaaaacgcatgctccaaattgcaccaatatttgataattttaccttgttaacggctcactgtcagtatgtagagcactacattttttccccattacctttctattgcacagtctatatttctttgcctcagaaaatgataatacattctgtacaacatgtttgtgttgcacaaccccgtgatttgaatatggctttttaacgtctcgcagtttcagaagctatctcctgagcagtgtgtaattctctcctggctgtttgatggtaatgggagctgtacatgtatctggagagaggagaaccagcctggggactcaagatatattaaagactatgctcatggacatcaattctttcctgtcctttagggcagtattcaggccacacggttcaataacgggaaagaatgtcgtcacatgattgcatcatgttcttcaaaatgaaatctattgaacagtataaacaacaaagaacatcatttgtcagaatgacctgggggaaatagtccagtgaaactaagcaaagggaactttataccgtgagggaaaatcaatggattgtaacagaaccctgcaagaagagacatagctttcaagttccagagacctagaggtgactgagaagcaggatgtaccagaaactgggcttcttgttctacttatctagcgcccttttcacagtgttgtatatgtaaataaataataaagcagtgtgatttttaaaaaa

SEQ ID NO: 43491 - DNA, 785 bp, Homo sapiens
cgtgcaattagatcttcttgactaagaaaaaatgcagacaagcaattactccgttactttaattactctcctaattataacgataaccttgtcacattatcataattccccaaacagaaaaacgcatgctccaaattgcaccaatatttgataattttaccttgttaacggctcactgtcagtatgtagagcactacattttttccccattacctttctattgcacagtctatatttctttgcctcagaaaatgataatacattctgtacaacatgtttgtgttgcacaaccccgtgatttgaatatggctttttaacgtctcgcagtttcagaagctatctcctgagcagtgtgtaattctctcctggctgtttgatggtaatgggagctgtacatgtatctggagagaggagaaccagcctggggggcagtattcaggccacacggttcaataacgggaaagaatgtcgtcacatgattgcatcatgttcttcaaaatgaaatctattgaacagtataaacaacaaagaacatcatttgtcagaatgacctgggggaaatagtccagtgaaactaagcaaagggaactttataccgtgagggaaaatcaatggattgtaacagaaccctgcaagaagagacatagctttcaagttccagagacctagaggtgactgagaagcaggatgtaccagaaactgggcttcttgttctacttatctagcgcccttttcacagtgttgtatatgtaaataaataataaagcagtgtgatttttaaaaaa

SEQ ID NO: 43492 - DNA, 442 bp, Homo sapiens
gctagtggcttcctaaacgtttagtgttctaatcaaataaacttgtatttaaatacattaacacagaccaatacacgcacatagaagcacatgtgtacacatagataggtgcacatgcatgtgtacacatacatcactgtcatagctcttcatgcagaatactttgctattcagccccatcaacacatactttttgaaaatatgctcagcagaggggtacaagcatacagaggactcagaccccagtctcaacttcttcacagtctgatggggacagacttgggagcagagatgctatgatgggggaggctgtgtacattgcagcctgaaaacagagtagaagaggggccctttctccttcgggcccctgggaagactccaggaggtgatggatgaactttgagctggtcattggtgaaagaacatggattagctgagcaga

SEQ ID NO: 43493 - DNA, 373 bp, Homo sapiens
gattttgaaggttagaggaaaggcatcttcaaagttcgtaagaaatttggtacataagctggtattgttgctgactatgaaaaatacagttcttaatatttagttcatcagtattttatttataaattgtgctatacacgccccataaagatttatcataatttttattgctctaaacttttagagattaaaaagtttaatttttagagagtaaagatttagcatcatttttattactctaaactgcctgtaatctcagctacttgggaagctgaggcaagggaattacttgaaccagggaggtggaggttgcagtcagccgagatcgtgccactgcattccagcctgggtgacagagggagactttgtctca

SEQ ID NO: 43494 - DNA, 1317 bp, Homo sapiens
attgttaggttttggtataaggtcataaaatcctgtgcatatgggatttctgaccatttgccctgcctcttgcaaaataggtctaatggcaggatggtgtcataattaaggctaccaagactgcccattgttccaggctgggcagttcataatgggggcagacaatagtgcaaaaaaaattttacattttatctttagagtgtcagggtcaaattgatttccatggttgaggatgtagccaagtgtggaatcaggtggaataggtggagagttgcccatagtggtttggaaaagagaagaggactttgaaaagtggagggctcattaggtgacccaaattttacctggggcatcccccctttagggccccaacttagtctgtcagacatctctgaccttagatgggtgctggcaccactttggaatggttccctccatcactgaggacctgacttaaagtttttctatctcacttaaaacaaccctttaacgctctcaacttaggcaataataaattccttttcatgaattccctccaccaccatgcaccacacagaccacatgcccggaccctctgacttgtgtaaccttttgtgcatagctaggtgggttttctgtcctttgccagttgggtgggagaagggaagaatttagcataaataaaagcagcataagtcacctgaaacctgtgagtttgccctggacgagctgctgctgctaactgcatcacacatagggatcagggattataactgaaaaggacagaaatgagtcttttccctttctgggcagggcagccatccctgttcactccttggccttcagaggataccagagagtggccccagtcagttcccctcaattaccaacgagctactaggaaacggccgctgaaagactgaaaaaggagaaaaggaaaataactcagaaaaaaaaaaaaaggaataggactcagaaaaacaaaaacgaggaaaaggactcaggttcctcaccttaaccaagcggtggcagttaggcacttccacacggaaaccttccagtttcaccagagaatggccctggccagaaacttgcaagtgtctttgtgcttaggtgctgtccactgagggtcctcagttggaaaggaaaagatggagagaggaagatttccctgtatgtaaaaggggaaaggagaaaaagaaatcccaaactttgggcctaccttctctcctggctagctcaccagaatatgttaccagtagagggtcttgactgcaagttgtttaggttcttggcattttgaacaaagacttggaagaaacacccagcaaagcaatg

SEQ ID NO: 43495 - DNA, 1347 bp, Homo sapiens
  misc_feature (950)..(950): n is a, c, g, or t
  misc_feature (961)..(961): n is a, c, g, or t
attgttaggttttggtataaggtcataaaatcctgtgcatatgggatttctgaccatttgccctgcctcttgcaaaataggtctaatggcaggatggtgtcataattaaggctaccaagactgcccattgttccaggctgggcagttcataatgggggcagacaatagtgcaaaaaaaattttacattttatctttagagtgtcagggtcaaattgatttccatggttgaggatgtagccaagtgtggaatcaggtggaataggtggagagttgcccatagtggtttggaaaagagaagaggactttgaaaagtggagggctcattaggtgacccaaattttacctggggcatcccccctttagggccccaacttagtctgtcagacatctctgaccttagatgggtgctggcaccactttggaatggttccctccatcactgaggacctgacttaaagtttttctatctcacttaaaacaaccctttaacgctctcaacttaggcaataataaattccttttcatgaattccctccaccaccatgcaccacacagaccacatgcccggaccctctgacttgtgtaaccttttgtgcatagctaggtgggttttctgtcctttgccagttgggtgggagaagggaagaatttagcataaataaaagcagcataagtcacctgaaacctgtgagtttgccctggacgagctgctgctgctaactgcatcacacatagggatcagggattataactgaaaaggacagaaatgagtcttttccctttctgggcagggcagccatccctgttcactccttggccttcagaggataccagagagtggccccagtcagttcccctcaattaccaacgagctactaggaaacggccgctgaaagactgaaaaaggagaaaaggaaaataactcagaaaaaaaaaaaaaggaattttntaagggggggnaccccttttcccccaaggactcagaaaaacaaaaacgaggaaaaggactcaggttcctcaccttaaccaagcggtggcagttaggcacttccacacggaaaccttccagtttcaccagagaatggccctggccagaaacttgcaagtgtctttgtgcttaggtgctgtccactgagggtcctcagttggaaaggaaaagatggagagaggaagatttccctgtatgtaaaaggggaaaggagaaaaagaaatcccaaactttgggcctaccttctctcctggctagctcaccagaatatgttaccagtagagggtcttgactgcaagttgtttaggttcttggcattttgaacaaagacttggaagaaacacccagcaaagcaatg

SEQ ID NO: 43496 - DNA, 642 bp, Homo sapiens
atgcatttaaagacttcaattaaaagataacaatgcatttttctcagcatattatttcttttaagaagcctctagaatactcaataggttccctgaaacagaaaaaaaacaaaaacaaaaacaaacaaacaaaaaaacgcaaccctggatattataatgcattgtgaatatccttttcaacccactaccaaaagctactatgaatgtaaatttctgtttagcctaaatgcataccaagttctatattgatggaatccaaatgaatgagattttattatagatgaaatataaatactggattatctgacaccacacacacaaaatcaactcaaaatagattgaaatgtaagagccaagactgtaaaactcctagaagaaaacaccgaggaaaggcttcttgacattggtctcagcaatgatgtcatggatatgacaccaaaagcacaggcaacaaaaagaaaaataaacaagtgggactgcatcagactaatacacttctgcacagcaaagaaatcaatcaacagagtaaaaaggcaacttatagaatgggagaaaatatttgcaaaccatatgcctgataagaggttaatctccaaaatatataagcaactcctacaactgaatagttaaaaaaaaaaacct

SEQ ID NO: 43497 - DNA, 369 bp, Homo sapiens
atcactttattaaatcactcgttcattaaatattttagtgcctacctaatgtgctaggtgttgttctaggtattagagatgtgtcagcgagcagtgaacaaaataaataaaaattcccgctctcattctagcctgagagcagatcagggcacctgttcaactgtagggatggccagctgccagtgcaggaggaggcgggcagaggtcagctgctacctccgtaacatgcagctcctctgatatctctgtcccctcatctctaagggaatacttccagggcctgccagaaaacatacagagtacagctcaacttggagattgctggtataatctttacttttttttccagaactacctaataattcattg

SEQ ID NO: 43498 - DNA, 254 bp, Homo sapiens
gagccaggcctgtgctgtgagctgcctgggccccacggagcagctaggccccaagggaggccccagagcacagcagccaggggtcagggggaggcaggcagcagcctaggcctggtggggggtgggaggctctgaagagccctgagggggttcaatagaaacatgggtctacactgtgccctgggaagggagccccagactgagcacaggtctggacgctacagaccctcctttcccagcccttctctggcccc

SEQ ID NO: 43499 - DNA, 448 bp, Homo sapiens
attcaactttctacctgtcaaaagaatgtgttcatcctggccaggcgcggtggctcatgactgtaatcccagcactttgggagactgaggtgggcagatcacttgaggtcaggagttcaagaccagcctggccaacatggtgaaacctccatctctactgaaaaaatacaaaaagcagctaggcgtggtggtgcacaactgtaatcccacctacttgggaagctgaggcaggagaatcacttgaactcaggaggcagaggttgcagtgagaggagatactgggcaaacttggtgatgaattggccacagggtaagtgtcagagggcaaagggtgaatgccttatgactttcttgggcagttagaatcttgggccagctttctctgagagcactttcactgtaatgcttgcagtgtacttctcctttgccattggactgagtgttcctc

SEQ ID NO: 43500 - DNA, 418 bp, Homo sapiens
attgctcagaagtcctaaatgttaaacattgatgattactatatatgaacatcataacagtagccacaaccaagaagagaacaactccaagatgctaagaagcacagtgaaggttatttgcttatgaaaagcataattttagcttgcaatgctatttgttcacatactttagttgtctggctgccatttaaacatatagattagctaaggagatttatgacagcagcctatccagtattaactttcagcattttatctggtacccaaataatatttaattataataacctggctgagattacatgcataactttgatatctcagcacacccagttctgctcctgggactatggtacacaagcagtatcacccttaggtctaagaaagaggggaccctgccacaaaccctatgtttcag

SEQ ID NO: 43501 - DNA, 612 bp, Homo sapiens
ttctggatcgggctcacctacaagaccgccaaggactccttccgctgggccacaggggagcaccaggccttcaccagttttgcctttgggcagcctgacaaccacgggtttggcaactgcgtggagctgcaggcttcagctgccttcaactggaacgaccagcgctgcaaaacccgaaaccgttacatctgccagtttgcccaggagcacatctcccggtggggcccagggtcctgaggcctgaccacatggctccctcgcctgccctgggagcaccggctctgcttacctgtctgcccacctgtctggaacaagggccaggttaagaccacatgcctcatgtccaaagaggtctcagaccttgcacaatgccagaagttgggcagagagaggcagggaggccagtgagggccagggagtgagtgttagaagaagctggggcccttcgcctgcttttgattgggaagatgggcttcaattagatggcgaaggagaggacaccgccagtggtccaaaaaggctgctctcttccacctggcccagaccctgtggggcagcggagcttccctgtggcatgaaccccacggggtattaaattatgaatcagctgaa

SEQ ID NO: 43502 - DNA, 652 bp, Homo sapiens
ttctggatcgggctcacctacaagaccgccaaggactccttccgctgggccacaggggagcaccaggccttcaccagttttgcctttgggcagcctgacaaccacgggtttggcaactgcgtggagctgcaggcttcagctgccttcaactggaacgaccagcgctgcaaaacccgaaaccgttacatctgccagtttgcccaggagcacatctcccggtggggcccagggtcctgaggcctgaccacatggctccctcgcctgccctgggagcaccggctctgcttacctgtctgcccacctgtctggaacaagggccaggttaagaccacatgcctcatgtccaaagaggtctcagaccttgcacaatgccagaagttgggcagagagaggcagggaggccagtgagggccagggagtgagtgttagaagaagctggggcccttcgcctgcttttgattgggaagatgggcttcaattagatggcgaaggagaggacaccgccagtggtccaaaaaggctgctctcttccacctggcccagaccctgtggggcagcggagcttccctgtggcatgaaccccacggggtattaaattatgaatcagctgaaaaaaaaaaaagtcgacgcggccgcgaatttagtagtagta

SEQ ID NO: 43503 - DNA, 491 bp, Homo sapiens
agaccgagtgcaacagggctgccatcttgggactgcctgggctgccatcgagccctgctctcttctgcttccttccagcccaggagcacatctcccggtggggcccagggtcctgaggcctgaccacatggctccctcgcctgccctgggagcaccggctctgcttacctgtctgcccacctgtctggaacaagggccaggttaagaccacatgcctcatgtccaaagaggtctcagaccttgcacaatgccagaagttgggcagagagaggcagggaggccagtgagggccagggagtgagtgttagaagaagctggggcccttcgcctgcttttgattgggaagatgggcttcaattagatggcgaaggagaggacaccgccagtggtccaaaaaggctgctctcttccacctggcccagaccctgtggggcagcggagcttccctgtggcatgaaccccacggggtattaaattatgaatcagctgaa

SEQ ID NO: 43504 - DNA, 460 bp, Homo sapiens
tcacctgctgtcgctagtttatatgactttacatttaccactcctgccaagagaaaggaagctttgtgattgtgccccgtcatagttaattgtacaaatcaattaaaaatggtatgtaagcatctggctcacacagcagctctgaattctgaatgaaaagataacccatgctaatgtatatgttgcatgaacaagtagatgggtgttggaaagaaaacactgatagtcactctgggtgaagggggaggcctggccaatgatttgtatctgagaaacattttgagattatttatatgtcttctgactgccctttgctttgtagctacagcaacttgcagaacctggcattattgcagagatgaaggtatagttgtataaagaatattggattaaagttgatgaggcctgtgttctgatatcaaatcttccactaatgagctctaaaatgaatatcaagtca

SEQ ID NO: 43505 - DNA, 195 bp, Homo sapiens
gataaatttaataaaactctaaaatgttaacccaaagatctctaaaaatatttgaagtgatttacaagatatgatagataataataacacagtagagactaaagaaaagaaaattgagtagcatagaaaacctggataagcacatcactgaggttgggtattaaattggtttgagagcttttgaataactaggtg

SEQ ID NO: 43506 - DNA, 445 bp, Homo sapiens
agcctggctgacatggtgaaactctgtctctaccaaaagactttaaaaattaggtgggggtggtggtgtgtgcctgtgttgtccccgctactccggaggctgaggcgggtggctcacttgagcccaggaagttgaggctgcagtgagccatgatcgcaccacggcactccagcctgggtgacagggagagatcctatctgaaaagaaaaaaaaaagaaaagaaaagaagacaggtcttcctgggagcacctagacaaaggcctttgtaaagatatattacaaaggaatatttctagttgcctcttttcttcaaaatcacagtcaagtaagctgggcatggtggctcacatctgtaatcccagcagtttgggaggccgaggtgggcagatcacctgaggttaggagtttgagaccagcctgcccaacatggtgaaaccccatctct

SEQ ID NO: 43507 - DNA, 378 bp, Homo sapiens
aaaatcccaagcagaaaattcagtcattcaagagaaaagtcattaaagaaaaaggaaaaaatagagaacagaaaagcagacatttagtttttccttaggcgtgacaaagcttaacaaacagtcagttctgcagaaatgctcccagttttcctggtgtcccaagccctcgctctgtttggagactaccacagcctctgtacttctcagctttgtgggtctgggaggcacttttgcttcggaattggggtgaaggctttctaggtcctgattaacagaatctgaactgctcccacctgtcttccctgcagtcctccacccagcagccagggggaattgctttaaaactccaagcctccaagcagatcatgtcgtctcttg

SEQ ID NO: 43508 - DNA, 1102 bp, Homo sapiens
aaatggtaaaagctaaaaagctatgttttctaattattgagattgccacgggtgtcaataagatgtaattaaagatacaggccaataatcacatagcaagaaaataggtccaaaatcaaataaaactggaaataattatgttttttcattagtgaagaaattgtatagtacattaagatatgtattgctaaacaaagccggaaataaaatataaaccttaaaaattgttatccatttcttctcctcccacctcactttaaaagaaggaggattttttaaagatgaacttccgaagagactccaaattactgactttatagtaatttctttaaaaatgagtataaatacaaagcaaattttggtgatggtggtgaaagtgtgaggttagagagaagagagtccaagcaattttaaagaaatataaggaaataaaacactcagatcctaaaattacaatctattcctcctttgatagatgcttaaaactgttctctttacctcttgaggtataatattgatatttaagaaactatgtactcttaagaagtagttgagtgctatggtaatctgcatcatgaggacctaccacagcaagtcctgaaagctggaaggaggcaaaggcttccccagcctccaactatagagagaggggtcaggtgggcagccagcattaagtaccacttctctggaggtgctgcaccccctacccccctgttcaggggcatttttagcacttacagcctccctcctgagacaggagagaaaggagaaggtggttctaacagtcctcaccattctgtggaaacaatctccagagaagcacatagctccttctagaccacgaggaatattcctgtgaagaagccagaaacggtttttaggcaatacagccttgggggctgcatcttcacttagtgtctttgtctacacccctccacaaacacaaggaaagaaagcaagtcaggccgctcttcagagccttgtccttaactcaccttcagtgaactcactttctaaagatggagtcgagccctacatgatttctaacaaaggacgcatttagggttgccagctacccaggtttagcctgggccgtctggga

SEQ ID NO: 43509 - DNA, 272 bp, Homo sapiens
gatttttgtatttttagtagagacggggtttcaccttgttggtcaggagttcaagaccatttagtaactccattttacagacgaggaaatgaaacccagcaatgataaaagaccaggtgaaaggtcacccagctagtaagtggcagaggcaagaggtgaactgaagcctgtctcactacggagcccgtattctcatgcgctgtgtgtagtgcattccagactgcattcatcttggtatccctacaacacctaaaaaatcagcattatattat

SEQ ID NO: 43510 - DNA, 969 bp, Homo sapiens
gtgcaacaagaaatcatctgaaggagtaaaacttactggcaaaagtaaatacacagacaaattgagaatattttaacactgtagttctggtgtgtgaacccctcatatctttagtgtgagcactaaaatacaaatctgtcaagaatgatgactgaatagctttttaggagatatataaaaagatataaagtgagacaacgaaaagaaaaggagtgatgagttatagtgtagagatttttagtttattctttgcttatttcttttcattgtgatcaaagtcaagttgtcatcagtttaaaataacttgctgtaactgtaagatactttttatgtctcatggcaaccataatgcaaaaatttatagtagagatactaaaaacaaaaagcaaaggattaaatcatactaccagagaaaatcacttatccacaaaaaagggagtaagaaaattagagaagacttagaaaacaaataacaaaatggaagtagtaagtccctaactataaatataagatttaatgtaaatggatgaaattcttcaactaaaagacatagagtagttgaatggattgaaaaaaaaaaagacccaactatatgctgcctacaagaaaactcactacacctataaagatgtacagactgagagtgaagggatagaaaaagatatgccatgcaaatgaaaaccaaaatggaacaggtctagctatatttatatcaggtaaaataattatttttaaataatgcagtttttcaagttaaaaactaaaaaagagaaagtaattatataatgaaaaaagtcaatttagaaagatgtaacaattgtaaatatatatgaccccaacattagggcacgcacaaacacataaagcaaatattagtagatcaaaaggatagacttcaatacagtaataccagagaacttcaacacctcatcttcagcaatgggcagatcattcagagaatacattaac

SEQ ID NO: 43511 - DNA, 548 bp, Homo sapiens
gtgcaacaagaaatcatctgaaggagtaaaacttactggcaaaagtaaatacacagacaaattgagaatattttaacactgtagttctggtgtgtgaacccctcatatctttagtgtgagcactaaaatacaaatctgtcaagaatgatgactgaatagctttttaggagatatataaaaagatataaagtgagacaacgaaaagaaaaggagtgatgagttatagtgtagagatttttagtttattctttgcttatttcttttcattgtgatcaaagtcaagttgtcatcagtttaaaataacttgctgtaactgtaagatactttttatgtctcatggcaaccataatgcaaaaatttatagtagagaaatttaacaaagagattgaaataattaccaaaaaaaaaaaaaaaaatcaaacagaaatcctagtgctgaaaaagacaatggatgaactgaaaaatacatcagaatataacaacagcataattgactaagcagaagaatttgttagcttaaatacaggctattgaaaatacagaggaga

SEQ ID NO: 43512 - DNA, 586 bp, Homo sapiens
ttaggggatatgaggtatgatacctgcaaccaaaataagctggctgttaagtgctctctccttaactattgtccaagcaatgtacatcactcttgcctagatgagtgaccatacttttttctttgctgcttggtttttctatcactaaaaagcaaatttaggtggaagatggatgggtaagtcctttgtccttgtcaaaagaatttagaaagggtaaaggtggtgggatttgaattcttttaaacggtttattcattggaaaggcaagtgagtggcagttgactgtagaatcttgggaatttttgaaggaatttaagagctgtacttattttaaataatgaggaaacaatcagagagacttaaccagggtggcaactatggaagagtgggggtagaatccaagtctacagttctacggcactgctttgtttattttttcaatcaagcacacatgagggattgcttaataaattcaagagttttctatatagtttgggattactacagacacaggtactctagccatgtgactatttcagattagtgttcccattgctctccatcctatttttcatatctaaatgtg

SEQ ID NO: 43513 - DNA, 268 bp, Homo sapiens
atgcatggaaacaaggggaaatgttgaacccagctgggacaggcagtgtcagagggctgttaggagagctggatccagcatggatgcatagcagagaggccagatgaagaaatttctggtcgaggggtccaggatgtatggagtaaatacctgggcctaaccagtggggaaaggattggcctaggacccaggggatgaaattagaggctacctgacttattaaatgctgggaagcaatgattaataaataaaagtttacttgaactgt

SEQ ID NO: 43514 - DNA, 365 bp, Homo sapiens
ggtgtaaatctaggcagtctttaacaaaattggtgcttcatgtgtttaagaggcataacttaagaattgtttgtttcttataaatcaggagaatggaggtttaatagaggtgaactgtctttctcactgcagaacctttaatatgccactatgcattgtaaatctcccaagagtgagattctagtatgatgcttttcttttccttttctgttctttccctttccctctacctcctttttcttttctttgttggtggcatgagtcctatattataaggaaatgcttttagagtacagtcttctgatatatagtgatttttgaaaaagatttatttattgtcttgttcactgtgagctttttccccc

SEQ ID NO: 43515 - DNA, 425 bp, Homo sapiens
tggtgaatgaaaataactagtatttcaatatgtctctactgtaatacaatatgaaaatatctgtgatttctattggtgacaaagtcacaagcactactaatactatcgtgggttttcttaccaatatgcatgatgaaagaaaatactgaatttcagttagaggtaatgcataccaaggatgtgatttttcccacgtaaattcatgaaccttctacactctatccagaggctccttgggctccatggactctatgtgaacatcctctcatgtctctgttctagctcctactttaatgctttttccttcattatatgcattgtgttccttcattctgttctcctgcagacacttattacagagctatgatgtgccaggcaatacccatcctgtatgtcatgtagtccttgaaaacttcctttgaggt

SEQ ID NO: 43516 - DNA, 418 bp, Homo sapiens
ttccttaaattttaaggtggaaggagatacagtcaccttctcctttgaaatgagaagtggccgtgaacacaacactcctgataaagccatgtggggtctttgcttgcacagttcgcgctcaggtacttgaatctaaccactgccgtggacaaaatgtactatctgctatgtgccttgattacatacagcatatttgccttggaaacagggcagaatatgagtcactctttcatctttctcttctagttggcactagtcaactactagcagttagtagtacttttacagaataaaactagccatgacctaaaatcaactcagcagcacagaaataaatctattgattggagctccctcttcaaagtttggggaggtgacctgaccccagcatctttccacagagcaaagaccccaaaag

SEQ ID NO: 43517 - DNA, 399 bp, Homo sapiens
ctgtgtcccctagcagtgatactcgatgctgctctgtagaaccctgtggttggggacagtgcagtgtggggcagcacaggtagcagcctctgccagtgtacactgaccagtgtggtttacccctgtctgcattgtaggagtcttcggaggatgtctcaggaggcttgccctttctggtagacctggctttaggtctgtctgtgttagcttgttccatgttaagaatcctgtacaatggaccagaaattaccaaagaagaagaagcctgtcaggagctattgcggtccaaacttttacaaaggtgccagtggcaggtggaggccaatggcgtgatctcccctgcccttactccgagcccctctccactgcctctgaccatagaggaagacagagaattca

SEQ ID NO: 43518 - DNA, 384 bp, Homo sapiens
ttccttaaattttaaggtggaaggagatacagtcaccttctcctttgaaatgagaagtggccgtgaacacaacactcctgataaagccatgtggggtctttgcttgcacagttcgcgctcaggagtcttcggaggatgtctcaggaggcttgccctttctggtagacctggctttaggtctgtctgtgttagcttgttccatgttaagaatcctgtacaatggaccagaaattaccaaagaagaagaagcctgtcaggagctattgcggtccaaacttttacaaaggtgccagtggcaggtggaggccaatggcgtgatctcccctgcccttactccgagcccctctccactgcctctgaccatagaggaagacagagaattca

SEQ ID NO: 43519 - DNA, 482 bp, Homo sapiens
ccttagataaatacttttctttttccactcttattcatgagccagatctttgtcttagagagcccataatggttatgcagagtgggcaatagtattttcaaaaagcttagtaaatgtaggcagtttctttagggttaatcatctttcaaagggccttaggaatgtccttcaaacagaatataaatgtcaaagagaatatctctttctgtttgaaattatttgggcaggttgaaagaatttgataaagggaaattctatatttaatctttcattgtaaattatatgtgcaatgaaagagtttaaacatttttggagtttgctgtcttaaaggcctttctggaatgtaaggaaacccagcagtggtgtctgctaaatatgcgaatgtagttcttaacttctttgagactgctttttatctgaaaatgggagtgattcctcctaccacctcacatgtttattgtgagggttaaatgagatactga

SEQ ID NO: 43520 - DNA, 511 bp, Homo sapiens
tttatattaataaattattataaattaaatttaaaaagtaaacaacatgctcctgaacaaaaatgcatcaaagaataaattaaaagggaatttttttaaaatcttgagacaaatgaaaattgacatgcaacataccaaaacttacgaaattcagcaaaaacggttctaagagaaaagcttttagtaattaatgcctacattaaaaggaagaaagatcttaaataaacaacataactttacctcaaggagctagaagaagatttaaaaaacccattgtagaaggagataaataataaagattagaaaagaaacaaatgaaaaagagactagaaaacagtaaaagaaaaaaatcaatgtaagacttgggtttttgaaaacataaaacagaatcaacaacttttagttaaactaacaaataaacaaagagaagcctcgaaatcagaaatggaagagaagacattgcaaacaatatgataaaactgcaaaggatcataagtgaccactaagaaca

SEQ ID NO: 43521 - DNA, 631 bp, Homo sapiens
ggtcagcttgactaataattacttgtcctgtctgtccctggattgtaagcctcaaggagatgaagactacactttgttcatttttatacttcccttctccccagggccaactacagtagcttgcatcaatatgttaagctaacatttcttgcgtctttaccatatcaagccacctggctggtgttgcaggtagcagacactcaacaaacacccactggattaaagtcagtcagggtggcatggacaagtgttccctggacctaatgatgttcagatgagatgcccatctatcatctgtgtttgcagagctgagacagcagagttagactcatggtggcatccatggtgaggcaatgaatgaatctcagcctagccttttacaaaaaaacttttacatgaggcataatttctcatttaaaattaaatgacattaattaataattaaatgacataaatagaaaacaaaaaaaagcactggaattaataagcaaacagacaaatccacacacatacaacacagtttttcctctttttaaacaattaattaagttgacattcctctctcctcttttctttctctttctttctttgagacagaggcttaactctgtcgcccaggctggagtgcagt

SEQ ID NO: 43522 - DNA, 421 bp, Homo sapiens
tttttgataaaaatttaaaaattgagctccaaaagggattcaccaattaatatttccatcatcattatgcagaagttgctatttactcacatccttaattatagaggaaagtatcaatgaatgtttaccaatttaatgactcaaatattttcatatctatatttctccattattagtgacattgtgcacttttacttatgtgtattgacgatttgtacttttactctgtgaatttctttttctcttctttttttcaacttttattttagaattggagagtacatgtgcaggtttgttatgaagttatattgcgtgatgctgaggtttggagcatgagtgaatctgttacccaggtactgagcatagtacccaataggtagttttctttctaccttgcccccaggagtccccagtatctatt

SEQ ID NO: 43523 - DNA, 536 bp, Homo sapiens
ccattttatcctcaaaatatccctattatataattactattcttatactcttcaaaatacatattttatatatttattaactcaacaaatatttattaaggatctttggtgttctggggactagggagtctttcttaaacaagactaggtcctgttttcttgtagttaatattctgttcaaaggtgtgtgaggaaaagacagcgaaactgaaacattaaaaggtataaacttgcctaaattcacacaggctatagatggcagagccagcgctgaataccaatctgcctgacccggaaaacgacactcctaaaagtcaaattgcagatttcattcttcctacacaagctctgcatagaaatttattttttaggcaggcaagccaacttcttgtgcatggagaagttcaatatgccttaagtaaaatatcagcttattctcagaggtggaatggtgcttttaagaaaaggctgtggtgacaccttatagtcattattagattaaaaatatattatctttagagtaaatagtagttgga

SEQ ID NO: 43524 - DNA, 646 bp, Homo sapiens
agagaaggcttacaaagcaagatggctgccactgagatcagcacactggggtttttaacagaaacctattacttgatttactgggagtggtagaaccctaaagaagcggtgaacatccaacactgaaatttgagctggctcttcctcagaaaggtttcagcggcttaatctcatgcaatcttgcaacattcctgaattcaaacccatgaagtagagagtcagcccgagaccctcttcagaatccaccgagtctgctgggcaggaagagctagcttgttgagttgtcctgctgcaaatgaaatagtaactttctcagaagcataggatattgaaagattcctttaagaggccaagtcctcaaaggcatgtatgcaacgtgaagtcatgggggcaggccttcctggttccaatgcatgttttcacagggttgtgtctctatgcttgaaggggagctcttgggcctatctgagggatcatttaccacttgctgtaggaaagtccagtggaaatcacttctagtggtgagtcttggccaaatatactcctatgtagaaggcctgtgtaggaggttatgcttggaacagttgagtagatgttctggcaacctgtgatggccttactaagtcatgacagtcagcaaaaaaaa

SEQ ID NO: 43525 - DNA, 915 bp, Homo sapiens
gtaaaaggtacattttactatttcttagcttttatctttgaagatgtctgggaactcctgagctcaagtgatcctctcacttgggcctcccaaagtgctaggattacaggtgtgacccaccgcacctggccctggtatacttttaagaatctcaacaattacatttgaaggtacaagcacaaaactgcagaacatacaacatatacacatgcatacagcaccttgccttaatggtagttcagtacctgatgagtaggaaacactatcaccatatttgctcagctctaaggtgtgtacattaccatattttaacatttctgatattcaggtgcgtcttacttttgaagaatttttaagctactgttaaagtggaatttatacttaacaagatttcagaatcaagtcagtattgtaaataagtcagtctgaggggctttgcgaaacctgaagttttgaagttacctttggatgtcttaactgaaaaaaatgtaacggctgaagtttttttcttcttaaaatttcagtttttgtagttgaaaactgtagaaatagaaaacaaaagccacattgttaggaaatgacaggtcttctaattttagtctttttttttttctttttaaaatttcctgttatcttagctcagagctgggtttcagtctccagttttctagctaatttaaccaatggcagctttttgtttgtagttttattacggcattgctaatcctcattatatttgtcgtggccttgagcaaaaaactcaattgatgacattcacctgtttatagtcataaccatttggtaaataactttaatttttggcaaagtagcacctgaatttctctcattttaccagacaggtctacatttactttggggtaaagctatttatttttcatattgctagtttaaaaa

SEQ ID NO: 43526 - DNA, 1071 bp, Homo sapiens
agatattggctgcaagccattccaggaaagggatgtgaccttgaatgagatgacttttcttagctgaggcaattctcaaagggagctgtcagccagtagccttgcagttggacagatggcagcacagcagagcatctgggacaggatgtgacctggaaatagcattgatatggtttggctgtgtccccaccccaatctcatcttgaattcccatgtgttgtgggagaaatccagtgggaggtaattgaatcatgggggaaggtctttcccatgctattcttgtgatagtgaataagtctcatgagacctgacagttttaaaagggggaatttccctgcacactttctctctttgcctgctgccatccatgtaagacgtgacttgcttctccttgccttctgccaagattgtgaggcttccccagccacgtggaactgcaagtccattaaacgtctttcttttgtaaattacccagtcccatgtatgtctttatcagcagcatgagaacagactaatacaagggtaaaccacttccattcacccctcattatctagaatgtctagaacagccaccatagttgccacggaggctgggaaatacagtctctagctaggaggccctatgcctagctagcactaaaaggaagaagggagaagggatactggggagcaatcacaagagggaaggaaaatcattctttgatttgttcagcttattgactgttgtagatcaaaaaccacttcattgaggaaagcaacccaccaaacacagaagcagaaagagagctaaaaatgggataagaacaactgagaaactgcttatccagtaatatattttaaatagtgaggactacaccaaacttaggtaggcttcagaatgagccagggacaactccccagaactctgcaggaaggggctcctgaggacacacgtccaacctgcacctgaaaccccaagtcacaaggacaactgatatttagatgcttttcttcctaagacctgctacatatcagaaaaagtcacttaaggtaaaagataaaatatgctgagaaacgattctgtttcttaaa

SEQ ID NO: 43527 - DNA, 303 bp, Homo sapiens
attttattctctggatgaaccataacttgagcatttacattgttttaaatttttccagttcgtaattaaagttacagtaaatatatttaagcataaagctggatttttccccttctccaataaatttcacattcttcccttaaaattggtttattgagtcaaaacaactaaatatctttaagacttttgatacagttgaattttctccacatttatttgaatactaggaaataaaatatttgttcattttattagctggttttattttgtgatttatccattatttgattttacattggattt

SEQ ID NO: 43528 - DNA, 387 bp, Homo sapiens
tttccagcaccttcatgccacttcacagtcaatactacccacccccatgggtaagcactattccaacttctatcagcattcattagatttgctgtaatttgttcatttaacaatttgtcacattttccgtattacattattactcattcttttttttttttaataatttgagagtaggctgactggactacataatttggaacttttgaccccattaccttcagtcttctctttgattttattttgctctgtttaacaaattgttttgggctgagcacggtggctcatgcctgcagtcccagcactttgggaggctaaggtgagaggattgcgtaacgccagaatttgagacaagcctagcaaaatagtgagaccgtcgtctctaca

SEQ ID NO: 43529 - DNA, 1073 bp, Homo sapiens
gtctattcttaatatgacagccagaatgatcttttaaacatgaaagtgagatcatattactccttgtgttcccattacaatggcctttgagagtgatcagggccccctttgtctctctgaccttattgcttattctcttgatcactctgctgccgctacgctggcctcttccctgtccctcaaatgtgccagacatgcttccatcttagggtctctgcactggctatttcctcaaatgtcatctcggtgaggctaaccctgatcaccctacctcaatacacccaattatttttactccgctttttctttccgtaggagttaacacctcctaacatttacttctatcagtttcttatgattaactgtgttgtgtattccctcccattagaatgtgaatatctgaaagacacttacagtttgaaaagtgcctggaacgtagtaaatgttcaataaattgcacttcattgatatttattggcaacataacattattaccactcctcagaagcctgccacatcttccctatcatttatacctctccccaagcctgatgtttttgtttcttgtcttaatatagagacaaggtcttactttcacccaggctggagctcagtggcatgatcatagctcactgcaacctgtatcttttgtgctcaagctatcctgctgcctcagcctctcaagtagctgagactacaggattgggctaacacacctagctaaatttttatttttatttttttgtagagatggagtcttgctgtgttgcccaggctggtcttgaaactcatgacctcctgccttgacctcccaaatgatcctcctgctttgacctcccaaagcactgggattataggcatgaatcatcaagcctggccaagtctgatggtttttaaagttgtttttagtatgattgaatatgattctcatacaaataaaggtctgctgtatagtagtaatctgttgcgtagaactttgttcttcaggtgaggtgtgagtcacatccttttatcttgtttgttttttttccccgccccccgcccccccagtatagtcatgagcagtccacaaa

SEQ ID NO: 43530 - DNA, 374 bp, Homo sapiens
tgtatttttagtagagtagcggtttcaccatgttagtcaggatggtttctatctcttgacctcgtgacccacccgctttggcctcccaaagtgctgggattacaggcgtgagccatcgcgcccggccaactttttaactttttgtagagacagggtctctccatgttgcccgggctggtcttgaactcctgggctcaagtaatcctcctgcctcagcctcccaaagtgctgggattacaggcatgagccaccacacctggccaatacataactattaaaagaaaaaaatgttggcttgctttttaaaaagagctaaagaggtcttgtgtaaccattagtggtatgcagagtacattttggaaaacactgcctga

SEQ ID NO: 43531 - DNA, 362 bp, Homo sapiens
aaaacagtcttcaggtcagtgttagcgtcccttgcttttgagttgggaatttcttcagcgagaagcgtttattttcttgaaagttgccacatatgggcttctgtgttctgaagaaaaaaagacagtagcagtcactctatagttgcatgtgtttatgctctggcccagatctgacctcaggttatccacccgcctcggcctctcaaagtgttgggattacaggcgtgagccaccacgcccggcccatgttttcttaatatgattcttgtgaaagtcctggttgaacttttggaggtcattatcttgattgtgaggatggtgccatgggtgggtacatatgttaaaccttatccaattgtaca

SEQ ID NO: 43532 - DNA, 1641 bp, Homo sapiens
gaagttattatatatgttgttttcttgagcaacagttacactaggtagaaaagtattcacacaataatagtgggctgggcagacaacctttgggcagtctcaaccttaatccttgggtacagcacctgaacttaattgatgagaagtggaacttaagtggtttccctggtgctgttcattatggaaattttatgctggatttatcgatgtcattcttaatcttttgatactataaaggagtcttaccaactggagaaaatttgcctacatgctatatatttgaattgtgtccaaagctttgcagaaaagcaaatctgaagttattatatatgttgttttcttgagcaacagttacactaggtagaaaagtattcacacaataatagtaatgcaaaaaaagtgagctacttggaaagtatcatctctgttcaggtaagtttacttcagtgaactcttgtgtggttagcgataagttttaaagtccaggatagcctcatgagcataggccttcctatgaagtagtgcaaagggggccgattttagtggattaccctatcagtgttcttcagtatgtccaattgttatcataccaaaaaccttaattacataacattgtgtggatgaaatgctgcatcttcagttaatacatgttttgagcacattcttaaaatacataataattaaatgatccctattcaaaagaaccctggcttgggtggaggatccactctggctaacggataagagtgatgaacttctttgttacctgacccttctcttctggaaaagtgaggtgtacattaaacatcttttggtcaccgtgcctcactaagacctttcacattccagcttgtccgactagtgtaatgtacctctcacttctgttttacgttgagcattacgaattaaaatctttacagtctagggggaaaaaaaggcttcaataccagttggcttatgaggctctgcatataattttctctaaaatatgtaactattttgtagtctgtggggactttcaaagccaatttttaaaattagtagtagtaaaggtttttccctttcctgaatgaaaaatcagaaattctaatctttgctataaagtacttaaacacaatacattgcctcagcataaataaaaacatttttattaagatgatttatgaacatggatttctaactggaccaacactaatgttgcaacctgataaaatttgagatgtaaattcatttcacagactcataaacacactctctttaagactcttctttaaatggatccttacattaccctgcctgttttattatgccttcatttttgtggttttcattcactcctgcttgcttctattgaggttctcctacatttcccagaaactcagtgaatatcttgccttttcttcaaacaaagggggtttttataaagtttgtatttttgaaactagctctatgtctatctaaaaatcaagtctcggcagtggctcatgcctataatcccagcactttgggaggccgaggagggcagatcatctgaggtcaggagtttgagaccagcctggccagcatggtgaaaccccatctctactaaaaatacaaaaaattagccaggcgtggtggcgcgcacctgcagtcccagctact

SEQ ID NO: 43533 - DNA, 3078 bp, Homo sapiens
ctcaaccttagattttccttctcagtgtccttctagaaagtgccgcctctactaaatgatttcatgttatttcctcaggtctagagctatttgatttccaaaattctatactcactcttctgttctcattcccggtcatggctcattttccctcagcagctaatgatgctaatcatgtatctaccccccattgtcacaaaaaagagagatggaagagttccttagataaatacagggttagcaaagaaaagtttcattatctcttaagaattactccaagatctggccaggcgtggtggctcatgcctgtaatcctagcactttgggagtccaaggtagacaggtctcgatctcctgacctcgtgatccgcccgcctcggcctcccaaagtgctgggattacaggcgtgagccaccgcgcccggcccactactggtttttaacaggatgattcaaagtacagcccgtgcacatttacttcgtcacctggtgcaccacactgtcttcatgttggccctcgtttcttgtatacttagcttactgcccagatgcaactgagaaaatacaggaaaagcaggtccaaattcagccttcgacttctgcaaaagtccataaacagaaagtctgtgagcctccaccctgccagaaagaactcttcatgaagaagtcacgtatttgctcttcctttcaaaggatggcattttaatgttgctttgctgccagatgttcatctgcttgctgtgaagtgattctttttttaaaatgttttttaatggatgtaagttttctaaaaggcagggctgaaatggagaaccaagaatttgcttggtagaaaaattatttttttttaatttcagacttatcaaaaatttggttgagggaatttttattagctgccctgactttataatgctacgctcttaacagtgccaaaaatcctacatagttactgacaaatgtgtgatctttttacagtcacaacacctgctgcccggaaagcacaccgtccacgtagaatggagaaggcagaaagttaccgtgtgttcccactgtatctgcactgttcttacttcctcttgtcccttttcatatcttggtctattcagccttaacatttcaaaggcttatagtaaaataggaactgaagatctgtatcaaaatgtaacactttcatcctttggaataattgaagtttaacataacctctacatgtatataagttagctggtgaaaatgtggcatgaaacttcacaattgtgcttcaggcctaagtgactgctacctatgatttaagtgacagtaaatgtcttgctacatttttctatttcatcctctacaatcatatgtcatggaatggagctatgaaatgtgctaacttggtattcaggattctcattgtgataaggtgatacattagttttaccttgtttgaaattttacaaaaatgcttacaatccaggcattctttctctacctattatgaactacggtgtgttaaacaacagcagtgggctgggcagacaacctttgggcagtctcaaccttaatccttgggtacagcacctgaacttaattgatgagaagtggaacttaagtggtttccctggtgctgttcattatggaaattttatgctggatttatcgatgtcattcttaatcttttgatactataaaggagtcttaccaactggagaaaatttgcctacatgctatatatttgaattgtgtccaaagctttgcagaaaagcaaatctgaagttattatatatgttgttttcttgagcaacagttacactaggtagaaaagtattcacacaataatagtaatgcaaaaaaagtgagctacttggaaagtatcatctctgttcaggtaagtttacttcagtgaactcttgtgtggttagcgataagttttaaagtccaggatagcctcatgagcataggccttcctatgaagtagtgcaaagggggccgattttagtggattaccctatcagtgttcttcagtatgtccaattgttatcataccaaaaaccttaattacataacattgtgtggatgaaatgctgcatcttcagttaatacatgttttgagcacattcttaaaatacataataattaaatgatccctattcaaaagaaccctggcttgggtggaggatccactctggctaacggataagagtgatgaacttctttgttacctgacccttctcttctggaaaagtgaggtgtacattaaacatcttttggtcaccgtgcctcactaagacctttcacattccagcttgtccgactagtgtaatgtacctctcacttctgttttacgttgagcattacgaattaaaatctttacagtctagggggaaaaaaaggcttcaataccagttggcttatgaggctctgcatataattttctctaaaatatgtaactattttgtagtctgtggggactttcaaagccaatttttaaaattagtagtagtaaaggtttttccctttcctgaatgaaaaatcagaaattctaatctttgctataaagtacttaaacacaatacattgcctcagcataaataaaaacatttttattaagatgatttatgaacatggatttctaactggaccaacactaatgttgcaacctgataaaatttgagatgtaaattcatttcacagactcataaacacactctctttaagactcttctttaaatggatccttacattaccctgcctgttttattatgccttcatttttgtggttttcattcactcctgcttgcttctattgaggttctcctacatttcccagaaactcagtgaatatcttgccttttcttcaaacaaagggggtttttataaagtttgtatttttgaaactagctctatgtctatctaaaaatcaagtctcggcagtggctcatgcctataatcccagcactttgggaggccgaggagggcagatcatctgaggtcaggagtttgagaccagcctggccagcatggtgaaaccccatctctactaaaaatacaaaaaattagccaggcgtggtggcgcgcacctgcagtcccagctact

SEQ ID NO: 43534 - DNA, 338 bp, Homo sapiens
gagtctcgctctgtcgcccaggctggagtgcagtggcgggatctcggctcactgcaagctccgcctcccgggttcacgccattctcctgcctcagcctcccaagtagctgggaccacaggcgcccgccaccacgcccggctaattttttgtatttttagtagagacggggtttcaccgtgttagccgggatggtctcgatctcctgacctcgtgatccgcccgcctcggcctcccaaagtgctgggattacaggcgtgagccaccgcgcccggcccactactggtttttaacaggatgattcaaagtacagcccgtgcacatttacttcgtcacctgg

SEQ ID NO: 43535 - DNA, 1245 bp, Homo sapiens
gttcaatggaggtgcatgtcctagagaaaatgaaagagatctcgttgtcggttatacttaaatcaataaaatgtttcttccctcatcagagacacaattctggaatggaaagtagcttatcatctctgaagccttgggtcccccggtggcaaccatgcctctgattacccaggggttccaagaaaacaggtcgtgttcttatgcagaagccacaagtgaaataactgatgagttcagaattctgacatctccagacacctgctgtactgcacttgtttatttatatctgaacagataagtgctcccaatattaatctatgcatcaaaaatataataaatcagatctgtatccttctttcaacaaggataagtaggcgagtcaaatgcagatgagaaaaatgattaaaatatatagaatgtaaaataaaaagtgttaagtactgtgagaagaacagctagagtgagatgggtattcaagagggatattcaaggaagacctcttggaggaggtcttaccgtatctgggtcttcaaagattttctgaaaggcagggagagatgggcctgagaagggagaagggcactccggactgaagatgctgcgtggattgccatagaggctgtaggtgagagcctggatgcggggagcagctgagtggttatcgtaaaccacctgcacaggaggtgaggagggctttacccagggaggtgacagaaaggattgaagatgttgcagaactaactttttggttatgagagactaggacgagagaaagtcaaagtcctgccaagtttctgagcttgagtgctgagggggcaggtggtgcttttcacaagagcaaagaacaaaggaagaaggaaggaaggagcatgatgaattctcttgaaattgtaatcttactgaatctgaggtgccacaggacatccagatgggttcatctagcaggtctttgaatgtgttagtgcaggtttgaactcagagaagggtaagaggtaaaggtttaggagtcatttacatagaattaatagttggaaaaacaaaaatgagcttgctaaaagagaataaagaatgcaaagttgcaatcttggagatcatcatagattttgggaagagggagtgaaaagccagaaaagattatcaaagaagaaacagcctgagggaagaaaacaggagtctgtgttatcttggcactacaagaaagaagggcatcttagagagacaggaagggaggatgaaagaggggta

SEQ ID NO: 43536 - DNA, 2096 bp, Homo sapiens
  misc_feature (1275)..(1275): n is a, c, g, or t
  misc_feature (1360)..(1360): n is a, c, g, or t
  misc_feature (1375)..(1375): n is a, c, g, or t
  misc_feature (1431)..(1431): n is a, c, g, or t
  misc_feature (1491)..(1491): n is a, c, g, or t
  misc_feature (1578)..(1578): n is a, c, g, or t
  misc_feature (1582)..(1582): n is a, c, g, or t
  misc_feature (1597)..(1597): n is a, c, g, or t
  misc_feature (1620)..(1621): n is a, c, g, or t
cttggagactatttattacatgtatttttaagactttagataaatatccccaaattgccttccaaaaactttacagttctataaatgatatatgagactactgtttcttcacatattcaccaacacaatacttttttatttttgctattttgatggggagaaaagtttctcattttaattttaatccacattgtaaattgtgtagtgaaacatttttacacataattattaataatttggaagtttcttttgagaattacctgcttataatggcacattcatcttttatacctgagagttcttgagtttttaaaaactttgcatttagtccccttccaaaaataatctaataatatttaccataaatgggccgggtgcagtggctcacgcctgtaatcccagccctttgagaggccgaggcaggtgaatcacctgaggtcaggagttcgacaccagcctggccaatgtggggaaaccctgcctctactaaaaatataaaaattagccgggcgtggtggtgggtgcctgtagtcccagctacttgggaggctgaggcagaattgcttgaacccaggaggcggaggttgcagtgagctgagatcatgccattgcactccagcctggatgacaagagcaaaaaactctgtctcaaaaaaaaaaaatttaccataaatgacatacaaaataaaagtaataatctagaaatagtcaaaaactcaaaacgatggaaaaggaaggccgcattaaatagagctctcataaataagcatcaaatctgagctgtccaacaaaaagggaagccctgtaagttatataattttaatcataaaggaagaagcacattagtcacaaaagagaccacatttattcctggcattaaattctaaaacagatttctcatttgggctcttacataggggaatacagagtgacagtataacagtatccttaatgacagttttacaacaaatacagaagcaatttttatgacttttatatcttgaaactttttatccacttatagtacataaagtactctatatagtactttaaaaactgtggtttatcaatgtttaaatgtttttggacttttttgtgagaaacagttattagcaataagtttttttttcaaaggcatttcttctccaagctaggccaagtgataaaattatagagcaaaagctaattagaatggcaacaataggccgggtgtggtggctcacacctgtaatcccagcactttgggaggccaaggcaggtggatcacgaggtcanaagatcgagaccatcctggctaacacagtgaaacactgtctctactaaaaatacaaaaaaattagccgggcgtggtggcgggcgnctgtagtcccagctnctcaggaggctgaggcaggagaatggtgtgaacccaggaggcagagcttgcagtgngccaaggttgtgccactgcactccagcctgggcaacagagtgagactccatctcaaaacnaaaaagaatggcaacaatagaaaattgtacttaggctgggtatggtggttcacacctgtaatcctagcactttgggaggctgaggcnggangattgcttgacctcngaagtttgagactagcctgggcnncatagcaagacctcatctctattaaaaataaaaaaattagttgggtgtggtagtgcatacctgtagtccgagctacccggtggtggggggcggtggggttgctgaggcaggaggattgcttgagcctggagatccaggctgcagtgagctatgatcatgccactgtactccagcctggcaacagagcgagaccctctctcaaaaaaaaaaaaaaaagaaaagaaaagaaaaaagaaaattatagtcaatacttgtaaaagattatttgcctttcgttgcaggctgagcctgaggcatgggtataccaaactgctaaatctatgtcactgtataagaatatacctaaatttaaagcagtcttcaacatatgaaaagaaactaaactatttccgtaataaaataaatgcacattaaaactatgctgaagtaccttgttttttaattgctgaaataaaaaaagcttgataatttaaag

SEQ ID NO: 43537 - DNA, 401 bp, Homo sapiens
ctgccctgaggactgggccagagcccttgaggggcccgcagggaaaggccaaaaggaccaagtgctcattaaagaccaaggcaggctggactgagctagacacccaggctccaggttccttcctctgaaacatctgcaggtttttgggaggcgaagggctctcagctgccatggctgatgtctggggactttttcttcagctccagatggtctacacagggttcgtatacacaggccccctagccgcacgcatgcgtgcatgcacgcgcgcacacacatacacacacacaccccagagtaaattcactgatatacaccactatgaacacacacaatgacttacctatacacacatattaatagacacccatactgctcttaacacacaccttcagacatcc

SEQ ID NO: 43538 - DNA, 1001 bp, Homo sapiens
gcccagcccatggtacacattcaataaagcctagctatcctgattttcagtcttaaaatcatgcctactttttagggtaacaaatttaagattctggacattaaagatgatctagtctgcctgggatccatttccttccttctgagaatctgaaatgccttcctcaggcattggatgtattaccatctaaacttccctgagatggttgttcaaaaccatgaaagtaattacagaggcagatgaaaatgagagtcacacaacactgctcttcaaaggcccttgctgacacaagcagatggcacagtggccgggatgggccagtgctgactaagagggagtgtgtcgtccgctctgtactccgcgcaagtccctgatgtgtaagggcacaggcttacaggcgtacgaattttattccccattttgatcccatttgattctgaatgcattaaaaaaaatctgtgtagcacaaaaaataatctatgttgttgaaataacaaaagtctatatgcggtagttagaataacaactagcttgggatctgggatacgtaggtttgacttcgtgcctttgcagctatgtgaccttgagtaaatatttcccttctctgggcttccattttcccacctataaagggcctaggagcctagatcatcacaagtaatttttttttggctctaatattctatgatttaaaatcttgccttggttcttattagctatgaatgaagtgtaaatttccttttctatattatctttagagcttccaatttttgctctgagtacaaaggaagtggaggaagcaagattaagccaaagataatggagagagaaggttagaagagaaaagggaaaattacagatgggcatttgggttgaggtcccctctcagacttggagtgtgtgtaggaggaaggcaggtggacgccggaccttctaggacaggcatcgaaggctggtccatcagacatgcgctttaatcagtgagtctggatcgccgaggt

SEQ ID NO: 43539 - DNA, 959 bp, Homo sapiens
  misc_feature (593)..(593): n is a, c, g, or t
cacactccttatgagaatcttgcctgatgatctgaggtggaacagtttcatcctgaaaccaatcccctgccatccctcagttggtggaaaaattgtcttccatgaaactggtccctggtgccaaaaagattgggggcagctgcattataccatgacagagggatctttctaaaacataagccaatgcaagtcactctccttaaacccttcagtgacttttcactgcccttagagcccgggttcctccaaatctgtacctgtacctctgaactctttcccaccagtgttctcacagctcttgggcagcaatgacacctgctctgtagaagccttccctggctgacccatctaaaattgcctcaacccccaactttctgtctgtcataagagtcaacttcattttactcatatcacttatctccatctgatatttatttatttatgtagtctctctgtcttcccatcccctcagcttatattctgagctcaatgtgaggtcttttcttcattactaggtccatagaggaaactcagatcactatttgatgggtgaatgaatgcttcaataaatgaatgcatgcatgcatgatganaattctgtgaggctggcttctttattcccatttcacaaatggagaaactgaggcccagagaggctaagtggctttcccaggattgctgcatagaatagacacaaatctggaattcagggttcttgccacctacccctgaattcccctctgcctttcccttgtgatctccttcctctcgggtcaccccacctgcctccagggactgagcacaaagctcctcttgagctttgcctgtctgaggagtcttgggctctgtgtggttattttgttttctgtgtgttgttttgggttctaaacagttgagccgccatgggcaggtgggtatgccagggctatgctgtcccaacacttgtatgtcctccttgg

SEQ ID NO: 43540 - DNA, 463 bp, Homo sapiens
tgtgctcctaggaaaacttgttagatacagcaaacttagatcatgacttctttcattgttccttctgggtcttcaagcctcaaatacatgaagaaaataactaattttcaagccactacacttggatttctcttacatacaagcgaacacccaacctgactggtatacccagatttaaactggcctcccactgtcctgagattaagcaggaggatttatcatacatttattattttgtttttgattccagaattccctgctcacaaatgatggtgagagttatctttctgcattacagttagggaaactaagaagataattgaattaaatcctctgagttcattataaggaatgacttattttatcataaagtgtaaatattacttttattagattattaccttgttaactatcatcccatagaattataaatttatttcttttaaaccatgacaactactac

SEQ ID NO: 43541 - DNA, 457 bp, Homo sapiens
ggtcgacagtcacctgacaaactgtttctctcccactcagtgggggaaagctccattctctcaacatttattgtgcatctgctatgttcccagtgtaggagaaatcgtctgggaatcaaatggccccacccgtcacgggctcagcaagccagttgtccccaggaggcagcctgcccaaggccctgtcatgcctggaacccccacccgctcagtgagtcggctgcctgttaactgggctggcaattgcagggtgcctggggcagcctggcccctagactgagggggtgaccaagggttcaagtccagaaagctaagccactaggctgcaatggcaagggctgggagaccagacacaccattggagcggctgaagaggaaggtggatgtccctgagcattgctcttgctgtctgcagaatgagcatattatactctactcccagcacttctagtttggc

SEQ ID NO: 43542 - DNA, 414 bp, Homo sapiens
acaagatagtcccttttcagtgcccagcatgacatttccaaaatgaagctatgtgtgttatgttcatgtgttttgtgcataaaaagggctcagagtcaaaatagtttggcagattctgggtttttatgctgcagaacttctcagagcctttaaaatgttcacgtgctaggtgattctctgaggatgcgagtgttaggattagattctgaaaggcagaaaacccaaaatactaggattaactatgatggagctcaaccttcagggtgggcaggcagatctgtataggctccatggcagtgggagccaggccccttccctggcatggctctgctgggcatggcctcagcctcatgattcaagatggcagcagctgtgttccaggcagctgttatggggtgaggggccctggggcca

SEQ ID NO: 43543 - DNA, 359 bp, Homo sapiens
atgtcgaccccagacttgtctcgaattctggactcaagagatctgcctacctcggcctcctaaaatgctgagattacaggcatgagccattgaacctgacctcttgataactttttaatatttacatttctaaggagatctctaatcaagcactatgagccacgtgaacttttaaatcacgtatttattcaattctgagccctgttaaaagtatatgatttgctgggcgtggtggctcacgcctgtaaccccagcactttgggaggcagaggcgggtgcatcacctgaggtcaggagtttgagatgagcctggccaacatcgtgaaaccccatctctactaaaaatacaaacgttagcc

SEQ ID NO: 43544 - DNA, 399 bp, Homo sapiens
cccagattcctcagtgagaatagaaggggctagagacatcagggaattggatttggtgactttaatacccactcagctccaaagcattcttgaatgatgcacgatttatgaatatatatattgaaatttactgatgggtgaacagctctcaacatgagatttttgttgtatgccttaaaaaagattatacataaatatgcgtgtgtgtgtgtatgtatgtttcgatgtatatgaacccatgatctgaaaaatggccactgtggcttgtggaaacctattaatctctgctgttccacccaacatcctcagagaaaaaaataaacaactttttgaaagtgctgccatggggtcagaccaaatactgtggccacttccaaggggtttgccttgatttgcctg

SEQ ID NO: 43545 - DNA, 1732 bp, Homo sapiens
tttcaggcttcatagccagagtcctatagagttcttatagaaacagaataattgaaattcagcatatactatgcttagaaagtattttgtttgggtttgattgggtttttttttcttttacttgtgtgtgtatgtactgggggagtatagcttttattctgtgctcaattcgaaagagagtattataagttttcccagcccatccacccgctaaaaaagaacatatccaaattttaatatgtatacacccaacctgtacctatgtacgtgaatatacatgcactgggaaatctacttaagagtcttcactgagaagttcactcgatagaaaggtcttgatagagaagagaagaggaaagcaatggtctgaaggcaaatcctgctttaacttggtggtccatttcccattcattcctgaaccaatgagagcagaaagaaacaagtcaacccaaacaagcaaactaggggctggacgcggcgaatggatgctggtcagtttggcaaattcactgaaactcatcaagaacccagctgaacttgcattccaacttccacaattatctgaaagggctagggaccaggtagccatgtgtcccaatcacacgggggagagtctgccaccggcggtgagagaggtggggaagctttggaggagacagtatattcacctttttatctttgggtaaaagaaaccaacaggactttggtgcagtagatttctcagtgccttctttaggaattctatcttaagcacacttcaaggggaaagaaaaaaggaggagagaacatttgttcccgtgaagtccctttctccaaaggactggggatcaagaaggaagaagagtaagaaggaaaaacaacaaaatcctgaggaggccatttcttttaacccacccagcttgcccctgaaaactgctggtgatacaaactttttcaaactgacttccagcttctccatgtgtcttggtaactgtagcctcgtctctgccctttctcctaataagatccatgtttctaaggagaaaaacaaaacagtattctcttctgtaaaactgtaatgtattgttgatatttgtaactattgtatatttctgtcttgctccagtcccagctggagtgtctagttccatggacaaggggatatttaaaattcaccacggacaagagccactaaagccaggtctctatcgctaatctctctcctattcttatttctctaccaactaatctcaagtaacaataccccaggctttttttcagcctcaattcaagtaactttgaatcaaaagagagcaaggcaaaaagcctccggacatgcttctttgggaaaggactttttctgtagctgcagagtgggcaggagggagaaggggctcccctgagaccccggcaggacaatggaaagcttccagccccgagctgatgtttcctcacctatcactgcttataggacagcatccaaatgctttcatgtcactcagcccaggcaacccaaaccagtcctggctacacccagaaataagagttacctctgcattttctgttgccatttttctggctctagaagtatctgatgcgcgactatgtcatagaatgtccacgcatctcagagtagtctatttttctgttcagataaaatatatatatatatgtatttttagcaaatttataatagggcaattgagtctaatttcttcttttgtaatacagaacaatatcttaggagtttcat

SEQ ID NO: 43546 - DNA, 234 bp, Homo sapiens
gtctactgctagatgaacaaggctaagtctacagagaaggtaaattatagaaattaggccccgtctctactaaaaatacaaaaaattagccgggcgcggtggtggggtcctgtagtcccagctactcgggaggctgacgcaggagaatggcgtgaacccgggaggcggagcttgcagtgagccgagatagcgccactgcagtctggcctgggcgaaagagcgagactccgtctt

SEQ ID NO: 43547 - DNA, 349 bp, Homo sapiens
ccccataaaactcatcacaattgggattaggtatctagggagttatttatttaaaatctgccccctacactagactgtactgcatcaaggcaaagacatatccatcttgttctaggctgtatcactagtgcttagtacggttcctgcaccataggcaggtgcttccacaaatgttttctgggatatttcagggagctcattctgtaccagggaaagctaagacttctttactggaaacaactgtgggggcatagggatgaggacagggcacaggaggcttaaatgtgtgggtgcagcccccagttgagggggagatgttcacttcttgggctgccggggggatgctccg

SEQ ID NO: 43548 - DNA, 1638 bp, Homo sapiens
ccactgtagacattactcgctttatattatttgctttcaaatactaaaacctcagctgctaattcagcgctctaggtgtacagtgtctccttcccttggctcctagcaatgtagggaacttgaggttcttcagtatcttcagagattccttccaggccacatatttttatgctaatacttctatagttgcattcaatctacaaggagaaagtgtacattggtgcatgttttataaacccagacacagatagctaaaaccataattagtttttctatacccagagctttgaattaaaaacagatgctttttttttccccaagagcagacagttctacattcctaacattaggaattggtgatacgagaagcaggatccagaattcagaatgatttagtgagactcggtgaaaaaaatgcattttcccctggctgtttgaaaatttacttatttgcagataagtctagatttagtcttggagatcaaagtcttttatattttaaaaacttattctttatattgatcaaacatggcatatgttagagaaccacttcttctgtcatgtttatgtattttggaattaagttgtttgcattcactttcaaaatctgcccatttctgtttatgtgcacttaccacagatgtgtcgggactttgcctcaggggagaggtactttagcacctgtgtcactgaggagatggagtggttgacaagtactgttgcgctgtgtaacttggggtttggccctgtggacaatatattagcagaatgataccacacaaaagtattacaggattaaggcatgtaacttctatggtagtccttatgtatcagcgtatacccaagttcagaaaccacaggtgcatttttagacctttacttagagaactaaaggcagttccaaccatcagcccatatggcgggattaatgcatgaaaaccctcagagggtgttgggacatcctacttccctgtcctcacccagtggaactctggtgtgtgccttgaggataaggaagtagagtggaaactcatcctatcattgagtattctcaatattttggccttccctctggaattatgagaaatttaacaaagtctcaggaacctttagaatccattgtccaacactgctagaaaaactgtaggaggtacatggagaattcctatagttcttaggtaagtgcaagacatggcacagggatccctatccacataaaggggaatctggatgctgcacacctcaattctgagaaatccctgactgaacttggaattatgacagtaaagttttcgtcctttagttttctagagcagctcacagaaattttaaaaagtaaaacaaggccaggcgcagtggctcatgcctgtaatcccagctctttgggaggctgaggcgggcagatcacgaggtgaggagatcgagaccatcctggctaacagggtgaaaccccgtctctactgaaaatacaaaaaattagctgggcatggtggcgggcgcctgtagtcccagatgctcaggaggctgaggcaggagaatcgcttgaacctgggaggcagaagattacagtaagccaagatcgccccactgcactccagcctgggcgacagagtgagactccgtctcaaaaaaaaaaaa

SEQ ID NO: 43549 - DNA, 570 bp, Homo sapiens
  misc_feature (524)..(524): n is a, c, g, or t
aaaagtaaaacaaaaataaagtctatgcccattaagacgtcttctaattcagttgtgattgtctgctcctacttaaaaaaatatttaagcttgatgtttaattattccctttcagcaaatttggatcagaaaattaaagtatgtgacaagatcaggtcaccttgaatttccacacaatctcaagacactgaatagcaaaaaagtaacattacacagtaatgattaggatatttccttagactttgctggatctttggtcttaaggtaacatgtaaaagtagtgaagcctttcctttcatggccctgtgcaatgtaacggttttctgcctcctcttcagctggaagcgttagtggtagtatgggcacagaatatatgtacactggcgatgctgaccatgcctcccaggtaccctggctctgggttccttgacctagggaacaagattggatgaggcagatctttgagcccatgtgactatagaatttgctgatgatataattttacaataacaatggatagggtnccgcgggggaaactcgtaagagacgagccagcaggcatcaggtgca

SEQ ID NO: 43550 - DNA, 1583 bp, Homo sapiens
aaaagtaaaacaaaaataaagtctatgcccattaagacgtcttctaattcagttgtgattgtctgctcctacttaaaaaaatatttaagcttgatgtttaattattccctttcagcaaatttggatcagaaaattaaagtatgtgacaagatcaggtcaccttgaatttccacacaatctcaagacactgaatagcaaaaaagtaacattacacagtaatgattaggatatttccttagactttgctggatctttggtcttaaggtaacatgtaaaagtagtgaagcctttcctttcatggccctgtgcaatgtaacggttttctgcctcctcttcagctggaagcgttagtggtagtatgggcacagaatatatgtacactggcgatgctgaccatgcctcccaggtaccctggctctgggttccttgacctagggaacaagattggatgaggcagatctttgagcccatgtgactatagaatttgctgatgatataattttacaataacaatggataggaattttacctctctttttattagtttaatattatttaatattatgtacataagtgttcactcgcctaattaaaaacattgagtaaaccaagtttttatatagactacccttgccatatgatgctctttttctctaataatatgcagtttaaatcctgaggaatcaatgcccagcatttcaccacatctgaactctgtgtgggcattcttcactcgcctacaaggggtaaacaaggctaccagaacttgaatttgacttatagggagctacccaggaaggggaaagcccttgggactttttccaaaacaatcttctatttgaactgttcatcagccaaagtagtccactgaggtgacaaagctttcagaaatacaaagatgggaagataaaggtaacactggcccacttggggctttgacattggattgggtggactgaataaacacagcctaggtggcctgggcttgagcctcacttacttctccttgatacatagttcctggtctaccttctgaccctttttctaaaatagccagtgtctatttcactaggccatttacttacaagttcccagcttttagggaaaaaagagggaggggggagcatctagttttgaattagatatacatcttagaagtaatgagctattggcagctgttaaatcagattcagccacaaaccagaattctttcttgttgaacaagaccaatgagttagatgactttaataattccacttttctctccctctcttctcctcttcctgaaatcagagagatgagaaactactctttgaaatacctccagaggcgttttattgtgttcctttcccctccaagcagctccctttatacaattttgctcaggcaaccaaggacagagtatcggcagaaacatggagtgcttttgtataggccacctgtacataaaagtgtaattatttatttaattttcccatttgtatcatattaaagctttgtacagtgttttaagttctgttttaaaattattttgtattttatttttataacctagtaataaaatattcattccgcatgcaaaa

SEQ ID NO: 43551 - DNA, 2043 bp, Homo sapiens
aaaagtaaaacaaaaataaagtctatgcccattaagacgtcttctaattcagttgtgattgtctgctcctacttaaaaaaatatttaagcttgatgtttaattattccctttcagcaaatttggatcagaaaattaaagtatgtgacaagatcaggtcaccttgaatttccacacaatctcaagacactgaatagcaaaaaagtaacattacacagtaatgattaggatatttccttagactttgctggatctttggtcttaaggtaacatgtaaaagtagtgaagcctttcctttcatggccctgtgcaatgtaacggttttctgcctcctcttcagctggaagcgttagtggtagtatgggcacagaatatatgtacactggcgatgctgaccatgcctcccaggtaccctggctctgggttccttgacctagggaacaagattggatgaggcagatctttgagcccatgtgactatagaatttgctgatgatataattttacaataacaatggataggaattttacctctctttttattagtttaatattatttaatattatgtacataagtgttcactcgcctaattaaaaacattgagtaaaccaagtttttatatagactacccttgccatatgatgctctttttctctaataatatgcagtttaaatcctgaggaatcaatgcccagcatttcaccacatctgaactctgtgtgggcattcttcactcgcctacaaggggtaaacaaggctaccagaacttgaatttgacttatagggagctacccaggaaggggaaagcccttgggactttttccaaaacaatcttctatttgaactgttcatcagccaaagtagtccactgaggtgacaaagctttcagaaatacaaagatgggaagataaaggtaacactggcccacttggggctttgacattggattgggtggactgaataaacacagcctaggtggcctgggcttgagcctcacttacttctccttgatacatagttcctggtctaccttctgaccctttttctaaaatagccagtgtctatttcactaggccatttacttacaagttcccagcttttagggaaaaaagagggaggggggagcatctagttttgaattagatatacatcttagaagtaatgagctattggcagctgttaaatcagattcagccacaaaccagaattctttcttgttgaacaagaccaatgagttagatgactttaataattccacttttctctccctctcttctcctcttcctgaaatcagagagatgagaaactactctttgaaatacctccagaggcgttttattgtgttcctttcccctccaagcagctccctttatacaattttgctcaggcaaccaaggacagagtatcggcagaaacatggagtgcttttgtataggccacctgtacataaaagtgtaattatttatttaattttcccatttgtatcatattaaagctttgtacagtgttttaagttctgttttaaaattattttgtattttatttttataacctagtaataaaatattcattccgcatgcaaaaaaaaacacacacacaacccaaacaaccaaaaacaaacagaaccaaaagatagaaaccaaacacagcaacagacagacacaagagaagacgaaaacaaccacacaaacagcacacacaaccgcagcggagaaccaacaaagccaaacgcaagacagcacaacaagggacaaaacacacacgtagcacaaagcagccgcagaaccgaacacacatctaaagacaggcgacaacaacatagcaggccgtagcaccgacaaccactaaaccataactatccagcggagatcagatcacagaagccgacacagaaagaaaagcatgtatgcaacgcatgacaccgcagggcggataaaaacactcgtaggcgggaccgccgcagaacgatcgaaggctaacaaacaagctagtagatcacaagtacgtgaccacgccctcttatctataaaggaggaagagggag

SEQ ID NO: 43552 - DNA, 1202 bp, Homo sapiens
aaaagtaaaacaaaaataaagtctatgcccattaagacgtcttctaattcagttgtgattgtctgctcctacttaaaaaaatatttaagcttgatgtttaattattccctttcagcaaatttggatcagaaaattaaagtatgtgacaagatcaggtcaccttgaatttccacacaatctcaagacactgaatagcaaaaaagtaacattacacagtaatgattaggatatttccttagactttgctggatctttggtcttaaggtaacatgtaaaagtagtgaagcctttcctttcatggccctgtgcaatgtaacggttttctgcctcctcttcagctggaagcgttagtggtagtatgggcacagaatatatgtacactggcgatgctgaccatgcctcccaggtaccctggctctgggttccttgacctagggaacaagattggatgaggcagatctttgagcccatgtgactatagaatttgctgatgatataattttacaataacaatggataggaattttacctctctttttattagtttaatattatttaatattatgtacataagtgttcactcgcctaattaaaaacattgagtaaaccaagtttttatatagactacccttgccatatgatgctctttttctctaataatatgcagtttaaatcctgaggaatcaatgcccagcatttcaccacatctgaactctgtgtgggcattcttcactcgcctacaaggggtaaacaaggctaccagaacttgaatttgacttatagggagctacccaggaaggggaaagcccttgggactttttccaaaacaatcttctatttgaactgttcatcagccaaagtagtccactgaggtgacaaagctttcagaaatacaaagatgggaagataaagagagatgagaaactactctttgaaatacctccagaggcgttttattgtgttcctttcccctccaagcagctccctttatacaattttgctcaggcaaccaaggacagagtatcggcagaaacatggagtgcttttgtataggccacctgtacataaaagtgtaattatttatttaattttcccatttgtatcatattaaagctttgtacagtgttttaagttctgttttaaaattattttgtattttatttttataacctagtaataaaatattcattccgcatgcaaaa

SEQ ID NO: 43553 - DNA, 570 bp, Homo sapiens
ccactgtagacattactcgctttatattatttgctttcaaatactaaaacctcagctgctaattcagcgctctaggtgtacagtgtctccttcccttggctcctagcaatgtagggaacttgaggttcttcagtatcttcagagattccttccaggccacatatttttatgctaatacttctatagttgcattcaatcacagatgtgtcgggactttgcctcaggggagaggtactttagcacctgtgtcactgaggagatggagtggttgacaagtactgttgcgctgtgtaacttggggtttggccctccagaggcgttttattgtgttcctttcccctccaagcagctccctttatacaattttgctcaggcaaccaaggacagagtatcggcagaaacatggagtgcttttgtataggccacctgtacataaaagtgtaattatttatttaattttcccatttgtatcatattaaagctttgtacagtgttttaagttctgttttaaaattattttgtattttatttttataacctagtaataaaatattcattccgcatgcaaaa

SEQ ID NO: 43554 - DNA, 362 bp, Homo sapiens
gagcacagatgtgtgccactatgcctggcaaatttttaaattttatgtagagatgaggtctccctatgttgcccagactggcctcaaactcctgggctcaagggatcctcctacgtcagcctcccaaggtgctgagattacaggcttgtctcttgaccacttccaagccatgccctgttttttccacttttgttctccaggggtcctgggccaggggagctgtgtccaagtcctggtctctcaagccccagctctggttccactttgtccctgaagactgcttcaccactctaggtcacacgctcccctgacttcccacaggggttttagaagtatctccaagtccaagaaactgtgcagct

SEQ ID NO: 43555 - DNA, 968 bp, Homo sapiens
aaaataaaaaactcttactgctgtgttattatatttggaatatcttggatttttaaatttatagtctatatcgagggactacaagaaccatgtagaatattgttagacgaactaaaactccatctatgacctttgttctaatggtatgttttcagagaagagttttttaggatgtccagctacttggctgtttcacaaggtccccacagttaagaaatctcaagtatgtaattgtgatgggtctacgtgtgatctgtggcaaaaccatctagaccacctgaaccacatgccgtgtaggtttgtgctaaccagtagctcttgaggcaagcgataggacagaagaagctctgcctcaggcgagttaagaaaggagaatgcactcctactaaagttctttgtatgcttgtgcgtatttttgcaggtttagaatctttaaaccctgctttcttgatacaaacagagaaaaatccacttttctcgtggtcctgacacttttctccaactagtctttgtaaaatactgattctggcatttcatctgttctgcattttcatgggaatctgaacttaacagataaagtgggtgccattcctctttatatgattccattaaagaaggagttctcagattttatgctacccatccccctaaggaaagtaaagagggagtgcagggcagacagcatcgccgagcagccacccaccattggggctgccgattctcatctccagctcatgcagcgttacatgagtgagtttagtaatagcttctaaacatagtctacgtgattttatagcattgatacatgctgagacttggaggagaaaataaacatttaattagtagatatatcatgggttgatgaacttaggactttggatagaaactcaaacttcatttttctccctaggttattaaacaggaggttacttggttaaattgggttcataaagttaacttcagacttc

SEQ ID NO: 43556 - DNA, 604 bp, Homo sapiens
agaagtttcggaaggaagagtcttggcctgaagagcagttctaataaaatttgccctagctgatgggagtcctttagccaaagctgcctattggaatagttctgtcttccggaaatggatctgacttagtatcactgctgtgctcagtcactggctggaagaatgtggcctcaaagaaaagctgcgaatattgggctgaatttagaacctagcagctagctagggccaaggtcatttacattccccatgctgggagaactgaaaggcacattttcgtagctgtctcaatcagagattttccactgctttgggtcgctggctcccagtccaagggatggatccttggattgggtgagccaaggtcatgtgcctgtgttctgactgcaagggggacctgcttcccaccaagattcctaagccccctctcccaaataaaggggttcatatgctggacagcaacccccacaaaggacaaatgtccactatactgtgtgacctccttaagagcaaagatctttgtcttgctgattgcaattataaatatttacaaataaatgtttattgaagtaactgaatgccccacaatgctatatctgactaagta

SEQ ID NO: 43557 - DNA, 236 bp, Homo sapiens
ttttcacaaataatcctttgtcaattgtcacttgcacatacatccttgggcacccgtgcattgatttctagggatttctagaagtaaggagttaaatcttcgagaaatattgtcagattgactttccaaaaggatgcttccatttacacttgatcttctgtgtgtggccaatccccatgctctagccaacactggatagcgctgtcacttacagctcctctgatgggggaggtggg

SEQ ID NO: 43558 - DNA, 546 bp, Homo sapiens
  misc_feature (10)..(11): n is a, c, g, or t
  misc_feature (14)..(14): n is a, c, g, or t
acaaggcggnntcnccggcagcatgtcaggttcactgaatatgtaaaagatgggctgaaacacacgtgtgtgaaattctacattgagggctctgagccagggaagcaaggaacggtgtatgcgcaagtgaaagagaacccaggaagtggtgaatatgattttcgatatatatttgtagaaattgaatcttatcctagaagaactattatcattgaagataatcgatcccaagatgattaaaatagggtttctgatggatgttgaatggcgtggactcgctactccgttcttcacagctgccttccagaatgtgttcaaaagaaagacaagaaggagtgtatggcttataaagtgaatctaatacagtatttgttgcatttaaacaaactagacattttcttacggaaaaattatgaaatacagcatattttatgttctcccattgactcaatcatgacaatatttctgctttaacaccatctttcatgattagaaatgtttgttattggaaatgttacaccatgtaaataaaggaaatagatttta

SEQ ID NO: 43559 - DNA, 535 bp, Homo sapiens
aacggtgtatgcgcaagtgaaagaggtgtgggaatcatgggatgtggggtcagaggttctgagcgcggtgttatttaagttctggaaaggaaaataatacctggaaacactacatttttttcagaacccaggaagtggtgaatatgattttcgatatatatttgtagaaattgaatcttatcctagaagaactattatcattgaagataatcgatcccaagatgattaaaatagggtttctgatggatgttgaatggcgtggactcgctactccgttcttcacagctgccttccagaatgtgttcaaaagaaagacaagaaggagtgtatggcttataaagtgaatctaatacagtatttgttgcatttaaacaaactagacattttcttacggaaaaattatgaaatacagcatattttatgttctcccattgactcaatcatgacaatatttctgctttaacaccatctttcatgattagaaatgtttgttattggaaatgttacaccatgtaaataaaggaaatagatttta

SEQ ID NO: 43560 - DNA, 729 bp, Homo sapiens
  misc_feature (10)..(11): n is a, c, g, or t
  misc_feature (14)..(14): n is a, c, g, or t
acaaggcggnntcnccggcagcatgtcaggttcactgaatatgtaaaagatgggctgaaacacacgtgtgtgaaattctacattgagggctctgagccagggaagcaaggaacggtgtatgcgcaagtgaaagagaacccaggaagtggtgaatatgattttcgatatatatttgtagaaattgaatcttatcctagaagaactattatcattgaagataatcgatcccaagatgattaaaatagggtttctgatggatgttgaatggcgtggactcgctactccgttcttcacagctgccttccagaatgtgttcaaaagaaagacaagaaggagtgtatggcttataaagtgaatctaatacagtatttgttgcatttaaacaaactagacattttcttacggaaaaattatgaaatacagcatattttatgttctcccattgactcaatcatgacaatatttctgctttaacaccatctttcatgattagaaatgtttgttattggaaatgttacaccatgtaaataaaggaaatagattttagtattgtattcattttatattatagaactgcataatgtctgcagaataaaattaaaactaacaaatatgtcattagcagctgccctccgcatactttggaatctgacttgagataagcatgtgaaaatggttgagggccatagggaaccagatggtaaatacattcttcaaaattgtgtgagt

SEQ ID NO: 43561 - DNA, 1414 bp, Homo sapiens
  misc_feature (10)..(11): n is a, c, g, or t
  misc_feature (14)..(14): n is a, c, g, or t
acaaggcggnntcnccggcagcatgtcaggttcactgaatatgtaaaagatgggctgaaacacacgtgtgtgaaattctacattgagggctctgagccagggaagcaaggaacggtgtatgcgcaagtgaaagagaacccaggaagtggtgaatatgattttcgatatatatttgtagaaattgaatcttatcctagaagaactattatcattgaagataatcgatcccaagatgattaaaatagggtttctgatggatgttgaatggcgtggactcgctactccgttcttcacagctgccttccagaatgtgttcaaaagaaagacaagaaggagtgtatggcttataaagtgaatctaatacagtatttgttgcatttaaacaaactagacattttcttacggaaaaattatgaaatacagcatattttatgttctcccattgactcaatcatgacaatatttctgctttaacaccatctttcatgattagaaatgtttgttattggaaatgttacaccatgtaaataaaggaaatagattttagtattgtattcattttatattatagaactgcataatgtctgcagaataaaattaaaactaacaaataaaaaaaaaaaaaaaaaaaaaaaaaaaaaaaaaaaaaaaaaaaaaaaaaaaaaaacaaaacaattgagtgcggcggcgcgcgcgcgcagcgcccacgagaaaagatctcatcacaacaacacctaatgtgggaggagcggcgcgcgcgcgaccacaacagatagcagaagaaaacaagacgcgcgagagaaaaggggccacaggaagagaacaccggagagaaaacaaaaggggaggggggagctcctctaccacaaaataaaaagcacgcgggagggaagagacagaaagagacgggtttgagagacaacaccccagagaggaggagtactctggagggagcacagaggggcgaaaaataaaaaaaggggaagacagagaaagcgcggacgtaaataataaaaacccccaggccggcggggggggggggggagggggaaagagcaacaaggcgaaggtaggacgacgaagaacgacaacagcagcaagagagagacgaggagaacaaaagcaagagagaagcgagacgaaaacagagaaagaacaagagggtcacgaacgagagcacacgaagagaaaagcacaacagacacggaaaaacagaaacgagacgaaggaaaagcaaggaagagcagagaaagggacgaggagaaaggaagacaaagaggaggaggaggagacagaaaggagggagaggcacagcggaggacaccagaagcgaacagaagaacacgcaagacaagacaaggaaacccaaacagcacaagaggccagaaggaacgccgacgaggaaggcgcgaga

SEQ ID NO: 43562 - DNA, 470 bp, Homo sapiens
  misc_feature (10)..(11): n is a, c, g, or t
  misc_feature (14)..(14): n is a, c, g, or t
acaaggcggnntcnccggcagcatgtcaggttcactgaatatgtaaaagatgggctgaaacacacgtgtgtgaaattctacattgagggctctgagccagggaagcaaggaacggtgtatgcgcaagtgaaagagaacccaggaagtggtgaatatgattttcgatatatatttgtagaaattgaatcttatcctagaagaactattatcattgaagataatcgatcccaagatgattaaaatagggtttctgatggatgttgaatggcgtggactcgctactccgttcttcacagctgccttccagaatgtgttcaaaagaaagacaagaaggagtgtatggcagacaagacgatatgttaaaacacgatcagtgccaagtatagcatactagaaagttcgactacagagaaacctactgcaatacggcaaagcgtagtgtagaccacgatgcaatatgcacgccaggt

SEQ ID NO: 43563 - DNA, 391 bp, Homo sapiens
gatttcaaatacgccgtccttttgcccccataagtacactcaaactcgtgagaccatgtgcctctatttttaattatgaaaatatggacgctgtatctccaccagtggttagaactgtgaaacatcctaaccacaacgtccagaagggcgactgatcgcagagcttcaagtgatcttaactacgttatgtgttcctaacacactacagctgtgttccgcgtcagcgacgcagggcagaaccatcattgtattaacctttcccgctcatgggacgcggtgcttagtccccgggaaccgacaggggctccgccaacaactctgcgtcccgctctcgcggcccggacggcagcagcgcaggttaactggaaatggctggcaaggaaaacacctt

SEQ ID NO: 43564 - DNA, 1155 bp, Homo sapiens
atcgtctttttactttatttagaaacctgtttggaggttatggatgataaacccaatcctgaagccctaagtgacagttcagagcgtcttttctcctttggcgtcatcgcagatgttcaatttgcagacttagaagatggctttaatttccaaggaaccaggcggcgatactacagacatagtcttcttcacttacagggtgccattgaagactggaataatgaaagcagcatgccctgttgtgtccttcagcttggagatatcatcgatggatataatgcacagtataatgcatccaaaaagtccctagaacttgttatggacatgttcaagaggcttaaagttccagttcatcatacatggggaaaccatgaattctataacttcagtagagagtatttaacacactctaaacttaacactaagtttctagaagatcagattgtacatcatcctgagaccatgccttcagaagattattatgcttatcattttgtaccattccctaaattccggttcattttacttgatgcatatgacttgagtgtcttgggcgtggatcagtcttctccaaaatacgagcagtgtatgaagatattgagggagcacaatccaaatacggaactgaatagtcctcaaggactttctgagccccagtttgtccagtttaatggaggattcagccaagaacagctaaactggttgaatgaagtgctaacattctctgacacaaaccaagaaaaggtggtgattgtgagccatcttcccatttacccggacgcctctgacaatgtgtgcctggcctggaactacagagatgccctggcagtcatttggtctcatgagtgtgtggtgtgtttctttgctggtcacacccatgatggtggctactctgaggatccttttggtgtataccacgtcaacctagaaggagttattgaaacagctccagacagccaagcctttggcacagttcatgtctatcctgacaaaatgatgttgaaagggagaggcagagttccagatagaattatgaattacaagaaaggaagagccttccattgttagtctaatttattttaacttgatagaaaatgagctttgtgtttgtccctcctaaacaaaaaaataaaaatcctctgtctcattgtttag

SEQ ID NO: 43565 - DNA, 1526 bp, Homo sapiens
ggcgctgttacatagcccgtagtcagaggcctttcagcccaggggccggcgcacgaaacctgtttggaggttatggatgataaacccaatcctgaagccctaagtgacagttcagagcgtcttttctcctttggcgtcatcgcagatgttcaatttgcagacttagaagatggctttaatttccaaggaaccaggcggcgatactacagacatagtcttcttcacttacagggtgccattgaagactggaataatgaaagcagcatgccctgttgtgtccttcagcttggagatatcatcgatggatataatgcacagtataatgcatccaaaaagtccctagaacttgttatggacatgttcaagaggcttaaagttccagttcatcatacatggggaaaccatgaattctataacttcagtagagagtatttaacacactctaaacttaacactaagtttctagaagatcagattgtacatcatcctgagaccatgccttcagaagattattatgcttatcattttgtaccattccctaaattccggttcattttacttgatgcatatgacttgagtgtcttgggcgtggatcagtcttctccaaaatacgagcagtgtatgaagatattgagggagcacaatccaaatacggaactgaatagtcctcaaggtgaattattcctttgagctgagaatctaatagattgtctttaaattcttcagctaccttttattcagcaggaagatggacaattaaggactttctgagccccagtttgtccagtttaatggaggattcagccaagaacagctaaactggttgaatgaagtgctaacattctctgacacaaaccaagaaaaggtggtgattgtgagccatcttcccatttacccggacgcctctgacaatgtgtgcctggcctggaactacagagatgccctggcagtcatttggtctcatgagtgtgtggtgtgtttctttgctggtcacacccatgatggtggctactctgaggatccttttggtgtataccacgtcaacctagaaggagttattgaaacagctccagacagccaagcctttggcacagttcatgtctatcctgacaaaatgatgttgaaagggagaggcagagttccagatagaattatgaattacaagaaaggaagagccttccattgttagtctaatttattttaacttgatagaaaatgagctttgtgtttgtccctcctaaacaaaaaaataaaaatcctctgtctcattgtttaggtaaaaaaaaaataataacaaaaagtgatgagaaaaaacaaatgagaaagtataagagaggagcgagtaggaataggagaaatgatggggagctagcatggaaatctggataggggcgagtggtgttgtagtcgctggtgttgggtagatattacaggtgtaggtcgttggtgtggaggggggtcctggtgggggtggctgaatacgtgtgcggtgtgggcggttgagggggtgggtgcggtgttgggtg

SEQ ID NO: 43566 - DNA, 1223 bp, Homo sapiens
ggcgctgttacatagcccgtagtcagaggcctttcagcccaggggccggcgcacgaaacctgtttggaggttatggatgataaacccaatcctgaagccctaagtgacagttcagagcgtcttttctcctttggcgtcatcgcagatgttcaatttgcagacttagaagatggctttaatttccaaggaaccaggcggcgatactacagacatagtcttcttcacttacagggtgccattgaagactggaataatgaaagcagcatgccctgttgtgtccttcagcttggagatatcatcgatggatataatgcacagtataatgcatccaaaaagtccctagaacttgttatggacatgttcaagaggcttaaagttccagttcatcatacatggggaaaccatgaattctataacttcagtagagagtatttaacacactctaaacttaacactaagtttctagaagatcagattgtacatcatcctgagaccatgccttcagaagattattatgcttatcattttgtaccattccctaaattccggttcattttacttgatgcatatgacttgagtgtcttgggcgtggatcagtcttctccaaaatacgagcagtgtatgaagatattgagggagcacaatccaaatacggaactgaatagtcctcaaggtgaattattcctttgagctgagaatctaatagattgtctttaaattcttcagctaccttttattcagcaggaagatggacaattaaggactttctgagccccagtttgtccagtttaatggaggattcagccaagaacagctaaactggttgaatgaagtgctaacattctctgacacaaaccaatgtgtgcctggcctggaactacagagatgccctggcagtcatttggtctcatgagtgtgtggtgtgtttctttgctggtcacacccatgatggtggctactctgaggatccttttggtgtataccacgtcaacctagaaggagttattgaaacagctccagacagccaagcctttggcacagttcatgtctatcctgacaaaatgatgttgaaagggagaggcagagttccagatagaattatgaattacaagaaaggaagagccttccattgttagtctaatttattttaacttgatagaaaatgagctttgtgtttgtccctcctaaacaaaaaaataaaaatcctctgtctcattgtttag

SEQ ID NO: 43567 - DNA, 415 bp, Homo sapiens
cttcttttctttaactaacaggccatcttcccatttacccggacgcctctgacaatgtgtgcctggcctggaactacagagatgccctggcagtcatttggtctcatgagtgtgtggtgtgtttctttgctggtcacacccatgatggtggctactctgaggatccttttggtgtataccacgtcaacctagaaggagttattgaaacagctccagacagccaagcctttggcacagttcatgtctatcctgacaaaatgatgttgaaagggagaggcagagttccagatagaattatgaattacaagaaaggaagagccttccattgttagtctaatttattttaacttgatagaaaatgagctttgtgtttgtccctcctaaacaaaaaaataaaaatcctctgtctcattgt

SEQ ID NO: 43568 - DNA, 1276 bp, Homo sapiens
ggcgctgttacatagcccgtagtcagaggcctttcagcccaggggccggcgcacgaaacctgtttggaggttatggatgataaacccaatcctgaagccctaagtgacagttcagagcgtcttttctcctttggcgtcatcgcagatgttcaatttgcagacttagaagatggctttaatttccaaggaaccaggcggcgatactacagacatagtcttcttcacttacagggtgccattgaagactggaataatgaaagcagcatgccctgttgtgtccttcagcttggagatatcatcgatggatataatgcacagtataatgcatccaaaaagtccctagaacttgttatggacatgttcaagaggcttaaagttccagttcatcatacatggggaaaccatgaattctataacttcagtagagagtatttaacacactctaaacttaacactaagtttctagaagatcagattgtacatcatcctgagaccatgccttcagaagattattatgcttatcattttgtaccattccctaaattccggttcattttacttgatgcatatgacttgagtgtcttgggcgtggatcagtcttctccaaaatacgagcagtgtatgaagatattgagggagcacaatccaaatacggaactgaatagtcctcaaggtgaattattcctttgagctgagaatctaatagattgtctttaaattcttcagctaccttttattcagcaggaagatggacaattaaggactttctgagccccagtttgtccagtttaatggaggattcagccaagaacagctaaactggttgaatgaagtgctaacattctctgacacaaaccaagaaaaggtggtgattgtgagccatcttcccatttacccggacgcctctgacaatgtgtgcctggcctggaactacagagatgccctggcagtcatttggtctcatgagtgtgtggtgtgtttctttgctggtcacacccatgatggtggctactctgaggatccttttggtgtataccacgtcaacctagaaggagttattgaaacagctccagacagccaagcctttggcacagttcatgtctatcctgacaaaatgatgttgaaagggagaggcagagttccagatagaattatgaattacaagaaaggaagagccttccattgttagtctaatttattttaacttgatagaaaatgagctttgtgtttgtccctcctaaacaaaaaaataaaaatcctctgtctcattgtttag

SEQ ID NO: 43569 - DNA, 1416 bp, Homo sapiens
ggcgctgttacatagcccgtagtcagaggcctttcagcccaggggccggcgcacgaaacctgtttggaggttatggatgataaacccaatcctgaagccctaagtgacagttcagagcgtcttttctcctttggcgtcatcgcagatgttcaatttgcagacttagaagatggctttaatttccaaggaaccaggcggcgatactacagacatagtcttcttcacttacagggtgccattgaagactggaataatgaaagcagcatgccctgttgtgtccttcagcttggagatatcatcgatggatataatgcacagtataatgcatccaaaaagtccctagaacttgttatggacatgttcaagaggcttaaagttccagttcatcatacatggggaaaccatgaattctataacttcagtagagagtatttaacacactctaaacttaacactaagtttctagaagatcagattgtacatcatcctgagaccatgccttcagaagattattatgcttatcattttgtaccattccctaaattccggttcattttacttgatgcatatgacttgagtgtcttgggcgtggatcagtcttctccaaaatacgagcagtgtatgaagatattgagggagcacaatccaaatacggaactgaatagtcctcaaggtgaattattcctttgagctgagaatctaatagattgtctttaaattcttcagctaccttttattcagcaggaagatggacaattaaggactttctgagccccagtttgtccagtttaatggaggattcagccaagaacagctaaactggttgaatgaagtgctaacattctctgacacaaaccaagaaaaggtggtgattgtgagccatcttcccatttacccggacgcctctgacaatgtgtgcctggcctggaactacagagatgccctggcagtcatttggtctcatgagtgtgtggtgtgtttctttgctggtcacacccatgatggtggctactctgaggatccttttggtgtataccacgtcaacctagaaggagttattgaaacagctccagacagccaagcctttggcacagttcatgtctatcctgacaaaatgatgttgaaagggagaggcagagttccagatagaattatgaattacaagaaaggaagagccttccattgttagtctaatttattttaacttgatagaaaatgagctttgtgtttgtccctcctaaacaaaaaaataaaaatcctctgtctcattgtttagtattcagcttgcataacaaaatgtatttatagtttcagtgtgtgatggttgataaaatactcagaaatgttattttggatcatgtatccattgtaagttagaaacaaaccagggaggaaactgaggcaggggtgtatagt

SEQ ID NO: 43570 - DNA, 1035 bp, Homo sapiens
atcgtctttttactttatttagaaacctgtttggaggttatggatgataaacccaatcctgaagccctaagtgacagttcagagcgtcttttctcctttggcgtcatcgcagatgttcaatttgcagacttagaagatggctttaatttccaaggaaccaggcggcgatactacagacatagtcttcttcacttacagggtgccattgaagactggaataatgaaagcagcatgccctgttgtgtccttcagcttggagatatcatcgatggatataatgcacagtataatgcatccaaaaagtccctagaacttgttatggacatgttcaagaggcttaaagttccagttcatcatacatggggaaaccatgaattctataacttcagtagagagtatttaacacactctaaacttaacactaagtttctagaagatcagattgtacatcatcctgagaccatgccttcagaagattattatgcttatcattttgtaccattccctaaattccggttcattttacttgatgcatatgacttgagtgtcttgggcgtggatcagtcttctccaaaatacgagcagtgtatgaagatattgagggagcacaatccaaatacggaactgaatagtcctcaaggactttctgagccccagtttgtccagtttaatggaggattcagccaagaacagctaaactggttgaatgaagtgctaacattctctgacacaaaccaagaaaaggtggtgattgtgagccatcttcccatttacccggacgcctctgacaatgtgtgcctggcctggaactacagagatgccctggcagtcatttggtctcatgagtgtgtggtgtgtttctttgctggtcacacccatgatggtggctactctgaggatccttttggtgtatccttctcaacctttactgcactattgaaatccctttttctagtcttttctttctaccattttttggctatctttaccttctgatgtctatcgtgttaggacttttcttatttttttctcccc

SEQ ID NO: 43571 - DNA, 417 bp, Homo sapiens
taaaagcaaacccctcactgctgctgtataaagttgccctaatgtaaatgtctattgtttaagtcccctaggtcacctttgtgctgtgctgtggagttcagaaacggggtacccatgacctggaatcttttgcctcttgtttttgcagtcttcaaggctgggggccctgtctcattgggaagcccctctttataaagcattatattacttggaatggcttggtcaactgtgttcagttcataaatatgttttacatttttatctgcctgttataaagatgaacaaaaaaacttaatgagaaagatcacagatacgtaataatttaaagtctgtagttgaatttcctaacttaaagaatagaccaaaatttctgtgtataaaaaaaaatgaaaggctccttacatcctggtctgggta

SEQ ID NO: 43572 - DNA, 342 bp, Homo sapiens
caccatgaatcccacctttcttgcctgcattttctctttccctcactgctgcttgttcctttctctgctggccaagagactctcttaggtctccctttgggtaaagaaaaaaaaactactttaactttgctgcctccaggaaccaggcccctcctccccttcactccacactccttgaaaatgtagtccatgttgccactgccaaagccgtgtccctcccggctgccctggggaaacatttcctctaagggtcctcagcgtcctcctcgcagcccacctgtaaccaaggcctggtcttgttcctcacaatccagacactgcatgctaccccgtctagagggg

SEQ ID NO: 43573 - DNA, 353 bp, Homo sapiens
tgactaaacacttggttctgacttgctttctcacccatattccaacaacttattctagtctactgtaatcccagttataaaactgtcactgacatcatctgttgcaaaaaaattatttacaactggatccatcatcaactcagtctacactaccagctttgaattccaaagcaattccacaccacaatccacatctgtattctcaaatccactttgatacagtttcccaagtccactttgatacagttacctctttagaaagatattagaatgacaaattttctggaaacaggttttcttcggggctggggctggaaggacattaaattaaaaagatggacctggcttaagac

SEQ ID NO: 43574 - DNA, 598 bp, Homo sapiens
agggttgcagaggcgccgagggctgggggggctgccggggctgccgggccctcgtgcaggctcctccccgcagcctcgcggccgggcctggagaccgcgtgcccggacgccgccgccagcctcgtgggccgcaaaggggcgggggcggcccctggcggcgggaggactcggccgcccgagggaccccgggccaggctccggggtcgccccggctgggtctctgcggccccacagctctgggcggggatgggggcgccggcgcctacgcgcgaggccaaccgggggaaaccgaggcagtgaatggcccaggccccgcccggttatcccggagccaggccgggagcgcccagtgtcccgcgaccgcagccgccgcagcctgaactcgtcccctcccagtaggatgcggagcgcggcccttccatcctgtccctgccaccgttgcttccccacgccgggccgccgtcgggatgggcagacggcgcggccggtacccgaggcctgcgagcgcgaggcccgcggggcgctgcggagccgggagcgcggagccggggcgggggacagacaaaggcggggacggcggcgaggggaagacaaagcg

SEQ ID NO: 43575 - DNA, 1982 bp, Homo sapiens
gcggtggcggcggcggtggctcggggtccactggtagcggcagcagctcgcgcccgcgccctcctcgtacccgtgcgcccccggagaccgatcccgccccgcggcccaggccgggcctggtgagagccgcggggggaggggccgcgtccggctccggaaccgggagaggcgccgaggggtgtggggtgagggccgcccgtggggtcccggcgagtctgcgagccgctctcgcccggggcgcacaggctcgagtcctcgtttcagggccggcccccggctgggcggagccgagacccgctggcggggctcgcggcgtcggggtctggggtccggtcctcgcggggccaggtcgggggccgaggggcggggcgggcggggacctcgggcgctgtccaggggctgcgcagcctaggcctggacgcccgggcgcggcgcagggcagcgagggccggggtcaggtcggggcagcggcttctcatcgcggccccgccggccccgacctcccctcaccccaagcggtcccagcccgcgggacgcacacggcggctgcgcgggagcccccggcccctccgctcccgctaactttgttcttccgagggacggtgccactcgggaccccggcccctggggagcaggggtgggggaggtgggtgaggggcggaagtggcaagaccaagagcaacaggaaatgacttagggaaagtcccaaccgcaatccccccagaccctgcctgtcaacaccccccaccctgcaggctggggccgggctggcggggccctcccgactgacttccccttgcagaacccagcgggtgccgcttctccacccgaggcttccacctccaacgagccatgttccaggctgcaggagccgcccaggccaccccctctcatgacgccaaaggcggcggcagcagcacggtgcagcgctccaagtccttcagcctgcgggcccaggtgaaggagacctgcgccgcctgccagaagaccgtgtaccccatggagcggctggtggccgacaagctcattttccacaactcttgcttctgctgcaagcactgtcacaccaagctcagcctgggcagctacgccgcgctgcacggggagttctactgcaaaccccacttccagcagctgtttaagagcaaaggcaactacgacgaggggtttggccgcaagcagcacaaggagctctgggcccacaaggaggtggaccccggcaccaagacggcctgaggcctctgtaaccttccaccccctctgcggaaggcctggagccggcagggggaaggtgggaaggaggtcgagctgggcttgcgtgggggccaggtgggaaggggatgaggcttgctcaggcgtaggggaccagggcagggctctgctccaggactccttccttcttccttctcccgcagccggtgagggtttggaaaccaggattggggtctgcccaccaccctgcttcctgcttcgttcagcctccctccccacctcaccccaggaccccctgggaggcccccaagcccagctcccctatctaggtgccttttctccagcaaggagtcagcatgcccccctcagggtcccaagctccctcactgccaccggagactgtgtggcccccacgtctccccatctacctctacccttaacctgtttctgagccacggagacagggaggaaggagcgcgacagtgccacctgttgggcatcataaatgcccctgcagcccatgggggaggagatggggaagtggagccaccctgcctctgcagggcaaggcagggcctgccccagtggggcttgggaccatctcgaaccaccagcgtggagaagcagaagcaaaagcactcgccaggctgcagcctcaggcactggcaggggctggtgcggccccactcccctcccccgctcccatttgtgcccatcctgttgtgaccaaccccgttttaaacatgtttcaatagatccagattctctat

SEQ ID NO: 43576 - DNA, 1346 bp, Homo sapiens
gcggtggcggcggcggtggctcggggtccactggtagcggcagcagctcgcgcccgcgccctcctcgtacccgtgcgcccccggagaccgatcccgccccgcggcccaggccgggcctggctggggccgggctggcggggccctcccgactgacttccccttgcagaacccagcgggtgccgcttctccacccgaggcttccacctccaacgagccatgttccaggctgcaggagccgcccaggccaccccctctcatgacgccaaaggcggcggcagcagcacggtgcagcgctccaagtccttcagcctgcgggcccaggtgaaggagacctgcgccgcctgccagaagaccgtgtaccccatggagcggctggtggccgacaagctcattttccacaactcttgcttctgctgcaagcactgtcacaccaagctcagcctgggcagctacgccgcgctgcacggggagttctactgcaaaccccacttccagcagctgtttaagagcaaaggcaactacgacgaggggtttggccgcaagcagcacaaggagctctgggcccacaaggaggtggaccccggcaccaagacggcctgaggcctctgtaaccttccaccccctctgcggaaggcctggagccggcagggggaaggtgggaaggaggtcgagctgggcttgcgtgggggccaggtgggaaggggatgaggcttgctcaggcgtaggggaccagggcagggctctgctccaggactccttccttcttccttctcccgcagccggtgagggtttggaaaccaggattggggtctgcccaccaccctgcttcctgcttcgttcagcctccctccccacctcaccccaggaccccctgggaggcccccaagcccagctcccctatctaggtgccttttctccagcaaggagtcagcatgcccccctcagggtcccaagctccctcactgccaccggagactgtgtggcccccacgtctccccatctacctctacccttaacctgtttctgagccacggagacagggaggaaggagcgcgacagtgccacctgttgggcatcataaatgcccctgcagcccatgggggaggagatggggaagtggagccaccctgcctctgcagggcaaggcagggcctgccccagtggggcttgggaccatctcgaaccaccagcgtggagaagcagaagcaaaagcactcgccaggctgcagcctcaggcactggcaggggctggtgcggccccactcccctcccccgctcccatttgtgcccatcctgttgtgaccaaccccgttttaaacatgtttcaatagatccagattctctat

SEQ ID NO: 43577 - DNA, 1641 bp, Homo sapiens
gcggtggcggcggcggtggctcggggtccactggtagcggcagcagctcgcgcccgcgccctcctcgtacccgtgcgcccccggagaccgatcccgccccgcggcccaggccgggcctgaacccagcgggtgccgcttctccacccgaggcttccacctccaacgagccatgttccaggctgcaggagccgcccaggccaccccctctcatgacgccaaaggcggcggcagcagcacggtgcagcgctccaagtccttcagcctgcgggcccaggtgaaggagacctgcgccgcctgccagaagaccgtgtaccccatggagcggctggtggccgacaagctcattttccacaactcttgcttctgctgcaagcactgtcacaccaagctcagcctgggcagctacgccgcgctgcacggggagttctactgcaaaccccacttccagcagctgtttaagagcaaaggcaactacgacgaggggtttggccgcaagcagcacaaggagctctgggcccacaaggaggtggaccccggcaccaagacggcctgaggcctctgtaaccttccaccccctctgcggaaggcctggagccggcagggggaaggtgggaaggaggtcgagctgggcttgcgtgggggccaggtgggaaggggatgaggcttgctcaggcgtaggggaccagggcagggctctgctccaggactccttccttcttccttctcccgcagccggtgagggtttggaaaccaggattggggtctgcccaccaccctgcttcctgcttcgttcagcctccctccccacctcaccccaggaccccctgggaggcccccaagcccagctcccctatctaggtgccttttctccagcaaggagtcagcatgcccccctcagggtcccaagctccctcactgccaccggagactgtgtggcccccacgtctccccatctacctctacccttaacctgtttctgagccacggagacagggaggaaggagcgcgacagtgccacctgttgggcatcataaatgcccctgcagcccatgggggaggagatggggaagtggagccaccctgcctctgcagggcaaggcagggcctgccccagtggggcttgggaccatctcgaaccaccagcgtggagaagcagaagcaaaagcactcgccaggctgcagcctcaggcactggcaggggctggtgcggccccactcccctcccccgctcccatttgtgcccatcctgttgtgaccaaccccgttttaaacatgtttcaatagatccagattctctataaaaaaaaaaaaaaaaaaaaaaaacaaacaaaaaaaaaaaaaaaaaaaaaaaaaaaagagagggggggggcgcccaaaaaaaatccccgcgggggggccccgagaaggcgcgcccccgctttgggggaaacagagaaggggcccgccccaataagggagccgccctgttattaaaacagcctacacaagccgggggccccgcgtttaacacacgtgggccgcgcgggaacaaaccgctgtcacctggcgcacaacctggggggaagcgaccccacactgcggcgcggggcaccaaagtggccaaacacccccgacaggattaacgctcgcggggacaaataa

SEQ ID NO: 43578 - DNA, 1326 bp, Homo sapiens
  misc_feature (939)..(939): n is a, c, g, or t
gcggtggcggcggcggtggctcggggtccactggtagcggcagcagctcgcgcccgcgccctcctcgtacccgtgcgcccccggagaccgatcccgccccgcggcccaggccgggcctgaacccagcgggtgccgcttctccacccgaggcttccacctccaacgagccatgttccaggctgcaggagccgcccaggccaccccctctcatgacgccaaaggcggcggcagcagcacggtgcagcgctccaagtccttcagcctgcgggcccaggtgaaggagacctgcgccgcctgccagaagaccgtgtaccccatggagcggctggtggccgacaagctcattttccacaactcttgcttctgctgcaagcactgtcacaccaagctcagcctgggcagctacgccgcgctgcacggggagttctactgcaaaccccacttccagcagctgtttaagagcaaaggcaactacgacgaggggtttggccgcaagcagcacaaggagctctgggcccacaaggaggtggaccccggcaccaagacggcctgaggcctctgtaaccttccaccccctctgcggaaggcctggagccggcagggggaaggtgggaaggaggtcgagctgggcttgcgtgggggccaggtgggaaggggatgaggcttgctcaggcgtaggggaccagggcagggctctgctccaggactccttccttcttccttctcccgcagccggtgagggtttggaaaccaggattggggtctgcccaccaccctgcttcctgcttcgttcagcctccctccccacctcaccccaggaccccctgggaggcccccaagcccagctcccctatctaggtgccttttctccagcaaggagtcagcatgcccccctcagggtcccaagctccctcactgccaccggaaaaaggaagaaancctttgggtttggggactgtgtggcccccacgtctccccatctacctctacccttaacctgtttctgagccacggagacagggaggaaggagcgcgacagtgccacctgttgggcatcataaatgcccctgcagcccatgggggaggagatggggaagtggagccaccctgcctctgcagggcaaggcagggcctgccccagtggggcttgggaccatctcgaaccaccagcgtggagaagcagaagcaaaagcactcgccaggctgcagcctcaggcactggcaggggctggtgcggccccactcccctcccccgctcccatttgtgcccatcctgttgtgaccaaccccgttttaaacatgtttcaatagatccagattctctat

SEQ ID NO: 43579 - DNA, 1220 bp, Homo sapiens
gcggtggcggcggcggtggctcggggtccactggtagcggcagcagctcgcgcccgcgccctcctcgtacccgtgcgcccccggagaccgatcccgccccgcggcccaggccgggcctgaacccagcgggtgccgcttctccacccgaggcttccacctccaacgagccatgttccaggctgcaggagccgcccaggccaccccctctcatgacgccaaaggcggcggcagcagcacggtgcagcgctccaagtccttcagcctgcgggcccaggtgaaggagacctgcgccgcctgccagaagaccgtgtaccccatggagcggctggtggccgacaagctcattttccacaactcttgcttctgctgcaagcactgtcacaccaagctcagcctgggcagctacgccgcgctgcacggggagttctactgcaaaccccacttccagcagctgtttaagagcaaaggcaactacgacgaggggtttggccgcaagcagcacaaggagctctgggcccacaaggaggtggaccccggcaccaagacggcctgaggcctctgtaaccttccaccccctctgcggaaggcctggagccggcagggggaaggtgggaaggaggtcgagctgggcttgcgtgggggccaggtgggaaggggatgaggcttgctcaggcgtaggggaccagggcagggctctgctccaggactccttccttcttccttctcccgcagccggtgagggtttggaaaccaggattggggtctgcccaccaccctgcttcctgcttcgttcagcctccctccccacctcaccccaggaccccctgggaggcccccaagcccagctcccctatctaggtgccttttctccagcaaggagtcagcatgcccccctcagggtcccaagctccctcactgccaccggagactgtgtggcccccacgtctccccatctacctctacccttaacctgtttctgagccacggagacagggaggaaggagcgcgacagtgccacctgttgggcatcataaatgcccctgcagcccatctcgaaccaccagcgtggagaagcagaagcaaaagcactcgccaggctgcagcctcaggcactggcaggggctggtgcggccccactcccctcccccgctcccatttgtgcccatcctgttgtgaccaaccccgttttaaacatgtttcaatagatccagattctctat

SEQ ID NO: 43580 - DNA, 1134 bp, Homo sapiens
gcggtggcggcggcggtggctcggggtccactggtagcggcagcagctcgcgcccgcgccctcctcgtacccgtgcgcccccggagaccgatcccgccccgcggcccaggccgggcctgaacccagcgggtgccgcttctccacccgaggcttccacctccaacgagccatgttccaggctgcaggagccgcccaggccaccccctctcatgacgccaaaggcggcggcagcagcacggtgcagcgctccaagtccttcagcctgcgggcccaggtgaaggagacctgcgccgcctgccagaagaccgtgtaccccatggagcggctggtggccgacaagctcattttccacaactcttgcttctgctgcaagcactgtcacaccaagctcagcctgggcagctacgccgcgctgcacggggagttctactgcaaaccccacttccagcagctgtttaagagcaaaggcaactacgacgaggggtttggccgcaagcagcacaaggagctctgggcccacaaggaggtggaccccggcaccaagacggcctgaggcctctgtaaccttccaccccctctgcggaaggcctggagccggcagggggaaggtgggaaggaggtcgagctgggcttgcgtgggggccaggtgggaaggggatgaggcttgctcaggcgtaggggaccagggcagggctctgctccaggactccttccttcttccttctcccgcagccggtgagggtttggaaaccaggattggggtctgcccaccaccctgcttcctgcttcgttcagcctccctccccacctcaccccaggaccccctgggaggcccccaagcccagctcccctatctaggtgccttttctccagcaaggagtcagcatgcccccctcagggtcccaagctccctcactgccaccggagactgtgtggcccccacgtctccccatctacctctacccttaacctgtttctgagccacggagacagggaggaaggagcgcgacagtgccacctcaggcactggcaggggctggtgcggccccactcccctcccccgctcccatttgtgcccatcctgttgtgaccaaccccgttttaaacatgtttcaatagatccagattctctat

SEQ ID NO: 43581 - DNA, 350 bp, Homo sapiens
ggggctggtgcggccccactcccctcccccgctcccatttgtgcccatcctgttgtgaccaaccccgttttaaacatgtttcaatagatccagattctctatttctctattgtgtggcctgctgggggatctgtcacaggaagggtgcagactcaccatggggcgggcatggggggacagggccagccccgactacctcggccctgatgggggcagggagctagaagtgggtgtcagttccctgacacaccattgagaaatgggagggctcctcttcacagcgagggcttcatgctgtcacacccacagtggttttggaactgaaactccacctcacccctcagttctgg

SEQ ID NO: 43582 - DNA, 1299 bp, Homo sapiens
gcggtggcggcggcggtggctcggggtccactggtagcggcagcagctcgcgcccgcgccctcctcgtacccgtgcgcccccggagaccgatcccgccccgcggcccaggccgggcctgaacccagcgggtgccgcttctccacccgaggcttccacctccaacgagccatgttccaggctgcaggagccgcccaggccaccccctctcatgacgccaaaggcggcggcagcagcacggtgcagcgctccaagtccttcagcctgcgggcccaggtgaaggagacctgcgccgcctgccagaagaccgtgtaccccatggagcggctggtggccgacaagctcattttccacaactcttgcttctgctgcaagcactgtcacaccaagctcagcctgggcagctacgccgcgctgcacggggagttctactgcaaaccccacttccagcagctgtttaagagcaaaggcaactacgacgaggggtttggccgcaagcagcacaaggagctctgggcccacaaggaggtggaccccggcaccaagacggcctgaggcctctgtaaccttccaccccctctgcggaaggcctggagccggcagggggaaggtgggaaggaggtcgagctgggcttgcgtgggggccaggtgggaaggggatgaggcttgctcaggcgtaggggaccagggcagggctctgctccaggactccttccttcttccttctcccgcagccggtgagggtttggaaaccaggattggggtctgcccaccaccctgcttcctgcttcgttcagcctccctccccacctcaccccaggaccccctgggaggcccccaagcccagctcccctatctaggtgccttttctccagcaaggagtcagcatgcccccctcagggtcccaagctccctcactgccaccggagactgtgtggcccccacgtctccccatctacctctacccttaacctgtttctgagccacggagacagggaggaaggagcgcgacagtgccacctgttgggcatcataaatgcccctgcagcccatgggggaggagatggggaagtggagccaccctgcctctgcagggcaaggcagggcctgccccagtggggcttgggaccatctcgaaccaccagcgtggagaagcagaagcaaaagcactcgccaggctgcagcctcaggcactggcaggggctggtgcggccccactcccctcccccgctcccatttgtgcccatcctgttgtgaccaaccccgttttaaacatgtttcaatagatccagattctctat

SEQ ID NO: 43583 - DNA, 1528 bp, Homo sapiens
gcggtggcggcggcggtggctcggggtccactggtagcggcagcagctcgcgcccgcgccctcctcgtacccgtgcgcccccggagaccgatcccgccccgcggcccaggccgggcctggtgagagccgcggggggaggggccgcgtccggctccggaaccgggagaggcgccgaggggtgtggggtgagggccgcccgtggggtcccggcgagtctgcgagccgctctcgcccggggcgcacaggctcgagtcctcgtttcagggccggcccccggctgggcggagccgagacccgctggcggggctcgcggcgtcggggtctggggtccggtcctcgcggggccagaacccagcgggtgccgcttctccacccgaggcttccacctccaacgagccatgttccaggctgcaggagccgcccaggccaccccctctcatgacgccaaaggcggcggcagcagcacggtgcagcgctccaagtccttcagcctgcgggcccaggtgaaggagacctgcgccgcctgccagaagaccgtgtaccccatggagcggctggtggccgacaagctcattttccacaactcttgcttctgctgcaagcactgtcacaccaagctcagcctgggcagctacgccgcgctgcacggggagttctactgcaaaccccacttccagcagctgtttaagagcaaaggcaactacgacgaggggtttggccgcaagcagcacaaggagctctgggcccacaaggaggtggaccccggcaccaagacggcctgaggcctctgtaaccttccaccccctctgcggaaggcctggagccggcagggggaaggtgggaaggaggtcgagctgggcttgcgtgggggccaggtgggaaggggatgaggcttgctcaggcgtaggggaccagggcagggctctgctccaggactccttccttcttccttctcccgcagccggtgagggtttggaaaccaggattggggtctgcccaccaccctgcttcctgcttcgttcagcctccctccccacctcaccccaggaccccctgggaggcccccaagcccagctcccctatctaggtgccttttctccagcaaggagtcagcatgcccccctcagggtcccaagctccctcactgccaccggagactgtgtggcccccacgtctccccatctacctctacccttaacctgtttctgagccacggagacagggaggaaggagcgcgacagtgccacctgttgggcatcataaatgcccctgcagcccatgggggaggagatggggaagtggagccaccctgcctctgcagggcaaggcagggcctgccccagtggggcttgggaccatctcgaaccaccagcgtggagaagcagaagcaaaagcactcgccaggctgcagcctcaggcactggcaggggctggtgcggccccactcccctcccccgctcccatttgtgcccatcctgttgtgaccaaccccgttttaaacatgtttcaatagatccagattctctat

SEQ ID NO: 43584 - DNA, 1714 bp, Homo sapiens
agggttgcagaggcgccgagggctgggggggctgccggggctgccgggccctcgtgcaggctcctccccgcagcctcgcggccgggcctggagaccgcgtgcccggacgccgccgccagcctcgtgggccgcaaaggggcgggggcggcccctggcggcgggaggactcggccgcccgagggaccccgggccaggctccggggtcgccccggctgggtctctgcggccccacagctctgggcggggatgggggcgccggcgcctacgcgcgaggccaaccgggggaaaccgaggcagtgaatggcccaggccccgcccggttatcccggagccaggccgggagcgcccagtgtcccgcgaccgcagccgccgcagcctgaactcgtcccctcccagtaggatgcggagcgcggcccttccatcctgtccctgccaccgttgcttccccacgccgggccgccgtcgggatgggcagacggcgcggccggctggggccgggctggcggggccctcccgactgacttccccttgcagaacccagcgggtgccgcttctccacccgaggcttccacctccaacgagccatgttccaggctgcaggagccgcccaggccaccccctctcatgacgccaaaggcggcggcagcagcacggtgcagcgctccaagtccttcagcctgcgggcccaggtgaaggagacctgcgccgcctgccagaagaccgtgtaccccatggagcggctggtggccgacaagctcattttccacaactcttgcttctgctgcaagcactgtcacaccaagctcagcctgggcagctacgccgcgctgcacggggagttctactgcaaaccccacttccagcagctgtttaagagcaaaggcaactacgacgaggggtttggccgcaagcagcacaaggagctctgggcccacaaggaggtggaccccggcaccaagacggcctgaggcctctgtaaccttccaccccctctgcggaaggcctggagccggcagggggaaggtgggaaggaggtcgagctgggcttgcgtgggggccaggtgggaaggggatgaggcttgctcaggcgtaggggaccagggcagggctctgctccaggactccttccttcttccttctcccgcagccggtgagggtttggaaaccaggattggggtctgcccaccaccctgcttcctgcttcgttcagcctccctccccacctcaccccaggaccccctgggaggcccccaagcccagctcccctatctaggtgccttttctccagcaaggagtcagcatgcccccctcagggtcccaagctccctcactgccaccggagactgtgtggcccccacgtctccccatctacctctacccttaacctgtttctgagccacggagacagggaggaaggagcgcgacagtgccacctgttgggcatcataaatgcccctgcagcccatgggggaggagatggggaagtggagccaccctgcctctgcagggcaaggcagggcctgccccagtggggcttgggaccatctcgaaccaccagcgtggagaagcagaagcaaaagcactcgccaggctgcagcctcaggcactggcaggggctggtgcggccccactcccctcccccgctcccatttgtgcccatcctgttgtgaccaaccccgttttaaacatgtttcaatagatccagattctctat

SEQ ID NO: 43585 - DNA, 1388 bp, Homo sapiens
gcggtggcggcggcggtggctcggggtccactggtagcggcagcagctcgcgcccgcgccctcctcgtacccgtgcgcccccggagaccgatcccgccccgcggcccaggccgggcctgaacccagcgggtgccgcttctccacccgaggcttccacctccaacgagccatgttccaggctgcaggagccgcccaggccaccccctctcatgacgccaaaggcggcggcagcagcacggtgcagcgctccaaggtaggggcctggggccgggtgtgcgggaggaggggtgtgagggagcgggatgagcactggggcagcacctggctgagcttcccgcacagtccttcagcctgcgggcccaggtgaaggagacctgcgccgcctgccagaagaccgtgtaccccatggagcggctggtggccgacaagctcattttccacaactcttgcttctgctgcaagcactgtcacaccaagctcagcctgggcagctacgccgcgctgcacggggagttctactgcaaaccccacttccagcagctgtttaagagcaaaggcaactacgacgaggggtttggccgcaagcagcacaaggagctctgggcccacaaggaggtggaccccggcaccaagacggcctgaggcctctgtaaccttccaccccctctgcggaaggcctggagccggcagggggaaggtgggaaggaggtcgagctgggcttgcgtgggggccaggtgggaaggggatgaggcttgctcaggcgtaggggaccagggcagggctctgctccaggactccttccttcttccttctcccgcagccggtgagggtttggaaaccaggattggggtctgcccaccaccctgcttcctgcttcgttcagcctccctccccacctcaccccaggaccccctgggaggcccccaagcccagctcccctatctaggtgccttttctccagcaaggagtcagcatgcccccctcagggtcccaagctccctcactgccaccggagactgtgtggcccccacgtctccccatctacctctacccttaacctgtttctgagccacggagacagggaggaaggagcgcgacagtgccacctgttgggcatcataaatgcccctgcagcccatgggggaggagatggggaagtggagccaccctgcctctgcagggcaaggcagggcctgccccagtggggcttgggaccatctcgaaccaccagcgtggagaagcagaagcaaaagcactcgccaggctgcagcctcaggcactggcaggggctggtgcggccccactcccctcccccgctcccatttgtgcccatcctgttgtgaccaaccccgttttaaacatgtttcaatagatccagattctctat

SEQ ID NO: 43586 - DNA, 1179 bp, Homo sapiens
gcggtggcggcggcggtggctcggggtccactggtagcggcagcagctcgcgcccgcgccctcctcgtacccgtgcgcccccggagaccgatcccgccccgcggcccaggccgggcctgaacccagcgggtgccgcttctccacccgaggcttccacctccaacgagccatgttccaggctgcaggagccgcccaggccaccccctctcatgacgccaaaggcggcggcagcagcacggtgcagcgctccaagcactgtcacaccaagctcagcctgggcagctacgccgcgctgcacggggagttctactgcaaaccccacttccagcagctgtttaagagcaaaggcaactacgacgaggggtttggccgcaagcagcacaaggagctctgggcccacaaggaggtggaccccggcaccaagacggcctgaggcctctgtaaccttccaccccctctgcggaaggcctggagccggcagggggaaggtgggaaggaggtcgagctgggcttgcgtgggggccaggtgggaaggggatgaggcttgctcaggcgtaggggaccagggcagggctctgctccaggactccttccttcttccttctcccgcagccggtgagggtttggaaaccaggattggggtctgcccaccaccctgcttcctgcttcgttcagcctccctccccacctcaccccaggaccccctgggaggcccccaagcccagctcccctatctaggtgccttttctccagcaaggagtcagcatgcccccctcagggtcccaagctccctcactgccaccggagactgtgtggcccccacgtctccccatctacctctacccttaacctgtttctgagccacggagacagggaggaaggagcgcgacagtgccacctgttgggcatcataaatgcccctgcagcccatgggggaggagatggggaagtggagccaccctgcctctgcagggcaaggcagggcctgccccagtggggcttgggaccatctcgaaccaccagcgtggagaagcagaagcaaaagcactcgccaggctgcagcctcaggcactggcaggggctggtgcggccccactcccctcccccgctcccatttgtgcccatcctgttgtgaccaaccccgttttaaacatgtttcaatagatccagattctctat

SEQ ID NO: 43587 - DNA, 643 bp, Homo sapiens
agaggctgggacacaatacaagcaagatgtaggaataccatgctagatctcagggaagaaaatgaggctggagatgtaggagggagagcaattggtacatattaaatgtgttatcctttgcctctttgaaaaatcatctagagacacagtgagaagaggagaaaccacgacaataatattagtgaagagcaatgacaaaggacatgggaggagaattaacaagggagaaaatagagattacaaccccaaatcaacacagttatgctggttaagctgcaggcctggttctgagcctgccagcactcagggaaggttacctgagtttcatggctgccattgtgagaatgaagaaaatatatcagtttctcaaaagaacaccaagttttccaaggactaaactctcagcagaatggcttacttggaaaattacatagggaacatgagtaaaactgggttatgaatgataatgtcattcagataaagaatttacatggttgtcttttgttaagacactttttcattccattaatgtttgctcattgataataaagattatcaatacatttagctttggcatttttatgatagaattcatgtatagtaatatgtaaatgctccattaaaacaaaaacaaacaaaaaac

SEQ ID NO: 43588 - DNA, 342 bp, Homo sapiens
ccacatagaaaaaaaaaagtgtgtgtgtcaggggaagattcctgcatcacaacatacacaaaaatcaacttcaagaagattaaagtcagccgactgtgctggttcacacctgtaatccaaacactttgggaggccgaggtgggtgaattgcttgagcccaggagttcaagaccagccagggcaacatgatgaaaccccatctctactaaaaatacaaaaattagctagacgtggtgacaggcacctgtggtcccaggtacttaggaggctgaggcatgagaatcgcttgaacctgggagacggaggttgcagtgggccaagatagagccactgcctccagcc

SEQ ID NO: 43589 - DNA, 143 bp, Homo sapiens
gagagttaattgaaaaactggtagagattaatagggtaactggataaaaaataagtatgtaaactttttaaatgttaataacatttagataacaaagggagagatacgttttattcatagtagtaaaaaaaaaaaactaaaga

SEQ ID NO: 43590 - DNA, 220 bp, Homo sapiens
tgtcaaatcacgttgcatacacagggtttaataatgatctgacacactttttccttgataaaattgaaaggaaatagggcctatatgttatttactgacacctcatttatattttgaggaaactagaagtccttaaacgtctaaaacaagtgtattgaatgttcatttaagcagtctatcagttgtaaatgtttacatttaaagttaattgtttattgaa

SEQ ID NO: 43591 - DNA, 408 bp, Homo sapiens
tggattgttctctttgactcatctcaattccacaggcccaggtcagcaaaagctgagccttttctagcaggtagacctactaggtcttaacttgggaaaattgaattattcatcaagattcattgaaggggtctgggtgtggtggctcactcctgtaaccccagcattctggcagaccaaggtggaaggatcaattgaactcagcagtttgagaccagcctgggcaacataacaagaccgtatctttacaattttttttttttttaattagccagatgtggtggcgggtgcttgtaatcccagctactcaggctaaggtaggaggcttatttgagctcggcagttcaaggctgcagttctcatgccagtggactctagcctgggtgacagagaaagaccctgtctcaa

SEQ ID NO: 43592 - DNA, 440 bp, Homo sapiens
ttgtcaaaggatttaaagtagcattagatggtagagagaaacaaaagatgacccaagtttcattttctcagctttctactggagagaggacgtcatataaaccagagtgcgaaaaaggtcagaatggaaccctggggctggctagctcaaatttgtatgagggatgaagggcagtcctctctgctcacactaaggctaaatggccagggcctgcggagaaatcacatcctttgctgtaggagtagaagggattccatgtgcctaagaaatgtcagagaaaaaggggatgtgagctccatggatcctctccaggccacctggatccctccttatctttgtaggactctgcttactgccagctggaattgtcaaccaaagggctctaagttgggatctcggtcccttaagatgaggggagatggctgggcgtggtggctcct

SEQ ID NO: 43593 - DNA, 601 bp, Homo sapiens
ctcagggctgtgtctgggacttaagttggatcgtacacagaattaggtcattctcctttccctctctctcttctccaggattctcctgccccctttcctcatcatacccacttgccagttcatatgatcagaaagacaggtttctttgagtgttagccttttcactatacagcagttccttacaagggggacagcctttagcacagagttaagaaaagagagaaaaaagggggattctgtccacacttttcaggcaatactgatcccttttcccagttcctctggtagacactttctcttgagttttatgttccccagttgccatggttggtgtctgctctgaggctagggccagccttggggcagggctgggaggtgagagagaaagcaacataaagccctgggctttgtcctataccttctggcatgcaggggtcattttccttggtcttctggataaaaataggtttactgtctgtgcccactggatggttcaaagctgaaagacaaaaaagaaccaaaaaaccgaaaacaaactgaaactcgtcaataaatgggttgttattaagatttcaacttcagtccccaatctacctgctat

SEQ ID NO: 43594 - DNA, 540 bp, Homo sapiens
  misc_feature (496)..(496): n is a, c, g, or t
ctgtgtgtacatcagttgggcttctttgatagcccagttctggcttcttttacacaatacaccgagaaacaccaattaatagtatattatacattacagataatagtatattatacttaacagatattctcatttgatgccaacacactgaagaaatgttatctctggtttcccaaataacaaaacctggggctcaggaacttttaagtgacatgcttggaatcatatggctagaagctgacacaagctggggctagaaacctgatctcaatcagattattaactcttcgagagcagggagtgcatcttcatcactgatttagccaagcacttgactgacacacatcttggcacatagttgaagcccagagaggtattcagcagacgttgagcccctcctccatatcgtgcagctgtccttgactctgagctattgtgagattgctttggcagaagattctggactcttgcagtgaaactgagcctctcctcttangacccaggggcatcagctactttaatgggtgagaaaattctctc

SEQ ID NO: 43595 - DNA, 337 bp, Homo sapiens
aaaaaaaaaagctatagccacactttttatcagtgtaatagtttctatggtgggttaaattcctctgaaatagagtatttatgcttgctggaatttctgagcaagtttgataaatagtaagaattgctttgtctttgggccaagctcaccatggtttgtggagtttgtatctctttgtgccccatgatgctgaaagagagcaagaccatgcttttgttttccagtctgtaggataccactccctcctccaatcactcgtccctgtgaagtttcaaggaataagagtatattggtagaactaacctgggtcatgcccctcatcagtgttctctttgtt

SEQ ID NO: 43596 - DNA, 207 bp, Homo sapiens
  misc_feature (163)..(163): n is a, c, g, or t
aaaaaaaaaagctatagccacactttttatcagtgtaatagtttctatggtgggttaaattcctcctccatatcgtgcagctgtccttgactctgagctattgtgagattgctttggcagaagattctggactcttgcagtgaaactgagcctctcctcttangacccaggggcatcagctactttaatgggtgagaaaattctctc

SEQ ID NO: 43597 - DNA, 328 bp, Homo sapiens
cagtggagtagcatgaatgactccatgtgacagtctcctttaatgattgatattatttttgagtcaggcataggattgcttttggttattcacaccacttctctattatcttcacacagataataaaacattgattcagatagctgctttaaactataaaattctaggcccatggcttggccatgtcttgtagtcctagcacctaggacagggcctgacttccagtgggttttcggtcatgtttgttggctgggaacagaaccaccctaagatgatatgttattggttaagagcctacaagtggactgcttaatttttaagctgggtt

SEQ ID NO: 43598 - DNA, 392 bp, Homo sapiens
ctcatcatttagctcccacttataaatgagagcatgtggtatttggctttctgttcctgcaaagaccatgatctcgttctttttatggttaaggccccttttaattcaagtctcctttaaggctctcatcaggtgagttacagttgtagttttgtacagaacggggaagggaagaaatgactatctgacagttgaaacatagacatctaatcactaggtcagatcctggccaaacttgttaaagtcttgggagaacagcttaataatcatgtggtgcatcagttctaaaaatagactgggaactttgcaaggtcggtgtctcactaaagatacataataaccaaatgcaacgtatgaattgtaattgggtcctgttttgaaaaacccagcaa

SEQ ID NO: 43599 - DNA, 212 bp, Homo sapiens
ccatgtgtcctggccacatcccagtctgttcttcccatgacctgaggggtctggatttccactgttggtgctgtcattgagttaaggtgcggtgcctctcgtttaaactgctgataacagtggtggcaccaaggtgtgggctggggggtgcttaagccccttttaatctctatcataataactcccttatccaaataaacaccatcgacata

SEQ ID NO: 43600 - DNA, 641 bp, Homo sapiens
ctgagaacaaaaaccaaatatttcttgttataacacacctatgggacaaaattcatttagttttctacatttttgtctttgaatgctgcattagttaaattagatgtgtttggtcccaaaatataatgtgggatatagaagataacaattatttcttaaaatgggcaaagtgagttttgtagacctgaaacttcgtaaagaaaatatttataactttcccaaagcctcaaaccttatatgacaaatgcattgtcacattttatttgaagtcttttcagtggtctgggttgtaaatcagagttaggaagggtgtgatagctcctatggttagggagtttagagccacaggaatttaagagatttgccatgctgaatgggccctgaacccacgacctgacccgtaggtaatttagtttcctaaaccattggatccatctttatcgataaaggagcatctgtttcggtctttcagatcatactattagctccaaaattttttaacttccaaaattaaatacatattagtcagagaaatggtccttacttaagtcaaattgaaaaaatgaataaacgaggcacagtggctcacgcctgtaatcccaacactttgggaaggtaaggaaggagaatttcttgagccc

SEQ ID NO: 43601 - DNA, 527 bp, Homo sapiens
ttccacaggtggattttaagtgccttgaaacagggtgtatgctttatgtgttttataccattttcatcagttagcattagctgtgtaacaacacttccaaatttagtggcttaaaacaacaagcatttactatttctcacgattctgtgagttggctgggcagttcttctagtttggactggctcgactggggctgaataatctgggatagaggtaggcgaaccatagcccacaggcctgccacctgtttttataaatagggttttattggaacacagccactcccatatcgtctatggctgcttctgcactacaacagcagagctgagtatttggaatggagatgatcatatgcccacaggcctaaagtatttcctgctggtcctttaagaaaaaggttgttaccccccattctaggatggttggtctggggaggcctcccctgggatgactcatctctgttccacatgttctctcatcctccaggaggctagcctggaattctttatatgatgccctcaggggta

SEQ ID NO: 43602 - DNA, 383 bp, Homo sapiens
tgaggttgatctacaagagctaaatcaagtgggctctgatgtcctctggcttgaggcttggttggagaccagagggagaaaagagagtgaggctggagtatttatttccttggctccttcagcaaaaagtcactgttcttttaaaggcgaataactgtgtctgactttttgtctcctgttgggttatagcaactctcccctcacatgttttattccttttgttttctctgcctctgttcttttgtatatagcttcctaaaaatctcctggaattttcctattttgcatgcatgctctgttgtaagttgagatcctgatggataaattttattagctacattctttttttgtctcctgaccaaaacagtgagaggtggatatga

SEQ ID NO: 43603 - DNA, 305 bp, Homo sapiens
aaaatttgagctttcacttaatgtaaatgaaatttaaatttagattgaatattaccctagaattatcaaatatgactttcaaatgaatcacatttcttaggcaactccataaggactgactttgctgacagttaaagttgatgccatctattactttttaaacacacctttggaaatcttggtctgtaagtgttttaaaataacctgtcaaacttggttattttattttattaaatatgcatcttctgaatagtcattttgaatttaatgacttaataggtatatgtattagattctcaagtaat

SEQ ID NO: 43604 - DNA, 972 bp, Homo sapiens
  misc_feature (1)..(1): n is a, c, g, or t
ntctcggcgcgcgccccgcccgcggagcctgagccgagcccgggttccactctagggagcgtctcaaaagtgcgctgctcccgccccctctagttggcctcgctcacagcttcctgcatcccggatccctgccccctccccctgcgcgccccagcaatctaagcagatggccgcactgtcgggaacatctggaggtcgccggagtacgtgcctgtgtatgtgtatgtgtgtgtatgactgtgtgtgtggaaagagagagggaattagttgctagtaagaaagagatttggtgggtgggtgagggcttcctctttgcttgttcaccgcccctccccatttttttttaaagagtgaaagaggttcagggactaccgggagcaagaaaccaagaatctgaagcagagaaagactggctgaaagacgaacccacagagaagagagagcccggctcgggcagaaaagctggcaggagaggagagagaaagtcaacagattgagtttttcttttaggaggaaaccattggcttctggttagagttctaagaagggaaactggcgtgtgagtaggcagcagtttcagtctattccccctgctgtagctcttgggctctcacccctctttatgttaaaaaaaaaaaaaaagggcaggaaagcatccaagacactttaaaatgagggtttgcaggagaaatgacctggtggacgcatttcctaggaggggagagtcaggtgtgtgggtggctcccagtctacacaccccgacaatgcctaccttgggagaggggcagttcacaggtgggagagttgatagaggctttggtcttgggccctggacctcccaggagcttctcctagactttggagggcctcggggtgcagaaattgggcaatgtacctcctgcagtggcccagacttgttaacacacccagtctgcttgctgcttctttccttattactttttcttattcatt

SEQ ID NO: 43605 - DNA, 629 bp, Homo sapiens
  misc_feature (1)..(1): n is a, c, g, or t
ntctcggcgcgcgccccgcccgcggagcctgagccgagcccgggttccactctagggagcgtctcaaaagtgcgctgctcccgccccctctagttggcctcgctcacagcttcctgcatcccggatccctgccccctccccctgcgcgccccagcaatctaagcagatggccgcactgtcgggaacatctggaggtcgccggagtacgtgcctgtgtatgtgtatgtgtgtgtatgactgtgtgtgtggaaagagagagggaattagttgctagtaagaaagagatttggtgggtgggtgagggcttcctctttgcttgttcaccgcccctccccatttttttttaaagagtgaaagaggttcagggactaccgggagcaagaaaccaagaatctgaagcagagaaagactggctgaaagacgaacccacagagaagagagagcccggctcgggcagaaaagctggcaggagaggagagagaaagtcaacagattgagtttttcttttaggaggaaaccattggcttctggttagagttctaagaagggaaactggcgtgtgagtaggcagcagtttcagtctattccccctgctgtagctcttggctggggacctctagatcacccag

SEQ ID NO: 43606 - DNA, 298 bp, Homo sapiens
gttcctcctgttcattatgcaattccctaaatgtagtatatccttcatgatcttattctcttgtctgtgctgcaggctaatgtttcatatgcatgtattttatttttatttaaagttatttttacatggcagtggaatgtgccttcatctgtcaacattaaccccattggacttgcagggcactcccttaaaaggaactgtcgcttaggggattaggcaactaaaccggacctcttgaattacttcactgtgctttctgaggaaatgctgattggttactgctaaagattccactaac

SEQ ID NO: 43607 - DNA, 600 bp, Homo sapiens
ggggtttcaccatgttggccaggatggtctcgatctcttgaccttgtaatctcagtactttgggaggctaaggcgggaggatcactttaacctaagagttcaaggctgctgtgagctgtaagtgtgccactgtactctagcctgtgtgacagagcaagaccctttctctaaagtacatacacacacacatacatacatacaggacttggcctttcagctcctatatttgactgaagttcttccactatgcacttattgtcagttcttgagatgatgctctggacttaataactttgatcagaccttctaaacccaaatttgaagtgaggaccagaccagaaaatctaggatacatgatggctagagacacaggtgtagcttttaatagatgcaggctaacagctgccattttcccattctctagatacattattctattttcatcttccccagaaccctgcaaggcagtgctttcacttcctgaaagaaactggcaggatagggaccttaccatagaacagagttctgggagaagggaactgaaccaggtcccttgcagctgtccctagacttccctgaccccatccttgcttgctttcc

SEQ ID NO: 43608 - DNA, 234 bp, Homo sapiens
ctggcaggcagagggctacagaaacagggtgatggattctaatgaatccatctggagaacacctggagaagttcattctgatgaacacctggagaagtttcatgtgagaggcaggcacggggttgtgagaggcaggcatggggtcaggagaggagtcatctaccaggccctggagtgtgggctgtggagatggaggaggttcttagactggagttgcccttcagttctgtaggg

SEQ ID NO: 43609 - DNA, 431 bp, Homo sapiens
aagatctctctctgtaatgctgatgaagatcactataatgctgaaaagcattcattatgactgggcaccagccaaagcacagcttattttatgccattaccgctattggaatagtacaaaatgtgcctacagtgggctgttggacctgctcattaaagcactgtcaatctgctcctctctcaccactacaaagagtagatcagtagcaagccactactgcttgaaatatttttttcacatagtgtgaatctctttccatgaaatctttagtccttgaaatttaaggaatataggggccaggagtggtggctcacgcctgtaataccagcactttgggaggccaaggagggtggatcacgaggtcaggagatcaagaccatcctggctacacggtgaaaccctgtccctactaaaaatataaaaaattagct

SEQ ID NO: 43610 - DNA, 397 bp, Homo sapiens
agttccagctacttgggaggctgaagtgggaggatcacctgagcccaggaacttgagactgcagtgagctatgattgcgtcactacacttcagactgtgagacagagtaagaccctgtctggaaaaatatatatacatatatatacattttttttattttttatttttatctttttttgagatggagtctcactttggcgccctggctgcagtgcagtggcgcgatctcagttcactgcaacctccacctgccaagttcaagcgattctcctgcttcagccttctgagtagctaccattacaggcgcgcgccaccacgcccggctaatttttgtattttcagtggagacggggttccaccatgttgtccaggctggccaggctggtctcgaattcct

SEQ ID NO: 43611 - DNA, 1039 bp, Homo sapiens
  misc_feature (2)..(2): n is a, c, g, or t
  misc_feature (4)..(4): n is a, c, g, or t
  misc_feature (6)..(6): n is a, c, g, or t
  misc_feature (10)..(10): n is a, c, g, or t
  misc_feature (1036)..(1039): n is a, c, g, or t
tncngnacanagctataacatggcagcctcgcatcccttcctgcttaccacctttctagatattaaggcttacttagttcttactgaattaaatggagagtgacttgacaactcttggccagccattcttaatgatatttgtgttcctaagatatagcagtatctgcaaatcctaaatctgtctcatgaagattttatgatcttttagatcagtgattaatggaagacaatgtcctttatttttttaaataaaaaataatgacctgaactttctctgtagccaataaaggtgagtgtgaatggctatcaccatggtagtgttgggagttaacattctctagttaaaacatactataacttccacacaccagctaaatggaaacgctcttgacaggatctgctatgaagaaaatggaaaggagtaacatgaggatatgtggaataagtccggagatggagtagagtaaaagcaccattgcccaagggcagagttggataccactgcagtaaagagtgactgattaggcagtgtgttaagttttatgtcaaataattggtggttgttagatgtgaggatgatctggctgtgacatctgtcaccccattgattaccagggttgatttggctgatctggctggctaggctggtgtcccgttccatcctcactgctccatgcacgtccctcccaaagctgcattctcagtcgaagaggacgaccatccccgataaaggaggaccagtctcggtcaagggtatatgagtagctgcactcccctcctagaacctccaagctttcaaataattggtgattcttaagatacatggagctaactaggggttagaatgatttcccaaacttctcctagaaggagactgtagtgccagaccatactgtcaacttttagatgtgtggtgtgacccagagagacctgaatttttattttatgagactagaattggatcaaaagtaaaaatatgaactagtcttcaaattaaatcatatctagggcttataaagaaagtagtgaatgcttnnnn

SEQ ID NO: 43612 - DNA, 312 bp, Homo sapiens
tccagggtgtctgatttttttacttagaccctgacaactcattctaatcatgatcagatgaccaccttatttacaattcattagccaggtataatattaattgagccttgctgtaaaatgggaaatgctacttcttacacacactccctccctcccgcaaaagtctcttttacaagagaatgggttctggttgtaaactagtactttcttgccttggttctttttaaaagtccatgggaagatagttttgtgccattatttttacagcccattggtatgatcatcaaattgtttgatgttttgatatggaag

SEQ ID NO: 43613 - DNA, 274 bp, Homo sapiens
ttttagtagagacagggtttcaccatgttgcccaggctggtctccaactcctgactgcatgtgatctgcctgtctcggcctccaaaagttctgggattataggcgtgagccactgcgcccagcctctgaatcatttttctaagagcatggccaagtgggggccgggagcccacctgctccacccatggggacccagctcctgggcgcacccctgagggttgcaggcctccacccccaacgcagccagtgccttactcatgttggtggtgacgat

SEQ ID NO: 43614 - DNA, 630 bp, Homo sapiens
tgagacagagtcctactctgtcccaggctggaatgcaacagtgcaatctcagcttactacaacctccacctccccggttcaagcgattctcctgcctcagcctcctgagtagctgggattacaggtgcgtgccaccactcctgactcattttttgtatttttagtagagacagggtttcaccatgttagtcaggctggtctcaaactcctgacctcaaatgatctgcctgcctcggcctctcaaagtgctggaattacaggcgtgagccacgacacccagtgaaaaacatcttttaaaagacatttattcaacatcatgatcagactatgacatttggcaatcaacaggatgagtgcaaaggaaaaaaaaaacacattaaaactctttgttaagactgctttacactttccacagaacagaaactaaactaacctgttatacaattagtcacaaatacggtccttgatttttttacccatacacctgagtattgtctaaaacatatcttctttgtagcagctaggccctgctaccaactgtgcttggctgagttcacaaatctgttgtaacctgtagtttccctgtcacttctctggctctcctctcctgctaagctttgtttcctggca

SEQ ID NO: 43615 - DNA, 351 bp, Homo sapiens
tgagatggagtcttgttctgttgcccaggctggagttcagtgacgcaatctcagctcgctgcaactctgcctcctgggttcaagtgattcttcagcctcagcctccgaagtagctgggattacaggtgcatgcaccatgcctagctaatttttctgtttttagtagagacagggttttgccatgctagccaggctggtcttgagctcctgacctcaagtgatcctcctgcctcagcctcccaaagtgctaagattacaagcatgagccaccatgccctgcccctattttctaataaggtcacattctgggattcctggtgaatgtgaatttttggaggacagtattcagtc

SEQ ID NO: 43616 - DNA, 325 bp, Homo sapiens
ctgtgtcccttacccttaagggaagaagccttgccatctaccctcgtgtcccaacatccagctcgagccaatcattgagacactgaagcaaatgacactctgaggctaaaaagggtggccagaggaacccaaacagatgaccttccaaacggtttaggcagcatccaggatcctcccctgaccagtagaagggactgtattgatatttatggagaacctgctgcagtagctcatttcaaacccacagcacccctggctaccaggtattgttaacaccacattccaggtgacacaacagagcccccaaatgtttaagtgacttttg

SEQ ID NO: 43617 - DNA, 185 bp, Homo sapiens
atgttatttattttgtctgaacaagacttttttaattccattctgtgcaaaatattaattaaaattggaacagtatgttctccatccctgtttttcaaactgttggttgcagcatgattagggagtcatatacagacttttgtggatttcatgttaaaaaaaaaaatcaattgttataagagaac

SEQ ID NO: 43618 - DNA, 443 bp, Homo sapiens
atgtcccaggcagtaaccattattgataaatttgctttgtttatccttctaggctcagtgcacgtataaatatggcctcatgtagggaggttttttaaaaaacaaaaatgggatatactatattgtattgcaacttggcattttcaaaatatcacagtatttttccatacgtatttttaagcgtaacttctcttatttttattttcagtaatactttttttttcttccttagggatgtgggggtgggtctcgctatgttgaccaagcttgtcttgaactcctggcctcaagctgtcttcccatcttggcctctgaaggtgctgggattacaggtgtaagccaccacacccagccatttttccatattcatgtgaacagacctgccacactaagtgttttaaaaataatgttaggtttctaaaaaatatacaggtgtgtaaaag

SEQ ID NO: 43619 - DNA, 857 bp, Homo sapiens
cagctgtgacatcactgggctacaggcatttttctgctccattatgtgtaatgttaggggaccatggttgtatatgtggtctgtcgttgacccaaaacgtctttttggggcacatgactgtatataaatgcataaaagatgtgactgcagatgactcctgtgttatgccatccaagattaagcaccctagaataaagagaaattccagaagtaccttgattggccacataggacccaagaatgtgatgtgcctactcttctgctccgctagctaggcagatagggtacttgattggcagcaccaccaaaatcacatggttggaatggaggagaagcagttgccctccaggaaaggtggcagtggtgctggggtgttttaacctttgttttttccgttgcagttcagcaagacgcttccagttacttcctgctcttaaaaaaaaaaaaaaaaaaagaataaatctctcatgactctatatccttcttgacacctaaccaagagaaattgagatgacagttaattgcaaattaataaagaaggccatcatctactcagcctttacctaagtggaatcctgtcttttgcgcatttaacttacaagaatttacctgcatcagtcagttatgtgaagaagaaaagggaatatatttcagcgtacacaaggcccttgtgctttttaggaggagttctttggagctgaagtgggtctgagaagagacattctcatgatagtggagacagtattatagaagctggaagtgatcatttttctctgttatttatttcacttattacctcacacacatattgatataaaactgatcaataaagttagaatttctacattatctagata

SEQ ID NO: 43620 - DNA, 402 bp, Homo sapiens
gggcattttgggcaggacaattatttcttttgtaggactgtcccaagcattgcaggacatggagtacaacccttaacctcctccacagaaatgccagtagcactccccctagtcatgacagccagaaatagccctgtttccagatacccccaggagagctgtttgacatttagttgaggaccccaaggctaaatcccaaaaaagactacctgctgaagagaggtaggagcagccaggttttgtactgctcagcagagtaaaaggaggaaataagggctttttttgttgctttgaggaagtttattttgattttttatttttgccaggagtggtagggtatacagaaacagagactgatggtaatacattatttcattttattctcttgataattttatggat

SEQ ID NO: 43621 - DNA, 623 bp, Homo sapiens
aatgattccagtagttggcttgtgggagaaaataaaagtttacttttcagcaatgaagtgcatagaaatttaatcatagtattttaaagcagattgttatgctttaagaacctctgacaatggaatgtgaagtataacattgtcagtcactgagcagaaatctggtctctgaatatgaattctcaatgactgtaatagtcaatgaatttaaacttttggaataaagatgtaaaatcatatgtaattggttaaaatgctttcacattagattcataatttgaattactttccttggctttgcaaatggagaaaaatttttgtattaatacaattaaaagaccttctaaaccccctgtggcccaaattgtgaaaactagaaacccaaaacttttctaagaatataataaaaatttctgtgtgtgcatcctattacattttaaagagtgtggtatattaagaggataccttttcaatatttacttatttttagtcctgttatgtaaaaactgatttgggagaacttcaatgagagacacaggtaaaataagaatatttaagacaaggataaaaataacgtgaagataaggagcaaggagagcaatattaattaaaaattaagcctg

SEQ ID NO: 43622 - DNA, 384 bp, Homo sapiens
gttagcttcccagatgctctccctatgtccaatctctcatctctccaaattatccttctcctgttgccaaactagattcctaaaaacaggtaaggtcatgttactcctctgattaaaaatattgataactcatcacctgcaaaggaaacttgaaaacattaacatgcatttcattccttttcaggcttatcccctctatagctccctgcttgtgcaagctaccttatctcagaatagttccagttccttaacagttctagatacattgaggccgggcacagtggctcaagcctgtaatcccagcactttgggaggctaagggaggatccttgagcccaggaattgaagaccagcttgggcgacacaggagaccctgtctctacg

SEQ ID NO: 43623 - DNA, 364 bp, Homo sapiens
taaaatataaggaaagcaagacaagtaatgtgcatgaaaactgaaaaaatgtgaacacccgagcctggatgcagcactaataatcaacattgttcttggtttagttaaagaaaatttggccactggcaaaataccatttgggagtaatgagacacacccctaatcctaaaatattttcttgtcacttcctcaaagttgtttttgactttttttccttcagggttgacttcatatgtgttcattttattctaataagcaaaagttgtaatttttaagtgaaaaaataatttatgtcattctacttacaaatacaatttttctattctatatactcatatataaagatactgaagttttactgtat

SEQ ID NO: 43624 - DNA, 754 bp, Homo sapiens
aagtagaatgattttctagctgtaaaagtagacagcaattcacctagttttgtaaacagctattataggtctatatataatgctttcttctattttcagtggtgatctctgaatgaacttaatttctaaagaagctaaaataaagggaaagccttgaaagtttcctaggtaggatagcaatcatttataaagctcttattactcccttgccccaccctaccgctagaggcaggtagtaagggaaggggcggcctgatcctcactcacaagcacaagagggattaaacaaggcaggaaccacaaattccaaggtctcgtggcctgggaagggcaaaaccaatgaggggagcaggcccagcctggcccttggcaagctggtctcctgtcctaagaagcagctgttactaagctctagctattatcacacaagaatttacaagtggcattgctggatcttctagtttttcaagagatagggaatgtggatttatttctaaagcctcccaacttttaaacgttgacatttaaatctaaaattttaaaataatttgtgtgccaaagaaagcatatccacaagccaggattgaaatctgtttatctttttcccattcattattaacgaggtgacctggggcaagagccttaaattttccacaactttcttacggatcagttttctcatctgtaaaatatggataataatatttaacttaaaaaaattctttagaacatgtggaaaaaataatcaaaaaga

SEQ ID NO: 43625 - DNA, 342 bp, Homo sapiens
aggtattttaggggagtttattttgaaactatgtttctaattaagctttcaatatatgcatttacgtatttataacaatatgggctcatgtttttctctttgattcaatgagtagtaatccattttgccattaattatttaaattctcaaactgacaacaatttaatctttcaggatgaccttattatcctttcaacattgtcttaatttttaacaatatatattccaggatcatcttgtaatttttctgcaccagctccagaatcaggcctcattcttttcaatggagcatgttattgagaaccaagatctgggggttcagtgtcctcattgcgattaggg

SEQ ID NO: 43626 - DNA, 405 bp, Homo sapiens
ccaaatttcttaattactggcaaataaaatatatgcacttatagaaaatttaaatttcacaaggtatgagaaaacaaaaatcccctgaaataccacacctgagaccaccaccatgattacttctctgtggatacatacaaagaaccgcacacaagcggcttcagacgtatgattttgttaaagcatttgttgtacagctatatagattaattaccaactcagccccaggatgacagcttccttcctgtccccaccacacctcaggctgtagcaggtggcagggaccttttggaaggaagagactctgccactcagaacgaccagcccggtgtcccagagccagtgctcacagctcagcggacgggacacgggcgggccctcatgctgtggtggggctggccagca

SEQ ID NO: 43627 - DNA, 428 bp, Homo sapiens
tctttctttcacttactacctttcccctaagcctcataagtcaaatcctcaattagcagatttcaaccaagtgaacaagaacttgagtttttgtctcatgatccctcttttcaactttgccgttatacaaaggtctgaaaccaaaagtaagacacttatcttgtattttttttcaatttcccagctgtttaaaatattattctctttgctgtctccaatagatatacggtctagcttgctttctatgttttgccttagatcagttatgtctctggcctaccaaatttcccatttctcctaaaatatatctcctcatctattatcactcagaaaacaacttctttcccaaaactgctgatgaattctaccagaaatctgcttaatgtctgcttattcagtgggattctttctgtctctttcctagatgc

SEQ ID NO: 43628 - DNA, 181 bp, Homo sapiens
ttatgtggcttaaggttttgaatgtgttcatttgtaacctgtcgccaatttctatttcattcttttcctaattattctgtgaaattctttagtgagaacccgcatcttacatctagagtttatgattcttttggaaaaattaagtctactaagtaagaaatatatctaatgcagaaagaca

SEQ ID NO: 43629 - DNA, 302 bp, Homo sapiens
ggactttttagttaccagatgataacctcttctacgatattcccattaaaagcaataaaatcgtggccagaacctacctcaattctgcatttttgatgtgtgaatgggatcgtaagaagaagttataaaaaagagaaaatatctttcacaagtatttctgcttgtaccatgtccgttacattgattcaaaatgtttaaactttaaagaaggtaatacatgcatatggtaaaacaaattgtaaagggcagtaaagagatatcaaatgagaaataaatgtctcccttcttatctcccatctcaa

SEQ ID NO: 43630 - DNA, 178 bp, Homo sapiens
aagattcatgaagttgacaaggatatacaagtagaaagaactttcaaagattatggagtaattgtgctagtgggaaggtaggttgagctataatatcagaaacgttggtcctggtgtggtcgtggttaggtagccttcaaattggttgcaagcagagccttggttctccaagaatgaa

SEQ ID NO: 43631 - DNA, 2204 bp, Homo sapiens
cagaccattgagatgtggaagctgttgctgtgggttgggctggttcttgtgctgaaacaccacgatggtgctgcccataaactcgtgtgttatttcaccaactgggcacacagtcggccaggccctgcctcgatcttgccccatgacctggacccctttctctgcacccacctgatatttgcctttgcctcaatgaacaacaatcagattgttgctaaggatctccaggatgagaaaattctctacccagagttcaacaaactaaaggagaggaacagagagctgaaaacactactgtccatcggcgggtggaactttggcacctcaagattcaccactatgttgtccacatttgccaaccgtgaaaagtttattgcttcagttatatcccttctgaggacacatgactttgatggtcttgaccttttcttcttatatcctggactaagaggcagccccatgcatgaccggtggacttttctcttcttaattgaagagctcctgtttgccttccggaaggaggcactgctcaccatgcgcccgaggctgctgctgtctgctgctgtttctggggtcccacacatcgtccaaacatcctatgatgtgcgctttctaggaagactcctggatttcatcaatgtcttgtcttatgacttacatggaagttgggaaaggttcacaggacataatagccccctcttctctctgcctgaagaccccaaatcttcggcatatgctatgaattattggagaaagcttggggcaccctcagagaagctcatcatggggatccccacctatggacgtacctttcgcctcctcaaagcctctaagaatgggttgcaggccagagcgatcggaccagcatctccagggaagtacaccaagcaagaaggcttcttggcttattttgagatttgttcctttgtctggggagcgaagaagcactggattgattaccagtatgtcccgtatgccaacaaggggaaagagtgggttggctatgacaatgccatcagcttcagttacaaggcatggtttataaggcgagagcattttgggggggccatggtgtggacattggacatggatgacgtcaggggcacgttctgtggcactggccctttcccccttgtctacgtattgaatgatatcctggtgcgggctgagttcagttcaacttctttaccacaattttggctgtcatctgctgtgaattcttcaagcactgaccctgaaaggctggctgtgaccacggcatggaccactgatagtaagattttgcccccaggaggagaggctggggtcactgagatccacggaaagtgtgaaaatatgactataacccctagaggtacaactgtgacccctacaaaggaaactgtatcccttggaaagcacactgtagctctaggagagaagactgagatcactggggcaacgaccatgacttctgtgggtcatcagtccatgacccctggagagaaggccctgacccctgtgggtcatcaatctgtgaccactggacagaagaccctgacctctgtgggttatcagtctgtgacccctggggaaaagaccctgacccctgtgggtcatcagtctgtgacccctgtgagtcatcagtctgtgagccctggaggaacgactatgacccctgtccattttcagactgagacccttagacagaatacagtggcccctagaaggaaggctgtggcccgtgaaaaggtgactgtcccctccagaaacatatcagtcacccctgaagggcagactatgcctttaagaggggagaatttgacttctgaggtgggcactcaccccaggatgggtaacttgggtcttcagatggaagctgaaaacaggatgatgctgtcctccagccccgtcatccagctcccggaacaaactcctctagcttttgacaaccgctttgttcccatctatggaaaccattcctctgtcaactcagtaacccctcaaacaagtcctctttctctaaaaaaagaaatcccagaaaactctgctgtggatgaagaagcctaagcccctctggtgtcagaaaccagggaaaacccttgtcttttcttctaagtgacatgttggaagccttctcatcccggggcaaagcaggcatcaaaaccagaataggccaatctcttttccattaaataaactgtaaacacaagaacccaaaaaaa

SEQ ID NO: 43632 - DNA, 420 bp, Homo sapiens
gactactctaggtaccacacataaatggagtcatacagtgtttcttattttgtgcctggcttatttcacttagcatagtgtcttcacgcttcatccatatcgtatgtaatatgtgcatgtaagaatcttttgggtctaaacatgttggacatgttattatcctcttttttttttttcacaaatgaggcagttaagacacataagggttacataacttcttcaggatcccatagctaataaacagtaaaagctagattcaaatgctggctacactcctaaccacccagctacattgcttcctgagggactatcttcagttttttgccattgtacccagtctagagactgacaagtacagcaggttgactgactgttacttttacaggcatggtttataaggcgagagcattttgggggggc

SEQ ID NO: 43633 - DNA, 2181 bp, Homo sapiens
cagaccattgagatgtggaagctgttgctgtgggttgggctggttcttgtgctgaaacaccacgatggtgctgcccataaactcgtgtgttatttcaccaactgggcacacagtcggccaggccctgcctcgatcttgccccatgacctggacccctttctctgcacccacctgatatttgcctttgcctcaatgaacaacaatcagattgttgctaaggatctccaggatgagaaaattctctacccagagttcaacaaactaaaggagaggaacagagagctgaaaacactactgtccatcggcgggtggaactttggcacctcaagattcaccactatgttgtccacatttgccaaccgtgaaaagtttattgcttcagttatatcccttctgaggacacatgactttgatggtcttgaccttttcttcttatatcctggactaagaggcagccccatgcatgaccggtggacttttctcttcttaattgaagagctcctgtttgccttccggaaggaggcactgctcaccatgcgcccgaggctgctgctgtctgctgctgtttctggggtcccacacatcgtccaaacatcctatgatgtgcgctttctaggaagactcctggatttcatcaatgtcttgtcttatgacttacatggaagttgggaaaggttcacaggacataatagccccctcttctctctgcctgaagaccccaaatcttcggcatatgctatgaattattggagaaagcttggggcaccctcagagaagctcatcatggggatccccacctatggacgtacctttcgcctcctcaaagcctctaagaatgggttgcaggccagagcgatcggaccagcatctccagggaagtacaccaagcaagaaggcttcttggcttattttgagatttgttcctttgtctggggagcgaagaagcactggattgattaccagtatgtcccgtatgccaacaaggggaaagagtgggttggctatgacaatgccatcagcttcagttacaaggcatggtttataaggcgagagcattttgggggggccatggtgtggacattggacatggatgacgtcaggggcacgttctgtggcactggccctttcccccttgtctacgtattgaatgatatcctggtgcgggctgagttcagttcaacttctttaccacaattttggctgtcatctgctgtgaattcttcaagcactgaccctgaaaggctggctgtgaccacggcatggaccactgatagtaagattttgcccccaggaggagaggctggggtcactgagatccacggaaagtgtgaaaatatgactataacccctagaggtacaactgtgacccctacaaaggaaactgtatcccttggaaagcacactgtagctctaggagagaagactgagatcactggggcaacgaccatgacttctgtgggtcatcagtccatgacccctggagagaaggccctgacccctgtgggtcatcaatctgtgaccactggacagaagaccctgacctctgtgggttatcagtctgtgacccctggggaaaagaccctgacccctgtgggtcatcagttctgtgagccctggaggaacgactatgacccctgtccattttcagactgagacccttagacagaatacagtggcccctagaaggaaggctgtggcccgtgaaaaggtgactgtcccctccagaaacatatcagtcacccctgaagggcagactatgcctttaagaggggagaatttgacttctgaggtgggcactcaccccaggatgggtaacttgggtcttcagatggaagctgaaaacaggatgatgctgtcctccagccccgtcatccagctcccggaacaaactcctctagcttttgacaaccgctttgttcccatctatggaaaccattcctctgtcaactcagtaacccctcaaacaagtcctctttctctaaaaaaagaaatcccagaaaactctgctgtggatgaagaagcctaagcccctctggtgtcagaaaccagggaaaacccttgtcttttcttctaagtgacatgttggaagccttctcatcccggggcaaagcaggcatcaaaaccagaataggccaatctcttttccattaaataaactgtaaacacaagaacccaaaaaaa

SEQ ID NO: 43634 - DNA, 278 bp, Homo sapiens
ttaatttgatgtgacctttattttactgtgttcagaagggacagtaactatgagagaaaaacatatctcattaaaagagagagaaggcatcttagtttttctttgtttcatagtgcttagggaagtgtatatcaaacaaatgaaaaaaatgctttgtagggaaatgggataattaagtaatttaaaagtatccttttttttttttttttttttgagacggagtcttgctctgttgcccaggctggagtgcagtgatgcaatctcggctctcggcaacc

SEQ ID NO: 43635 - DNA, 2144 bp, Homo sapiens
gaattccacaataaaacacttgcttttctttttgagaaaaattaggttccttttcatctatttaattattgcccatgtcaaatgcttggttttgaaaactgaggaattctatctgacaaagatgaaaccagctatagttgcttgtaaatcatcctttctagtgatcacataaaatgaacagtagacagcaaataatttaggaattgaacctatacatttatcttataattttgctgacttaagtttccctttcttggtttatgatgccagcagaacttctgtgtaaaattatagtctgttctactgttctcagtttcaggcaactgatttcaaatgcctatgaaaccactccaattaagccacatgggggtgctagaaacttatagtatgccagtcacagcagtggaaaagacctggggtggaaaatagcagatgttattgtgatttaaatttccacttgacatacgttctgatttttggacaaattcaatgttttaattgaatagttttcgttacaaccagaaggcaggttgagattctaactaagcataaataagggtatattgatagtgaaaaaggtccttggaggattaaaacaacacactgttacagatcatttataatatttttctgacttccacattctgttgcatttatttgccgacaatttgacattttcaatctccattttctggcataaatatatttgtaaatagggatattttctattgttcataatgatctacatttaaaactctttatgtaaagctttatatcatttcaaaaatttcaaaaacttacacttaaaatcatctctactgtataaatttgtttttgatccagggaggttgaagtgtctattatatagcaaaagctaaagtaaacctgaagtggaactcacagatgatccacggcgttagcaaacctaaaccctgaactcattatctgagtgtcactttatggtttaattcctttctttttgaagtgtcattgatgcacgcatagcaatttgataatgattgttatttagcggtattagataaataacaagaatagatggccactaaagctacctgtctccatcattttgtggcacataggggtctgaagttgaaagaatacgacagctgatggaatgaatgttaagtatgtaaggccttgagtttccttgccctattttaattatactcaccattagtctgggtctgagtcctctgctttttctcggcccctcaatatccagggaggcttagtcatcaaggtacgtactgctccaacagtaacaagagctccctattaatgacctatagctgacttacatattgcgagtttggagagaggctgagaagattagttgttctttttcatttgtatttatttatggtttactttgaagatctcaactgcttctgtgttagaatggctgtctttagctgtaggcctaggagctagcgatttatttggtgtgcgttcagagaactccaaaattctcctgcctcaacatctatctctgctgccaatgtaccgcactccctttgtacttttcatagagatccttgagaagacaggcagtggggctctcacttgggaaaagagaagtaaattaagagaaaaaatatagaatgctagacgtgggttttctggttccacccttgtgcattggaaggagcagactatggagccagagattggtgcgcagtcctccccactgtagaatcagacgtacatcacctctttcatttctccagattcatgttctttctcttaatctctgcttctagtttttttgtgaagcttaatttatataagtataaatgacatctgacatattgtgagggcccaagaaaatttttcctcttttcccctgaaaataaaaatgctacttgttgtaataaaggttactttatgattttagatatgtattatatattatgattttagatatgtagatatgatagttaaatatttaaagattcattttcagactcacaatttttatttgcttttatattttgcaatgtatcatttcttaatttcctttatgatgcatcacttattttaatatcagacctattttttaaaggaagcaattgatagctacgatgcaaatgctattcttattaaaagataaatagctttccctt

SEQ ID NO: 43636 - DNA, 2465 bp, Homo sapiens
gaattccacaataaaacacttgcttttctttttgagaaaaattaggttccttttcatctatttaattattgcccatgtcaaatgcttggttttgaaaactgaggaattctatctgacaaagatgaaaccagctatagttgcttgtaaatcatcctttctagtgatcacataaaatgaacagtagacagcaaataatttaggaattgaacctatacatttatcttataattttgctgacttaagtttccctttcttggtttatgatgccagcagaacttctgtgtaaaattatagtctgttctactgttctcagtttcaggcaactgatttcaaatgcctatgaaaccactccaattaagccacatgggggtgctagaaacttatagtatgccagtcacagcagtggaaaagacctggggtggttggacaaattcaatgttttaattgaatagttttcgttacaaccagaaggcaggttgagattctaactaagcataaataagggtatattgatagtgaaaaaggtccttggaggattaaaacaacacactgttacagatcatttataatatttttctgacttccacattctgttgcatttatttgccgacaatttgacattttcaatctccattttctggcataaatatatttgtaaatagggatattttctattgttcataatgatctacatttaaaactctttatgtaaagctttatatcatttcaaaaatttcaaaaacttacacttaaaatcatctctactgtataaatttgtttttgatccagggaggttgaagtgtctattatatagcaaaagctaaagtaaacctgaagtggaactcacagatgatccacggcgttagcaaacctaaaccctgaactcattatctgagtgtcactttatggtttaattcctttctttttgaagtgtcattgatgcacgcatagcaatttgataatgattgttatttagcggtattagataaataacaagaatagatggccactaaagctacctgtctccatcattttgtggcacataggggtctgaagttgaaagaatacgacagctgatggaatgaatgttaagtatgtaaggccttgagtttccttgccctattttaattatactcaccattagtctgggtctgagtcctctgctttttctcggcccctcaatatccagggaggcttagtcatcaaggtacgtactgctccaacagtaacaagagctccctattaatgacctatagctgacttacatattgcgagtttggagagaggctgagaagattagttgttctttttcatttgtatttatttatggtttactttgaagatctcaactgcttctgtgttagaatggctgtctttagctgtaggcctaggagctagcgatttatttggtgtgcgttcagagaactccaaaattctcctgcctcaacatctatctctgctgccaatgtaccgcactccctttgtacttttcatagagatccttgagaagacaggcagtggggctctcacttgggaaaagagaagtaaattaagagaaaaaatatagaatgctagacgtgggttttctggttccacccttgtgcattggaaggagcagactatggagccagagattggtgcgcagtcctccccactgtagaatcagacgtacatcacctctttcatttctccagattcatgttctttctcttaatctctgcttctagtttttttgtgaagcttaatttatataagtataaatgacatctgacatattgtgagggcccaagaaaatttttcctcttttcccctgaaaataaaaatgctacttgttgtaataaaggttactttatgattttagatatgtattatatattatgattttagatatgtagatatgatagttaaatatttaaagattcattttcagactcacaatttttatttgcttttatattttgcaatgtatcatttcttaatttcctttatgatgcatcacttattttaatatcagacctattttttaaaggaagcaattgatagctacgatgcaaatgctattcttattaaaagataaatagctttcccttatgctaatgaataaaaattcctactcctacagttgttaatcaatcctcgagttcctaaagtcccgataaacacatttaatagcagaggatgagcatatcattaaattgatggtcagtctctgacttgtgtttacatatagtcatctgaaatgaagttcagaatttgagtcccaaatagactatacccacgcatggacacagggaggggaacatcacacaccggggcctgttggggggtggggggctaagggagggatagcattaggaaaaatacctaatgtagatgacgggttgatgggtgcaacaaatcaccatggcacgtgtatacctatgtaacaagcctgcatgttctgtacatgtatcccagaacttaaa

SEQ ID NO: 43637 - DNA, 2519 bp, Homo sapiens
gaattccacaataaaacacttgcttttctttttgagaaaaattaggttccttttcatctatttaattattgcccatgtcaaatgcttggttttgaaaactgaggaattctatctgacaaagatgaaaccagctatagttgcttgtaaatcatcctttctagtgatcacataaaatgaacagtagacagcaaataatttaggaattgaacctatacatttatcttataattttgctgacttaagtttccctttcttggtttatgatgccagcagaacttctgtgtaaaattatagtctgttctactgttctcagtttcaggcaactgatttcaaatgcctatgaaaccactccaattaagccacatgggggtgctagaaacttatagtatgccagtcacagcagtggaaaagacctggggtggaaaatagcagatgttattgtgatttaaatttccacttgacatacgttctgatttttggacaaattcaatgttttaattgaatagttttcgttacaaccagaaggcaggttgagattctaactaagcataaataagggtatattgatagtgaaaaaggtccttggaggattaaaacaacacactgttacagatcatttataatatttttctgacttccacattctgttgcatttatttgccgacaatttgacattttcaatctccattttctggcataaatatatttgtaaatagggatattttctattgttcataatgatctacatttaaaactctttatgtaaagctttatatcatttcaaaaatttcaaaaacttacacttaaaatcatctctactgtataaatttgtttttgatccagggaggttgaagtgtctattatatagcaaaagctaaagtaaacctgaagtggaactcacagatgatccacggcgttagcaaacctaaaccctgaactcattatctgagtgtcactttatggtttaattcctttctttttgaagtgtcattgatgcacgcatagcaatttgataatgattgttatttagcggtattagataaataacaagaatagatggccactaaagctacctgtctccatcattttgtggcacataggggtctgaagttgaaagaatacgacagctgatggaatgaatgttaagtatgtaaggccttgagtttccttgccctattttaattatactcaccattagtctgggtctgagtcctctgctttttctcggcccctcaatatccagggaggcttagtcatcaaggtacgtactgctccaacagtaacaagagctccctattaatgacctatagctgacttacatattgcgagtttggagagaggctgagaagattagttgttctttttcatttgtatttatttatggtttactttgaagatctcaactgcttctgtgttagaatggctgtctttagctgtaggcctaggagctagcgatttatttggtgtgcgttcagagaactccaaaattctcctgcctcaacatctatctctgctgccaatgtaccgcactccctttgtacttttcatagagatccttgagaagacaggcagtggggctctcacttgggaaaagagaagtaaattaagagaaaaaatatagaatgctagacgtgggttttctggttccacccttgtgcattggaaggagcagactatggagccagagattggtgcgcagtcctccccactgtagaatcagacgtacatcacctctttcatttctccagattcatgttctttctcttaatctctgcttctagtttttttgtgaagcttaatttatataagtataaatgacatctgacatattgtgagggcccaagaaaatttttcctcttttcccctgaaaataaaaatgctacttgttgtaataaaggttactttatgattttagatatgtattatatattatgattttagatatgtagatatgatagttaaatatttaaagattcattttcagactcacaatttttatttgcttttatattttgcaatgtatcatttcttaatttcctttatgatgcatcacttattttaatatcagacctattttttaaaggaagcaattgatagctacgatgcaaatgctattcttattaaaagataaatagctttcccttatgctaatgaataaaaattcctactcctacagttgttaatcaatcctcgagttcctaaagtcccgataaacacatttaatagcagaggatgagcatatcattaaattgatggtcagtctctgacttgtgtttacatatagtcatctgaaatgaagttcagaatttgagtcccaaatagactatacccacgcatggacacagggaggggaacatcacacaccggggcctgttggggggtggggggctaagggagggatagcattaggaaaaatacctaatgtagatgacgggttgatgggtgcaacaaatcaccatggcacgtgtatacctatgtaacaagcctgcatgttctgtacatgtatcccagaacttaaa

SEQ ID NO: 43638 - DNA, 487 bp, Homo sapiens
caaaactcacctgaattgcccaggctgtggcccattctatcaaatagcctagagtggggctaatctccaaaggtccaagttttcatcagagaggagaggagccactggtcctctcatggcagtgactctcatggcacatccctgagggtcacttttagcagtggaattgtgggccaaatatgccatttgtctccctcgggctctccactgtgccagtccccaagccagtcatgaccaaggtgggctgtctgtcagattcttactccagccagctggcaaggagggtacccattctgctgtcccagcccaggatatgctggagggcagcatgggtttaaatgccagctctatccctttccacctctcgggctttggtcaaattacttaatcatgttaagcgtcagttttcctgcctgtaaaatgggtatatgagatatcacttttatggagttgttgtaaggattaaaggagtcaatatgtaaatggt

SEQ ID NO: 43639 - DNA, 376 bp, Homo sapiens
ccactgctcccttgcccaacatggtaccatcagcctctttgctggagcagccctgtcgttattaggtggttctgatgccacctatctgtcttgttctatcactcatttcactagctgctgtatcgcatacacccaaaattaaaagctagagatgctcttctggactttagcctctcttttgccagtttctgccaatgatcccaaggtgtctgcacagctaaagacaacgtgttcagccaggaactctctgggtagtggccacttggagccatggtctccagggccttcctactccaagtgcaggagtaggctgcagcctactgggggctgttagagatgcgggatctcagactcaccccagaccttctgatcagaa

SEQ ID NO: 43640 - DNA, 369 bp, Homo sapiens
ggaatgcatctatcttgagtgaacactatgtgagttttaacaaatgcctgcatctctgtgaactgaaaccctatcaaggtttaccatcactccagaaagttctctcatacttccttccagtctcagctcccttctgcccacattccccaagaggcaaccagtgttctggtttttttctactgtagattagttttgtcttttctagaacttgatatgaatggagcatctactcttttgatgacgtttcttttgctctgcattttttttagatttatccacatcttatgtctcatttgcccagtatgtgaatatatgacagttgttgatgtattcttttcatgacagttatctgggctctttgtagttcag

SEQ ID NO: 43641 - DNA, 348 bp, Homo sapiens
caaatagtaatataccatttacttaacttatttaaacaattccttagtgatggatgtttaaagtgttttcaacttttgctattatgaacaaaacaacaatgaataactggagtgcaattttttttaaagaaatgggtgaagaagataaactaatgaagagccttgaggaggtcgtcaatggctcttgctcccacagtgccactcaaactacagtaacaggagccatccataatctccaccccagctcgtctctcttggacattgcatgctgtcatgcttctcccttggctgtcacacccccttcccattggttttccactcgcttatctactctttgccagacccctg

SEQ ID NO: 43642 - DNA, 1094 bp, Homo sapiens
agcctgggcgacagagcaagactccatctcaaaaacaaaacaaaacaaaacaaaaactctttgccttgtaaatagcctgcctttttcaaaaaaatcaatattatcaaatgatacaagagctatcacaaaaggcacccaaacttctgaatatgtgagacctttagctgagaacatttgtatctaattttgaacaatcctattcaaaaagctcctattttcgttaatggaaatgccatgtttctcttagagttacgaaagatctcagaaagtggcaaaagatatttaatgtagccagagctatatatttctgtttttctcgtacttcaagtattctgaaaaacatataactgaccttggtggtgttcacaatgggatgaaacagtatcttaggaattgactttgaaattagtatggaaattcattgtttttaatataacattgagcaacagaaagccttgaatgataagatcaagagtctcccatgaagtctcagctcactgcaactctgtctcccgggttcaagcgattctccctcctcagcctcctgagtagctgggattacaggtgcccgcttgtatttttagtatagacagggtttcaccatgttggtcaggctggtctcgaactcctgacctcaagtgatccgcccaccttggcctcccaaatgcaattacttttgcaccaacctaagaacagtaatctcagtcaatagtggcttaaaccattagaaccaaaaccaggcagagatcagagaaggttcaacgctcaacaatgttatcaagaacccagcttctttttgccttttcttttcaccatcctctgcatgttggccatctgaccctgtgcttgaaacctcatggtcacaaaatggcttgcccctgtgctggacatcatattttttttcaaagaaggtagaatgggaaaggagcagtcataaaaggttttctttcagaagagtctgttggttttggttagaaaaggaagtcccctggcagatttaccattgcttctcattgatcagacctgggtgtcatgcccatcccagcatgagtcctgctgtagggctggaaggaagggcctacgagcaccaaggg

SEQ ID NO: 43643 - DNA, 1113 bp, Homo sapiens
agcctgggcgacagagcaagactccatctcaaaaacaaaacaaaacaaaacaaaaactctttgccttgtaaatagcctgcctttttcaaaaaaatcaatattatcaaatgatacaagagctatcacaaaaggcacccaaacttctgaatatgtgagacctttagctgagaacatttgtatctaattttgaacaatcctattcaaaaagctcctattttcgttaatggaaatgccatgtttctcttagagttacgaaagatctcagaaagtggcaaaagatatttaatgtagccagagctatatatttctgtttttctcgtacttcaagtattctgaaaaacatataactgaccttggtggtgttcacaatgggatgaaacagtatcttaggaattgactttgaaattagtatggaaattcattgtttttaatataacattgagcaacagaaagccttgaatgataagatcaagagtctcccatgaagtctcagctcactgcaactctgtctcccgggttcaagcgattctccctcctcagcctcctgagtagctgggattacaggtgcccgccttgatgcttggctaatttttgtatttttagtatagacagggtttcaccatgttggtcaggctggtctcgaactcctgacctcaagtgatccgcccaccttggcctcccaaatgcaattacttttgcaccaacctaagaacagtaatctcagtcaatagtggcttaaaccattagaaccaaaaccaggcagagatcagagaaggttcaacgctcaacaatgttatcaagaacccagcttctttttgccttttcttttcaccatcctctgcatgttggccatctgaccctgtgcttgaaacctcatggtcacaaaatggcttgcccctgtgctggacatcatattttttttcaaagaaggtagaatgggaaaggagcagtcataaaaggttttctttcagaagagtctgttggttttggttagaaaaggaagtcccctggcagatttaccattgcttctcattgatcagacctgggtgtcatgcccatcccagcatgagtcctgctgtagggctggaaggaagggcctacgagcaccaaggg

SEQ ID NO: 43644 - DNA, 403 bp, Homo sapiens
actgggtgagaaacttcaggagagagccccagcaatctgcattttaataagccctcccaggtgattctgaggcacaaatttgagaactcctgaattagataggctcaatctgatccaaggagaggatttttatctcatggatgtgagaaaggtttcgtctgttcctattgatttgaatcaggaactaaattatccccactgctgctggcagcctttctgacagcatcagagattttggcctgttgattgcaaaagtcaaaatgtttgtcgtcttcacctcaaattaacagattgataccaaatccccaatgtgttggtatttggaggtggggcctttgggaagtgattgggtcacaagggtggagccctgttccgcaggtggtaagtgccacaataaagcaaa

SEQ ID NO: 43645 - DNA, 418 bp, Homo sapiens
tcagcagtacctgcttctagcttcaagtccagcaaatgaggggatgtctctcttttccgtcaacctatggtctgaaagttaagccagccattgcaacacattggcacacaacgggggagagaagacagggttgctgcaataacatcttataaaaaggaggagagaatggacatattccatagatgctgtgttccatcccattgaatgagaattgcaagacctcctgcacactagctgtggcgtgaactcccgagttggcccggttggctgcttttggttttgttctctgagaagatctcccttgtccattgtcctttgtggctcatctaggatgggtgtatacgtcatatttcagctcagatgtcatctcctcaggcagcttttctctggcgtccgagtagaaagtaggcatccagtt

SEQ ID NO: 43646 - DNA, 440 bp, Homo sapiens
tttgggagaatacccaggagtggaatggctgacaacagggcaggtagttactgaacttttctagaaggtgtgagacagttctccaaagtggtggtgccattgaccagtggtggacaatcgtttcacttgcaccatagcctcaccaacttttggtgtttctagtcttttaaatgtttagctgttgtaatggatgagatatggttgcttagttgttttttaaggacattttaaagaattttccagcatgtcagtcaatgccagctcagacactgaaaaggtcccataggagggaaaccaggtgttaaatgtttagggacaggaggtttctactaatcatccctgtccctaaagcagagtctttccagccctgagggctgtctgtgggctgcctcagggcaagctcaaggccgaagccctagagcggggaactagggaagggg

SEQ ID NO: 43647 - DNA, 403 bp, Homo sapiens
gcgtcgaccgcccaggctggagtgcagtggccaatcgcggctcactgcaaactccgcctcccgggttcacgcctttctcctgcctcagcctcccgagtagctgggactacaggcgcccgccaccaagcccggctaattttttgtatttttagtagagacggggtttcaccatgttagccaggatggtctccatctcctgaccttgtgatccgcccgcctcgtcctcccaaagtgctgggattacaggcttgagccaccgcgcccggcctgtgatcagaattttaagaagggcaggaagaaacaaaactattggtggtctagattagaggtcacaaattattttatgtaaaggtccagagagcaaataatttaggttttgtgggtcatacagtctcgtcgacgc

SEQ ID NO: 43648 - DNA, 367 bp, Homo sapiens
  misc_feature (328)..(328): n is a, c, g, or t
gttttacaaacattcatcacatgacatagatttctagccatcccaatatgctgtatgtgttcctcactgcccaacccttaggccaatgtcatatactttgggatcttgttacagtagcaacacaattcaaaatgtcaatttctatgttgatcagggtaagtaactctctctgctgtaacaactaactccaaagcttcagtggcttacacaacaaaagttttccctcttatgtcacaatcaatttgggacagggaaagatggtctttcactatgtgattcaatgacattttgtctactagtgtctatcctagggccttggaaactcccnactaaatattcctcaatgaggagagtatggaaagttttg

SEQ ID NO: 43649 - DNA, 361 bp, Homo sapiens
gacctttcagatctttccagttctttttttgctgtcgtgaataatgtagcaatggaaattcttgcatatcttgactacttgtgtagacacatcagtacaacgtgttgaaagaattggaattgctggattaaaaggtctccgcatttaaaagtttaatagatactggcaaggacttaaaggatggagtggtgcaaggggtcccccctaagtacaggaagtaagggggtatatcatttatatagaattttaaaacagtaataaaaccagtgtgggtctgttttttattatcaccatgcgctggcagtgaaaaagtcagagtaagttcttaatggtgtgtacagctttcactagagctttgggg

SEQ ID NO: 43650 - DNA, 719 bp, Homo sapiens
aaggaataagataagtggaggagcgtacataaaattgcaaagtactttctcccctttcttccttttcctgctttttcttatagtacttggcaccttctggcacactaaataatatactttttaggataatttattgtactcctccctgtcccactagattataagcatcaagagaacagagctatttctatcttgttttgttttattttgttcactgctttgccttcaacatataaaagtatctggtgcagaataagcactaaatagatatttgttgaatgaatgaagacttctgtgaagattctttcagagctactaatgaagatgaaaagaagaaggaaagtgggaggaagcagggaagtgaagaaaggaaaggagggaagaaggaaagaagttaagaagcaaacgaagacattgacaacacttttataggcacttttcataaatgttgttttatttcatcttctcagcaccctgaaaggcagaagcaattgtttgctttccacagatagaaaaattgagatttgatggctccggaatgaataataagggccctgctgatcatacgtagtagccaacttcccattaaaaacaaccatctctgtagttagacagaatttgttttgaacctcagttttgtcttttgccaactatgataacttggtcaagtcacctctttctgagtcttcatttccaaataaagactgtcatactaaatg

SEQ ID NO: 43651 - DNA, 182 bp, Homo sapiens
tcacagagttatgccaaggttatgcagctggtatccccatcaaacctcgagttctttcgaggcagagcccctggggactgggctcaggggtctgggcccagtacaggagccttgtgtggcacagtgagataggactagattcctgccctcccaggggaactcagcaggctgagggggcatca

SEQ ID NO: 43652 - DNA, 587 bp, Homo sapiens
gacatttaacattgtttctagtttggggctgctgcatgtctttggatgaatatgtgtacacatttttgttggaaatagaattgctggtccaacatagatagatagataggtaggtagatacatagatagatagatagatttattattgaatatatataacaaaatgttcttattgttcatcataatttccaaatgacattttttttctatttggtgtggaataactttcatatcttccattaatttttttagacatagttcttttatttgaacatgtttttgatacctggtttaatgtctttgtctaataagtccaacatctgggcttactctgggacaatttcttttgactacttttttatgtttataggccatacttgcctgttcttttgtgtgtctcctaattatttggttgaaaactagacactttaaataatatatcgactctggaaattagagttgttgctgtttttgtgattgctgttgtggtggtggtttatttgtttagtgatgtttctggattggtattgtaaagtctgtattcttttttgtgtgcagccactaaagtatttacttggttaaaaaaa

SEQ ID NO: 43653 - DNA, 439 bp, Homo sapiens
gtgggaggatggcttgagttccagaccagcctgggcaacacagcgaggccccgcctcccaaaaatatttataaaaattagccaggcatagtagcacctagctactcaggaggctgagacaggaggactgcttgagttcaggagtgtcaggttacaatgagctatgattgcaccactgcactccagcctgcatgacagagcgaggccatgtctcaaaaaaagttgtaaaagtaaaatcagtcaatcaattttatcttccatttaaacaggaacaatattgcaaatttctgtcctttactgatggcaactatgcaaaaattttaagacatgtaagatccacacatgattataataaaaacctgtgagggccacatcataaccgtacgtatgcaaagagcacacaactcaaaggggagcaatttacacagagtctaacagca

SEQ ID NO: 43654 - DNA, 162 bp, Homo sapiens
ctccagcgtctgcgacttgccacacactccattcaagctgaagcggctgcccagtccctcgcataatttggagttaatcatttgtacttcacagcctctgagaggccttagacttgggaggtggggacagatttggcttttaatcgctttgtatattgtgcg

SEQ ID NO: 43655 - DNA, 229 bp, Homo sapiens
cccttgttgtggcccctgaacaggctgctgctggcccaccacggtgcctctagtttgtgtaaaatgcatatgttaatttataatatatgaggcttttttagctctaaaaggctattattcactagttgctgtgtgaatcagtatttctgggtgcagttagaaattattagagttgatgcccaagactcatctccatcagcacgggggaggcatctgctcgttttatggt

SEQ ID NO: 43656 - DNA, 391 bp, Homo sapiens
actctaagtaaaatgtacagtatgaatattctaccttgtatgagtaattcatatagggttggaagacctgaatgtctttctggtaatcttagtactacaatattcttttatacttaagtaattatcatattgagcatctgttttttttattcattgcatgcaaccaatgcatattatgaagggaagaattattattgggtttacacattgatcttttttttttttttgagacggagtcttgctctgtctccaggctggagtgcagtggtgccatctcagctcactgcaacctctgcctcatgggttcaagcgattctcctgcctcagccttccgagtagctgggactacaggtgtgcgccaccacgcccaccaagttttgtatttttagta

SEQ ID NO: 43657 - DNA, 429 bp, Homo sapiens
tcgtgaggcttctgcaagttaacttatgtaaaacactgaaaacaggtcctggcacagaataatccctcagtaaggtggtaacttgtttttatgtattgaaacaaaaaacattgttaatagagtattagcacaaccatgcttagcatattcccaagtactatgagacaacatagtctccataattgctccatcatccagaaggaaaagatcatttcatggatgctctagagtggagaaattgtgacttcaaaaccctggagtgagtcaatcacaaaatcagatagaggacccagacttctaattccttgtcaggtgctagaccccgatcaggatgaatgatgctgaacaatggcctggctgttcagagcctgaccttccaggtccaaacggagactgcaacacaaacaaacatgagttcttgtttttgtt

SEQ ID NO: 43658 - DNA, 319 bp, Homo sapiens
gtggttaggtgcatagatttttgaaatcagttaaattagtttttgatacttgatgtgtgacaggggaaactgtgtaagctgtacttgttatttctttgtaaaatgtcttagataataaaactaaatcataaagtagatattggtttaaaggatgtatacattgtcccttttacattgtaagcattcaataagaactagctgcggatgtaattttttttaaaaaagtccaaaagcagctatgggcagttgacaaaagaaaatgtaatgactacgtaacttgcgaatctgtttaccctcacttgcaaataaaataagtgca

SEQ ID NO: 43659 - DNA, 494 bp, Homo sapiens
ggggtcaatttatcaagaggcataacaatccaaaatatttattcccctaataagagagcttaaaaatacatgaaacagaagctgaagcccctatgagaacaaatagataaagtcacagttgtagtcagagataactgacagaaatagaagtagacagaaaattagtaaggttatagaagactagaagaatgctgtgaaacaacttaattaacatttatagaccactccacctaacattagaatgaacattttttttcaaatgttccatggcacatggaacatttttcatgatagaccaaattcaggcccataaaatagttctcaataaatttaaaaaatgttttaagtcatacaatatatgtccttttaccacagtggaattaagttagaaattaaaaacaaaaaatatctggaaaatctccacctatttggaagctaacacatttataaataatccaccggttaaagaatgaatcaaaagataaacagaaagt

SEQ ID NO: 43660 - DNA, 388 bp, Homo sapiens
cgctgaggtgtagccatattccagagcctgaaaagccttgtgtggcctagtggttaagagcatgactctagagtcagcctgccaattccagatgtgctcactgggtgaccctgggcaagtaatttaatcacctggtgctgccctgtcttcatctgtaaaggacactgatggcagtccctgcctcaaatgatggttgtaggatgatggggaaaacaacaagtgtttagaagggtgactagcaagtagaattcaactctgctttgatgactcaatgtacgatgccaatcaccctgactgggccatgaatgggcacctactatgcgcaggcactgagtgaggggtgggccatagacagaaagagaccaaagcgttgaggaacgcagtctag

SEQ ID NO: 43661 - DNA, 501 bp, Homo sapiens
ggatcaaagatgtaggaaacgatggatccatgtaggcctcagccttcaagtttctcctctgagatttcagggattatcctttaaaggagtcaggaagagggtagagatcacaaagataataagctcagacagtttgtatgttaaataaacctcaggaggttttagtcttaaggtccttaatctgaccttccaaactgacttttccagaaacttccaaaagcctctctggtgtctctttcttcccctcctttaatgtggccctggctcacaagtcacccctctctctaagaagtccccttctctgttttattcttcagctttgccccaggaggacctggggtgtagccccatgtcccctccctctgccactggtgactcatggtcatttcattcccctcagtcctcaaatagggtgaaccctacaggccccagaactaccccagtcaacctgtagagaaactccacaatgaccctcacaggaaatgaaattgaaagtcccat

SEQ ID NO: 43662 - DNA, 263 bp, Homo sapiens
tttcattaccagctgcccattaataaccatcaaattagaagtgtctctagcagcatgacaatttagtgaggggaataagaacagaaaatcacaaattgttcagaaaagttgctgcatagcaggcctcctggggccggggcccgatgccccttggtgtttagttcaaggccatggggctctcttgggtgacatcacttctaacatagatactgtgtaattcagttacacaaaagcagcccagacaagcaggctcacatcatctc

SEQ ID NO: 43663 - DNA, 331 bp, Homo sapiens
tccactgcacaccctccttctgtccgctccgtgaacaggaaacagaaatacagctccaatttttttttttaatggaggaagagaaaccacaacccgaacaaaaaactcaaaaactaaactccaaccaaactaaactctcaagatagaatcatgagagatgcaaaatgtccaaaatgtcctaagtggctcaaaccacccgccccttaacaggtctgcctctcttcctgggagtcagaagtgaccttgatgaactggatgttaggtccaaaaatgacaaacaagccctccactgggaaacatcagtccaacccctttcttttgacagcaggac

SEQ ID NO: 43664 - DNA, 306 bp, Homo sapiens
ccccagatggatatcaaattaatccagaacaatttatttaaaagactttccctttccagctactctacagagccaattttgtcataagtcaaagattcatgtgtggatatgtttctggactttcttttttgtcctgttggtctctttgtaagtctttaagtcactctcttcattctcataacttgaaggtcttgctatctgatagtgaaagtcttccactgtgttgcttctccaagagtctcttggcttttcctggtcctttgcatttcatttaattttagaattagcttgccaatttctaccaaa

SEQ ID NO: 43665 - DNA, 596 bp, Homo sapiens
aattaggcttgggctccatatatctacagctgagaggtaaggatgaaccagaactaaccgcttttcatcacctacctcccaatcaaatatcaaggaatttcaagacaagttgtgttggtactgagcagagcaggaggaaaaaagagaaaggaaacaagcaaacaaaagtctttacaaagcataggtgggaaagggaaccgtaagccatacttaatttaggttggttcctgactccaggtgcttgtcagaagcaaatgcaaatgttcttcaaaggaaggctccttcatcttaggcctccccacaattttttaaggacagtaatcagcacatagtcaaagataactagacgtacgaggagacaaggaaccataggcatgaaccagtagaaacaacagacagcagaaaaagataaacatcatataatagaattaaaagatatataataaaacaaccaagcttactgtgtttacagaaataagtgacaaatttgagaatagggaacaggaaatgattgtttttaagtggcattatagttttgaaaaaaccaaatcgaatttttggaataaaaactgactcaggagtttgaggccagcctg

SEQ ID NO: 43666 - DNA, 2266 bp, Homo sapiens
ggacagaaaactccctccttttccaagttagccttatagtctagggcttaaaatactggtttaatggtgaaggtaagtgcttttcttctttttgggtagaaggattattactaacttaccaaaggtccattaaggggagggaacagttttaggagaagtcagagaaaagacattaacagcaacataaggatctccatctggtaatattgcctaattccaaaatgaagagactctctgaaaaagataactgattcaatgaagaccctagggcaaggcttgagaagccactggtaccaatggacactgtggacaatggtcatttctccaaggacgctataaaagactgtcgtagtaaaagagattcagggcacagggaaactccaccacaaagcgtggtaccatttcccacagaagctaaatggacgggaagcctgccaccaggaaaggtccagatttctgttcattacgctatgggctggctcttatcatgcacttctcaaacttcaccatgataacgcagcgtgtgagtctgagcattgcgatcatcgccatggtgaacaccactcagcagcaaggtctatctaatgcctccactgaggggcctgttgcagatgccttcaataactccagcatatccatcaaggaatttgatacaaaggcctctgtgtatcaatggagcccagaaactcagggtatcatctttagctccatcaactatgggataatactgactctgatcccaagtggatatttagcagggatatttggagcaaaaaaaatgcttggtgctggtttgctgatctcttcccttctcaccctctttacaccactggctgctgacttcggagtgattttggtcatcatggttcggacagtccagggcatggcccagggaatggcatggacaggtcagtttactatttgggcaaagtgggctcctccacttgaacgaagcaagctcaccaccattgcaggatcagggtcagcatttggatccttcatcatcctctgtgtggggggactaatctcacaggccttgagctggccttttatcttctacatctttggtagcactggctgtgtctgctgtctcctatggttcacagtgatttatgatgaccccatgcatcacccgtgcataagtgttagggaaaaggagcacatcctgtcctcactggctcaacagcccagttctcctggacgagctgtccccataaaggcgatggtcacatgcctaccactttgggccattttcctgggttttttcagccatttctggttatgcaccatcatcctaacatacctaccaacgtatatcagtactctgctccatgttaacatcagagatagtggagttctgtcctccctgccttttattgctgctgcaagctgtacaattttaggaggtcagctggcagatttccttttgtccaggaatcttctcagattgatcactgtgcgaaagctcttttcatctcttgatatgcaagtttcctcatgggaatctcaaggggatttgggctcatcgcaggaatcatctcttccactgccactggattcctcatcagtcaggattttgagtctggttggaggaatgtctttttcctgtctgctgcagtcaacatgtttggcctggtcttttacctcacgtttggacaagcagaacttcaagactgggccaaagagaggacccttacccgcctctgaggacataaagttacaaacttaaatgtggtactgagcatgaactttttaaacattttttacttctctccatattcctgaccatagactcagcagttcttaactctggctgtgtgttagtcttccctggggagcctttataagacactgatacttgggacccactccagagattctgaatgaattggtctggggtggaacccagatactactaatttttagatactccttagaggtttctagcatgcgcccggggttgacaacagctggacaaacttgaaaagtcaattcatgtggcctttgaattttcctcattggaaagtactaaataaataaaaattcatgtgaaaatgatcactgataaatatcttcatggtggggcaggttattggatgcagagaagatctgctcggaattgtagccatatgttacagatctcagcaccgatcagaactgtaaagctataatccccagaattaaagtttttattattttttatacattgtaaaacatagacgtttatttatgtgattaaattctattaaaatttacatgctaaaat

SEQ ID NO: 43667 - DNA, 1901 bp, Homo sapiens
  misc_feature (1)..(3): n is a, c, g, or t
  misc_feature (321)..(321): n is a, c, g, or t
nnnaatagctggatttattcacaattgtagtaattagtccctgttcattataattttctaggtgatatgaagactttgtcagtccaagcaagtgtccatattgtgtgtagcaaacatgagaataaacattttaaacttttaaatgtaatacatattagtgttatgtaatgtcatccttcatgttcgaaggcacatggaacattgttctggtggtacagaggggagaggaacaccatcagaatgaaaggaaagaccgctctggaaccttcctccttagctcttgagcttagtttaattgtcctgtcttatggtctgctacangcaataccactcttcaccttcgcatgcttctctgtggtttgataaagtacatgcaatttttcatttaattcttccagctgcactaagaaaggagccttatctttattgaacagatgaggaaatgaatgattagagaatttaaatgactagctctaggtcacacagctggaacttacagccagatttccttttaacaatcctgtaaccaaaagcataccagtagtgccccataaaatgtaagttatagagctgtgttgggtcaaaacttttactgatgctaagaggaggcaacattaacaaggggaaattatttgtgtattatgttttggattatgttctctccatagataaaagactgtcgtagtaaaagagattcagggcacagggaaactccaccacaaagcgtggtaccatttcccacagaagctaaatggacgggaagcctgccaccaggaaaggtccagatttctgttcattacgctatgggctggctcttatcatgcacttctcaaacttcaccatgataacgcagcgtgtgagtctgagcattgcgatcatcgccatggtgaacaccactcagcagcaaggtctatctaatgcctccactgaggggcctgttgcagatgccttcaataactccagcatatccatcaaggaatttgatacaaaggcctctgtgtatcaatggagcccagaaactcagggtatcatctttagctccatcaactatgggataatactgactctgatcccaagtggatatttagcagggatatttggagcaaaaaaaatgcttggtgctggtttgctgatctcttcccttctcaccctctttacaccactggctgctgacttcggagtgattttggtcatcatggttcggacagtccagggcatggcccagggaatggcatggacaggtcagtttactatttgggcaaagtgggctcctccacttgaacgaagcaagctcaccaccattgcaggatcagggtcagcatttggatccttcatcatcctctgtgtggggggactaatctcacaggccttgagctggccttttatcttctacatctttggtagcactggctgtgtctgctgtctcctatggttcacagtgatttatgatgaccccatgcatcacccgtgcataagtgttagggaaaaggagcacatcctgtcctcactggctcaacagcccagttctcctggacgagctgtccccataaaggcgatggtcacatgcctaccactttgggccattttcctgggttttttcagccatttctggttatgcaccatcatcctaacatacctaccaacgtatatcagtactctgctccatgttaacatcagagatagtggagttctgtcctccctgccttttattgctgctgcaagctgtacaattttaggaggtcagctggcagatttccttttgtccaggaatcttctcagattgatcactgtgcgaaagctcttttcatctcttgggctcctccttccatcaatatgtgctgtggccctgccctttgtggcctccagttacgtgataaccattattttgctgatacttattc

SEQ ID NO: 43668 - DNA, 863 bp, Homo sapiens
ttgcattaaagttgagttgctgcagaagctgtaggtggctttctatataaaatcatttataaaatcatcttcccacagatatgcaagtttcctcatgggaatctcaaggggatttgggctcatcgcaggaatcatctcttccactgccactggattcctcatcagtcaggattttgagtctggttggaggaatgtctttttcctgtctgctgcagtcaacatgtttggcctggtcttttacctcacgtttggacaagcagaacttcaagactgggccaaagagaggacccttacccgcctctgaggacataaagttacaaacttaaatgtggtactgagcatgaactttttaaacattttttacttctctccatattcctgaccatagactcagcagttcttaactctggctgtgtgttagtcttccctggggagcctttataagacactgatacttgggacccactccagagattctgaatgaattggtctggggtggaacccagatactactaatttttagatactccttagaggtttctagcatgcgcccggggttgacaacagctggacaaacttgaaaagtcaattcatgtggcctttgaattttcctcattggaaagtactaaataaataaaaattcatgtgaaaatgatcactgataaatatcttcatggtggggcaggttattggatgcagagaagatctgctcggaattgtagccatatgttacagatctcagcaccgatcagaactgtaaagctataatccccagaattaaagtttttattattttttatacattgtaaaacatagacgtttatttatgtgattaaattctattaaaatttacatgctaaaat

SEQ ID NO: 43669 - DNA, 809 bp, Homo sapiens
ttgcattaaagttgagttgctgcagaagctgtaggtggctttctatataaaatcatttattgggctcatcgcaggaatcatctcttccactgccactggattcctcatcagtcaggattttgagtctggttggaggaatgtctttttcctgtctgctgcagtcaacatgtttggcctggtcttttacctcacgtttggacaagcagaacttcaagactgggccaaagagaggacccttacccgcctctgaggacataaagttacaaacttaaatgtggtactgagcatgaactttttaaacattttttacttctctccatattcctgaccatagactcagcagttcttaactctggctgtgtgttagtcttccctggggagcctttataagacactgatacttgggacccactccagagattctgaatgaattggtctggggtggaacccagatactactaatttttagatactccttagaggtttctagcatgcgcccggggttgacaacagctggacaaacttgaaaagtcaattcatgtggcctttgaattttcctcattggaaagtactaaataaataaaaattcatgtgaaaatgatcactgataaatatcttcatggtggggcaggttattggatgcagagaagatctgctcggaattgtagccatatgttacagatctcagcaccgatcagaactgtaaagctataatccccagaattaaagtttttattattttttatacattgtaaaacatagacgtttatttatgtgattaaattctattaaaatttacatgctaaaat

SEQ ID NO: 43670 - DNA, 2410 bp, Homo sapiens
  misc_feature (1)..(3): n is a, c, g, or t
  misc_feature (321)..(321): n is a, c, g, or t
  misc_feature (1912)..(1912): n is a, c, g, or t
  misc_feature (1970)..(1970): n is a, c, g, or t
nnnaatagctggatttattcacaattgtagtaattagtccctgttcattataattttctaggtgatatgaagactttgtcagtccaagcaagtgtccatattgtgtgtagcaaacatgagaataaacattttaaacttttaaatgtaatacatattagtgttatgtaatgtcatccttcatgttcgaaggcacatggaacattgttctggtggtacagaggggagaggaacaccatcagaatgaaaggaaagaccgctctggaaccttcctccttagctcttgagcttagtttaattgtcctgtcttatggtctgctacangcaataccactcttcaccttcgcatgcttctctgtggtttgataaagtacatgcaatttttcatttaattcttccagctgcactaagaaaggagccttatctttattgaacagatgaggaaatgaatgattagagaatttaaatgactagctctaggtcacacagctggaacttacagccagatttccttttaacaatcctgtaaccaaaagcataccagtagtgccccataaaatgtaagttatagagctgtgttgggtcaaaacttttactgatgctaagaggaggcaacattaacaaggggaaattatttgtgtattatgttttggattatgttctctccatagataaaagactgtcgtagtaaaagagattcagggcacagggaaactccaccacaaagcgtggtaccatttcccacagaagctaaatggacgggaagcctgccaccaggaaaggtccagatttctgttcattacgctatgggctggctcttatcatgcacttctcaaacttcaccatgataacgcagcgtgtgagtctgagcattgcgatcatcgccatggtgaacaccactcagcagcaaggtctatctaatgcctccactgaggggcctgttgcagatgccttcaataactccagcatatccatcaaggaatttgatacaaaggcctctgtgtatcaatggagcccagaaactcagggtatcatctttagctccatcaactatgggataatactgactctgatcccaagtggatatttagcagggatatttggagcaaaaaaaatgcttggtgctggtttgctgatctcttcccttctcaccctctttacaccactggctgctgacttcggagtgattttggtcatcatggttcggacagtccagggcatggcccagggaatggcatggacaggtcagtttactatttgggcaaagtgggctcctccacttgaacgaagcaagctcaccaccattgcaggatcagggtcagcatttggatccttcatcatcctctgtgtggggggactaatctcacaggccttgagctggccttttatcttctacatctttggtagcactggctgtgtctgctgtctcctatggttcacagtgatttatgatgaccccatgcatcacccgtgcataagtgttagggaaaaggagcacatcctgtcctcactggctcaacagcccagttctcctggacgagctgtccccataaaggcgatggtcacatgcctaccactttgggccattttcctgggttttttcagccatttctggttatgcaccatcatcctaacatacctaccaacgtatatcagtactctgctccatgttaacatcagagatagtggagttctgtcctccctgccttttattgctgctgcaagctgtacaattttaggaggtcagctggcagatttccttttgtccaggaatcttctcagattgatcactgtgcgaaagctcttttcatctcttgatatgcaagtttcctcatgggaatctcaaggggatttgggctcatcgcaggaatcatctcttccactgccactggattcctcatcagtcaggttgggncagtttattgaacatcttcaagtggcaggtattgttttaggtgttggagatacacacngtgctctaaagatctggatggcaacacaattactctatttacatgagcctctaaatcagactctggtaggtcagatttcccagaggaagaaaaatataagcttattttctcaagatgaatagatgttagattgattaaaatgagctgttccggtgcagaagacagcacgtatgactacctagaggtacatgagcatgaaacagttcttagttatgaccagaatgaaagacacatgtcaaggaatagcaagagacgaagacagaggggcaaaagaagatcatgaagaatatgttcagactaatccaatttctaaaaaaacacaaaagggaaacaaagtgtcctaggccagtttaaagataatttaatgtctggaaacagatcggctgtgagacattgcaaggaggcttgctcggtgtttggaaatgcaggctcatgaggaa

SEQ ID NO: 43671 - DNA, 346 bp, Homo sapiens
aggtggagaagaccattctcaacatggcccaaatgtagaaactattttttaaaaaaagagtgggccaggcacggtggctcacacctgtaatcccagcactttgggaggctgaggggggtggatcacgaggtcaggagatcgagaccatcctggctaacacggtgaaacccgtctctactaaaaaaatacaaaaaaattagccgggcttggtggcgggcgcttgtagtcccagctactcgggaggctgaggcaggagaatggctgaacccgagaggcggagcttgcagtgagccaagatcgcgccactgcgttccagcctgggaaacagagtgaggctctgtctcaa

SEQ ID NO: 43672 - DNA, 817 bp, Homo sapiens
atatatatgtatgtgtatatataacatgttatatatgcatatatattaatgtatacatgcacacacattgtggaatgtctaaatcaaactatttaagatatgcattacctcacatacttatttttttgtggtgagaatactccaaatcttagcaattttaaagtactcaatatagtggtatgaattcatcattgaatcactatgatgtacaagagatgtcttgaatgtattccttctgtcctaatgaaattttgtgtcctttaaccaacatctccccaattcccagcctctagaaatctttaaagtgattttccaaggaaaagtattggtacgaatattgttggcatagtttgaattgttcatgcattctgttctcactcataagtgggagttgaacaatgagaacacatggacacagggaggggaacaacacaggccagggcctgttgggttgagattgggtgctgaaaggagagcatcaaagtagctcatgcatgcggggcttaaaacctaggtgataagttgacaggtgcagcaaatctccatggcacacgtatacctatgtaacaagcctgtacattctgcacatctgcccatgtatcccggaacttaaagtgaaaaaaaattgctcatgcattcaaaggtaatataattttattaaaaaaataactgagtatgataggttgcacctgtaattgcagctactcaggactcaggaagctaaggagggaggcttgcttgagtccaggagttcgaggatacagtacagtgagctataatcccaacaccctcagcaacagaatgaaaccttatttca

SEQ ID NO: 43673 - DNA, 553 bp, Homo sapiens
ggggttttaccaccttgcccaggctggtctcgaactcctgagctcatgtagtccacccacctgggcctcctgaagtgctaggattacaggcatgagccaccgcgcctggccactctttcttttaaaatttaaagataaaaatattttatttaaggccaggatcatatgccattttagaggggacaaaaactgaagatgctatagggagaaaatctgttgaaatactatttgaataagatgaatatatttaaagctagaaggccagttacttgcattttagggtagtaaagaaattgaccaagtttatcaaaacaccattggctatccatcttgaaaacgcaaagagtattacaaaagtgcataaaactgacaaagagcccaaggcggatcaatacttttagaaaatggagaattatgctttagaaagccacagacctgaagttttgctactcttctttcaaaaactgttttccagaaatcagtcttaaaacactaagaacaaaatgaaatcaagcaaggcagaaccagccccaattaaaaatttgactttcag

SEQ ID NO: 43674 - DNA, 481 bp, Homo sapiens
gagggatctttccctcctaggtttcctgaaacagtttgaattaatggccctggcatatttgaaaagactttctgatttttctttcctctcttgtctgttttcttagcttagtttggggaaagggcaatagagcaaattgtggtaaaggtccatctctttgataatttgactatttaaaaggtatttgcttttctgtcatctatggaaaaaaaaacaatgaaaatataagatactctaggattttttcagctctcctgaaaaatgcttttctgcagaaaaatgtcatagatctgttggccccatagctattaaaataatattcatcacccactcagccacaccagacccaagaattccctgcctcagaggatgaactggaaagtgttcatttgaaacctcacaccaggcttcctataatcaggattgcagctttttcgcctcccctccacaaaacactcagagttatccggaggagacaatc

SEQ ID NO: 43675 - DNA, 377 bp, Homo sapiens
gctagttgatgaattcagtacctcacacacttatctttttttgaggtaaaacatttgaaatctacttcttcggcaattttgaaatatgcaatgcgacccagtgcagtggctcacccctgtaattctaacactttgggaggccaagtcaggtggatcacttgaggtcagagttcaagatcagcctagccaacatggcaaaaatcccgtctctactaaaaatacaaaaattagccaggcatggtgttgctcatctgtagtcccagctacttggggagctgaggcaggagagtcgcttgaaccggggaggtggaggttgcagtgagctgagattgcaccactgcactccggcatgggcaacaaaatgaaaccatgtctca

SEQ ID NO: 43676 - DNA, 308 bp, Homo sapiens
gctacttcaccaattttctcaagggctttgattcagttttctatatcagaaggtaaaaggcgagaggcttccatggctgcctgtcaacagggtttgtggagagaaggggctgggaacctgggcaagcagcactttcagcaataaacagtatcctcaggggcccacagagggaagatggtttcagtgccaaaggcttgagtccccttaattttttcattccacttcactcatcacctgtctcctttctatgctagcaaaagaacaattattcatagatggtaaaattatttatagagccggtgtaatta

SEQ ID NO: 43677 - DNA, 454 bp, Homo sapiens
gggtcctggcccagccttgggcattttcttggcccgcaaaagcagaggggtcagagttagctcccagaagggtttggagttagctcagcacagtgcaggctggtggttgctacctgtcagtggatcctgagatcaagtcgatagacttcagccagctgcctgtgttctcctttccattagcatagaacagaaagcagcatagggcagagtggagtggcgtggcatggggcaggtcagagtgcagtgtgaccctaggttccagcccttatgtgtgtacctagtcccaatgcacaaggagtcctttgtgtgggtggatgcaaacgtatcagagtcgtaagttaagtcagaagaccatgagaagaccctataaatcactgactgggaggcctgctcggcccacagaagctggcttacttaggtcttgctggctgcaaagccctcttcttgttaatta

SEQ ID NO: 43678 - DNA, 674 bp, Homo sapiens
ctctagcgcattacagctaagtgttagtctatgaatgtaatataacagtggtttaaaatcaacagattataacaaaagtccctcacaggagacaaagctggtgccgtgatctctattgcattaatgagacaaatgaggataggaaacatcatgtggcttcccagggctccatggcaggggcgtggcaggggggatttgagtccaggctcctactccagtgctgacctttcccgtcactttcctgctgcccagtgtgagctctatcctgtccagagtcatgaagtattagagcacatggatgtcttatagatgatcttgtccaagtcattcattttagaagagctgatggaacttcagagaggttaaattcacctgttgcaggtcacctatctccttagtgacaagtttgagattacagcccaacttcaagtcacactgactcttgtgattataagtgaaatcatacttggccactcattcctgagcaagatgcctgtttctgaaattagtctctagagtaccaacttttcaggagaaaagatggtaccttacttaccttcaagagcaaagcctttcccatgtttcataagtgtttcttggcagcctaactgactcagtgactgattaaaggaaagactgaaggacatgaaaggcattgacttgctccctcctaa

SEQ ID NO: 43679 - DNA, 442 bp, Homo sapiens
cttttagatgcaaattgattttcttggattttcttgctaagagtcatgaagtattagagcacatggatgtcttatagatgatcttgtccaagtcattcattttagaagagctgatggaacttcagagaggttaaattcacctgttgcaggtcacctatctccttagtgacaagtttgagattacagcccaacttcaagtcacactgactcttgtgattataagtgaaatcatacttggccactcattcctgagcaagatgcctgtttctgaaattagtctctagagtaccaacttttcaggagaaaagatggtaccttacttaccttcaagagcaaagcctttcccatgtttcataagtgtttcttggcagcctaactgactcagtgactgattaaaggaaagactgaaggacatgaaaggcattgacttgctccctcctaa

SEQ ID NO: 43680 - DNA, 396 bp, Homo sapiens
gaaatacaagaatggatgccttctcttacttctcttgcaaatcagtgcctagcaaacttctaaaaggtgaattgttgatagattatatgacttatttttcttcaagctttttaatatgacaagggaattccagccagtatttttacctcttctttcttttcagagtcatgaagtattagagcacatggatgtcttatagatgatcttgtccaagtcattcattttagaagagctgatggaacttcagagaggttaaattcacctgttgcaggtcacctatctccttagtgacaagtttgagattacagcccaacttcaagtcacactgactcttgtgattataagtgaaatcatacttggccactcattcctgagcaagatgcctgtttctgaaat

SEQ ID NO: 43681 - DNA, 475 bp, Homo sapiens
acttcagcacccactacgatgcattagccagagtggagctagagtacaggttacagaagaggccaaccctctgtccctgcattcatgaactcggctctgaggaatcttctgttatttccaaatttgcagaaagaaaccttgggcaaactgcttcttttccaccttaccattccaacaccagccttaggtattaccgtaattagtcaagaacatgtcttggttagtcaagaacacttcatgtgttaagctgggaatgaggatgctacttaggcaaaggactagtgatcaggaacctctctacctgtgtggctcctctggggatggcattaggtttacctttccaggatttctttttttttttctaatttttaagttctgggatacatgtgcagaacatgcaggtttgttacataggtatacatgtgccatggtggtttgctgcacctatcaacccgtcatctaggttttaatcccc

SEQ ID NO: 43682 - DNA, 500 bp, Homo sapiens
gcatttccttctgtcatccattgcaaagacgtaccagcttcagggtagtatggaaagatccctggtctcgcagtcagaagacccgagttcaagatgtgggatctctgaacatggcccttcagttctttcttccgagagctgtgctgatggccaagtaagatgagggctatgaaaagcctctgtagactgcaaaatgagcatgggagaggctgtcattattctggaattgggagacagatttacagagggcctgaacacaggattgaaggtggtgaatttccattcggctgcctgggcgtctgcatgtataaaaagcaaacctaagtggtttttttctcctccaagtgaagatgaaagtgttaaaaatagcaaggaggtgaaagtgttcaaaatagcaaagtggcctgtctcctcttctcctaagcagactgtccaaacagacgcccagtagaaggagcaccttttgatactgggcacgtggtggtgatgcctcctctctc

SEQ ID NO: 43683 - DNA, 328 bp, Homo sapiens
actttcccttcttggcttcacctttactcttgagcttggtaagcaacactgataatgataacatcatgatcaatcagcttgattgatgaattcctctgggactccccactttccatctctgacccctgctcaactttaagaacagtctcttagaaacacagaaaactttcctatgtacttttaagtaaattggcaaatgacagggcatgagccacgcacctaacctgttttcattctctatccccacatacccattcattccccaggtgctaccacaattacctcgtgtgtctgtggtttgggacttcattatctcttccacactctg

SEQ ID NO: 43684 - DNA, 956 bp, Homo sapiens
tttaggtaatcttcagtgctgaaaataactaatgtactgaaagcttgctgtgggttcagtactttcataggagtttgcaatttactgtctcaaaaactctggaatagatttggacctcattttacaacaaagagtttgaagctatgagaggttaagttgcattacctgtcacatatctaacagcaaataaaatggggaagccgtgagtagaacctgggcagcctgtttcccagtcccaggcactcagccattttattgtggctagctgttgctttaagaggctaaaattatacatttgtaattctgaaataagtacccaagaaaatgttctgtatttatgtttttagacaaaatcctgatcagtggtgaataaggggaaaaaaaggtagacaaaatattgttttaaaatacttaaccacgtagactatagtagtaatgttgagataataagatacttatggagaaaaaatgacaaattccttccatctgctcttttcagataagtagaacgtcagccaactggagttccactcttgtcgagggaatgttttcaggactcagagaccctgaaagtgaggccaaaggactggaagttctggtggtcagataactcattcagactggataaaagccagagtgtaaatgtgaaaaccctgaattgtagtcaatggctaaatattgagccacatgcaaggcaactggggtaggtaatgaggaaaccaaaaaatgccactgctgtttccaacgagtacaacaagatggtaataaccaatattcattgagctcttcacatggcaggcagtattctgagtccttgacagtcacttaacccaatcatcacaaccaccatacaagggaaatatggaaattccatgtctttgttgcaggataagttactaagacagtgatttctgaaatattttatgcatacaatgaacagtaaatggtttgagtaa

SEQ ID NO: 43685 - DNA, 221 bp, Homo sapiens
aagccattgccatgcccccagctgaagagccatctagaaggcagagagagagagaggcatagctgctgctagaccgtgataacaaagcaaagtggggagaaggcagaggaagacatgcctggagtctttcttctttcctttcatcttttactggtttatcctactggccaaacccagctagaagccagaaagcaaagggggtacccagcattcagccttta

SEQ ID NO: 43686 - DNA, 428 bp, Homo sapiens
ttttgaaaaacctaggcaggccagctgaaacgggataatgtgggcccccagttgacctcagtggctgtcatctactgtgtttttcaacccaggaatttcaaatactgtgtattttagaaagaaaggaaagagccaaagtgcagccttttctcacttgatcagtaacttgtgttagaaactcagtgggggagaattctttgcgtttttcagttgactgattattttcctttttttcttttttgcttttctcgagtcactctgtgtggtgcttgtgggagaagggagagggtgggagagcgttggtggatgtgttctgcatgttcctttctgtacagtaacttctgcatttactctgtttaggatggttccttcaccactatccctgtctgtagccagtaaatttctggaatattcatcccagagtgcca

SEQ ID NO: 43687 - DNA, 742 bp, Homo sapiens
agaaaccatccctgtccttcagtttataatctagttggagagataagaaacgtacaaaccaaaagataacagaatatctgaagcatgtactcattgtcagatgttccctctgagagcacagaggaggcaaaagcttctgtgggatgtgctagtcggctaaagcttcacagaggaggtggcaattgaaaatgagtcctgaatggggtagggtggttagggaattccatgagacaagacaaggggggcatggtgtgagaaaggcatggaagtaggaaccctcttcctatgacaggagtctacactgcttggactgcaccaaggacttcccttgacagttgtgcttctggttgaatttggccaatggagaggccattcaggaaagcagaaagaaaaaggagagtgaagatggaatacttacttgaagtatttatctggatggtgcctctcaaacaaaagtccaattcccatgggatgccttctccaaacagctatatttctagcttctctccttccccttttagacctaggactgccaaagcttccctattgctgctagtcatggagtactgcactaccgcctgtagtttcccttcactctatccacgcatttcatgaactctcttcaaattactccatatgggtagccatcgacttcttaccaaggccctgactgagacactttcattcttttaaaaatatccgagtcaactaatatattaaaatagaccagcatctcttctca

SEQ ID NO: 43688 - DNA, 277 bp, Homo sapiens
gctcccgtgtacactctcaaggagatgctggtcttccttatctggatgccatctggcttctccacctacctccttctccagggagaggcctctgacctcacccatgtcctctctcagagataaccaccccggtgagcccagcctgtcttccagcctctgcatgcctcagttctgaaagaacatttgaagggatgacaggccaggcgtggtggctcatgcctgcaatcccaacaccttcagaggccgaagcaggcagatcacttgaggccaggagttc

SEQ ID NO: 43689 - DNA, 445 bp, Homo sapiens
aattttacatgcttcaagcgccacaaaacctggatccacccctgggtgaggttataagaggaggactcagtcagctttgggtatgacctcattatatggttgcactttgattatctctgggcatatgggcaactgaagcttctaggttgaggtgacaaagtattttgcaaagctgggaaaaggaaacttccttcatttctgcatggatcccagcacctcccagcactttgaggactggaagctttggaaacactgcaggcagcatccttggatacattggcgttttcataggagtgaggggcctccgctgcagtgtcatgggtatagggcagtggttggcaaactgcagccagtgggaaaacctggcctgctccctgtctttgttttatggcctgtgagctaagaacgttttttacatttcaaaaagattgggggaaaaaaagca

SEQ ID NO: 43690 - DNA, 446 bp, Homo sapiens
ctttttgagacagcgtcttgccctgtcacccaggatggagtgcagaggcacaatcacagctcactgcagccttgacctcctgggttcaggtgatcctcccacctcagcctcccaagtggctgggactacgggtgtgcaccaccatgcctggctaagtttttgtatttttggtagaaatggagtttcgccatgttgcccaggctggtctcgagctcctgggctcaatcaattctcccaccttggcctcccagaattctgggattacagacgtgagccactgtgcccattccttttttaaaatcctacagggaatccaaagcaggtagtttgagcatttaaagagttttaacttatttcagatcttatttcagctggaatgctgcttacctaattcgctggatgtcagcatttcagacaagatttacatttccaagggacttcaggac

SEQ ID NO: 43691 - DNA, 409 bp, Homo sapiens
gaaatcctccgtacagaaagaaaattattccagatggaaatacaggtgtgcagaaaggaattagtgtacaggaatcggtacttaccctggtaaatgtataagattttccccttttacttagatatctttcaaagttaattggctgtttaaagaaaaaataagatagtgtagagttgataacacatgaataaatgaaatatttgacaaaaatagcttaccaactgagaggagaaagatggtaggtgctatgttaaggctctcctgtgtgcagaagtatggtgtctcttcaagatagactgtgataaattaaagatgaatgctataaatcctacagtaatcaccaaatttttaaaaagcattataaccaataagccaacagatgagtaaaattataacatatctaccatga

SEQ ID NO: 43692 - DNA, 632 bp, Homo sapiens
agccagagctgttcccacccagccagggcatgaaacatcaaccccccacatgtgaacccatcattcctaaaccctgggtaggctccatgccaagtaacagcagagggagttaagccataggaatttggctgtggagtaagagggaatgcggtgaggcactctggaatatgaccctaccagaggttggagaacaaacttgggcagccggaacccgtcactattctagacttccctggcattcgaggagccctttgaactttccaaagtgcagccacagctacaatgctgttaaatcctcccacattcttggatgccccttcaccttgtgtggacagtgtctggtttctccattttacagacaggaaaactgagcttcagacagggggtgggctttgcctaaggacacacaaatttggttgggagttgatggggccagatgagccagcattccagctctttcacccttcagcaacatgcagagtccctgagcccacctcccagccctctcctcattctctgaacccactgtggtgagaagaatttgctccggccaaattggccgttagccacctgggtccacatcctgctaagacgtttaaaacagcctaacaaagacacttgcctctggattt

SEQ ID NO: 43693 - DNA, 472 bp, Homo sapiens
cactatgctgtaatgattgtcatatgtgcatattcaatgcctgtattatttcatttcttttttttaaagtttatgtcgtttgttcagctaccttttctatttaggggttgacaaaagaaatttttttttttttttttttttgagaaggagtctcactctgttgcccaggctggagtgcagtggctcctgggactacaggcacccgccaccacacccagctaattttgtttttgtattttttggtagagacagggtttcaccatgttagccaatatggtctcaatctcctgacctcgtgatctgaccacctaggcctcccaaagaaaaatggttttaaacaaagttgggaacatagaaattatggataattaattaaactgtgttgttttagttatttattactggttgatatttattaaattaggaaaagcccttttgaatgtgctatcacataagctgactttgtctaaaa

SEQ ID NO: 43694 - DNA, 620 bp, Homo sapiens
cctgggcaacatggtgaaaccctgtttctataaaaaatacaataattagccaggcttggtggcgtatgcctgtactcccagctacgcggaaggctgaaacggtaggactgcttgagcccgggaggcagaggttgtagtgagccaagatcacgccattgcattccagcctggacaacagagtgagaccccatctcaaaaaataaataaataaaaatgaatgctcatatttctagttaaaggtgcagactaaagacataacattagttccacgccttccttaagtctattgatgtaagattaaaggacttctaaaaaggcataaatccactataacagagagtgggagaagacacagcaacaaaactttgaagctaaaaagaagataggttagtgatacctgggtaatccaaatcctaaaccagccgtaaagaaagtaaagaaacaacctgatttttatcacaggacctcaaaaaaggaaatggtggcaacaaggacctctggaaatggaaatgaacaaggagctaaaaattgcaaggtggttcaatgtttaagaaacagattcccggatcccctcccctatgctgtaaagctagacgactgcacctcccccactcccgtgg

SEQ ID NO: 43695 - DNA, 1635 bp, Homo sapiens
tagtagctgggattacaggcatgtgccacacctggctaatttttgtggttttagtagagacagggtttctccatgttggtcagtctggtctcaaactcccaacctcaggtgatatgcccgcctcggcctcccaaaatgttgggattacaggcatgagccactgcacccggcgcatgttttttcttcattcctattgtattcacatgtgaaagcatgtgatcaacttgctgcatcaaagatatgagatttttttttttattaggtgggcattatttatgaccttttctgtggaagagtaagaacattaaaatgaaagatgcatgatgaaaatctaagtagagaggctcttgtggttaactgataatattgagtgatgcatgaggtaggtgttcagagtaatattctgcattatagtgaaaaatttttaatattaaaattcaattatatcattttatgaattgtgcttttcataatgcagtacatttcaaaatttttagattatgtatgaacttagatttttaaacatgttttaacatgttaagacttgtgcattcagtgaagcgttattatgccacaaactaacctacctcaccttactcaatggtgtaggtaaaagatgatagcaatatattatttggttacatagtggactaacatttttagtaatctcttttgccagtggctttaaactgcagataagttaaatattcccataggttttacatttatattttttcttatttaaatttattgttcttatttttcatgggtacatagtatgtttttatgctgtatatggcatgttttgatacaggtatataatatgtaataatcacatcagggtaaatgaggtatccattactagcatttatcctttgtattttattttaaaatgtacaactaaattgttatggactacagggttatttttatggtcataataaaaattacaaaagtatgaataaaatacatacatttctgagtcctgaatatttttaaaaattgttatatatttttcttctaacatgtggcctctttgcctgcaaacatataaagactcagttttgatttacatagagttaaatatacatatattttactttaaagataaatcttaagtgtaagaaaattgtagagtaagtgtgcttgtgtgagtatgtttgtacctgttttcagaagaaaacagcaatattggaacaaaacaaatcattttaataaggtgactaatttattagaaaactaacaacctcaaaaatgctgaaagcaaatctatactctctctgctttgtactgaattcattactgtaaaatattatggcttatggttcagaatctccccatgcagatgttctgtttttacttgcctggtactcatggtagagccatacatttcttttttcttacaatttcttttacagtttatgaagtattatatgagctggtcagggattacaacaattattttttttataaaatttagtagtgcacaaaaagtaatttttagatgtaattttactattagtctattaagttatattttatttatttagttaaaacattgccctttgttcttttaattggagaaccctatgtaagccgacttttttaaagttattctttctttcacttttcata

SEQ ID NO: 43696 - DNA, 1798 bp, Homo sapiens
tagtagctgggattacaggcatgtgccacacctggctaatttttgtggttttagtagagacagggtttctccatgttggtcagtctggtctcaaactcccaacctcaggtgatatgcccgcctcggcctcccaaaatgttgggattacaggcatgagccactgcacccggcgcatgttttttcttcattcctattgtattcacatgtgaaagcatgtgatcaacttgctgcatcaaagatatgagatttttttttttattaggtgggcattatttatgaccttttctgtggaagagtaagaacattaaaatgaaagatgcatgatgaaaatctaagtagagaggctcttgtggttaactgataatattgagtgatgcatgaggtaggtgttcagagtaatattctgcattatagtgaaaaatttttaatattaaaattcaattatatcattttatgaattgtgcttttcataatgcagtacatttcaaaatttttagattatgtatgaacttagatttttaaacatgttttaacatgttaagacttgtgcattcagtgaagcgttattatgccacaaactaacctacctcaccttactcaatggtgtaggtaaaagatgatagcaatatattatttggttacatagtggactaacatttttagtaatctcttttgccagtggctttaaactgcagataagttaaatattcccataggttttacatttatattttttcttatttaaatttattgttcttatttttcatgggtacatagtatgtttttatgctgtatatggcatgttttgatacaggtatataatatgtaataatcacatcagggtaaatgaggtatccattactagcatttatcctttgtattttattttaaaatgtacaactaaattgttatggactacagggttatttttatggtcataataaaaattacaaaagtatgaataaaatacatacatttctgagtcctgaatatttttaaaaattgttatatatttttcttctaacatgtggcctctttgcctgcaaacatataaagactcagttttgatttacatagagttaaatatacatatattttactttaaagataaatcttaagtgtaagaaaattgtagagtaagtgtgcttgtgtgagtatgtttgtacctgttttcagaagaaaacagcaatattggaacaaaacaaatcattttaataaggtgactaatttattagaaaactaacaacctcaaaaatgctgaaagcaaatctatactctctctgctttgtactgaattcattactgtaaaatattatggcttatggttcagaatctccccatgcagatgttctgtttttacttgcctggtactcatggtagagccatacatttcttttttcttacaatttcttttacagtttatgaagtattatatgagctggtcagggattacaacaattattttttttataaaatttagtagtgcacaaaaagtaatttttagatgtaattttactattagtctattaagttatattttatttatttagttaaacatggcttgtctttaatgggacctagtagcgatttttaagtatcttcttcatttcataattcatagtaattattattatgaattggcaggagaaagggggccggcagaggaggggctattaaattggaaaggggggggttagaggcagagaaaattggggggggcaaagaaatagggaagagtggggatggggaaggaaagggaatggagcaatgcttgtgtcttttgtatgtttgatatatg

SEQ ID NO: 43697 - DNA, 1029 bp, Homo sapiens
ttactaaatgatttattaggtgcgggaatctattaggtaagtgaatatggacatgagggtagtaagttaaagatatcctgtaggttgaatattgataggattcttaataaaaataaatggtcgtgataacccgatggttataggtaagaatgttcagaattggctgtgtatgatggtcatgtactgaattacaagtctaatatggatgaattgtaagtagatcatcgttagtgaataagacgcgctatcccatgaatagcatttatcctttgtattttattttaaaatgtacaactaaattgttatggactacagggttatttttatggtcataataaaaattacaaaagtatgaataaaatacatacatttctgagtcctgaatatttttaaaaattgttatatatttttcttctaacatgtggcctctttgcctgcaaacatataaagactcagttttgatttacatagagttaaatatacatatattttactttaaagataaatcttaagtgtaagaaaattgtagagtaagtgtgcttgtgtgagtatgtttgtacctgttttcagaagaaaacagcaatattggaacaaaacaaatcattttaataaggtgactaatttattagaaaactaacaacctcaaaaatgctgaaagcaaatctatactctctctgctttgtactgaattcattactgtaaaatattatggcttatggttcagaatctccccatgcagatgttctgtttttacttgcctggtactcatggtagagccatacatttcttttttcttacaatttcttttacagtttatgaagtattatatgagctggtcagggattacaacaattattttttttataaaatttagtagtgcacaaaaagtaatttttagatgtaattttactattagtctattaagttatattttatttatttagttaaaacattgccctttgttcttttaattggagaaccctatgtaagccgacttttttaaagttattctttctttcacttttcata

SEQ ID NO: 43698 - DNA, 421 bp, Homo sapiens
ccatggcagtatctggcctgtcacagtcattgcagcatcccctggctcagtgcctggaaagaatgaattcagtctaaatgacccttaaagaagtaccctttaattccctctaaagctgagggggccggagcctgcatagagggtcagtgcagagtaggccagccaccaggccagcttccttggagtgcatgaccccctggtccatatttggttgaaagaggagggtgatgtgatggttaagtttatgtgtcaacttgactgggccacaggatgcccaggtagctggctaagcgtcatttccgggtgtttacataaaggtgtttccagaagagatgagcatttgaatcggtgggctgaggatagcagatagtctccctaatgtgggcgggcaacatgcaacctgttaagggcctgatgagaa

SEQ ID NO: 43699 - DNA, 2668 bp, Homo sapiens
gctcccggggccacgggatgacgcctcctccgcccggacgtgccgcccccagcgcaccgcgcgcccgcgtccctggcccgccggctcggttggggcttccgctgcggctgcggctgctgctgctgctctgggcggccgccgcctccgcccagggccacctaaggagcggaccccgcatcttcgccgtctggaaaggccatgtagggcaggaccgggtggactttggccagactgagccgcacacggtgcttttccacgagccaggcagctcctctgtgtgggtgggaggacgtggcaaggtctacctctttgacttccccgagggcaagaacgcatctgtgcgcacggtgaatatcggctccacaaaggggtcctgtctggataagcgggactgcgagaactacatcactctcctggagaggcggagtgaggggctgctggcctgtggcaccaacgcccggcaccccagctgctggaacctggtgaatggcactgtggtgccacttggcgagatgagaggctacgcccccttcagcccggacgagaactccctggttctgtttgaaggggacgaggtgtattccaccatccggaagcaggaatacaatgggaagatccctcggttccgccgcatccggggcgagagtgagctgtacaccagtgatactgtcatgcagaacccacagttcatcaaagccaccatcgtgcaccaagaccaggcttatccgacgacaggttccgagcttcttccgagaggacaatcctgacaagaatcctgaggctcctctcaatgtgtcccgtgtggcccagttgtgcaggggggaccagggtggggaaagttcactgtcagtctccaagtggaacacttttctgaaagccatgctggtatgcagtgatgctgccaccaacaagaacttcaacaggctgcaagacgtcttcctgctccctgaccccagcggccagtggagggacaccagggtctatggtgttttctccaacccctggaactactcagccgtctgtgtgtattccctcggtgacattgacaaggtcttccgtacctcctcactcaagggctaccactcaagccttcccaacccgcggcctggcaagtgcctcccagaccagcagccgatacccacagagaccttccaggtggctgaccgtcacccagaggtggcgcagagggtggagcccatggggcctctgaagacgccattgttccactctaaataccactaccagaaagtggccgtccaccgcatgcaagccagccacggggagacctttcatgtgctttacctaactacagacaggggcactatccacaaggtggtggaaccgggggagcaggagcacagcttcgccttcaacatcatggagatccagcccttccgccgcgcggctgccatccagaccatgtcgctggatgctgagcggaggaagctgtatgtgagctcccagtgggaggtgagccaggtgcccctggacctgtgtgaggtctatggcgggggctgccacggttgcctcatgtcccgagacccctactgcggctgggaccaaggccgctgcatctccatctacagctccgaacggtcagtgctgcaatccattaatccagccgagccacacaaggagtgtcccaaccccaaaccagacaaggccccactgcagaaggtttccctggccccaaactctcgctactacctgagctgccccatggaatcccgccacgccacctactcatggcgccacaaggagaacgtggagcagagctgcgaacctggtcaccagagccccaactgcatcctgttcatcgagaacctcacggcgcagcagtacggccactacttctgcgaggcccaggagggctcctacttccgcgaggctcagcactggcagctgctgcccgaggacggcatcatggccgagcacctgctgggtcatgcctgtgccctggccgcctccctctggctgggggtgctgcccacactcactcttggcttgctggtccactagggcctcccgaggctgggcatgcctcaggcttctgcagcccagggcactagaacgtctcacactcagagccggctggcccgggagctccttgcctgccacttcttccaggggacagaataacccagtggaggatgccaggcctggagacgtccagccgcaggcggctgctgggccccaggtggcgcacggatggtgaggggctgagaatgagggcaccgactgtgaagctggggcatcgatgacccaagactttatcttctggaaaatatttttcagactcctcaaacttgactaaatgcagcgatgctcccagcccaagagcccatgggtcggggagtgggtttggataggagagctgggactccatctcgaccctggggctgaggcctgagtccttctggactcttggtacccacattgcctccttcccctccctctctcatggctgggtggctggtgttcctgaagacccagggctaccctctgtccagccctgtcctctgcagctccctctctggtcctgggtcccacaggacagccgccttgcatgtttattgaaggatgtttgctttccggacggaaggacggaaaaagctctatttttatgttaggcttatttcatgtatagctacttccgactgcatctgta

SEQ ID NO: 43700 - DNA, 549 bp, Homo sapiens
tactcaggggcgagctgcgggcgatcatcaagaagatctggaagcggacccgcatgaagctgctggaccaggtggtgccacctgcagggatggtgaggggctgagaatgagggcaccgactgtgaagctggggcatcgatgacccaagactttatcttctggaaaatatttttcagactcctcaaacttgactaaatgcagcgatgctcccagcccaagagcccatgggtcggggagtgggtttggataggagagctgggactccatctcgaccctggggctgaggcctgagtccttctggactcttggtacccacattgcctccttcccctccctctctcatggctgggtggctggtgttcctgaagacccagggctaccctctgtccagccctgtcctctgcagctccctctctggtcctgggtcccacaggacagccgccttgcatgtttattgaaggatgtttgctttccggacggaaggacggaaaaagctctatttttatgttaggcttatttcatgtatagctacttccgactgcatctgta

SEQ ID NO: 43701 - DNA, 1455 bp, Homo sapiens
gctcccggggccacgggatgacgcctcctccgcccggacgtgccgcccccagcgcaccgcgcgcccgcgtccctggcccgccggctcggttggggcttccgctgcggctgcggctgctgctgctgctctgggcggccgccgcctccgcccagggccacctaaggagcggaccccgcatcttcgccgtctggaaaggccatgtagggcaggaccgggtggactttggccagactgagccgcacacggtgcttttccacgagccaggcagctcctctgtgtgggtgggaggacgtggcaaggtctacctctttgacttccccgagggcaagaacgcatctgtgcgcacggtgaatatcggctccacaaaggggtcctgtctggataagcgggactgcgagaactacatcactctcctggagaggcggagtgaggggctgctggcctgtggcaccaacgcccggcaccccagctgctggaacctggtgaatggcactgtggtgccacttggcgagatgagaggctacgcccccttcagcccggacgagaactccctggttctgtttgaaggggacgaggtgtattccaccatccggaagcaggaatacaatgggaagatccctcggttccgccgcatccggggcgagagtgagctgtacaccagtgatactgtcatgcagaacccacagttcatcaaagccaccatcgtgcaccaagaccaggcttatccgacgacaggttccgagcttcttccgagaggacaatcctgacaagaatcctgaggctcctctcaatgtgtcccgtgtggcccagttgtgcaggggggaccagggtggggaaagttcactgtcagtctccaagtggaacacttttctgaaagccatgctggtatgcagtgatgctgccaccaacaagaacttcaacaggctgcaagacgtcttcctgctccctgaccccagcggccagtggagggacaccagggtctatggtgttttctccaacccctggaactactcagccgtctgtgtgtattccctccctggacttctcatcttcacaagatggggatcatgggggtttcttaccccacctatgtccccctcttccccaccctgtccctgtagaaaaccagtgaagcaggtacggagctgaggactgggccccaggaggtggggacaggggtctgaatgccgagtccctgaattcacccaggaccatccaaggggccaccgcagcattggccccatcaccacgtcctcacccaactctccctgatgaatagaatatacacactgtgctaggtgtatatatacatatatatatatataaatatatatataatatataaaatatagatatggaaatgactgttctgctgttaagataatgtatactcttttattttcttcctttcatggttaagattttttttttaagaaaagttaaatatccaaaaaa

SEQ ID NO: 43702 - DNA, 2324 bp, Homo sapiens
ttctgctggtcgattctagaggtatccctgtcgtcggataagcgggactgcgagaactacatcactctcctggagaggcggagtgaggggctgctggcctgtggcaccaacgcccggcaccccagctgctggaacctggtgaatggcactgtggtgccacttggcgagatgagaggctacgcccccttcagcccggacgagaactccctggttctgtttgaaggggacgaggtgtattccaccatccggaagcaggaatacaatgggaagatccctcggttccgccgcatccggggcgagagtgagctgtacaccagtgatactgtcatgcagaacccacagttcatcaaagccaccatcgtgcaccaagaccaggcttatccgacgacaggttccgagcttcttccgagaggacaatcctgacaagaatcctgaggctcctctcaatgtgtcccgtgtggcccagttgtgcaggggggaccagggtggggaaagttcactgtcagtctccaagtggaacacttttctgaaagccatgctggtatgcagtgatgctgccaccaacaagaacttcaacaggctgcaagacgtcttcctgctccctgaccccagcggccagtggagggacaccagggtctatggtgttttctccaacccctggaactactcagccgtctgtgtgtattccctcggtgacattgacaaggtcttccgtacctcctcactcaagggctaccactcaagccttcccaacccgcggcctggcaagtgcctcccagaccagcagccgatacccacagagaccttccaggtggctgaccgtcacccagaggtggcgcagagggtggagcccatggggcctctgaagacgccattgttccactctaaataccactaccagaaagtggccgtccaccgcatgcaagccagccacggggagacctttcatgtgctttacctaactacagacaggggcactatccacaaggtggtggaaccgggggagcaggagcacagcttcgccttcaacatcatggagatccagcccttccgccgcgcggctgccatccagaccatgtcgctggatgctgagcggaggaagctgtatgtgagctcccagtgggaggtgagccaggtgcccctggacctgtgtgaggtctatggcgggggctgccacggttgcctcatgtcccgagacccctactgcggctgggaccaaggccgctgcatctccatctacagctccgaacggtcagtgctgcaatccattaatccagccgagccacacaaggagtgtcccaaccccaaaccagacaaggccccactgcagaaggtttccctggccccaaactctcgctactacctgagctgccccatggaatcccgccacgccacctactcatggcgccacaaggagaacgtggagcagagctgcgaacctggtcaccagagccccaactgcatcctgttcatcgagaacctcacggcgcagcagtacggccactacttctgcgaggcccaggagggctcctacttccgcgaggctcagcactggcagctgctgcccgaggacggcatcatggccgagcacctgctgggtcatgcctgtgccctggccgcctccctctggctgggggtgctgcccacactcactcttggcttgctggtccactagggcctcccgaggctgggcatgcctcaggcttctgcagcccagggcactagaacgtctcacactcagagccggctggcccgggagctccttgcctgccacttcttccaggggacagaataacccagtggaggatgccaggcctggagacgtccagccgcaggcggctgctgggccccaggtggcgcacggatggtgaggggctgagaatgagggcaccgactgtgaagctggggcatcgatgacccaagactttatcttctggaaaatatttttcagactcctcaaacttgactaaatgcagcgatgctcccagcccaagagcccatgggtcggggagtgggtttggataggagagctgggactccatctcgaccctggggctgaggcctgagtccttctggactcttggtacccacattgcctccttcccctccctctctcatggctgggtggctggtgttcctgaagacccagggctaccctctgtccagccctgtcctctgcagctccctctctggtcctgggtcccacaggacagccgccttgcatgtttattgaaggatgtttgctttccggacggaaggacggaaaaagctctatttttatgttaggcttatttcatgtatagctacttccgactgcatctgta

SEQ ID NO: 43703 - DNA, 2315 bp, Homo sapiens
cgcagtcaggatgctgtgcattgtgcaaggaagctagatgaatcacagtgtacgaaggttggacccggtgggactcgtgtcgtgtgtcgtttgccggctgcatctgagtacctcagcgtggtaccgagcgcatgttcgtgatcatgctcttggctatatcatgtgttataacccctgtcagcccggacgagtaactccttggtactgcctgaaggggacgaggtgtattccaccatccggaagcaggaatacaatgggaagatccctcggttccgccgcatccggggcgagagtgagctgtacaccagtgatactgtcatgcagaacccacagttcatcaaagccaccatcgtgcaccaagaccaggcttatccgacgacaggttccgagcttcttccgagaggacaatcctgacaagaatcctgaggctcctctcaatgtgtcccgtgtggcccagttgtgcaggggggaccagggtggggaaagttcactgtcagtctccaagtggaacacttttctgaaagccatgctggtatgcagtgatgctgccaccaacaagaacttcaacaggctgcaagacgtcttcctgctccctgaccccagcggccagtggagggacaccagggtctatggtgttttctccaacccctggaactactcagccgtctgtgtgtattccctcggtgacattgacaaggtcttccgtacctcctcactcaagggctaccactcaagccttcccaacccgcggcctggcaagtgcctcccagaccagcagccgatacccacagagaccttccaggtggctgaccgtcacccagaggtggcgcagagggtggagcccatggggcctctgaagacgccattgttccactctaaataccactaccagaaagtggccgtccaccgcatgcaagccagccacggggagacctttcatgtgctttacctaactacagacaggggcactatccacaaggtggtggaaccgggggagcaggagcacagcttcgccttcaacatcatggagatccagcccttccgccgcgcggctgccatccagaccatgtcgctggatgctgagcggaggaagctgtatgtgagctcccagtgggaggtgagccaggtgcccctggacctgtgtgaggtctatggcgggggctgccacggttgcctcatgtcccgagacccctactgcggctgggaccaaggccgctgcatctccatctacagctccgaacggtcagtgctgcaatccattaatccagccgagccacacaaggagtgtcccaaccccaaaccagacaaggccccactgcagaaggtttccctggccccaaactctcgctactacctgagctgccccatggaatcccgccacgccacctactcatggcgccacaaggagaacgtggagcagagctgcgaacctggtcaccagagccccaactgcatcctgttcatcgagaacctcacggcgcagcagtacggccactacttctgcgaggcccaggagggctcctacttccgcgaggctcagcactggcagctgctgcccgaggacggcatcatggccgagcacctgctgggtcatgcctgtgccctggccgcctccctctggctgggggtgctgcccacactcactcttggcttgctggtccactagggcctcccgaggctgggcatgcctcaggcttctgcagcccagggcactagaacgtctcacactcagagccggctggcccgggagctccttgcctgccacttcttccaggggacagaataacccagtggaggatgccaggcctggagacgtccagccgcaggcggctgctgggccccaggtggcgcacggatggtgaggggctgagaatgagggcaccgactgtgaagctggggcatcgatgacccaagactttatcttctggaaaatatttttcagactcctcaaacttgactaaatgcagcgatgctcccagcccaagagcccatgggtcggggagtgggtttggataggagagctgggactccatctcgaccctggggctgaggcctgagtccttctggactcttggtacccacattgcctccttcccctccctctctcatggctgggtggctggtgttcctgaagacccagggctaccctctgtccagccctgtcctctgcagctccctctctggtcctgggtcccacaggacagccgccttgcatgtttattgaaggatgtttgctttccggacggaaggacggaaaaagctctatttttatgttaggcttatttcatgtatagctacttccgactgcatctgta

SEQ ID NO: 43704 - DNA, 2977 bp, Homo sapiens
gctcccggggccacgggatgacgcctcctccgcccggacgtgccgcccccagcgcaccgcgcgcccgcgtccctggcccgccggctcggttggggcttccgctgcggctgcggctgctgctgctgctctgggcggccgccgcctccgcccagggccacctaaggagcggaccccgcatcttcgccgtctggaaaggccatgtagggcaggaccgggtggactttggccagactgagccgcacacggtgcttttccacgagccaggcagctcctctgtgtgggtgggaggacgtggcaaggtctacctctttgacttccccgagggcaagaacgcatctgtgcgcacggtgaatatcggctccacaaaggggtcctgtctggataagcgggactgcgagaactacatcactctcctggagaggcggagtgaggggctgctggcctgtggcaccaacgcccggcaccccagctgctggaacctggtgaatggcactgtggtgccacttggcgagatgagaggctacgcccccttcagcccggacgagaactccctggttctgtttgaaggggacgaggtgtattccaccatccggaagcaggaatacaatgggaagatccctcggttccgccgcatccggggcgagagtgagctgtacaccagtgatactgtcatgcagaacccacagttcatcaaagccaccatcgtgcaccaagaccaggcttatccgacgacaggttccgagcttcttccgagaggacaatcctgacaagaatcctgaggctcctctcaatgtgtcccgtgtggcccagttgtgcaggggggaccagggtggggaaagttcactgtcagtctccaagtggaacacttttctgaaagccatgctggtatgcagtgatgctgccaccaacaagaacttcaacaggctgcaagacgtcttcctgctccctgaccccagcggccagtggagggacaccagggtctatggtgttttctccaacccctggaactactcagccgtctgtgtgtattccctcggtgacattgacaaggtcttccgtacctcctcactcaagggctaccactcaagccttcccaacccgcggcctggcaagtgcctcccagaccagcagccgatacccacagagaccttccaggtggctgaccgtcacccagaggtggcgcagagggtggagcccatggggcctctgaagacgccattgttccactctaaataccactaccagaaagtggccgtccaccgcatgcaagccagccacggggagacctttcatgtgctttacctaactacagacaggggcactatccacaaggtggtggaaccgggggagcaggagcacagcttcgccttcaacatcatggagatccagcccttccgccgcgcggctgccatccagaccatgtcgctggatgctgagcggaggaagctgtatgtgagctcccagtgggaggtgagccaggtgcccctggacctgtgtgaggtctatggcgggggctgccacggttgcctcatgtcccgagacccctactgcggctgggaccaaggccgctgcatctccatctacagctccgaacggtcagtgctgcaatccattaatccagccgagccacacaaggagtgtcccaaccccaaaccaggtacctgatctggccctgctggcggctgtggcccaatgagtggggtactgccctgccctgattgtcctggtctgagggagacatggccttgtcctgtgggccccaggtacatggggcaggatacagtcctgcagagggagccctcttggtgggatgagcgagacgggagaaaaaaggaggacgctgagggctgggttccccacgttcattcagaagccttgtcctgggatcccagtccgtggggaggacacatcctcccctgggagctctttgtccctcctcacggctgcttccccactgcctccccagacaaggccccactgcagaaggtttccctggccccaaactctcgctactacctgagctgccccatggaatcccgccacgccacctactcatggcgccacaaggagaacgtggagcagagctgcgaacctggtcaccagagccccaactgcatcctgttcatcgagaacctcacggcgcagcagtacggccactacttctgcgaggcccaggagggctcctacttccgcgaggctcagcactggcagctgctgcccgaggacggcatcatggccgagcacctgctgggtcatgcctgtgccctggccgcctccctctggctgggggtgctgcccacactcactcttggcttgctggtccactagggcctcccgaggctgggcatgcctcaggcttctgcagcccagggcactagaacgtctcacactcagagccggctggcccgggagctccttgcctgccacttcttccaggggacagaataacccagtggaggatgccaggcctggagacgtccagccgcaggcggctgctgggccccaggtggcgcacggatggtgaggggctgagaatgagggcaccgactgtgaagctggggcatcgatgacccaagactttatcttctggaaaatatttttcagactcctcaaacttgactaaatgcagcgatgctcccagcccaagagcccatgggtcggggagtgggtttggataggagagctgggactccatctcgaccctggggctgaggcctgagtccttctggactcttggtacccacattgcctccttcccctccctctctcatggctgggtggctggtgttcctgaagacccagggctaccctctgtccagccctgtcctctgcagctccctctctggtcctgggtcccacaggacagccgccttgcatgtttattgaaggatgtttgctttccggacggaaggacggaaaaagctctatttttatgttaggcttatttcatgtatagctacttccgactgcatctgta

SEQ ID NO: 43705 - DNA, 2302 bp, Homo sapiens
gctagctgagcgtgacgtcgatatgtcatagtctatatcatcgtctcctggagaggcggagtgaggggctgctggcctgtggcaccaacgcccggcaccccagctgctggaacctggtgaatggcactgtggtgccacttggcgagatgagaggctacgcccccttcagcccggacgagaactccctggttctgtttgaaggggacgaggtgtattccaccatccggaagcaggaatacaatgggaagatccctcggttccgccgcatccggggcgagagtgagctgtacaccagtgatactgtcatgcagaacccacagttcatcaaagccaccatcgtgcaccaagaccaggcttatccgacgacaggttccgagcttcttccgagaggacaatcctgacaagaatcctgaggctcctctcaatgtgtcccgtgtggcccagttgtgcaggggggaccagggtggggaaagttcactgtcagtctccaagtggaacacttttctgaaagccatgctggtatgcagtgatgctgccaccaacaagaacttcaacaggctgcaagacgtcttcctgctccctgaccccagcggccagtggagggacaccagggtctatggtgttttctccaacccctggaactactcagccgtctgtgtgtattccctcggtgacattgacaaggtcttccgtacctcctcactcaagggctaccactcaagccttcccaacccgcggcctggcaagtgcctcccagaccagcagccgatacccacagagaccttccaggtggctgaccgtcacccagaggtggcgcagagggtggagcccatggggcctctgaagacgccattgttccactctaaataccactaccagaaagtggccgtccaccgcatgcaagccagccacggggagacctttcatgtgctttacctaactacagacaggggcactatccacaaggtggtggaaccgggggagcaggagcacagcttcgccttcaacatcatggagatccagcccttccgccgcgcggctgccatccagaccatgtcgctggatgctgagcggaggaagctgtatgtgagctcccagtgggaggtgagccaggtgcccctggacctgtgtgaggtctatggcgggggctgccacggttgcctcatgtcccgagacccctactgcggctgggaccaaggccgctgcatctccatctacagctccgaacggtcagtgctgcaatccattaatccagccgagccacacaaggagtgtcccaaccccaaaccagacaaggccccactgcagaaggtttccctggccccaaactctcgctactacctgagctgccccatggaatcccgccacgccacctactcatggcgccacaaggagaacgtggagcagagctgcgaacctggtcaccagagccccaactgcatcctgttcatcgagaacctcacggcgcagcagtacggccactacttctgcgaggcccaggagggctcctacttccgcgaggctcagcactggcagctgctgcccgaggacggcatcatggccgagcacctgctgggtcatgcctgtgccctggccgcctccctctggctgggggtgctgcccacactcactcttggcttgctggtccactagggcctcccgaggctgggcatgcctcaggcttctgcagcccagggcactagaacgtctcacactcagagccggctggcccgggagctccttgcctgccacttcttccaggggacagaataacccagtggaggatgccaggcctggagacgtccagccgcaggcggctgctgggccccaggtggcgcacggatggtgaggggctgagaatgagggcaccgactgtgaagctggggcatcgatgacccaagactttatcttctggaaaatatttttcagactcctcaaacttgactaaatgcagcgatgctcccagcccaagagcccatgggtcggggagtgggtttggataggagagctgggactccatctcgaccctggggctgaggcctgagtccttctggactcttggtacccacattgcctccttcccctccctctctcatggctgggtggctggtgttcctgaagacccagggctaccctctgtccagccctgtcctctgcagctccctctctggtcctgggtcccacaggacagccgccttgcatgtttattgaaggatgtttgctttccggacggaaggacggaaaaagctctatttttatgttaggcttatttcatgtatagctacttccgactgcatctgta

SEQ ID NO: 43706 - DNA, 1841 bp, Homo sapiens
ggtaaggtgcctcgcaggcacgtgagggcctctctaatcgttagctattgtcaccgattgtattgttatgacttctaccaccaccactccccctcctcctgggatggtgattccagggccaggcggcaggctataactagcgcccttccaggtggaacccgccagagccccgaggcagcctaggattttctgagatcagacacacttgggccgggttgggaggaactggcaggaaaaggactgaacccttaatgtcaggcggttttgaagcacctggggcaagctatggaaatccccacaggaaggctcacgcagtctcttaggcggctgccctccacctgccacgttctttttgattgactaaaaaacgctgaatgaagaacgaagtcgcgtggaaaccctcgccgcgcgcctgcagcggacagcgcagcccgggaggttcggctgcggacttgcgcccgggggctgcgctgcgagcggccacgcatggcggctggacccgggcggccgcaagggcttggctgggccgcgggaggcgggaggttcttcgtcctcccgagccatctccctgaactgacaagcaggactcccgggtccagggggcacagggcccggggcggtgacccggcggatcgggctgccggaggagcccactgtaaatgccgcaactggccccaaacactgcgttcctggactgcaccagcagctcctggcgcggccgcagagttggtggatattttccaagggggaaaaaaatcttttaaatgccatctgtttactttaaaaatgttgattacttaagaaaaacgaatggatgtctgggcaaaggtatggacgtcacaattattttgaaggcgtcctttttaactttaaacagaccacgccaggaggagactgctgacccagagcgcattacctaaaatctggtacccagagtgcacccttcgccctcgttggagttctctcctctctgccaagctttgctccgtgccagaggtgtgctccattgtacctccgctctgtccctgcagtcaggcaaccaattggagaagagtataaatagtaattaaccagggagagttgtaattcagaaacctagttaaaacaagtcctcaaaaactagagaatatgagagtggggagacattttgaaggcattaagaacaaaaaacgatggggacgaatggttgagtctgaggatcagcatcgtaatctgttagagaacgaggtcgtggctgtgtctgtgagtcgttaatgggtttaatcggttgatacacagcctgctagtggcctaaccagtaacccagggcctggcagatttgcatgacatctcggagtttgattgctcttccttccacttggcaaaaggagacaccatcagccggatcaggaggggtcatggtgagatggaacccaccgaggtggtgtacagagctggcgctgccaatggccagagtggcagcctttctacctccttaaccctgcaaaaatcaaacgtgctagtacgcactgtccatccacactggaactccagttggttttagtctgcgatgatgactcttctgggttgacttttccagttcattatgcagccctcttgaagcaggcctcccaaacttagcagacaccaatgagaacctcacagagaggctcatcaagcaggctggtgaaactgggtgttacttcctgttccatgggtaccccatagtgtttgggaaacaccgggctgtggttcaggagaatttcacatatgctaagatggagaaagaacctgccctttacatttaggcttgggatgttaatttaaagtttgaatgaccaaaaattaaatctgtaactttt

SEQ ID NO: 43707 - DNA, 2502 bp, Homo sapiens
ggtaaggtgcctcgcaggcacgtgagggcctctctaatcgttagctattgtcaccgattgtattgttatgacttctaccaccaccactccccctcctcctgggatggtgattccagggccaggcggcaggctataactagcgcccttccaggtggaacccgccagagccccgaggcagcctaggattttctgagatcagacacacttgggccgggttgggaggaactggcaggaaaaggactgaacccttaatgtcaggcggttttgaagcacctggggcaagctatggaaatccccacaggaaggctcacgcagtctcttaggcggctgccctccacctgccacgttctttttgattgactaaaaaacgctgaatgaagaacgaagtcgcgtggaaaccctcgccgcgcgcctgcagcggacagcgcagcccgggaggttcggctgcggacttgcgcccgggggctgcgctgcgagcggccacgcatggcggctggacccgggcggccgcaagggcttggctgggccgcgggaggcgggaggttcttcgtcctcccgagccatctccctgaactgacaagcaggactcccgggtccagggggcacagggcccggggcggtgacccggcggatcgggctgccggaggagcccactgtaaatgccgcaactggccccaaacactgcgttcctggactgcaccagcagctcctggcgcggccgcagagttggtggatattttccaagggggaaaaaaatcttttaaatgccatctgtttactttaaaaatgttgattacttaagaaaaacgaatggatgtctgggcaaaggtatggacgtcacaattattttgaaggcgtcctttttaactttaaacagaccacgccaggaggagactgctgacccagagcgcattacctaaaatctggtacccagagtgcacccttcgccctcgttggagttctctcctctctgccaagctttgctccgtgccagaggtgtgctccattgtacctccgctctgtccctgcagtcaggcaaccaattggagaagagtataaatagtaattaaccagggagagttgtaattcagaaacctagttaaaacaagtcctcaaaaactagagaatatgagagtggggagacattttgaaggcattaagaacaaaaaacgatggggacgaatggttgagtctgaggatcagcatcgtaatctgttagagaacgaggtcgtggctgtgtctgtgagtcgttaatgggtttaatcggttgatacacagcctgctagtggcctaaccagtaacccagggcctggcagatttgcatgacatctcggagtttgattgctcttccttccacttggcaaaaggagacaccatcagccggatcaggaggggtcatggtgagatggaacccaccgaggtggtgtacagagctggcgctgccaatggccagagtggcagcctttctacctccttaaccctgcaaaaatcaaacgtgctagtacgcactgtccatccacactggaactccagttggttttagtctgcgatgatgactcttctgggttgacttttccagttcattatgcagccctcttgaagcaggcctcccaaacttagcagacaccaatgagaacctcacagagaggctcatcaagcaggctggtgaaactgggtgttacttcctgttccatgggtaccccatagtgtttgggaaacaccgggctgtggttcaggagaatttcacatatgctaagatggagaaagaacctgccctttacatttaggcttgggatgttaatttaaagtttgaatgaccaaaaattaaatctgtaacttttaaagtttctctttgtgattttacttaagtgttggtagatattcttaaattgtaatgacctcagtttgggaattaagttagccaaatattgtgtaattattgtttgttatacaaaaatatgccttagactgtacagcggcagaaactccctctaccacctcggtccccctttccattctgcgttatacaaaataagctgacacgttaatgctgtggcccacattaaacaaagtataccgtacgtgtgtgtgtgtgtatgtggcataataaatggtggtagctaacacttaccgaatgttttccctatgttccaggcactgtttcaagttttacaggattagcaaatttaatcctcattacagttctgtgaagtaggtacttttacaggtgaggaaacacaggcacagagaggttaagcaatttgcccaagatctcacagctgggaagtaccaaagctaatataccaacccaggcagtcctgctccagagatcgttctggaccattctggatcacacttcctcgcttaagtgattgaagcaagatatttatcatatagcatgggtccaaaactgagtttgctttagaagagtttgacagctttctgacatgcctttagtggtctcagcgcagactgcagattttgtcattcacttgaaaagaa

SEQ ID NO: 43708 - DNA, 320 bp, Homo sapiens
gatactgctaaatcaataaacacaacagtcatttaagtgtgtatgttatataatatttggttaattatattataactcaaattctttcagtgcacttgtcttttaaattgaatgctaaatataactggagtacttgtaaaaatagaatggtcagaaaaatgcagagtatattatgtcatttttctaagctatattaagttaatatttggagttagcaacagattttgtcatacacatcattttatgtaccatgaaatgtcatatttcagaagtactcatgtttaataataaaaataaatagccctgttttatgttactga

SEQ ID NO: 43709 - DNA, 252 bp, Homo sapiens
tgcgtgtgctattccctctgcctggagtgcctttccctgtcctctttgcttggagacctcctatttatcacttaggtctcagctcaaatgctcttttttttttgaaacggagtcccactctgtcacccaggctggagtgcagtggtgcgatctcggctcactgcaacctccacctcctgggttcaagcgattctcctgcctcagcctccagggtagttgggactataggtgcctggctaatttttttttttt

SEQ ID NO: 43710 - DNA, 479 bp, Homo sapiens
tacttttctgcttagcatgttttcaccgtccttcagggtgggggaacagtgcttacaatgacgttctctccattggcttcacaaacaccctaaccactatgtgccctgaatgtgattacattttgctacctttgaagagaagaaaaaaaacattgagaagaaaaagaaatctggctggctctaaagaaaaagcctttaagtacagctttaaacattttaataagcagtttatttcccttccgctgattgccctggaaaaaaataaaataaaataacacgcaaacaaagccaggattgattagttcttctcctcccccattcccaactgctgttcactcagcaggaaaaagaaaatcacagtatgggactcagaatcttattcattagcatgtgtggcccttcctggtggatggtctactttctccacagccccctccatcagtgtttgctgaaatctgagagggggagattctgaagtc

SEQ ID NO: 43711 - DNA, 256 bp, Homo sapiens
taaataaaagagaaaatgagttaatgatcatttatttttctaattacatatatatgttagtaccatgcttggatattttcatgacagccccgtgttaatgacctaatttcaaatatgacccacagtatattctaacccaacagtttgtttctcttcacctaaaaagtaattcttagcttttgtatagaactttataatttgtaaaataattccacatgatcgtcacaactacccctagattaaagcaaggaggtat

SEQ ID NO: 43712 - DNA, 433 bp, Homo sapiens
tgtatctggggccaaaataaataaaatcctcgccgatatttttctggttaatatagctggattcttctcttttaaaaaattattttccaagaatgtaatatttctatgatggttgtacctagtcaacattattagtttcgtttgctccctgcaggggcagaattgaccctcaggtctatggggatggatccagctttctcccctgtggggttctctaagttggcagcctttcctacctcacccccaagctcccttttgcacgtgcagccacactcatcacattggggtgcagctcatctttcatggctggcaggctgccaacactgctttgaactgtggaaaatctgagaagtgcttgatagctttttatatagcttggtttgataccaataactcttgagtgtggatgtcaaggcaacaaagctgcagctca

SEQ ID NO: 43713 - DNA, 652 bp, Homo sapiens
acaataaaagaaattggagttttatgaaaatttgggggagtgagaaagaaagctcacatctggttggttgtaggactggaaaagattcaaggaggaagttccatgggagtttggctgggaggaatttctggagatgaaagtgtagaagaaggcattccaaggtgatggaacagcatgaggtgggaggaaagtacaggaacactaaacatagaacttaggtaggagggcaatgggtggggaggaagatttaaagaagtaaaacacttggggaaatgctaaagtaggaatttggatgagagtccacggacaacaaggacctattgaaggatttcataggagggaaataagtgcttgcagctgtgccctggacagtgaatttggcagtgatggaggcctggagtggagaagggaagaagactgaggtcgtgaatatcagtaaagagactattccaggatccagataagagggttaaggcacaggcaacagaaaaaaaggggaaaattaagaggtaatggatggctgggcatgatggctcatgcctgtaatcccagcactttgggaggcagaggcaggcagatcacctgaggtcaggagttcaaaaccagcctgaccaacgtggtgaaaccccatctctactaaaaatacaaaagt

SEQ ID NO: 43714 - DNA, 417 bp, Homo sapiens
gggggcaggagcatttggaaaaagaaaggtcaaatggagcaaatggttgtgccagagtagcaggtaagggatccatacccaggactggaggctccagatgggttaccagcactgaagcccacagcagctgtctttccttcaaaggttttactcaggttctcctctgaggatttctgcaaatgtcccctaaaatgatcccaggtcatgtataggagcactgaactactaaaactcaccacattccacacacccaccacctcagcactcctgccacacaggtgagatccatttccccaagcttagagagggaagccctttgatgagacacaggcttaaagcagactaatttcatccaaagcagaagctccacacatcacagggcttacggcagagtcatctcagtagagcactcctgga

SEQ ID NO: 43715 - DNA, 326 bp, Homo sapiens
aaaaattgagtaacaagcataagcctagttttataagaaggctcagatgaaggctttctgagaatgttacctgaatagagattctaagtcatactctgatttcagatttagcttctctgagagtttacaaaagcccctctagagaattcagttggacaggtcataagccagttctgataaacctaggggtccactacagttagaatatctgacacatttggctgggcatagtagctcactcctgtaatcccagcacttttggaggccaaggcgggcagattacctgaggtcaggagtttgagaccagcctggccaacatggtgaaa

SEQ ID NO: 43716 - DNA, 96 bp, Homo sapiens
gcctcaaagcagggagttaggaagtgatgaagctgtaacacaaatcttatcatttatagaccaataataaaagccaatgtttattgaccatctata

SEQ ID NO: 43717 - DNA, 900 bp, Homo sapiens
caagcgattctcttgcctcagcctcctgagtagctgggattataggcaggtgccaccatgtctagctaatttttgtattttttgtagagatggggtttcaccatgttggccaggctggtcttgaactcctgacctcaaattttcctcctgcttcggcctcccaaagtgctgggattataggtgtgagccaccgtgcactgacatgttttgtctgagcagtgcctttgtggtagttaccctcctgggtcaccctagtctatcctcagagagaaagacttggctatggcttaccccacagggtgtccacagggaaggtggtggcgtcttgtgtggggatgttcctggagaaggggacattgtggcaaatgtggaccagccggaagacaccccctccccccagctggagtttataccatttatggcctcctaactcattcattcaggtatacactaactcatccattcaggtatacactaactcattcattcaggtatacactaactcactaactcatccaggtatgcactcactaactcacatatccccagggcctcctaaggcatctaaaatatgcaaatctttggtgagcccccagtgaggctcctggctctgaatttgactcctgaaaggtgaggccctaggagagggggatggggactgagccacagaaagccttgctcagctcccctagaccggggtgagccggggtctgtttcatagagggccaagctgaggcccagacactctgagaggaagctagactctgaacttcctccttggcaccctggattctggggatctgctatacaagtccccagaggtggcgaagaggatgggagaggcagggccctggctgggggcctccaagcctccatcccactccttgggccacccccgcc

SEQ ID NO: 43718 - DNA, 488 bp, Homo sapiens
tggtccataatttttttttgaatactgagaccatggtatagataaaatattcataacagttaagatctgttggagtatagatgagttaaaatctgtagaatataaatcatatataaaacaaagtattcagactatgtatatgtaagggaatagcaaaagctctgagtcatgctagaaataagcttttattattcctcttgactatagtaagtctggtttctcaagtcagaaatgaaaatggactaaaaaacaggtgtgtgttggcatgactttgagaagagggcaatgaaataaatcaggcagacatcacgcttacttctttcttttagatttcatttccttctatcttgtaatgaaggcttttgttttttaaatgcatcctgaggcactggttctaccaccccacaaacagctgaattttaaacaactcctttaatatgaagttattttattttgaattggattttccagagtcgtgtttactgcct

SEQ ID NO: 43719 - DNA, 431 bp, Homo sapiens
gatctaggttgcaagctccctatgagaatctaatgcctgatgatctgtcacggtctcccatcacccctagatgggaccatctagttgcaggaaaacaagctcagggctcccactgattctacacgatggtgaattgtggaattatttcattatatatattacaatgtaataataatagaaataaagcacacaataaatgtaatgtgcttgaatcatcccgaaaccatcccaccctggtctgtgaaaaaattgtcttccatgaaaccagtccctggtgccaaaaacgttgaggaccactgctccacagaatctatcggtcactcttcctcccctcacccccttgccctaaaagcacaccctgcaaacctgccatgaattgacactctgtttctatcccttttccccttgtgtctgtgtctggaggaagagga

SEQ ID NO: 43720 - DNA, 474 bp, Homo sapiens
attgctcttttgtttaaattattgggagttggcctctattgcctgcaaccaaaatctctcattcttatacttctcaacagagcaaactgctatgcatccttcagctgcaagggattgaatgctatcaacaaccatacaagtggagaagcagatgcttccctagctgagcctcaggtaagaacccagacctggccaacacattaatggcagctttgtgaaaccctgagttgatctctctaggtcatgcctggacttctgatccacagaaagagtgagataataaatgtgtgttgttttgagctgttgagtttgtggtaatttgttatataaacagagacagaggaacgagttaacaatactatgatcatacaatgaaccaattatggaatgtagaattttccatgctataaataactttgtatctgcaaaatatcaatggcttcacaaaaggaaacaagggcatcattaaaagaa

SEQ ID NO: 43721 - DNA, 326 bp, Homo sapiens
agttctaaatatctacatttaaaaagaaaattctcaattacttaactttacaccttaagcaagtagaaaagcaagggaatagttaagattagacaacagataaatgaaatagagaacagcaaagcaatagagagaacagataaacctaaaagttggttctttgtaaagattaataaatttgataaacttttatctagattaagaagaaaagaaagaagcaaataactaaaataaataaaaatggagatattaccaccaaacctttacacagattaaaagaattacaagaaggctgggcacagtggctcacgcctgtaatcctagca

SEQ ID NO: 43722 - DNA, 828 bp, Homo sapiens
ggaatgtagtagatgataaaagtaccatttctaatctgttgagaaaagatgagttaataaaagacattaggaagaaaagggagcaatctggaaaaaaagtaagttggattcataatttgtatcttagaaaaaattacagatgaactcaatttataggtttggaatatgttgttcctaatgaaaaaaacatttaaaaaggctgggtgtggtggctaacacctgtaatcctagcactttgggaggccaaggtagatggatcacctgaggtcaggagttcacgaccagcccggccaatatggtgaaacctcgtctctactaaaaatacaaaaaaaaaaaaaaaaaaagctgggcatggtgggtggcaggcgtttgtaatcccagctactcgggaggctgaggcaggagaattgtttgaacccagggggcggaggttgcagtgagccgagattgcaccacttcactccagcctgagcaaaagagtgagactccgtctcaaaaaaataaataaaaatttttttaaaaattaaaaaataaaaactctaggtctggtgtggtatctcacaccacctgtaatcccagcattttcggagcctgaggtgggaggctctcttgagcctaggggttcaaggcctcagtgagcaccgctgcacttccagcctcggcgacagagtgagacaacgtctcaaaaaaaataaataaataaaaataaaaattaaatgttaaccttcaatatttaaacgtacaaaaatgaaaacgaaaatacagccagaagctggctgggcacggtggctcatgcctgtaatcctagcactttgggaggctgaggtg

SEQ ID NO: 43723 - DNA, 284 bp, Homo sapiens
cgtggtggcgggcgcctgtagtcccagccacttgggaggctgaggcaggagaatggcgtgaacccaggaggcagagcttgcagtgagccaagattgcgccactgcactccagcctcggcgacagagtgagacaacgtctcaaaaaaaataaataaataaaaataaaaattaaatgttaaccttcaatatttaaacgtacaaaaatgaaaacgaaaatacagccagaagctggctgggcacggtggctcatgcctgtaatcctagcactttgggaggctgaggtg

SEQ ID NO: 43724 - DNA, 406 bp, Homo sapiens
ggtttcatcatgttggtcaggctggtctcaaattcttgacctcaggtgatccaccctccttggcctcccaaagtgttgggattacaggtgtgagccactgtgcccagcctcatgtgctatatttttacttcgttccaggacactaatatgcttttgttttccatctatttcctggttgcactttctcaatatttttgtggtctccctggctttttaactttgaggtattacaggcttctaaactaaattcttctcttctcacctattcttattttagtgttcagttcatccaatttcgttgctccaaatgccaactttgtgtcaatgttctctaagttcataaggccaataaaatgcctcttgtgaacttcaggctgcatatacaaatgacttctctatatatctg

SEQ ID NO: 43725 - DNA, 555 bp, Homo sapiens
taatagtatggtacaggattattatctccatctgactggtgcgttgatatatctcaggtagttccaaatgtgggagaaggcaaaaagagagtattatttactgttacttccccaagtcctacctataattttttacttttttcagaaagaaacatttaaaaggggcttaaaaacagaagccatatttgtgtcttgggtgagggtaagacaagatggtggatcccctcgccattactactgagacccatggcttataaactatcctacttataattttttatttttatgtatttactttttgagacagagtcttgttccatcacctgttgaggctcactgaagcctcgacctcccaagctcaagtgatcctcccacctctgcctctccagtagctgggactacaggtgtgtaccaccacacccagctaatttttaaacttttttttggaatctttactatgttgcccagggtggtctttgaactcctagggtcaaacagtttttcccgacttggcctcccaaagttctgggattacaggtttaagcaactgtcctc

SEQ ID NO: 43726 - DNA, 360 bp, Homo sapiens
taaattaatcacacattaatgtaaaaaataagagctttctcttttcaccttatgagaatgtaagaaaaaaaagttggactagaaatttaaatttaggtgctaagaaactggatatccacatgcagaagaatgaaactagacccccacctttcaccccatacgaaaatcaacttaaaatggatcaaagacctaattgtaagacttgaaactataaaactattagaagaaaacacaggggacactgatgtggggaaagggtttatgagttaagatctgaaaagtacagggtgggcacggtggctcatgcctgtaatcccagcactttgggaggccgaggcaggcggatcatgaggtcaggag

SEQ ID NO: 43727 - DNA, 469 bp, Homo sapiens
acagctagaaagcaaagttattttttagaactattatttctgttgtgaccttttcttcaagttaactgataatacacagtgagttgctttttctaatacagaaacccgtggcattctaggagcttatttataaccccctgcgaggagcaggcagtaaggaagaaagcttcattatgcattttaaacactgtgcttcgtgtggtcagatgaaatgttattctgcttgcactgtggtatcttttacgtctgagcaaacatacctggcttactttccccaacttccccctctcttttttctctgttcaggaaatcaatttggttgaatttcttgtgtagggtgaaatccatggactcgtacagagttggtgagtgggccatcaatgggatctctgttagctcatttttcatcagggagatacatttctttcccaaagctgtgatctaggagagttgccaagcagctagagtt

SEQ ID NO: 43728 - DNA, 442 bp, Homo sapiens
atgaaaatgggttaattggtcactaatgagctgcattactgggaatagggttagagttttatgaaatgcgtagtttcactttagacttacctactctcaggagtaggcagttatttaagtagtagccagtttgaaagaaaaaaatctaccttttcagtttgtttcctttttatggataaaatgaaaaaattccatcctgaaatcagattttaaggaacagatatatatagtgattaaccacccagcttccttttgcctacacacacacatgcacacacacactttatcttctgtttttcattcagaatatgactgcacaagctgtaggggttagctaacagcacactgaacagctttttgctgccagtttgggggatgattgaaattattgacccttacacgaagacaaaatgaaatatttttatgcaagaatactagaaaa

SEQ ID NO: 43729 - DNA, 694 bp, Homo sapiens
gagaggaggagaagacagaagaggaaaacagtcctaactattaaaaataccaattaactacttaataacacatctttcagtgtcttgcataataatttcttagatattttgcaaaattcggcatggttaagggattttgtaatggttaaataattttattagttgtttgaaattgactgtctttgttttcctatctgtgtgctgagatttatctcaattatatgtgtgaataatgttatgcatgggggttacttttaatatgggatttaactgaggattctaggactatattctttgtaaatatggaaccattaggaaacttgttcaattgtgggtcgtcattaattcaagtcaggaaggctcaccctttgtcctcacaccatctcttaagaagataagtcctgtggataagctggagaggtcagatgttggtgttgacttaaagcattgccacccgaggagggcagaatgctgtaaaacaaagcagaaggaactgtgtggagagaaggtgaatgactgggggacttgaagttgaaagaaaagtcaggcgctgagcctgcaagggcaaaatgaggcttgtgggataagaatggtttgtcagaagtcacctgtttgctcagaagtcatctttccctaacaagggtctgtttggtatgttcctgtattacaatttataataactgtttttttacct

SEQ ID NO: 43730 - DNA, 853 bp, Homo sapiens
ctcatcttcatttctctgaatgattattaagattacagcagttatatcccagttccaagctataggattgaggaaaggaagaagggtacactttttcaagacttcctgtgacaaaacatttccacttttactcattagcatatggttaaacctcactccaggggaaagtgagaaaggtcatgttatatctggacatcagtatgcccatatataaatgggggttctgttcctaaaaatgaagggaaaagtagtttatcagacacaagcctgaaacagctcgtcatgtttaatttagcaactttttttaggcacgtttggtcatcgttcagttattttatttgggatacatataattctcccctcccctcgttccctccttccttcccttctttctcttccttcttctctccctccctcccttcgtctttctttccctcccttctttccttccttacttccctccctcattctctccatccctttctttttttttttttgctagtaaaattgttcatacctcatataataaatcagtatttcctgacattcctcagattactactctttcaggtggattttttccaggttttgccgttggaaaaaatttgagatacattcaactggatactccctaggatgttctcaggcgtaaaaatctaagaattttaccatgtttaaatgtttcaaacacagtgtcaataacttgaaagagaatcagtgctttaaatattaactgagacatcttacagatggccactggactcttttaagttagcactaaattatgtctacaatgttaggaagatggttgtgatattttcatggaacttttaaattttttttcctttttctt

SEQ ID NO: 43731 - DNA, 520 bp, Homo sapiens
acatatatcatgatatatcaaaataataacatattcagaaaaatatgactaaaaaattaaactccattatttatttgagatttgacaatgcttcccatatgattttaacataccaaataagctaaatatatctttcttagatttctagaggttacttttggaaaagatttaattttagaaactgaaatttgactttgggtagtatatcaaatattaaaggtttaaaacacttgatcaaattaggatcacagttcactgtaaataatagtcattcatttaaccaaagcaataattcaaaaatttcaaacaacctttactctttgagagagaagactcagttatctaaataatcaaaagacctaataaagatctttttttgcagtttactcaaaagttgaacaaaagccttttactatccttattaatactacattaaaatcttgttcaaaagaggaaagcatattctacatttgtgtcagtatattattaatgctaaagctaagtttaataaagacttata

SEQ ID NO: 43732 - DNA, 469 bp, Homo sapiens
gatagtaaagatggtggcccctgtgctttcaagtttctcaagccagatcccgactaggctcacagtgtgtatttgggacttttagaatttgggaagttgagacctatgaaagtttgagaacctgggaaacttcagagctttcaggatcttttgaaatcttggacattttagaatctggagcatctttaaacctggggaactttaagaagcttgaactcttctgacgttgtggaatttgagggatttcattttggggctctgttggccttggagtggatgctgtcctcttggtgtagaggaggacattcgtcagcagacctgagccctctcctcccaccggccctcagagcccagtatttcaaatatctcgacgttatgcagttttaaacttcagatttttgaaatgaaattgtattagttatcttgaatgttcgatgttgtgtttctcaaacatgtgttggcctactgg

SEQ ID NO: 43733 - DNA, 162 bp, Homo sapiens
aatcttgaaagggttatccctagatctagtagcagtttatttccaggtcatatatgagaactggtctggggaaagggcccagttcctttctccacctccaggggcatggatttggaggccaatgtatatccagttgtctcggcatacctccctgaggctagg

SEQ ID NO: 43734 - DNA, 374 bp, Homo sapiens
gagtggtgggtgtggaagggagtacctggcacggattttgcacctggaggatgcttgacaccttaggctgcttctgtggaagaggaggtgaggaccctgtcctgggagcaggtggttctacgaagcccagctgtgggggtctatgaagcctctcctgagttggtctcggactcatcttcccagagccatgggtctttctctatctctgtgatacggggttcagtgcccccatcccagcaggaccccaagtctacactgggcagcaaccctgagccagtgataataatgacttatggcccctgtttacggagcatttcctgtgcacgtgcatatgggcctaatcttgttatgtccttcaacaactctgtgagagt

SEQ ID NO: 43735 - DNA, 268 bp, Homo sapiens
cgtccactagaaagggaaaggtggcagaaccatatatatgagcctgttacttgttcaaggacttggtcaggggcctcacagaacttggaaaagagcaacggactcttcagagaagttcttcagagaagagctctgaactggagagcaagagctgggagcacctcccatggctgcagtctctggtcatttccaaagcccaggagaaggctgcatttggtcaaccacccacttccatttagccagggcctttaattcattcccaaatcct

SEQ ID NO: 43736 - DNA, 1008 bp, Homo sapiens
cttgttgggaggaattaacaatcatgcatcgagccctgggcctcaggcttcaatgtattagttattagagctaatcattatttaatgttttaaacacccccaaggaagtagagaacattcctgtcacattctgcagaaaaagaaattgaggcaaggggcaaagccatttgccaaggtcatagatcctgcaagccaatggcaaggcaggatctgaacctggggcttcagatcctggggctttacctgattaaataccaagagagagtgctgagatttttttggtggtggacagtccctgaggcaagccatttttagagcatctgggccacttggggaattgaatctttaccagggcttcccacctcctgttgccccttctctgaaggtgacccccctcccacagtagcaccccaaccactcagaacccccaagccaccttctttgcacatgctgaagctaatattgccctccactccaccccaacatcagggaccctggcccaagcccttccctgggagcccttcctcctctcatgaggcctccttcccagcccctcagaacagcctcctttatgagagtggccaagatcccactgaaaccttccctatcaactttataaaattaatcaggggagaagggaggggcgaaatggaaatcagcccagcttgcagcacacacagcattggtcatgaggtcagctgctctctgacccacttgctcagagttgtttgctgcctgttgctccagagtcacatagaccctgtcacaaggtcatagttccccttcactgctcatagataacaactggaacattataaaacgttaacttttccatttgagatattctttcaggtcctgcgtagcaatgaaactgaggcaggataggtacttaagggagtgaccgtgttctcaggatgcagcgaccatggcacccatacagtcaacacagtgagcctcagcattcgcattgtcattgcgctcattcaagcaaagctgtcttcattaggg

SEQ ID NO: 43737 - DNA, 424 bp, Homo sapiens
ttttgagacagggtctcaccatgtcacccaggttcaagaacagtagcatgatcatggctcactgcagcctcaacctcccaggctcaagtgaccctccagcctcagtctcccaagtacccaggatcacaggtgcatgctaccacgcccagctaattttctagttttttgtagagatggggtcttgctatgctgtggctggtctcaaactcctgacctcaagaaatcctcccatcttggcctcccaaagtgctgggattacaggtgtgagcaaccatgcctggccgaagaaagtcattctttcatattctttaacatcctaacctttctcatctttgcctcttgatattgggtatatcttgcttttgtggtctgtagcccacactattcactgctttcaaagaagaggaaaagaggtaggttagtc

SEQ ID NO: 43738 - DNA, 415 bp, Homo sapiens
actttatgaaatatgttgtttactgaaaaatgctgaacttattgaaaaatatttatagtggtctggggccagtggcagctagttacacaagtaagatcttctttgagcttgctgtagaacaaaggcattagccgggcgcggtggctcacgcccgtaatcccagcactttgggaggccgaggcgggcggatcatgaggtcaggagatcgagaccatcctggctaacacagcgaaaccccaactctactaaaaatgcaaagaattagttgggcgtggtggcaggcgcctgtagtcccggctactcgggaggctgaggcaggagaatggcatgaacccaggaggcggagcttgcagtgagccgagatagcgccactgcactccagcctgggtgacagagcgagattccgtctcaaaaa

SEQ ID NO: 43739 - DNA, 1135 bp, Homo sapiens
attccagcctcattgtaacacacattctacgcctagcctggctttcttgctctccctcatctcattgtttcagcggaggccaaatctgaagtcctttccagggagtggctctgttcatcttattcgccagccaaagtaggaacagcgtaagaggagagagacacattcagcagccaaaggactcggtggaaagagcagaacaccatagacaatatgtcgctcttgggacccaaggtgctgctgtttcttgctgcattcatcatcacctctgactggatacccctgggggtcaatagtcaacgaggagacgatgtgactcaagcgactccagaaacattcacagaagatcctaatctggtgaatgatcccgctacagatgaaacagttttggctgttttggctgatattgcaccttccacagatgacttggcctccctcagtgaaaaaaataccactgcagagtgctgggatgagaaatttacctgcacaaggctctactctgtgcatcggccggttaaacaatgcattcatcagttatgcttcaccagtttacgacgtatgtacatcgtcaacaaggagatctgctctcgtcttgtctgtaaggaacacgaagctatgaaagatgagctttgccgtcagatggctggtctgccccctaggagactccgtcgctccaattacttccgacttcctccctgtgaaaatgtggatttgcagagacccaatggtctgtgatcattgaaaaagaggaaagaagaaaaaatgtatgggtgagaggaaggaggatctccttcttctccaaccattgacagctaacccttagacagtatttcttaaaccaatccttttgcaatgtccagcttttacccctacttccttacagtctctagaattaaatgtactcatttagacaacatattaaatgcatattttagccactttagagaaacctcataggcacagagtttccaagattaattttaagaatatcttcacgaacttgaccctcctactccacattgcaacatttccatcagacagcatttcaattccagtattatgtatattgcaaattaaacattttaaaatatttttttccaatttatttctcaaaataaaatgtcttttgttctgg

SEQ ID NO: 43740 - DNA, 3093 bp, Homo sapiens
attccagcctcattgtaacacacattctacgcctagcctggctttcttgctctccctcatctcattgtttcagcggaggccaaatctgaagtcctttccagggagtggctctgttcatcttattcgccagccaaagtaggaacagcgtaagaggagagagacacattcagcagccaaaggactcggtggaaagagcagaacaccatagacaatatgtcgctcttgggacccaaggtgctgctgtttcttgctgcattcatcatcacctctgactggatacccctgggggtcaatagtcaacgaggagacgatgtgactcaagcgactccagaaacattcacagaagatcctaatctggtgaatgatcccgctacagatgaaacagttttggctgttttggctgatattgcaccttccacagatgacttggcctccctcagtgaaaaaaataccactgcagagtgctgggatgagaaatttacctgcacaaggctctactctgtgcatcggccggttaaacaatgcattcatcagttatgcttcaccagtttacgacgtatgtacatcgtcaacaaggagatctgctctcgtcttgtctgtaaggaacacgaagctatgaaagatgagctttgccgtcagatggctggtctgccccctaggagactccgtcgctccaattacttccgacttcctccctgtgaaaatgtggatttgcagagacccaatggtctgtgatcattgaaaaagaggaaagaagaaaaaatgtatgggtgagaggaaggaggatctccttcttctccaaccattgacagctaacccttagacagtatttcttaaaccaatccttttgcaatgtccagcttttacccctactctctactttttcacccaaactgataacatttatctcattttctagcacttaaaatacaaagtctatattattgcataattttgctgcttctcaatatcatagacacagtgaatagatgatgactatatggcttatatacaaacattctatgtacaatttcaagggagactaaactttaggctaataatctttactattgaatctgtctgatatagatcttagggttgaagaagctatctttgtctatttgggctaaccatagaatttcatttattttcctcacaatattttcctagaccaactccccatcattcacgtgttcctctttactcttactttaactattttgctggcttgcccgaaaatttgcctggcaagtcttccttataagacacatcatggtaagttttgtagtcctgtaagattctgcaacacagtcaagaattatacaatcctactagcaatatataaggacccaaaatgtcttctgctaagctcagaggctggggctaaagcatgaggactatgccagctatagaacttggactcataattcgctatccaatttttcatgcagttgtctagtcgggaagtaaggttggaaactaagtctcatttactgattcgtttatgggtagtaccgggatgaacccaccaccacaaagcaaattagacaacttaatgtgaaatcataccattggttgacgtttccttgagttgctacttcgttcatcttcacaacttaacaagtgcacggtcgaattattgtgcaagtggcttttggatatcctgattggggcctaagaagggcattcagacttgaattttaataggcagacagaaagtttgcctaatagttaatacgaaagaatgaaagaaacacagatattcagacaacccacattcttatcctggctctagcagtaaccacgtagccttggataagccattttccttcattaggtcctggtttaatttcctcatctttaaaatgagaaggttaaatttatcttagtactgctgggcgcagtggctcatgcctgtaatctgagcactttgggaagctgaggcgggtggatcacttgaggtcagaaatttgagacgagcctggccaacatggtgaaaccccatctctactaaaaatacaaaaattagctgggcgtggtggcacgtgcctgtaatcccagctactcgggaggctgaggcaggagaatcaattgaacctgggaggcagaggttgcagtgagccgagatggcgccattgcactccagcctgggtgacaaaagcaaaagtccatcttaagaaatatatatatatattatatatattcttagttctaagatttcctttaattctatgattctctggatttaaatgcattattcatatttcttgaagcttagatacagtctaattcatagcaaccatatctgctttatcctaggtgagggtagcagtccacaatggaatagaagaaaatcccattataacaaatgacaaattatatatcatgaatccttctgtctgactaactcaataactttctataaaagccaatggaattcaaataggagctaggagacaacaagttatatatgacagtggaggttgtattccttttatattgctgagaaaactagttaaatgatcagattcttgctgttaagaaacaatttcgtttaatgggatctgtacaactgattttaaaaaaatgctacaaaaagccccaaagcatataatctctactccttacagtctctagaattaaatgtactcatttagacaacatattaaatgcatattttagccactttagagaaacctcataggcacagagtttccaagattaattttaagaatatcttcacgaacttgaccctcctactccacattgcaacatttccatcagacagcatttcaattccagtattatgtatattgcaaattaaacattttaaaatatttttttccaatttatttctcaaaataaaatgtcttttgttctggaaaaaaaaaagggagaaaaaaaattggggggcggcacagaggccccagaagaggtctctgcaaaccactctggtggggggcggggggcccaaagagtcagcgagacacggccaaaaggggctcccaggagaacacgcgggcagcgacaaagggcggggatcctccacagataaaaagcgccgggggagacacgagcgcttggaaaaaaccg

SEQ ID NO: 43741 - DNA, 2852 bp, Homo sapiens
attccagcctcattgtaacacacattctacgcctagcctggctttcttgctctccctcatctcattgtttcagcggaggccaaatctgaagtcctttccagggagtggctctgttcatcttattcgccagccaaagtaggaacagcgtaagaggagagagacacattcagcagccaaaggactcggtggaaagagcagaacaccatagacaatatgtcgctcttgggacccaaggtgctgctgtttcttgctgcattcatcatcacctctgactggatacccctgggggtcaatagtcaacgaggagacgatgtgactcaagcgactccagaaacattcacagaagatcctaatctggtgaatgatcccgctacagatgaaacagttttggctgttttggctgatattgcaccttccacagatgacttggagtgctgggatgagaaatttacctgcacaaggctctactctgtgcatcggccggttaaacaatgcattcatcagttatgcttcaccagtttacgacgtatgtacatcgtcaacaaggagatctgctctcgtcttgtctgtaaggaacacgaagctatgaaagatgagctttgccgtcagatggctggtctgccccctaggagactccgtcgctccaattacttccgacttcctccctgtgaaaatgtggatttgcagagacccaatggtctgtgatcattgaaaaagaggaaagaagaaaaaatgtatgggtgagaggaaggaggatctccttcttctccaaccattgacagctaacccttagacagtatttcttaaaccaatccttttgcaatgtccagcttttacccctactctctactttttcacccaaactgataacatttatctcattttctagcacttaaaatacaaagtctatattattgcataattttgctgcttctcaatatcatagacacagtgaatagatgatgactatatggcttatatacaaacattctatgtacaatttcaagggagactaaactttaggctaataatctttactattgaatctgtctgatatagatcttagggttgaagaagctatctttgtctatttgggctaaccatagaatttcatttattttcctcacaatattttcctagaccaactccccatcattcacgtgttcctctttactcttactttaactattttgctggcttgcccgaaaatttgcctggcaagtcttccttataagacacatcatggtaagttttgtagtcctgtaagattctgcaacacagtcaagaattatacaatcctactagcaatatataaggacccaaaatgtcttctgctaagctcagaggctggggctaaagcatgaggactatgccagctatagaacttggactcataattcgctatccaatttttcatgcagttgtctagtcgggaagtaaggttggaaactaagtctcatttactgattcgtttatgggtagtaccgggatgaacccaccaccacaaagcaaattagacaacttaatgtgaaatcataccattggttgacgtttccttgagttgctacttcgttcatcttcacaacttaacaagtgcacggtcgaattattgtgcaagtggcttttggatatcctgattggggcctaagaagggcattcagacttgaattttaataggcagacagaaagtttgcctaatagttaatacgaaagaatgaaagaaacacagatattcagacaacccacattcttatcctggctctagcagtaaccacgtagccttggataagccattttccttcattaggtcctggtttaatttcctcatctttaaaatgagaaggttaaatttatcttagtactgctgggcgcagtggctcatgcctgtaatctgagcactttgggaagctgaggcgggtggatcacttgaggtcagaaatttgagacgagcctggccaacatggtgaaaccccatctctactaaaaatacaaaaattagctgggcgtggtggcacgtgcctgtaatcccagctactcgggaggctgaggcaggagaatcaattgaacctgggaggcagaggttgcagtgagccgagatggcgccattgcactccagcctgggtgacaaaagcaaaagtccatcttaagaaatatatatatatattatatatattcttagttctaagatttcctttaattctatgattctctggatttaaatgcattattcatatttcttgaagcttagatacagtctaattcatagcaaccatatctgctttatcctaggtgagggtagcagtccacaatggaatagaagaaaatcccattataacaaatgacaaattatatatcatgaatccttctgtctgactaactcaataactttctataaaagccaatggaattcaaataggagctaggagacaacaagttatatatgacagtggaggttgtattccttttatattgctgagaaaactagttaaatgatcagattcttgctgttaagaaacaatttcgtttaatgggatctgtacaactgattttaaaaaaatgctacaaaaagccccaaagcatataatctctactccttacagtctctagaattaaatgtactcatttagacaacatattaaatgcatattttagccactttagagaaacctcataggcacagagtttccaagattaattttaagaatatcttcacgaacttgaccctcctactccacattgcaacatttccatcagacagcatttcaattccagtattatgtatattgcaaattaaacattttaaaatatttttttccaatttatttctcaaaataaaatgtcttttgttctgg

SEQ ID NO: 43742 - DNA, 2848 bp, Homo sapiens
gtgtttcacttgagtgtagtgcccatttcatcctcttgtatggttcctagattcagctctttgcatgctcttatcttgtttctattctgtagtcgggatcattcaaccagattaggatctgtctgtgaatgtttctggatgtcgcttgagtcacatcgtctcctcgttgactagttgaccctccaggtggtatccagtcagagtgtgatgatgaattgcagcaagtatacatgtcagcaccttgtgtcccaagagcgacatatttgtctatgttcttctgctctttccaccgagtcctttggctcgctgaatgtgtctctctcctcttacgctgttcctactttggctggcgaataagatgaacagagccactccctggaaaggacttcagatttggcctccctcagtgaattaataccactgcagagtgctgggatgagaaatttacctgcacaaggctctactctgtgcatcggccggttaaacaatgcattcatcagttatgcttcaccagtttacgacgtatgtacatcgtcaacaaggagatctgctctcgtcttgtctgtaaggaacacgaagctatgaaagatgagctttgccgtcagatggctggtctgccccctaggagactccgtcgctccaattacttccgacttcctccctgtgaaaatgtggatttgcagagacccaatggtctgtgatcattgaaaaagaggaaagaagaaaaaatgtatgggtgagaggaaggaggatctccttcttctccaaccattgacagctaacccttagacagtatttcttaaaccaatccttttgcaatgtccagcttttacccctactctctactttttcacccaaactgataacatttatctcattttctagcacttaaaatacaaagtctatattattgcataattttgctgcttctcaatatcatagacacagtgaatagatgatgactatatggcttatatacaaacattctatgtacaatttcaagggagactaaactttaggctaataatctttactattgaatctgtctgatatagatcttagggttgaagaagctatctttgtctatttgggctaaccatagaatttcatttattttcctcacaatattttcctagaccaactccccatcattcacgtgttcctctttactcttactttaactattttgctggcttgcccgaaaatttgcctggcaagtcttccttataagacacatcatggtaagttttgtagtcctgtaagattctgcaacacagtcaagaattatacaatcctactagcaatatataaggacccaaaatgtcttctgctaagctcagaggctggggctaaagcatgaggactatgccagctatagaacttggactcataattcgctatccaatttttcatgcagttgtctagtcgggaagtaaggttggaaactaagtctcatttactgattcgtttatgggtagtaccgggatgaacccaccaccacaaagcaaattagacaacttaatgtgaaatcataccattggttgacgtttccttgagttgctacttcgttcatcttcacaacttaacaagtgcacggtcgaattattgtgcaagtggcttttggatatcctgattggggcctaagaagggcattcagacttgaattttaataggcagacagaaagtttgcctaatagttaatacgaaagaatgaaagaaacacagatattcagacaacccacattcttatcctggctctagcagtaaccacgtagccttggataagccattttccttcattaggtcctggtttaatttcctcatctttaaaatgagaaggttaaatttatcttagtactgctgggcgcagtggctcatgcctgtaatctgagcactttgggaagctgaggcgggtggatcacttgaggtcagaaatttgagacgagcctggccaacatggtgaaaccccatctctactaaaaatacaaaaattagctgggcgtggtggcacgtgcctgtaatcccagctactcgggaggctgaggcaggagaatcaattgaacctgggaggcagaggttgcagtgagccgagatggcgccattgcactccagcctgggtgacaaaagcaaaagtccatcttaagaaatatatatatatattatatatattcttagttctaagatttcctttaattctatgattctctggatttaaatgcattattcatatttcttgaagcttagatacagtctaattcatagcaaccatatctgctttatcctaggtgagggtagcagtccacaatggaatagaagaaaatcccattataacaaatgacaaattatatatcatgaatccttctgtctgactaactcaataactttctataaaagccaatggaattcaaataggagctaggagacaacaagttatatatgacagtggaggttgtattccttttatattgctgagaaaactagttaaatgatcagattcttgctgttaagaaacaatttcgtttaatgggatctgtacaactgattttaaaaaaatgctacaaaaagccccaaagcatataatctctactccttacagtctctagaattaaatgtactcatttagacaacatattaaatgcatattttagccactttagagaaacctcataggcacagagtttccaagattaattttaagaatatcttcacgaacttgaccctcctactccacattgcaacatttccatcagacagcatttcaattccagtattatgtatattgcaaattaaacattttaaaatatttttttccaatttatttctcaaaataaaatgtcttttgttctgg

SEQ ID NO: 43743 - DNA, 883 bp, Homo sapiens
attccagcctcattgtaacacacattctacgcctagcctggctttcttgctctccctcatctcattgtttcagcggaggccaaatctgaagtcctttccagggagtggctctgttcatcttattcgccagccaaagtaggaacagcgtaagaggagagagacacattcagcagccaaaggactcggtggaaagagcagaacaccatagacaatatgtcgctcttgggacccaaggtgctgctgtttcttgctgcattcatcatcacctctgactggatacccctgggggtcaatagtcaacgaggagacgatgtgactcaagcgactccagaaacattcacagaagatcctaatctggtgaatgatcccgctacagatgaaacagttttggctgttttggctgatattgcaccttccacagatgacttggcctccctcagtgaaaaaaataccactgcagagtgctgggatgagaaatttacctgcacaaggctctactctgtgcatcggccggttaaacaatgcattcatcagttatgcttcaccagtttacgacgtatgtacatcgtcaacaaggagatctgctctcgtcttgtctgtaaggaacacgaagctatgaaagatgagctttgccgtcagatggctggtctgccccctaggagactccgtcgctccaattacttccgacttcctccctgtgaaaatgtggatttgcagagacccaatggtctgtgatcattgaaaaagaggaaagaagaaaaaattttgcttgcacttgctgtccttccaccatgggatgactctcatcagatgatggcaccatgttcttggacttctcagcctccagaactgtgagaaataaatttcttttctttataaatta

SEQ ID NO: 43744 - DNA, 919 bp, Homo sapiens
attccagcctcattgtaacacacattctacgcctagcctggctttcttgctctccctcatctcattgtttcagcggaggccaaatctgaagtcctttccagggagtggctctgttcatcttattcgccagccaaagtaggaacagcgtaagaggagagagacacattcagcagccaaaggactcggtggaaagagcagaacaccatagacaatatgtcgctcttgggacccaaggtgctgctgtttcttgctgcattcatcatcacctctgactggatacccctgggggtcaatagtcaacgaggagacgatgtgactcaagcgactccagaaacattcacagaagatcctaatctggtgaatgatcccgctacagatgaaacagttttggctgttttggctgatattgcaccttccacagatgacttggagtgctgggatgagaaatttacctgcacaaggctctactctgtgcatcggccggttaaacaatgcattcatcagttatgcttcaccagtttacgacgtatgtacatcgtcaacaaggagatctgctctcgtcttgtctgtaaggaacacgaagctatgaaagatgagctttgccgtcagatggctggtctgccccctaggagactccgtcgctccaattacttccgacttcctccctgtgaaaatgtggatttgcagagacccaatggtctgtgatcattgaaaaagaggaaagaagaaaaaatgtatgggtgagaggaaggaggatctccttcttctccaaccattgacagctaacccttagacagtatttcttaaaccaatccttttgcaatgtccagcttttacccctactctctactttttcacccaaactgataacatttatctcattttctagcacttaaaatacaaagtctatattattgca

SEQ ID NO: 43745 - DNA, 397 bp, Homo sapiens
caagcatgagccaccgtgcccagcctattttatatttcataacggacaattctagaaagactttattcctagaagtgctctcagagattattttatccacttctacttccaagtagggaagcgccaaaacttcatttagtcaattccctcttgctgtgtttttggtggacggaaaggatgtagcccaatttataatgattctctgtagagattactctgtatttttttcctactctatctatccttcccaattccttcaatccttcatttatgctgcttctatttggacctccttatttttttgtattgggcttcctcagagtgctgggatgagaaatttacctgcacaaggctctactctgtgcatcggccggttaaacaatgcattcatcagtta

SEQ ID NO: 43746 - DNA, 357 bp, Homo sapiens
atgatgttctgcttctcttctagatgagctttgccgtcagatggctggtctgccccctaggagactccgtcgctccaattacttccgacttcctccctgtgaaaatgtggatttgcagagacccaatggtctgtgatcattgaaaaagaggaaagaagaaaaaatgtatgggtgagaggaaggaggatctccttcttctccaaccattgacagctaacccttagacagtatttcttaaaccaatccttttgcaatgtccagcttttacccctactctctactttttcacccaaactgataacatttatctcattttctagcacttaaaatacaaagtctatattattgcataatttt

SEQ ID NO: 43747 - DNA, 949 bp, Homo sapiens
attccagcctcattgtaacacacattctacgcctagcctggctttcttgctctccctcatctcattgtttcagcggaggccaaatctgaagtcctttccagggagtggctctgttcatcttattcgccagccaaagtaggaacagcgtaagaggagagagacacattcagcagccaaaggactcggtggaaagagcagaacaccatagacaatatgtcgctcttgggacccaaggtgctgctgtttcttgctgcattcatcatcacctctgactggatacccctgggggtcaatagtcaacgaggagacgatgtgactcaagcgactccagaaacattcacagaagatcctaatctggtgaatgatcccgctacagatgaaacagttttggctgttttggctgatattgcaccttccacagatgacttggcctccctcagtgaaaaaaataccactgcagagtgctgggatgagaaatttacctgcacaaggctctactctgtgcatcggccggttaaacaatgcattcatcagttatgcttcaccagtttacgacgtatgtacatcgtcaacaaggagatctgctctcgtcttgtctgtaaggaacacgaagctatgaaagatgagctttgccgtcagatggctggtctgccccctaggagactccgtcgctccaattacttccgacttcctccctgtgaaaatgtggatttgcagagacccaatggtctgtgatcattgaaaaagaggaaagaagaaaaaatgtatgggtgagaggaaggaggatctccttcttctccaaccattgacagctaacccttagacagtatttcttaaaccaatccttttgcaatgtccagcttttacccctactctctactttttcacccaaactgataacatttatctcattttctagcacttaaaatacaaagtctatattattgca

SEQ ID NO: 43748 - DNA, 2882 bp, Homo sapiens
attccagcctcattgtaacacacattctacgcctagcctggctttcttgctctccctcatctcattgtttcagcggaggccaaatctgaagtcctttccagggagtggctctgttcatcttattcgccagccaaagtaggaacagcgtaagaggagagagacacattcagcagccaaaggactcggtggaaagagcagaacaccatagacaatatgtcgctcttgggacccaaggtgctgctgtttcttgctgcattcatcatcacctctgactggatacccctgggggtcaatagtcaacgaggagacgatgtgactcaagcgactccagaaacattcacagaagatcctaatctggtgaatgatcccgctacagatgaaacagttttggctgttttggctgatattgcaccttccacagatgacttggcctccctcagtgaaaaaaataccactgcagagtgctgggatgagaaatttacctgcacaaggctctactctgtgcatcggccggttaaacaatgcattcatcagttatgcttcaccagtttacgacgtatgtacatcgtcaacaaggagatctgctctcgtcttgtctgtaaggaacacgaagctatgaaagatgagctttgccgtcagatggctggtctgccccctaggagactccgtcgctccaattacttccgacttcctccctgtgaaaatgtggatttgcagagacccaatggtctgtgatcattgaaaaagaggaaagaagaaaaaatgtatgggtgagaggaaggaggatctccttcttctccaaccattgacagctaacccttagacagtatttcttaaaccaatccttttgcaatgtccagcttttacccctactctctactttttcacccaaactgataacatttatctcattttctagcacttaaaatacaaagtctatattattgcataattttgctgcttctcaatatcatagacacagtgaatagatgatgactatatggcttatatacaaacattctatgtacaatttcaagggagactaaactttaggctaataatctttactattgaatctgtctgatatagatcttagggttgaagaagctatctttgtctatttgggctaaccatagaatttcatttattttcctcacaatattttcctagaccaactccccatcattcacgtgttcctctttactcttactttaactattttgctggcttgcccgaaaatttgcctggcaagtcttccttataagacacatcatggtaagttttgtagtcctgtaagattctgcaacacagtcaagaattatacaatcctactagcaatatataaggacccaaaatgtcttctgctaagctcagaggctggggctaaagcatgaggactatgccagctatagaacttggactcataattcgctatccaatttttcatgcagttgtctagtcgggaagtaaggttggaaactaagtctcatttactgattcgtttatgggtagtaccgggatgaacccaccaccacaaagcaaattagacaacttaatgtgaaatcataccattggttgacgtttccttgagttgctacttcgttcatcttcacaacttaacaagtgcacggtcgaattattgtgcaagtggcttttggatatcctgattggggcctaagaagggcattcagacttgaattttaataggcagacagaaagtttgcctaatagttaatacgaaagaatgaaagaaacacagatattcagacaacccacattcttatcctggctctagcagtaaccacgtagccttggataagccattttccttcattaggtcctggtttaatttcctcatctttaaaatgagaaggttaaatttatcttagtactgctgggcgcagtggctcatgcctgtaatctgagcactttgggaagctgaggcgggtggatcacttgaggtcagaaatttgagacgagcctggccaacatggtgaaaccccatctctactaaaaatacaaaaattagctgggcgtggtggcacgtgcctgtaatcccagctactcgggaggctgaggcaggagaatcaattgaacctgggaggcagaggttgcagtgagccgagatggcgccattgcactccagcctgggtgacaaaagcaaaagtccatcttaagaaatatatatatatattatatatattcttagttctaagatttcctttaattctatgattctctggatttaaatgcattattcatatttcttgaagcttagatacagtctaattcatagcaaccatatctgctttatcctaggtgagggtagcagtccacaatggaatagaagaaaatcccattataacaaatgacaaattatatatcatgaatccttctgtctgactaactcaataactttctataaaagccaatggaattcaaataggagctaggagacaacaagttatatatgacagtggaggttgtattccttttatattgctgagaaaactagttaaatgatcagattcttgctgttaagaaacaatttcgtttaatgggatctgtacaactgattttaaaaaaatgctacaaaaagccccaaagcatataatctctactccttacagtctctagaattaaatgtactcatttagacaacatattaaatgcatattttagccactttagagaaacctcataggcacagagtttccaagattaattttaagaatatcttcacgaacttgaccctcctactccacattgcaacatttccatcagacagcatttcaattccagtattatgtatattgcaaattaaacattttaaaatatttttttccaatttatttctcaaaataaaatgtcttttgttctgg

SEQ ID NO: 43749 - DNA, 830 bp, Homo sapiens
  misc_feature (778)..(778): n is a, c, g, or t
  misc_feature (789)..(789): n is a, c, g, or t
  misc_feature (826)..(826): n is a, c, g, or t
attccagcctcattgtaacacacattctacgcctagcctggctttcttgctctccctcatctcattgtttcagcggaggccaaatctgaagtcctttccagggagtggctctgttcatcttattcgccagccaaagtaggaacagcgtaagaggagagagacacattcagcagccaaaggactcggtggaaagagcagaacaccatagacaatatgtcgctcttgggacccaaggtgctgctgtttcttgctgcattcatcatcacctctgactggatacccctgggggtcaatagtcaacgaggagacgatgtgactcaagcgactccagaaacattcacagaagatcctaatctggtgaatgatcccgctacagatgaaacagttttggctgttttggctgatattgcaccttccacagatgacttggcctccctcagtgaaaaaaataccactgcagagtgctgggatgagaaatttacctgcacaaggctctactctgtgcatcggccggttaaacaatgcattcatcagttatgcttcaccagtttacgacgtatgtacatcgtcaacaaggagatctgctctcgtcttgtctgtaaggaacacgaagctatgaaagatgagctttgccgtcagatggctggtctgccccctaggagactccgtcgctccaattacttccgacttcctccctgtgaaaatgtggatttgcagagacccaatggtctgtgatcattgaaaaagaggaaagaagaaaaaatgtgtggccaagatnccctctcgcangcacatgactgcctcattcacaaatcttgtcaccaangcgg

SEQ ID NO: 43750 - DNA, 907 bp, Homo sapiens
tagtagggcagaaaagtgggtatagctgcctgcacgcacgcttggtgcgtgcgcggcgactgcgacgggcagtggcagtcatggcggctcagtgcgtgaggttggcgcggcgcagtcttcctgctttggcgttgtctctcaggccatctccccggttgttgtgcacagccacgaaacaaaagaacagtggccagaacctggaagaggacatgggtcagagtgaacagaaggcagatcctcctgctacagagaagaccctcctggaagagaaggtcaagttggaggaacagctgaaggagactgtggaaaaatataaacgagctttggcagacactgagaacttacggcagaggagccagaaattggtggaggaggcaaaattatacggcattcaagccttctgcaaggacttgttggaggtggcagacgttctggagaaggcaacacagtgtgttccaaaagaagaaattaaagacgataaccctcacctgaagaacctctatgaggggctggtcatgactgaagtccagatccagaaggtgttcacaaagcatggcttgctcaagttgaaccctgtcggagccaagttcgacccttatgaacatgaggccttgttccacacaccggttgaggggaaggagccaggcacagtggccctagttagcaaagtggggtacaagctgcatgggcgcactctgagacccgccctggtgggggtggtgaaggaagcttagctgctgttgatggggtgggtgtttttaaactcacttgatgtaaaaaaaaaaaaaaaaaaatcgggggcttattgcggggcggggaaaaggggtttgaaatggcctgggtcttgttgtcctggccctttttggtacagggggatttgcgggccctaagggcgttaatgaaaccg

SEQ ID NO: 43751 - DNA, 1542 bp, Homo sapiens
tagtagggcagaaaagtgggtatagctgcctgcacgcacgcttggtgcgtgcgcggcgactgcgacgggcagtggcagtcatggcggctcagtgcgtgaggttggcgcggcgcagtcttcctgctttggcgttgtctctcaggccatctccccggttgttgtgcacagccacgaaacaaaagaacagtggccagaacctggaagaggacatgggtcagagtgaacagaaggcagatcctcctgctacagagaagaccctcctggaagagaaggtcaagttggaggaacagctgaaggagactgtggaaaaatataaacgagctttggcagacactgagaacttacggcagaggagccagaaattggtggaggaggcaaaattatacggcattcaagccttctgcaaggacttgttggaggtggcagacgttctggagaaggcaacacagtgtgttccaaaagaagaaattaaagacgataaccctcacctgaagaacctctatgaggggctggtcatgactgaagtccagatccagaaggtgttcacaaagcatggcttgctcaagttgaaccctgtcggagccaagttcgacccttatgaacatgaggccttgttccacacaccggttgaggggaaggagccaggcacagtggccctagttagcaaagtggggtacaagctgcatgggcgcactctgagacccgccctggtgggggtggtgaaggaagcttagctgctgttgatggggtgggtgtttttaaactcacttgatgtaactctcaaggctggttcattgtttctcatctatgagtacgtgtgaccttttcccaaaccttattggaaaccttaagtaaccagtggctaaacagaaaagccggttgcccaactgcattaatgaactctaattcgggagtctgttcccttttagtgccacgcgttgaatagttccacatactttcagaagagctcagcagggccctgcctggtctcccgagcatcatgagtaacgtgtctgctcagactctgctgacaccaaagtattttaaacaaataaaaggtcttggggaattctgtttggctacctgggcacgccagtctgcaccatgtgtccctgcggcgcatgagtgactggcgtatttagcccgtcacatttcattcgctgaaggaaaggcaagagagttgaaacatttttcttacttaaaaaaaatgatctttgtgaagaacatagtgagttcgtttgtcttcagtcaacagcggctgaaactgaccactgagaaatgggtgtgggcactgacagttctcccccattatttggccaggaattgagcttggcttggcaaagttccttttaccctgttctgttcatctaaatgcagacatatttaaatcatattcaactagttactaatgacctcaagttgtattccctggcaaaatggactttctcaaaataggactgcacgcttggtgtactttaaatgttaatgtttaatttaaaatttttatttaagaggattaaagccctaatgtttattttccta

SEQ ID NO: 43752 - DNA, 1260 bp, Homo sapiens
tagtagggcagaaaagtgggtatagctgcctgcacgcacgcttggtgcgtgcgcggcgactgcgacgggcagtggcagtcatggcggctcagtgcgtgaggttggcgcggcgcagtcttcctgctttggcgttgtctctcaggccatctccccggttgttgtgcacagccacgaaacaaaagaacagtggccagaacctggaagaggacatgggtcagagtgaacagaaggcagatcctcctgctacagagaagaccctcctggaagagaaggtcaagttggaggaacagctgaaggagactgtggaaaaatataaacgagctttggcagacactgagaacttacggcagaggagccagaaattggtggaggaggcaaaattatacggcattcaagccttctgcaaggacttgttggaggtggcagacgttctggagaaggcaacacagtgtgttccaaaagaagaaattaaagacgataaccctcacctgaagaacctctatgaggggctggtcatgactgaagtccagatccagaaggtgttcacaaagcatggcttgctcaagttgaaccctgtcggagccaagttcgacccttatgaacatgaggccttgttccacacaccggttgaggggaaggagccaggcacagtggccctagttagcaaagtggggtacaagctgcatgggcgcactctgagacccgccctggtgggggtggtgaaggaagcttagctgctgttgatggggtgggtgtttttaaactcacttgatgtaactctcaaggctggttcattgtttctcatctatgagtacgtgtgaccttttcccaaaccttattggaaaccttaagtaaccagtggctaaacagaaaagccggttgcccaactgcattaatgaactctaattcgggagtctgttcccttttagtgccacgcgttgaatagttccacatactttcagaagagctcagcagggccctgcctggtctcccgagcatcatgagtaacgtgtctgctcagactctgctgacaccaaagtattttaaacaaataaaaggtcttgggaaaaaaaaaataaaaaaaaaaaaaaaccgtcaccatcccttctttctcccaatctccctttccatcctcattttccattctcacttgccctcctccctcaaccttctcttccttgcacaaccctctgcgctccctcgctctccttctccttccgcttcctccctttccggtgcggttatatctgtgcctctccc

SEQ ID NO: 43753 - DNA, 2220 bp, Homo sapiens
tagtagggcagaaaagtgggtatagctgcctgcacgcacgcttggtgcgtgcgcggcgactgcgacgggcagtggcagtcatggcggctcagtgcgtgaggttggcgcggcgcagtcttcctgctttggcgttgtctctcaggccatctccccggttgttgtgcacagccacgaaacaaaagaacagtggccagaacctctatgaggggctggtcatgactgaagtccagatccagaaggtgttcacaaacttagctgctgttgatggggtgggtgtttttaaactcacttgatgtaactctcaaggctggttcattgtttctcatctatgagtacgtgtgaccttttcccaaaccttattggaaaccttaagtaaccagtggctaaacagaaaagccggttgcccaactgcattaatgaactctaattcgggagtctgttcccttttagtgccacgcgttgaatagttccacatactttcagaagagctcagcagggccctgcctggtctcccgagcatcatgagtaacgtgtctgctcagactctgctgacaccaaagtattttaaacaaataaaaggtcttggggaattctgtttggctacctgggcacgccagtctgcaccatgtgtccctgcggcgcatgagtgactggcgtatttagcccgtcacatttcattcgctgaaggaaaggcaagagagttgaaacatttttcttacttaaaaaaaatgatctttgtgaagaacatagtgagttcgtttgtcttcagtcaacagcggctgaaactgaccactgagaaatgggtgtgggcactgacagttctcccccattatttggccaggaattgagcttggcttggcaaagttccttttaccctgttctgttcatctaaatgcagacatatttaaatcatattcaactagttactaatgacctcaagttgtattccctggcaaaatggactttctcaaaataggactgcacgcttggtgtactttaaatgttaatgtttaatttaaaatttttatttaagaggattaaagccctaatgtttattttcctactttctgaaaacaattttgtgtcctctcatggagatccttgccgctgaggcaagcatggcttagccttcccattctctactccagcccagaagctgtcagcttgacacgtgcgtgcgtgcacattcacgtacacacatatacaggcttctacacagaaagggagagccacactcccccagtgcagctgcagcccgtccggtaagaatacgaaacacccaggagccacagcaagggcacaggatttgcaaaatcatcttgccaaagggctgttcctcatttacacggtcatccagggcttagaaaaaggctgaatgattggcgtctgttacaaaaaagagaaaagaacctttcgctgcctttgcttctagaatggaagatacttgtgaaagccatttgctgcataggaaagatggggcagtttatttcacttctaattttaaaagacgcaagtaatggtcccataatacttcatcttgggataccattcccaaacatgttccacctttaagatgccttaagttaatttggtcagaaacaactaaaggcagcatcgtgtattggagaaaacatgactgggagctccagcgctgcctgttttcacgctgtggggttgtgagtgcatcatcacccctggagctcccgagttaaatggaggctaagaaaagtaatttatcaactcatttctgtgaatgtttgcagtctcctaccgtctcaactacagctgcagttgctaaaaagcacttaactcgtaacctagaggcaatatagcttaagtagcaaaatatttttttacagtaagcttcagtcatccatagtcactataagttggttatcatctgaaatggttagaaccagaattgtttcaaacttggggggttttcggattttggaatatagtcaagcatggcttaaccacagggatgtgttctgagaaatgcgctgtcaggcagtttttcctgtgaacaccatgtgtacctacatggacctaaaaaacaggtggtggagcctcctccacacctaggctatatggtgtatgtagcctgttgctctagactggagggcacgttactgtactgatactgtaggcaactgttaacacaatggtatctgtgtatctgaacataacatagtaaaggtacagtgcaaactgtgttct

SEQ ID NO: 43754 - DNA, 872 bp, Homo sapiens
  misc_feature (24)..(24): n is a, c, g, or t
  misc_feature (105)..(105): n is a, c, g, or t
  misc_feature (135)..(135): n is a, c, g, or t
aattgagcttggcttggcaaagtnccttttaccctgttctgttcatctaaatgcaaacatatttaaatcatattcaactagttactaatgacctcaagttgtatnccctggcaaaatgcactttctcaaaatagnactgcacgcttggtgtattttaaattaaacttattggaaaccttaagtaaccagtggctaaacagaaaagccggttgcccaactgcattaatgaactctaattcgggagtctgttcccttttagtgccacgcgttgaatagttccacatactttcagaagagctcagcagggccctgcctggtctcccgagcatcatgagtaacgtgtctgctcagactctgctgacaccaaagtattttaaacaaataaaaggtcttggggaattctgtttggctacctgggcacgccagtctgcaccatgtgtccctgcggcgcatgagtgactggcgtatttagcccgtcacatttcattcgctgaaggaaaggcaagagagttgaaacatttttcttacttaaaaaaaatgatctttgtgaagaacatagtgagttcgtttgtcttcagtcaacagcggctgaaactgaccactgagaaatgggtgtgggcactgacagttctcccccattatttggccaggaattgagcttggcttggcaaagttccttttaccctgttctgttcatctaaatgcagacatatttaaatcatattcaactagttactaatgacctcaagttgtattccctggcaaaatggactttctcaaaataggactgcacgcttggtgtactttaaatgttaatgtttaatttaaaatttttatttaagaggattaaagccctaatgtttattttccta

SEQ ID NO: 43755 - DNA, 642 bp, Homo sapiens
aatagtaaatagtttgaagctattttaagtttctaaagtcatacatctgactttaataagcacaaaaactaagtcttcgtttctcacgtgtggacttccctgtaggccatctccccggttgttgtgcacagccacgaaacaaaagaacagtggccagaacctggaagaggacatgggtcagagtgaacagaaggcagatcctcctgctacagagaagaccctcctggaagagaaggtcaagttggaggaacagctgaaggagactgtggtgaggactgtgaggctcctgtgggggcgggctcggctgaactgtttctctcctgggccacataaaggttccaggtttcattggtgacagactaaagccagagttaagccgttgtccatggcctgcagtgggcccaggtggcaagttactgccaaagcaaagactaaaacccaaatcctgtgcaactctggttctggcaagagactaatctttacacgctgttatttgtcattgaatgaaaacttaaaatcatctttacaaatgaggaatgctcagtatggttgtttaggctgggacttaggagaggaagcagaaaattgcaagtacaagagttgggagcaggagtgtggttttatgtgatgctctcataggca

SEQ ID NO: 43756 - DNA, 2699 bp, Homo sapiens
tagtagggcagaaaagtgggtatagctgcctgcacgcacgcttggtgcgtgcgcggcgactgcgacgggcagtggcagtcatggcggctcagtgcgtgaggttggcgcggcgcagtcttcctgctttggcgttgtctctcaggccatctccccggttgttgtgcacagccacgaaacaaaagaacagtggccagaacctggaagaggacatgggtcagagtgaacagaaggcagatcctcctgctacagagaagaccctcctggaagagaaggtcaagttggaggaacagctgaaggagactgtggaaaaatataaacgagctttggcagacactgagaacttacggcagaggagccagaaattggtggaggaggcaaaattatacggcattcaagccttctgcaaggacttgttggaggtggcagacgttctggagaaggcaacacagtgtgttccaaaagaagaaattaaagacgataaccctcacctgaagaacctctatgaggggctggtcatgactgaagtccagatccagaaggtgttcacaaagcatggcttgctcaagttgaaccctgtcggagccaagttcgacccttatgaacatgaggccttgttccacacaccggttgaggggaaggagccaggcacagtggccctagttagcaaagtggggtacaagctgcatgggcgcactctgagacccgccctggtgggggtggtgaaggaagcttagctgctgttgatggggtgggtgtttttaaactcacttgatgtaactctcaaggctggttcattgtttctcatctatgagtacgtgtgaccttttcccaaaccttattggaaaccttaagtaaccagtggctaaacagaaaagccggttgcccaactgcattaatgaactctaattcgggagtctgttcccttttagtgccacgcgttgaatagttccacatactttcagaagagctcagcagggccctgcctggtctcccgagcatcatgagtaacgtgtctgctcagactctgctgacaccaaagtattttaaacaaataaaaggtcttggggaattctgtttggctacctgggcacgccagtctgcaccatgtgtccctgcggcgcatgagtgactggcgtatttagcccgtcacatttcattcgctgaaggaaaggcaagagagttgaaacatttttcttacttaaaaaaaatgatctttgtgaagaacatagtgagttcgtttgtcttcagtcaacagcggctgaaactgaccactgagaaatgggtgtgggcactgacagttctcccccattatttggccaggaattgagcttggcttggcaaagttccttttaccctgttctgttcatctaaatgcagacatatttaaatcatattcaactagttactaatgacctcaagttgtattccctggcaaaatggactttctcaaaataggactgcacgcttggtgtactttaaatgttaatgtttaatttaaaatttttatttaagaggattaaagccctaatgtttattttcctactttctgaaaacaattttgtgtcctctcatggagatccttgccgctgaggcaagcatggcttagccttcccattctctactccagcccagaagctgtcagcttgacacgtgcgtgcgtgcacattcacgtacacacatatacaggcttctacacagaaagggagagccacactcccccagtgcagctgcagcccgtccggtaagaatacgaaacacccaggagccacagcaagggcacaggatttgcaaaatcatcttgccaaagggctgttcctcatttacacggtcatccagggcttagaaaaaggctgaatgattggcgtctgttacaaaaaagagaaaagaacctttcgctgcctttgcttctagaatggaagatacttgtgaaagccatttgctgcataggaaagatggggcagtttatttcacttctaattttaaaagacgcaagtaatggtcccataatacttcatcttgggataccattcccaaacatgttccacctttaagatgccttaagttaatttggtcagaaacaactaaaggcagcatcgtgtattggagaaaacatgactgggagctccagcgctgcctgttttcacgctgtggggttgtgagtgcatcatcacccctggagctcccgagttaaatggaggctaagaaaagtaatttatcaactcatttctgtgaatgtttgcagtctcctaccgtctcaactacagctgcagttgctaaaaagcacttaactcgtaacctagaggcaatatagcttaagtagcaaaatatttttttacagtaagcttcagtcatccatagtcactataagttggttatcatctgaaatggttagaaccagaattgtttcaaacttggggggttttcggattttggaatatagtcaagcatggcttaaccacagggatgtgttctgagaaatgcgctgtcaggcagtttttcctgtgaacaccatgtgtacctacatggacctaaaaaacaggtggtggagcctcctccacacctaggctatatggtgtatgtagcctgttgctctagactggagggcacgttactgtactgatactgtaggcaactgttaacacaatggtatctgtgtatctgaacataacatagtaaaggtacagtgcaaactgtgttct

SEQ ID NO: 43757 - DNA, 2955 bp, Homo sapiens
tagtagggcagaaaagtgggtatagctgcctgcacgcacgcttggtgcgtgcgcggcgactgcgacgggcagtggcagtcatggcggctcagtgcgtgaggttggcgcggcgcagtcttcctgctttggcgttgtctctcaggccatctccccggttgttgtgcacagccacgaaacaaaagaacagtggccagaacctggaagaggacatgggtcagagtgaacagaaggcagatcctcctgctacagagaagaccctcctggaagagaaggtcaagttggaggaacagctgaaggagactgtggaaaaatataaacgagctttggcagacactgagaacttacggcagaggagccagaaattggtggaggaggcaaaattatacggcattcaagccttctgcaaggacttgttggaggtggcagacgttctggagaaggcaacacagtgtgttccaaaagaagaaattaaagacgataaccctcacctgaagaacctctatgaggggctggtcatgactgaagtccagatccagaaggtgttcacaaagcatggcttgctcaagttgaaccctgtcggagccaagttcgacccttatgaacatgaggccttgttccacacaccggttgaggggaaggagccaggcacagtggccctagttagcaaagtggggtacaagctgcatgggcgcactctgagacccgccctggtgggggtggtgaaggaagcttagctgctgttgatggggtgggtgtttttaaactcacttgatgtaactctcaaggctggttcattgtttctcatctatgagtacgtgtgaccttttcccaaaccttattggaaaccttaagtaaccagtggctaaacagaaaagccggttgcccaactgcattaatgaactctaattcgggagtctgttcccttttagtgccacgcgttgaatagttccacatactttcagaagagctcagcagggccctgcctggtctcccgagcatcatgagtaacgtgtctgctcagactctgctgacaccaaagtattttaaacaaataaaaggtcttggggaattctgtttggctacctgggcacgccagtctgcaccatgtgtccctgcggcgcatgagtgactggcgtatttagcccgtcacatttcattcgctgaaggaaaggcaagagagttgaaacatttttcttacttaaaaaaaatgatctttgtgaagaacatagtgagttcgtttgtcttcagtcaacagcggctgaaactgaccactgagaaatgggtgtgggcactgacagttctcccccattatttggccaggaattgagcttggcttggcaaagttccttttaccctgttctgttcatctaaatgcagacatatttaaatcatattcaactagttactaatgacctcaagttgtattccctggcaaaatggactttctcaaaataggactgcacgcttggtgtactttaaatgttaatgtttaatttaaaatttttatttaagaggattaaagccctaatgtttattttcctactttctgaaaacaattttgtgtcctctcatggagatccttgccgctgaggcaagcatggcttagccttcccattctctactccagcccagaagctgtcagcttgacacgtgcgtgcgtgcacattcacgtacacacatatacaggcttctacacagaaagggagagccacactcccccagtgcagctgcagcccgtccggtaagaatacgaaacacccaggagccacagcaagggcacaggatttgcaaaatcatcttgccaaagggctgttcctcatttacacggtcatccagggcttagaaaaaggctgaatgattggcgtctgttacaaaaaagagaaaagaacctttcgctgcctttgcttctagaatggaagatacttgtgaaagccatttgctgcataggaaagatggggcagtttatttcacttctaattttaaaagacgcaagtaatggtcccataatacttcatcttgggataccattcccaaacatgttccacctttaagatgccttaagttaatttggtcagaaacaactaaaggcagcatcgtgtattggagaaaacatgactgggagctccagcgctgcctgttttcacgctgtggggttgtgagtgcatcatcacccctggagctcccgagttaaatggaggctaagaaaagtaatttatcaactcatttctgtgaatgtttgcagtctcctaccgtctcaactacagctgcagttgctaaaaagcacttaactcgtaacctagaggcaatatagcttaagtagcaaaatatttttttacagtaagcttcagtcatccatagtcactataagttggttatcatctgaaatggttagaaccagaattgtttcaaacttggggggttttcggattttggaatatagtcaagcatggcttaaccacagggatgtgttctgagaaatgcgctgtcaggcagtttttcctgtgaacaccatgtgtacctacatggacctaaaaaacaggtggtggagcctcctccacacctaggctatatggtgtatgtagcctgttgctctagactggagggcacgttactgtactgatactgtaggcaactgttaacacaatggtatctgtgtatctgaacataacatagtaaaggtacagtgcaaactgtgttctaatatgtggcccctcattgactgaaaagagattctctgcttgactatttgcattgtatttgctggttaagtatccccaatcccaaaatccaaaatgctctaaatgagcatctcctttgagcaccatgtaggcactcagaaagtttcagattttgcagcctttcagatttggggatactcaacctgtaataggaaaatgtcttttaattatgtgcatatttacagtaggaattaaagatttgtttagctaccttcta

SEQ ID NO: 43758 - DNA, 5006 bp, Homo sapiens
gaatgcaggtgagaaaaggcacggactctgcggctgcgaacccaaacttgggcaccgcacggtgcgcactgctcagccttcgcccccgtgggcgaaaggctgctgcggtttcaggcggctgcttcgtgactaatgaccttgcgcagagttgttaagaaaaaagagaaacccgcgctctccggggtgagaagggactgactctgggcgtctctgaagatggctcgggcttctctttggcgcgccggggggaccctgacactgaccgctctgtgacgcgagtagtctcccctgcaccgtgcccgaagcgacgtgccgggggatttttcattctcgatctgttgactggctcccccgctgcatgagcagagtcggagttgagactggcttgttgctggccccagcgcctggtgcaggaagcgactcacgtttgtctgggtggccggagccggagcagagcctgggtttggagtgagtgcctggaacgtgaattggactcaactcgagtagcagcaaagaccagcgggctggcaggcgggggaggctgcaggctcattccccacctcttcccagccccactgcccgtctgccggagcggttctggccccttccgacagagcggggactagagccggggattctccgcccgctgaggggatgactctgggttgggggagcgccgaacccgcggcgcgcagtgtcccgtgaactgtgagtactgcgactgaacggcggcaggcgagcgggcgattagcacccattgcatgaattatgaaacaataactttcggaagaagcaggaggaaaaaaagaagcatctatcgctgccctcccacccccattcccggccaactctccacgccgcttttgccccctccctcccctccctctcgctccttcctttccgggagaggggagaggactcgggggagggcaggcggccggccccggaggaggggggcgccgagggggctgtggttagaaggagcagtagcagcagcagcaggagaagatgctgaggatgcggaccgcgggatgggcgcgcggctggtgcttgggctgctgcctcctcctgccgctctcgctcagcctggcggccgccaagcagctcctccggtaccggctggccgaggagggccccgccgacgtccgcatcggcaacgtggcttcagacctgggcatcgtgaccggatcgggtgaggtgactttcagcctggagtccggttccgagtacctgaagatcgacaacctcactggcgagctgagcacgagcgagcggcgcatcgaccgcgagaagctgccccagtgtcagatgatcttcgacgagaacgagtgcttcctggacttcgaggtgtcggtgatcgggccctcgcagagctgggtggacctgtttgagggtcaggtcatcgtgcttgacatcaacgacaacacgcccaccttcccgtcgcccgtgctcacgctcacggtggaggagaatcggccggtgggcacactttacctgctgcccacagccaccgaccgcgacttcggccgcaacggcatcgagcgctacgagctgctccaggagcccggaggcggcggcagcggcggcgagagccggcgcgccggggcggccgacagcgccccctaccccgggggcggcgggaacggcgcgagcggcggcggctcgggaggctccaagcggcggctggacgcatcagagggcggcggcggcaccaaccccggcggccgcagcagcgtgttcgagctgcaggtggcggacaccccggacggcgagaagcagccgcagctgatcgtgaagggggcgctggaccgcgagcagcgcgactcctacgagctgaccctgcgagtgcgcgacggcggcgacccgcctcgctcctcgcaggccatcctacgggtcctcatcaccgacgtgaacgacaacagcccccgcttcgagaagagcgtgtacgaggccgacttggctgagaacagcgccccggggacccccatcctgcaactgcgcgcagccgacttggacgtgggggtcaacgggcagatcgaatacgtgttcggggcggccaccgagtcggtgaggcggctgctgcgccttgacgagacgtccggctggctcagcgtcctgcaccggatcgaccgcgaggaggtgaaccagctgcgcttcacggtcatggcccgcgaccgcgggcagccccccaagaccgacaaggccaccgtggtccttaacatcaaagacgagaacgacaacgtgccgtccattgaaatccgcaagattgggcgcatccccctcaaggacggggtggccaacgtggccgaggacgttctggtcgacacccccatcgctctggtgcaggtgtccgaccgagaccaaggcgagaacggggtggtcacctgcaccgtggtgggcgacgtgcccttccagctcaagccagccagcgacaccgagggcgaccagaacaagaaaaagtacttcttgcacacctcgacccctctggactatgaggccacccgggagttcaacgtggtcatcgtggcggtggactcaggcagccccagcctctcgagcaacaactccctgattgtcaaggtgggagacaccaacgacaacccgcccatgttcggccagtcggtggtggaggtttacttccctgagaacaacatcccgggcgagagggtggccacggtgctggcgacagacgcagacagcggtaagaacgccgagatcgcctactcgctggactcctctgtgatggggatctttgccatcgatcccgattctggggacatcctggtcaataccgtgctggaccgcgagcagactgacaggtatgagtttaaagttaacgccaaagacaaaggcatccccgtgctgcagggcagcactacggtgattgtgcaggtggctgataaaaatgacaatgaccctaagtttatgcaggacgtcttcaccttttatgtgaaagaaaacttgcagcccaacagccctgtggggatggtcaccgtgatggatgctgacaaggggcggaatgcagagatgagcctgtacatagaggagaacaataacattttttctattgaaaatgacacggggaccatttactccacaatgtcttttgaccgggaacatcagaccacatacactttcagagtcaaggctgtggatgggggagatcctcccagatctgccacagctacagtctcgctttttgtgatggatgaaaatgacaatgctcccacagttacccttcccaaaaacatttcctacactttactgccaccttcgagtaatgtcaggacagtagtagctacagtgttggcaacagacagtgatgatggcatcaatgcagacctgaactacagcattgtgggaggaaatcccttcaagctgtttgaaattgatcccactagtggtgtggtttccttagtgggaaaactcacccaaaagcattatggcttgcacaggttggtggtgcaagtgaatgacagtgggcagccttcccagtccaccacgactctggtgcacgtgtttgtcaatgaaagtgtttctaatgcaactgcgattgactcccagatagctagaagtttgcacatcccactcacccaggatatagctggtgacccaagctatgaaattagcaaacagagactcagtattgtcattggcgtggttgctggcattatgacggtgattctaatcatcttaattgtagtgatggcaaggtactgcaggtccaaaaataaaaatggctatgaagccggcaaaaaagatcacgaagacttttttacaccccaacagcatgacaaatctaaaaagcctaaaaaggacaagaaaaacaaaaaatctaagcagcctctctacagcagcattgtcactgtggaggcttctaagccaaatggacagaggtatgatagtgtcaatgagaagctgtcagacagcccaagcatggggcgatacaggtccgttaatggtgggcccggcagtcctgacctggcaaggcattacaaatctagttccccattgcctactgttcagcttcatccccagtcaccaactgcaggaaaaaaacaccaggccgtacaagatctaccaccagccaacacatttgtgggagcaggagacaacatttcaattggatcagatcactgctctgagtacagctgtcaaaccaataacaagtacagcaaacaggtaagatgtatcccaaatatatttaaatatcccagggagggctaataactctgagacagattatcttctgtaaagttttgtcttctcgtttttaaagttattaaaattttaacagtaggaatttaatgttaatttttgcaccattaatttagcaaaggccatctacaagaggtataccactgtattttgcaaattagaattaaggttcactaaactactgaaagaagtattcagagtaggcagtgtttggcagttctctttgcacttgacatccctaattcatactacatttttttgtttccagaataaatatgtgtgtattacttagatggttagttttcacctgaaattattttcttctgtggcaactaagtggataattacatccagagaaaaagtttctaaagttactactggtgtctatgcaaattggattccatagaagttttagctatgttatttacaatgcaggattttacagataaatagatgctgattcatgcagatgtagtactaagtctgagatattgaaatactgactactttgatgaaactgctggtttaaaaatatttactgatatgcaaatgtcatgcaaaactccactttcaatcttttatatctataataatcgatacctataacaattagtgttctataatgatatgcaattaccatttgcattctttctgtttggtattaaaagtttgcaaacaaaaatacattgcatgagccatttattatttaagccaagtaatgaaaatattcatgattgatgtactgtgtgcaagactattttggtatgcattatgatatattgagaatg

SEQ ID NO: 43759 - DNA, 1240 bp, Homo sapiens
gctcccctttcctcatggcaagacgcatggaagaagagtgctgttaaggcctctccattaatcaacagattcaaggcctcttccagatgtagccctgactgggaagtgcactcgtgagtgtgatgagtatggccactcagactcctgctggatgccggtccgcacttctccggagaggaagaagagccagcctaaactgtccactttcatgcctgttgatgaacgaggaagccaggaaaagctggccaatggggaggccgccatcatgggtgaccgcaacagaaacctcctgaacaaaaagttgacctcatcctatgagaccttcagtgcagctagtttcagcaaaaatgaggaagccaaccctgaggatattccccttacaaaaacaggggaatataagccatctcctgtcaatactctcactagaagagaagtttacctgtaggctataaaggagcaacagcaaagttctttacatgtatgaaaaggagaataaggggcaaaaaccttacaaagcaaaacgtttaatcacaaagagggggctaccaaagagacaaagctttgcctgccacttctgcctccagatcaggcctttagtgatactgttagcctgattctactgtacaatgtagaaaccatccttgttacttgcatgtctaaccccttcactgattcccaacactcactttctcttccccacccctctccaaaaaaaaaaaaaccaaaagaaaagaaaaaaaaagggggatagttgcaagtttctttcacagtaactgtacgaagcctgattagcagaacacaacacaccctcattatccctaagctgaagcatgattttagtcactttgattttgttcgagtgtcatctggctggtcaaaaataagcaggacagataaaatgtatttcagacataccatcagaaaatggtttatcaccatcaaaggcaatcctttgaaagtgatagagtccctctaaaggtacagtccttagaaagagggactgtattaaaaagtattttgggaatatcaaagctttaatatctccaacaaagactaagagaaaaacaatactcagtgggtgattgcagtcctaaattgtcatatgttgttattttcaggtcaagagcatcaacttcaattccatacattcaccaaatattctcagtatacacacagtcttgattacatgtatcaatttcaccagttatgacttctaagaattatatatattttttcagaa

SEQ ID NO: 43760 - DNA, 653 bp, Homo sapiens
cttcccccaccccccaagtgtatttattatttacaaacacaaagttggcattaaaatttttcttagctccgaaatctctactaaagctttccaattgggcataagacactggggaaaatttctttatcgatttttttttacctgcataaatctttattttccttctttcagatgcgtctacatccatacattactgtgtttggctgaattccactctaatatgatgctccattatgcaccatactgtgatgacctttctactccgaaacctgctggagcctgcccttggccgtggggtgtcagccaatcactgcttgttccacttgttgtacattttatttttgagtctttttctttctcatatacagaaaaatagtatgaaaataaaataaatgtatgaaacagtattaatgcagaaatgtgctactaatggatgtctgagtcaccagaaattccattcttaaagaggcggttagcacctattagacgtaacagtgatgtcttttaaaaaatccaaaagcatattgcaacaataagtttgagactttgtgtgaacaaagggaaattcagcctcttatgtctttgtctttaatacattaaatactgattttgaataaaaatctaaattgatcaatattgttaagtgccagtaa

SEQ ID NO: 43761 - DNA, 5406 bp, Homo sapiens
gaatgcaggtgagaaaaggcacggactctgcggctgcgaacccaaacttgggcaccgcacggtgcgcactgctcagccttcgcccccgtgggcgaaaggctgctgcggtttcaggcggctgcttcgtgactaatgaccttgcgcagagttgttaagaaaaaagagaaacccgcgctctccggggtgagaagggactgactctgggcgtctctgaagatggctcgggcttctctttggcgcgccggggggaccctgacactgaccgctctgtgacgcgagtagtctcccctgcaccgtgcccgaagcgacgtgccgggggatttttcattctcgatctgttgactggctcccccgctgcatgagcagagtcggagttgagactggcttgttgctggccccagcgcctggtgcaggaagcgactcacgtttgtctgggtggccggagccggagcagagcctgggtttggagtgagtgcctggaacgtgaattggactcaactcgagtagcagcaaagaccagcgggctggcaggcgggggaggctgcaggctcattccccacctcttcccagccccactgcccgtctgccggagcggttctggccccttccgacagagcggggactagagccggggattctccgcccgctgaggggatgactctgggttgggggagcgccgaacccgcggcgcgcagtgtcccgtgaactgtgagtactgcgactgaacggcggcaggcgagcgggcgattagcacccattgcatgaattatgaaacaataactttcggaagaagcaggaggaaaaaaagaagcatctatcgctgccctcccacccccattcccggccaactctccacgccgcttttgccccctccctcccctccctctcgctccttcctttccgggagaggggagaggactcgggggagggcaggcggccggccccggaggaggggggcgccgagggggctgtggttagaaggagcagtagcagcagcagcaggagaagatgctgaggatgcggaccgcgggatgggcgcgcggctggtgcttgggctgctgcctcctcctgccgctctcgctcagcctggcggccgccaagcagctcctccggtaccggctggccgaggagggccccgccgacgtccgcatcggcaacgtggcttcagacctgggcatcgtgaccggatcgggtgaggtgactttcagcctggagtccggttccgagtacctgaagatcgacaacctcactggcgagctgagcacgagcgagcggcgcatcgaccgcgagaagctgccccagtgtcagatgatcttcgacgagaacgagtgcttcctggacttcgaggtgtcggtgatcgggccctcgcagagctgggtggacctgtttgagggtcaggtcatcgtgcttgacatcaacgacaacacgcccaccttcccgtcgcccgtgctcacgctcacggtggaggagaatcggccggtgggcacactttacctgctgcccacagccaccgaccgcgacttcggccgcaacggcatcgagcgctacgagctgctccaggagcccggaggcggcggcagcggcggcgagagccggcgcgccggggcggccgacagcgccccctaccccgggggcggcgggaacggcgcgagcggcggcggctcgggaggctccaagcggcggctggacgcatcagagggcggcggcggcaccaaccccggcggccgcagcagcgtgttcgagctgcaggtggcggacaccccggacggcgagaagcagccgcagctgatcgtgaagggcgtgtacgaggccgacttggctgagaacagcgccccggggacccccatcctgcaactgcgcgcagccgacttggacgtgggggtcaacgggcagatcgaatacgtgttcggggcggccaccgagtcggtgaggcggctgctgcgccttgacgagacgtccggctggctcagcgtcctgcaccggatcgaccgcgaggaggtgaaccagctgcgcttcacggtcatggcccgcgaccgcgggcagccccccaagaccgacaaggccaccgtggtccttaacatcaaagacgagaacgacaacgtgccgtccattgaaatccgcaagattgggcgcatccccctcaaggacggggtggccaacgtggccgaggacgttctggtcgacacccccatcgctctggtgcaggtgtccgaccgagaccaaggcgagaacggggtggtcacctgcaccgtggtgggcgacgtgcccttccagctcaagccagccagcgacaccgagggcgaccagaacaagaaaaagtacttcttgcacacctcgacccctctggactatgaggccacccgggagttcaacgtggtcatcgtggcggtggactcaggcagccccagcctctcgagcaacaactccctgattgtcaaggtgggagacaccaacgacaacccgcccatgttcggccagtcggtggtggaggtttacttccctgagaacaacatcccgggcgagagggtggccacggtgctggcgacagacgcagacagcggtaagaacgccgagatcgcctactcgctggactcctctgtgatggggatctttgccatcgatcccgattctggggacatcctggtcaataccgtgctggaccgcgagcagactgacaggtatgagtttaaagttaacgccaaagacaaaggcatccccgtgctgcagggcagcactacggtgattgtgcaggtggctgataaaaatgacaatgaccctaagtttatgcaggacgtcttcaccttttatgtgaaagaaaacttgcagcccaacagccctgtggggatggtcaccgtgatggatgctgacaaggggcggaatgcagagatgagcctgtacatagaggagaacaataacattttttctattgaaaatgacacggggaccatttactccacaatgtcttttgaccgggaacatcagaccacatacactttcagagtcaaggctgtggatgggggagatcctcccagatctgccacagctacagtctcgctttttgtgatggatgaaaatgacaatgctcccacagttacccttcccaaaaacatttcctacactttactgccaccttcgagtaatgtcaggacagtagtagctacagtgttggcaacagacagtgatgatggcatcaatgcagacctgaactacagcattgtgggaggaaatcccttcaagctgtttgaaattgatcccactagtggtgtggtttccttagtgggaaaactcacccaaaagcattatggcttgcacaggttggtggtgcaagtgaatgacagtgggcagccttcccagtccaccacgactctggtgcacgtgtttgtcaatgaaagtgtttctaatgcaactgcgattgactcccagatagctagaagtttgcacatcccactcacccaggatatagctggtgacccaagctatgaaattagcaaacagagactcagtattgtcattggcgtggttgctggcattatgacggtgattctaatcatcttaattgtagtgatggcaaggtactgcaggtccaaaaataaaaatggctatgaagccggcaaaaaagatcacgaagacttttttacaccccaacagcatgacaaatctaaaaagcctaaaaaggacaagaaaaacaaaaaatctaagcagcctctctacagcagcattgtcactgtggaggcttctaagccaaatggacagaggtatgatagtgtcaatgagaagctgtcagacagcccaagcatggggcgatacaggtccgttaatggtgggcccggcagtcctgacctggcaaggcattacaaatctagttccccattgcctactgttcagcttcatccccagtcaccaactgcaggaaaaaaacaccaggccgtacaagatctaccaccagccaacacatttgtgggagcaggagacaacatttcaattggatcagatcactgctctgagtacagctgtcaaaccaataacaagtacagcaaacagccatttcgtagagtgacgttttctgttgtgagtcagcctcaggacccacatcaggggtcactgcagagttgctatgacagcgggctggaggagtcagaaacaccaagcagtaagagttcatcagggccaagactgggtgcgcttccactcccagaggacaactatgaaaggaccacgccggatggcagtgttgattcaaggcctcttccagatgtagccctgactgggaagtgcactcgtgagtgtgatgagtatggccactcagactcctgctggatgccggtccgcacttctccggagaggaagaagagccagcctaaactgtccactttcatgcctgttgatgaacgaggaagccaggaaaagctggccaatggggaggccgccatcatgggtgaccgcaacagaaacctcctgaacaaaaagttgacctcatcctatgagaccttcagtgcagctagtttcagcaaaaatgaggaagccaaccctgaggatattccccttacaaaaacaggggaatataagccatctcctgtcaatactctcactagaagagaagtttacctgtaggctataaaggagcaacagcaaagttctttacatgtatgaaaaggagaataaggggcaaaaaccttacaaagcaaaacgtttaatcacaaagagggggctaccaaagagacaaagctttgcctgccacttctgcctccagatcaggcctttagtgatactgttagcctgattctactgtacaatgtagaaaccatccttgttacttgcatgtctaaccccttcactgattcccaacactcactttctcttccccacccctctccaaaaaaaaaaaaaccaaaagaaaagaaaaaaaaagggggatagttgcaagtttctttcacagtaactgtacgaagcctgattagcagaacacaacacaccctcattatccctaagctgaagcatgattttagtcactttgattttgttcgagtgtcatctggctggtcaaaaataagcaggacagataaaatgtatttcagacataccatcagaaaatggtttatcaccatcaaaggcaatcctttgaaagtgatagagtccctctaaaggtacagtccttagaaagagggactgtattaaaaagtattttgggaatatcaaagctttaatatctccaacaaagactaagagaaaaacaatactcagtgggtgattgcagtcctaaattgtcatatgttgttattttcaggtcaagagcatcaacttcaattccatacattcaccaaatattctcagtatacacacagtcttgattacatgtatcaatttcaccagttatgacttctaagaattatatatattttttcagaa

SEQ ID NO: 43762 - DNA, 4664 bp, Homo sapiens
gaatgcaggtgagaaaaggcacggactctgcggctgcgaacccaaacttgggcaccgcacggtgcgcactgctcagccttcgcccccgtgggcgaaaggctgctgcggtttcaggcggctgcttcgtgactaatgaccttgcgcagagttgttaagaaaaaagagaaacccgcgctctccggggtgagaagggactgactctgggcgtctctgaagatggctcgggcttctctttggcgcgccggggggaccctgacactgaccgctctgtgacgcgagtagtctcccctgcaccgtgcccgaagcgacgtgccgggggatttttcattctcgatctgttgactggctcccccgctgcatgagcagagtcggagttgagactggcttgttgctggccccagcgcctggtgcaggaagcgactcacgtttgtctgggtggccggagccggagcagagcctgggtttggagtgagtgcctggaacgtgaattggactcaactcgagtagcagcaaagaccagcgggctggcaggcgggggaggctgcaggctcattccccacctcttcccagccccactgcccgtctgccggagcggttctggccccttccgacagagcggggactagagccggggattctccgcccgctgaggggatgactctgggttgggggagcgccgaacccgcggcgcgcagtgtcccgtgaactgtgagtactgcgactgaacggcggcaggcgagcgggcgattagcacccattgcatgaattatgaaacaataactttcggaagaagcaggaggaaaaaaagaagcatctatcgctgccctcccacccccattcccggccaactctccacgccgcttttgccccctccctcccctccctctcgctccttcctttccgggagaggggagaggactcgggggagggcaggcggccggccccggaggaggggggcgccgagggggctgtggttagaaggagcagtagcagcagcagcaggagaagatgctgaggatgcggaccgcgggatgggcgcgcggctggtgcttgggctgctgcctcctcctgccgctctcgctcagcctggcggccgccaagcagctcctccggtaccggctggccgaggagggccccgccgacgtccgcatcggcaacgtggcttcagacctgggcatcgtgaccggatcgggtgaggtgactttcagcctggagtccggttccgagtacctgaagatcgacaacctcactggcgagctgagcacgagcgagcggcgcatcgaccgcgagaagctgccccagtgtcagatgatcttcgacgagaacgagtgcttcctggacttcgaggtgtcggtgatcgggccctcgcagagctgggtggacctgtttgagggtcaggtcatcgtgcttgacatcaacgacaacacgcccaccttcccgtcgcccgtgctcacgctcacggtggaggagaatcggccggtgggcacactttacctgctgcccacagccaccgaccgcgacttcggccgcaacggcatcgagcgctacgagctgctccaggagcccggaggcggcggcagcggcggcgagagccggcgcgccggggcggccgacagcgccccctaccccgggggcggcgggaacggcgcgagcggcggcggctcgggaggctccaagcggcggctggacgcatcagagggcggcggcggcaccaaccccggcggccgcagcagcgtgttcgagctgcaggtggcggacaccccggacggcgagaagcagccgcagctgatcgtgaagggggcgctggaccgcgagcagcgcgactcctacgagctgaccctgcgagtgcgcgacggcggcgacccgcctcgctcctcgcaggccatcctacgggtcctcatcaccgacgtgaacgacaacagcccccgcttcgagaagagcgtgtacgaggccgacttggctgagaacagcgccccggggacccccatcctgcaactgcgcgcagccgacttggacgtgggggtcaacgggcagatcgaatacgtgttcggggcggccaccgagtcggtgaggcggctgctgcgccttgacgagacgtccggctggctcagcgtcctgcaccggatcgaccgcgaggaggtgaaccagctgcgcttcacggtcatggcccgcgaccgcgggcagccccccaagaccgacaaggccaccgtggtccttaacatcaaagacgagaacgacaacgtgccgtccattgaaatccgcaagattgggcgcatccccctcaaggacggggtggccaacgtggccgaggacgttctggtcgacacccccatcgctctggtgcaggtgtccgaccgagaccaaggcgagaacggggtggtcacctgcaccgtggtgggcgacgtgcccttccagctcaagccagccagcgacaccgagggcgaccagaacaagaaaaagtacttcttgcacacctcgacccctctggactatgaggccacccgggagttcaacgtggtcatcgtggcggtggactcaggcagccccagcctctcgagcaacaactccctgattgtcaaggtgggagacaccaacgacaacccgcccatgttcggccagtcggtggtggaggtttacttccctgagaacaacatcccgggcgagagggtggccacggtgctggcgacagacgcagacagcggtaagaacgccgagatcgcctactcgctggactcctctgtgatggggatctttgccatcgatcccgattctggggacatcctggtcaataccgtgctggaccgcgagcagactgacaggtatgagtttaaagttaacgccaaagacaaaggcatccccgtgctgcagggcagcactacggtgattgtgcaggtggctgataaaaatgacaatgaccctaagtttatgcaggacgtcttcaccttttatgtgaaagaaaacttgcagcccaacagccctgtggggatggtcaccgtgatggatgctgacaaggggcggaatgcagagatgagcctgtacatagaggagaacaataacattttttctattgaaaatgacacggggaccatttactccacaatgtcttttgaccgggaacatcagaccacatacactttcagagtcaaggctgtggatgggggagatcctcccagatctgccacagctacagtctcgctttttgtgatggatgaaaatgacaatgctcccacagttacccttcccaaaaacatttcctacactttactgccaccttcgagtaatgtcaggacagtagtagctacagtgttggcaacagacagtgatgatggcatcaatgcagacctgaactacagcattgtgggaggaaatcccttcaagctgtttgaaattgatcccactagtggtgtggtttccttagtgggaaaactcacccaaaagcattatggcttgcacaggttggtggtgcaagtgaatgacagtgggcagccttcccagtccaccacgactctggtgcacgtgtttgtcaatgaaagtgtttctaatgcaactgcgattgactcccagatagctagaagtttgcacatcccactcacccaggatatagctggtgacccaagctatgaaattagcaaacagagactcagtattgtcattggcgtggttgctggcattatgacggtgattctaatcatcttaattgtagtgatggcaaggtactgcaggtccaaaaataaaaatggctatgaagccggcaaaaaagatcacgaagacttttttacaccccaacagcatgacaaatctaaaaagcctaaaaaggacaagaaaaacaaaaaatctaagcagcctctctacagcagcattgtcactgtggaggcttctaagccaaatggacagaggtatgatagtgtcaatgagaagctgtcagacagcccaagcatggggcgatacaggtccgttaatggtgggcccggcagtcctgacctggcaaggcattacaaatctagttccccattgcctactgttcagcttcatccccagtcaccaactgcaggaaaaaaacaccaggccgtacaagatctaccaccagccaacacatttgtgggagcaggagacaacatttcaattggatcagatcactgctctgagtacagctgtcaaaccaataacaagtacagcaaacagatgcgtctacatccatacattactgtgtttggctgaattccactctaatatgatgctccattatgcaccatactgtgatgacctttctactccgaaacctgctggagcctgcccttggccgtggggtgtcagccaatcactgcttgttccacttgttgtacattttatttttgagtctttttctttctcatatacagaaaaatagtatgaaaataaaataaatgtatgaaacagtattaatgcagaaatgtgctactaatggatgtctgagtcaccagaaattccattcttaaagaggcggttagcacctattagacgtaacagtgatgtcttttaaaaaatccaaaagcatattgcaacaataagtttgagactttgtgtgaacaaagggaaattcagcctcttatgtctttgtctttaatacattaaatactgattttgaataaaaatctaaattgatcaatattgttaagtgccagtaa

SEQ ID NO: 43763 - DNA, 4915 bp, Homo sapiens
gcattagtcaagggaggaggaaatttaccagcccgagggagggaaaacaagtcccccagagaagacggcggtactcgctagggagggggactgggctttggcttaaagaggactggctgggattgggcacactttgagcggcccctggagctgaggctgggctttcccgagcgcggcggctggctgacgctccctcccgcccccattcccggccaactctccacgccgcttttgccccctccctcccctccctctcgctccttcctttccgggagaggggagaggactcgggggagggcaggcggccggccccggaggaggggggcgccgagggggctgtggttagaaggagcagtagcagcagcagcaggagaagatgctgaggatgcggaccgcgggatgggcgcgcggctggtgcttgggctgctgcctcctcctgccgctctcgctcagcctggcggccgccaagcagctcctccggtaccggctggccgaggagggccccgccgacgtccgcatcggcaacgtggcttcagacctgggcatcgtgaccggatcgggtgaggtgactttcagcctggagtccggttccgagtacctgaagatcgacaacctcactggcgagctgagcacgagcgagcggcgcatcgaccgcgagaagctgccccagtgtcagatgatcttcgacgagaacgagtgcttcctggacttcgaggtgtcggtgatcgggccctcgcagagctgggtggacctgtttgagggtcaggtcatcgtgcttgacatcaacgacaacacgcccaccttcccgtcgcccgtgctcacgctcacggtggaggagaatcggccggtgggcacactttacctgctgcccacagccaccgaccgcgacttcggccgcaacggcatcgagcgctacgagctgctccaggagcccggaggcggcggcagcggcggcgagagccggcgcgccggggcggccgacagcgccccctaccccgggggcggcgggaacggcgcgagcggcggcggctcgggaggctccaagcggcggctggacgcatcagagggcggcggcggcaccaaccccggcggccgcagcagcgtgttcgagctgcaggtggcggacaccccggacggcgagaagcagccgcagctgatcgtgaagggggcgctggaccgcgagcagcgcgactcctacgagctgaccctgcgagtgcgcgacggcggcgacccgcctcgctcctcgcaggccatcctacgggtcctcatcaccgacgtgaacgacaacagcccccgcttcgagaagagcgtgtacgaggccgacttggctgagaacagcgccccggggacccccatcctgcaactgcgcgcagccgacttggacgtgggggtcaacgggcagatcgaatacgtgttcggggcggccaccgagtcggtgaggcggctgctgcgccttgacgagacgtccggctggctcagcgtcctgcaccggatcgaccgcgaggaggtgaaccagctgcgcttcacggtcatggcccgcgaccgcgggcagccccccaagaccgacaaggccaccgtggtccttaacatcaaagacgagaacgacaacgtgccgtccattgaaatccgcaagattgggcgcatccccctcaaggacggggtggccaacgtggccgaggacgttctggtcgacacccccatcgctctggtgcaggtgtccgaccgagaccaaggcgagaacggggtggtcacctgcaccgtggtgggcgacgtgcccttccagctcaagccagccagcgacaccgagggcgaccagaacaagaaaaagtacttcttgcacacctcgacccctctggactatgaggccacccgggagttcaacgtggtcatcgtggcggtggactcaggcagccccagcctctcgagcaacaactccctgattgtcaaggtgggagacaccaacgacaacccgcccatgttcggccagtcggtggtggaggtttacttccctgagaacaacatcccgggcgagagggtggccacggtgctggcgacagacgcagacagcggtaagaacgccgagatcgcctactcgctggactcctctgtgatggggatctttgccatcgatcccgattctggggacatcctggtcaataccgtgctggaccgcgagcagactgacaggtatgagtttaaagttaacgccaaagacaaaggcatccccgtgctgcagggcagcactacggtgattgtgcaggtggctgataaaaatgacaatgaccctaagtttatgcaggacgtcttcaccttttatgtgaaagaaaacttgcagcccaacagccctgtggggatggtcaccgtgatggatgctgacaaggggcggaatgcagagatgagcctgtacatagaggagaacaataacattttttctattgaaaatgacacggggaccatttactccacaatgtcttttgaccgggaacatcagaccacatacactttcagagtcaaggctgtggatgggggagatcctcccagatctgccacagctacagtctcgctttttgtgatggatgaaaatgacaatgctcccacagttacccttcccaaaaacatttcctacactttactgccaccttcgagtaatgtcaggacagtagtagctacagtgttggcaacagacagtgatgatggcatcaatgcagacctgaactacagcattgtgggaggaaatcccttcaagctgtttgaaattgatcccactagtggtgtggtttccttagtgggaaaactcacccaaaagcattatggcttgcacaggttggtggtgcaagtgaatgacagtgggcagccttcccagtccaccacgactctggtgcacgtgtttgtcaatgaaagtgtttctaatgcaactgcgattgactcccagatagctagaagtttgcacatcccactcacccaggatatagctggtgacccaagctatgaaattagcaaacagagactcagtattgtcattggcgtggttgctggcattatgacggtgattctaatcatcttaattgtagtgatggcaaggtactgcaggtccaaaaataaaaatggctatgaagccggcaaaaaagatcacgaagacttttttacaccccaacagcatgacaaatctaaaaagcctaaaaaggacaagaaaaacaaaaaatctaagcagcctctctacagcagcattgtcactgtggaggcttctaagccaaatggacagaggtatgatagtgtcaatgagaagctgtcagacagcccaagcatggggcgatacaggtccgttaatggtgggcccggcagtcctgacctggcaaggcattacaaatctagttccccattgcctactgttcagcttcatccccagtcaccaactgcaggaaaaaaacaccaggccgtacaagatctaccaccagccaacacatttgtgggagcaggagacaacatttcaattggatcagatcactgctctgagtacagctgtcaaaccaataacaagtacagcaaacagccatttcgtagagtgacgttttctgttgtgagtcagcctcaggacccacatcaggggtcactgcagagttgctatgacagcgggctggaggagtcagaaacaccaagcagtaagagttcatcagggccaagactgggtgcgcttccactcccagaggacaactatgaaaggaccacgccggatggcagtgttgattcaaggcctcttccagatgtagccctgactgggaagtgcactcgtgagtgtgatgagtatggccactcagactcctgctggatgccggtccgcacttctccggagaggaagaagagccagcctaaactgtccactttcatgcctgttgatgaacgaggaagccaggaaaagctggccaatggggaggccgccatcatgggtgaccgcaacagaaacctcctgaacaaaaagttgacctcatcctatgagaccttcagtgcagctagtttcagcaaaaatgaggaagccaaccctgaggatattccccttacaaaaacaggggaatataagccatctcctgtcaatactctcactagaagagaagtttacctgtaggctataaaggagcaacagcaaagttctttacatgtatgaaaaggagaataaggggcaaaaaccttacaaagcaaaacgtttaatcacaaagagggggctaccaaagagacaaagctttgcctgccacttctgcctccagatcaggcctttagtgatactgttagcctgattctactgtacaatgtagaaaccatccttgttacttgcatgtctaaccccttcactgattcccaacactcactttctcttccccacccctctccaaaaaaaaaaaaaccaaaagaaaagaaaaaaaaagggggatagttgcaagtttctttcacagtaactgtacgaagcctgattagcagaacacaacacaccctcattatccctaagctgaagcatgattttagtcactttgattttgttcgagtgtcatctggctggtcaaaaataagcaggacagataaaatgtatttcagacataccatcagaaaatggtttatcaccatcaaaggcaatcctttgaaagtgatagagtccctctaaaggtacagtccttagaaagagggactgtattaaaaagtattttgggaatatcaaagctttaatatctccaacaaagactaagagaaaaacaatactcagtgggtgattgcagtcctaaattgtcatatgttgttattttcaggtcaagagcatcaacttcaattccatacattcaccaaatattctcagtatacacacagtcttgattacatgtatcaatttcaccagttatgacttctaagaattatatatattttttcagaa

SEQ ID NO: 43764 - DNA, 436 bp, Homo sapiens
atctttgttgtccagagtgttataactcccaacaactgttcatgcttagaggctaaagtcagcagacttagtattttaaaaaccacatgcaaaattatgagtcttgttggtaattagtagtgacagctgactgtattgtttcaagcaatgttttcattggttacagaaaactgaggcactgtgttgtatttccagctcccttagttcagaggtgagaggacgggcatgaactttattaatgtggggcctcaggcagccccagtctctctaggcttccagggcttcatttatgaaaaggaagaactggcttataaggtttattctagccttacaatgatgtttatgactaataagattctatctctccatctaaagactgatgaggaagtgagtaatggtctagcaaatccagaaaataagaaatatttggattaaa

SEQ ID NO: 43765 - DNA, 419 bp, Homo sapiens
ctggaagaacacaatccaatagtcctagcatttctctaataaatgcactcctagagtggcagggaatgatttagtaatagttatattctgtcacatgcattttactgttacccaaaaatggggaggtcttaaatggacatgagtctccactttccttcagtgtgagaagggctggttctaaaaaatttatctttaattctcagcaagagacaacctaggtgaagaaaaacgtaccttaatccaagagctttggtctgagacctcaaggaatttaaataatctctacaaaatgaggtattatcaagcacacacaactcatccaacaggttttaaaaaattgaaatgacaccctgagaggaagaaaaataaaacaggttacgtgtttgtttactcttcttctaatcatcttcccagataca

SEQ ID NO: 43766 - DNA, 782 bp, Homo sapiens
cttgagcctaggagttcaaggctgcagtgagctatgaacttgccactgcactccagcctgggtgacagagtgagaacctgtctcaaaaagaaaaaaaaaaaaaggaaaaaaattttaaaaaaatatttaaaagtaatcaccgaaaaaatagaactcgcttgaaagacaagaccaaaaacgaagaggacgtttccctagatggtgaaaacaagtggggcggaatcactgcagcgtcctgcacagaactctggaattgccactttgcagttgctgccttctagtgtgtattgttgaaagacagttttattgaggcataattggcatacaataagctgcatataaaaatgtgtacgtgatgacttttgacatacgtgtacacccgtgaagctatttccacaatcaagataatcaccatccccttcactctggaaagtttcccatgcccttggtaagcccaccctcctgcttcttgcctcccatccccaagtaacaactgtgctgctttctgtcactacaggttaatctgcactttctagaatgtatgtaaatagaatcacacagtatgtacttgtgttttgtctggcttcttgcttagctgagcataaggatttgcgagtcatccctgttgcatgcattaatattttattcctttttattgccaagtagtattccattgtttggatgcaccagtttggttagctgttcacctgttgatggacatttggaccatgttccgttgtgaactattacaaataaagctgctataaacattcaaaagtacc

SEQ ID NO: 43767 - DNA, 414 bp, Homo sapiens
gcttctggatgctggtcaccctgttcacttagtgatgagtccattgtgagtggtgggactttcacggtttgtgcacttttctgtatgtatgttacacttcaattaaaaactttaaaaatttttgacaagacaggccagatgcagtggctcatacctgtaatcccaatgctttgggaggcccaggtgggaggatcatttgagatcaggagttcgagaccagcctgggcaacatagcgagactcctgtctttactaaaaacaaaaaatcagccgggcatggtggtgcaaacctgtaatcctagctacttgggaggctgaggcaggagcatcgcttgagcccaggagggtgaggctacagtgagctatgattgcgccactgcactccagcctggatgacagagcgagaccctgtctc

SEQ ID NO: 43768 - DNA, 273 bp, Homo sapiens
tttgaaatggtgcagaggaatgcacagcttttcagaagtccttcaggatgtcgtgaaggtacaaaactgtgtcaagaccctggaggcagggccaacagaggctgctttaaaagcatgcaaatggattttgggtccttccccaccctgcctgtgagtggtgaactgaggaccccagaaaggcgagacagtgcggcctcctcatttgtctggctgtgtcttgttaaatgtgcatgagttttcctgaatttcaccaacattgagccagacctgcac

SEQ ID NO: 43769 - DNA, 349 bp, Homo sapiens
ggggaaaagtacagtcttttcaataaatggtcttgcaaagacctatatctaagaactaaaattataaaatctttggaagaaaacaggagaaaaacttcatgacattgagtttagcagtgatttcttggatttgacaccaaaagttcaggaaatgaaagaaaaaatagataaagtggattacatcaaaatttaaaacttgttttaaagcctggcgtgtggtggtgggatgcctgtaatcccagctactcggaaggctgagacaggcgaatcacgtgaccccaagaggctgaggttgcagtgagccgagatggtgccactgcactccagcctgggcgacagagcaaaactc

SEQ ID NO: 43770 - DNA, 475 bp, Homo sapiens
ggatggtgttaaattggcctggggacttctttattattttttttaatcgtagcattggtttgtaatattcatggtttagcctgaatgacttaaaggatttattttttaatttaacgtgggttaaaagaacatgagcaatagacctgccaataactattttaaaatataaacagataactgtttgttttgctcaaaggtcacattgaggattcagagctcatgactcaggatggctatttttcttagaggaatgatttagacaagttgaattgaatagctcctaggccactgacatttattcaattttgtctttaacatttgtttactttttgaacctgtaaaacaggggtgtccaatcttttggcttccctagaagaagaattagaagaagaattgtcttaggccacacagaaaatacactaacaacagcttatgagcttaaataaataaataaataaataaatgcaaaaaaaaa

SEQ ID NO: 43771 - DNA, 408 bp, Homo sapiens
ctctaacaatggttttgtggcaaagttataggcaaatggcatcttggacctttctgaatgaataaaaccaaatttttagaatagagtattaaatacaagaggtaaaattttctactaagtaagaaattattcaagtggccgggcgcggtggctcacgcctgtaatcccagcactttgggaggccgaggcgggtggatcttgaggtcaggagatcgagaccatcctggctaacaaggtgaaaccccgtctctactaaaaatacaaaaaattagccgggcgcggtggcgggcgcctgtagtcccagctactcgggaggctgaggcaggagaatggcgtgaacccgggaagcggagcttgcagtgagccgagattgcgccactgcagtccgcagtccggcctgggcgacag

SEQ ID NO: 43772 - DNA, 280 bp, Homo sapiens
agatggggtttcacgttgttagccaggatggtctcaatctcctgacctcgtgatctgcccgcctcagccttccaaagtgctgggattacaggtatgagccactgcgcccagccagtaaattctttttattactgtagtagatgatacttgattaaatgccatctcgggtgctttcattgtcaacaaaggtgctcccatctctaagcttacataaaatgtaattttaaaaagacatttctttagatgtacctgttcacatttttgttaatagtctctcatg

SEQ ID NO: 43773 - DNA, 501 bp, Homo sapiens
tcccctgcacctagctgagagtcaggagcttttcttcagagtgtggagaaaaaatactaaaattgaatacccaaattcccattatcgatatgagtaataattatccaagctgtgacccatacgccaagctcagaagtaagcccacgtacccgcactgcctccctggaatcatcagggcagccctgtaaggaaggcactgtcatttccattttataaaagtggaaacggggatcgagaggttagtaaatgctgaagtcacaggtaacaaatagagctgggatacagatgcaggtctcattgactcagaagtccatactcatactctttaatttctccatctctgccagcctgagggacactgtagactatgtaaactggaataaagctgaactcaggctgggtgcagtggtggttcatgcctgtaatcccaatgctttgggaggcccagagttcgagatcagcctgggcaaaacagtgagacccccatctctacaaaaaaca

SEQ ID NO: 43774 - DNA, 327 bp, Homo sapiens
ccaagttaaatggcaagagaaattggtgcttatgtcaacatggtttaagaaaaattagtgcctggtgtggggcgtggtgtctcacccttataatcccaacactttgggaggttgggccgggtagatcacttgaggccaggagacggcaaaaacctgtctctactaaaaatacaaaaattagttgggtgtgatcgcacactcttgtaatcccagcttcttgggaggctgaggtgggagaattgcttgaacctacaagagaggtggccgtgagctgaggtctggccactgcactctagcctgggtgacagggcaatgccctgtctcaaa

SEQ ID NO: 43775 - DNA, 689 bp, Homo sapiens
ggacagcaaggaagaaaggggtatacccagctgggagatcttggtgctgccttagaaacacctgatgtggcttcatgaggtgacttctgttttggaggtgaagtggaagacagcagcagtggaaaatgatgatgggtagagatatgtagggccaatgagttggagacattttagagtatgccataactgagaaactatggatatagagggaaactaaccaatttttaaaggaagatttccaattaaaatcagtgtgaacacccaacccattaccatgttgtctaaataaacttcactggtttctgttttagcaaacattattgagttttgaggatttgaactctagtttctacgactgccaaattatgcaaagactagactacataggctcctagtatttattgggattatacattggtgagcatatcatgtgaggatcacataaaggtgtcgttagtaagaatggaaacttctaagtaagcaagtgagatttgggagtaaatcctggcccatcgtctgtcataaatgttgtcttaaataagcttcattaagttgcaagatgtataaacctattcagactagcaaaaagtattctatttcaaggacccgtggataatttcacaggattgaggaatatggcaatcaaccagctctcataagggcataaccagctacttgttagaaaacca

SEQ ID NO: 43776 - DNA, 339 bp, Homo sapiens
gtggggggtgcacgacgatatattcaaacttatgtacaaggcatttgagctcgaggcatggaaaaatactgaggcactgtgtgtacgttgtttgtgcgtgagaatgtaactccttgacactgaaaacaggacaaggagtggaatgtgtgataaggagcgctgaaaacagcctcctaggaatgtggtctgagtgcttttacaaggccgtatgtgcctcatgaccccacggcaaaaacccatctggtggatgtttgtggtttaacaagccttctaataaatacttggcggatggattttggggcggcactctctcagaggagttgccgcctgccccactca

SEQ ID NO: 43777 - DNA, 5259 bp, Homo sapiens
actcagataccatggagacaaggccaaaggggttaggaaacttttctctagtcttttttggacagcctcagtaagggtagtgtgggatacagaatcaaagagcctcatcttttgagatggaaaactcaaggtccaagcaagactctgtcatttactgtttgatttgtaacagctagccaaaaaaatccgagagaagttcaaccgttacttggatgtggtcaatcggaacaagcaagttgtagaagcatcctatacggctcacctaacctctcccctaactgcaattcaagactgctgtactatcccaccttccatgatggaattcgatgggaactttaataccaatgtgtctagaacaattagttgtgatcgactttctactactgttaatagccgggccttcaatccaggacgagacttaaattcaggggtcgagaactgagctgcagtatctccaagttcttgcagacaacctgaaatccaaccctggaattaagtggcaatatttcagttcagaagaaggaattttcactgttttcccagcacacaagttccggtgtaagggcagctacgaacaccgcagtagacccatctacgtctctacagtccggccgcagtcaaagcacatagtagtgattctggaccacggggcttcagtcacagacactcagcttcagattgccaaggacgctgctcaggtcatcctcagcgccatcgatgaacatgacaagatttctgtgttaactgtggcagataccgtccggacttgctcactagaccagtgctataagaccttcttgtctccagccaccagtgagacaaaaaggaaaatgtccacctttgttagcagcgtgaagtcttcagacagtcctacccagcacgcagtgggattccaaaaggcatttcagctgattcgaagtacaaacaataacacaaagttccaagcaaatacagacatggtcatcatttacctgtcagctggcattacatcaaaggactcttcggaagaagataaaaaagcgactctccaagtcatcaatgaagaaaatagctttctaaacaactctgtaatgattctcacctatgccctcatgaacgatggggtgactggtttgaaagagctggcttttctgagggatctagctgaacagaattcagggaagtacggtgtgccagaccggacggccttgcctgtgattaagggcagcatgatggtgctgaatcagttgagcaacctggagaccacagtgggcaggttctacacaaaccttcccaaccggatgattgatgaagccgtcttcagcctgcccttctctgatgagatgggagatggtttgataatgactgtgagtaaaccctgttattttggaaacctacttctgggaattgtaggtgtggacgtgaatctggcttacattcttgaagacgtgacgtattaccaagactctttggcttcctatacttttctcatagacgacaaaggatatacacttatgcacccatctcttaccaggccatatttattgtcagagcccccacttcatactgacatcatacattatgaaaatattccaaaatttgaattagttcggcaaaatatcctaagcctccctctgggcagccagattatcgcagtccctgtgaactcatccctgtcttggcacataaacaagctgagagaaactggaaaggaagcctacaatgttagctatgcctggaagatggtacaagacacttcctttattctgtgtattgtggtgatacaaccagaaatacctgtgaaacaactgaagaacctcaacactgttcccagcagcaagctgctgtaccaccggctggatctccttggccagcccagtgcttgcctccacttcaaacagctggcaaccctagaaagtcccaccatcatgctgtctgctggcagcttttcctccccctatgagcacctcagccagccagagacaaagcgcatggtagagcactacaccgcctatctcagcgacaacacccgcctcattgctaacccgggcctcaaattctctgtcagaaatgaagtaatggctaccagccacgtcacagatgaatggatgacacaaatggaaatgagtagcctgaacacttacattgtccgccgttacatagcaacacccaatggcgtcctcagaatttatcctggttccctcatggacaaagcatttgatcccactaggagacaatggtatctccatgcagtagctaatccagggttgatttctttgactggtccttacttagatgttggaggagctggttatgttgtgacaatcagtcacacaattcattcatccagtacacagctgtcttctgggcacactgtggctgtgatgggcattgacttcacactcagatacttctacaaagttctgatggacctattacctgtctgtaaccaagatggtggcaacaaaataaggtgcttcataatggaggacaggggttatctggtggcgcacccgactctcatcgaccccaaaggacatgcacctgtggagcagcagcacatcacccacaaggagcccctggtagcaaatgatatcctcaaccaccccaactttgtaaagaaaaacctgtgcaacagcttcagtgacagaacggtccagaggttttataaattcaacaccagccttgcgggggatttgacgaaccttgtgcatggcagccactgttccaaatacagattagcaaggatcccaggaaccaacgcgtttgttggcattgtcaacgaaacctgcgactctcttgccttctgtgcctgcagcatggtggaccgactctgtctcaactgtcaccgaatggaacaaaatgaatgtgaatgtccttgtgagtgccctctagaggtcaatgagtgcactggcaacctcaccaatgcagagaaccgaaaccccagctgcgaggtccaccaggagccggtgacatacacagctattgaccctggcctgcaagatgctcttcaccagtgtgtcaacagcaggtgcagtcagaggctggaaagtggggactgttttggggtgctggattgtgaatggtgcatggtggacagtgatggaaagactcacctggacaaaccctactgtgccccccagaaagaatgcttcggggggattgtgggagccaaaagtccctacgttgatgacatgggagcaataggtgatgaggtgatcacattaaacatgattaaaagcgcccctgtgggtcctgtggctggagggatcatgggatgcatcatggtcttggtcctggcggtgtatgcctaccgccaccagattcatcgccggagccatcagcatatgtctcctcttgctgcccaagaaatgtcagtgcgtatgtccaacctggagaatgacagagatgaaagggacgacgacagccacgaagacagaggcatcatcagcaacactcggtttatagctgcggtcatcgaacgacatgcacacagtccagaaagaaggcgccgctactggggtcgatcaggaacagaaagtgatcatggttacagcaccatgagcccacaggaggacagtgaaaatcctccatgcaacaatgaccccttgtcagccggggtcgatgtgggaaaccatgatgaggacttagacctggataccccccctcagactgctgccctactaagtcacaagttccaccactaccggtcacaccaccctacacttcatcatagccaccacttacaggcggccgtcacggtacacactgtcgatgcagaatgctaacaatctcctcacctccacgccaagatgagatctgggagctacagaatgttctggaaagaaaaagaaccggcttaaaacccacagcaagagacctcccttgtgtttgtgctttgtgcagagttgtttgagtcatttcctgcctgtcgacatggttaaaaacgagagaaacaacaacacagtcacatttgtgaagatgtgaggctggttctgaaatggaggggaaataagcctgatgaacagacctgccataacactaatggaaggtaacagaaggcgaacctccaaacacagagacggaacctgcaagtgaagctgagccagaggaatgttccaaagagccagaagcattcagctctccttaactggaagagagaaaaatctgctcacccagagactggaatgtggcacatgcagatacaaatgtgtgcattgaagatttcgctttgtttcttagcggtacctggataccacagttgctgtatggaactcatgttatgctctaaacgatgcatctcagaatttctaagtaaaggattatttttctactatttattgaactttcaaacattctcaaactttggggaaaaggaaaggaaacacaggagaagttttcagcagttgccccgagctgttttgtgtgtaatgaagtggttctttgattaaggagctctatttcttatttaactgatatcccactgccccactccacaaaataggaaaatgaagaaatctttctctctgacttgtttacatcatttcacggaaacacatctttgtttgtaatgcagtattctttctctgtgtttgacagagatggggaggggcagaggaatttaagaggttttaaaagaaatgttatgtttcttatgacttgtttccactcctcgtacaatgctattcttaggtttctacgaaacctaatgttagaaccgcatcctttcagctaagggagggttggatttattttccttgttttagagactacaaatttttaaatatcccattttgactgagaatattgacatataagggaagaagttttctaaattgtgaaagtctggttcttaattaaagaattttttttttaatatcacggttaaaagctgctgccagttagccaagacattatccaccaaattgctttgtgatttatacagggattaatcaaatctggctactataacatggggcattgtaactttaaagtagtgttttaattacagtgatgtattttagactcacattttgtgattcaaatatgttataaaggcattcttgcaccatggtaaagaatgtgtgtggtaaatctccgtttatatgtagttggaaaaaattcactgaataatgttttaatgatagggtattatgatacaatgtaaaaaacaattggttcttcagcagtacagaaagtaaactatatatgtgctatcaggaaaccccttcatactgtgtataaaattgcaatctagtgaaataaaccgtatgcaatgga

SEQ ID NO: 43778 - DNA, 323 bp, Homo sapiens
caacacccgcctcattgctaacccgggcctcaaagtaagcattggcgcagagctccatttctggtgtccccctccacaggcccagcagggggtgctggcagtgaacctttgaagtaggaaacccagctctgcatctgtgcctctcagctggagagctgcagagtgtgtggcccaggggaggctggtcagcagtgactcttctgatggatgaagaagccccgtgggccacatggagaatctgttacaggccttagaagcactgggggtttccagtgatgttagagggatgtgatttagagactagtgaaactttcccagccctg

SEQ ID NO: 43779 - DNA, 5270 bp, Homo sapiens
gcggccgcccctctggctgctctgcctggtcgcgtgctggctcctgggcgccggggccgaagccgacttctccatcctggacgaggcgcaagtgctggcgagccagatgcggaggctggcggccgaggagctgggggtcgtcaccatgcagcggatattcaactcctttgtttacactgagaaaatctcaaatggagaaagtgaagtacagcagctagccaaaaaaatccgagagaagttcaaccgttacttggatgtggtcaatcggaacaagcaagttgtagaagcatcctatacggctcacctaacctctcccctaactgcaattcaagactgctgtactatcccaccttccatgatggaattcgatgggaactttaataccaatgtgtctagaacaattagttgtgatcgactttctactactgttaatagccgggccttcaatccaggacgagacttaaattcagttcttgcagacaacctgaaatccaaccctggaattaagtggcaatatttcagttcagaagaaggaattttcactgttttcccagcacacaagttccggtgtaagggcagctacgaacaccgcagtagacccatctacgtctctacagtccggccgcagtcaaagcacatagtagtgattctggaccacggggcttcagtcacagacactcagcttcagattgccaaggacgctgctcaggtcatcctcagcgccatcgatgaacatgacaagatttctgtgttaactgtggcagataccgtccggacttgctcactagaccagtgctataagaccttcttgtctccagccaccagtgagacaaaaaggaaaatgtccacctttgttagcagcgtgaagtcttcagacagtcctacccagcacgcagtgggattccaaaaggcatttcagctgattcgaagtacaaacaataacacaaagttccaagcaaatacagacatggtcatcatttacctgtcagctggcattacatcaaaggactcttcggaagaagataaaaaagcgactctccaagtcatcaatgaagaaaatagctttctaaacaactctgtaatgattctcacctatgccctcatgaacgatggggtgactggtttgaaagagctggcttttctgagggatctagctgaacagaattcagggaagtacggtgtgccagaccggacggccttgcctgtgattaagggcagcatgatggtgctgaatcagttgagcaacctggagaccacagtgggcaggttctacacaaaccttcccaaccggatgattgatgaagccgtcttcagcctgcccttctctgatgagatgggagatggtttgataatgactgtgagtaaaccctgttattttggaaacctacttctgggaattgtaggtgtggacgtgaatctggcttacattcttgaagacgtgacgtattaccaagactctttggcttcctatacttttctcatagacgacaaaggatatacacttatgcacccatctcttaccaggccatatttattgtcagagcccccacttcatactgacatcatacattatgaaaatattccaaaatttgaattagttcggcaaaatatcctaagcctccctctgggcagccagattatcgcagtccctgtgaactcatccctgtcttggcacataaacaagctgagagaaactggaaaggaagcctacaatgttagctatgcctggaagatggtacaagacacttcctttattctgtgtattgtggtgatacaaccagaaatacctgtgaaacaactgaagaacctcaacactgttcccagcagcaagctgctgtaccaccggctggatctccttggccagcccagtgcttgcctccacttcaaacagctggcaaccctagaaagtcccaccatcatgctgtctgctggcagcttttcctccccctatgagcacctcagccagccagagacaaagcgcatggtagagcactacaccgcctatctcagcgacaacacccgcctcattgctaacccgggcctcaaattctctgtcagaaatgaagtaatggctaccagccacgtcacagatgaatggatgacacaaatggaaatgagtagcctgaacacttacattgtccgccgttacatagcaacacccaatggcgtcctcagaatttatcctggttccctcatggacaaagcatttgatcccactaggagacaatggtatctccatgcagtagctaatccagggttgatttctttgactggtccttacttagatgttggaggagctggttatgttgtgacaatcagtcacacaattcattcatccagtacacagctgtcttctgggcacactgtggctgtgatgggcattgacttcacactcagatacttctacaaagttctgatggacctattacctgtctgtaaccaagatggtggcaacaaaataaggtgcttcataatggaggacaggggttatctggtggcgcacccgactctcatcgaccccaaaggacatgcacctgtggagcagcagcacatcacccacaaggagcccctggtagcaaatgatatcctcaaccaccccaactttgtaaagaaaaacctgtgcaacagcttcagtgacagaacggtccagaggttttataaattcaacaccagccttgcgggggatttgacgaaccttgtgcatggcagccactgttccaaatacagattagcaaggatcccaggaaccaacgcgtttgttggcattgtcaacgaaacctgcgactctcttgccttctgtgcctgcagcatggtggaccgactctgtctcaactgtcaccgaatggaacaaaatgaatgtgaatgtccttgtgagtgccctctagaggtcaatgagtgcactggcaacctcaccaatgcagagaaccgaaaccccagctgcgaggtccaccaggagccggtgacatacacagctattgaccctggcctgcaagatgctcttcaccagtgtgtcaacagcaggtgcagtcagaggctggaaagtggggactgttttggggtgctggattgtgaatggtgcatggtggacagtgatggaaagactcacctggacaaaccctactgtgccccccagaaagaatgcttcggggggattgtgggagccaaaagtccctacgttgatgacatgggagcaataggtgatgaggtgatcacattaaacatgattaaaagcgcccctgtgggtcctgtggctggagggatcatgggatgcatcatggtcttggtcctggcggtgtatgcctaccgccaccagattcatcgccggagccatcagcatatgtctcctcttgctgcccaagaaatgtcagtgcgtatgtccaacctggagaatgacagagatgaaagggacgacgacagccacgaagacagaggcatcatcagcaacactcggtttatagctgcggtcatcgaacgacatgcacacagtccagaaagaaggcgccgctactggggtcgatcaggaacagaaagtgatcatggttacagcaccatgagcccacaggaggacagtgaaaatcctccatgcaacaatgaccccttgtcagccggggtcgatgtgggaaaccatgatgaggacttagacctggataccccccctcagactgctgccctactaagtcacaagttccaccactaccggtcacaccaccctacacttcatcatagccaccacttacaggcggccgtcacggtacacactgtcgatgcagaatgctaacaatctcctcacctccacgccaagatgagatctgggagctacagaatgttctggaaagaaaaagaaccggcttaaaacccacagcaagagacctcccttgtgtttgtgctttgtgcagagttgtttgagtcatttcctgcctgtcgacatggttaaaaacgagagaaacaacaacacagtcacatttgtgaagatgtgaggctggttctgaaatggaggggaaataagcctgatgaacagacctgccataacactaatggaaggtaacagaaggcgaacctccaaacacagagacggaacctgcaagtgaagctgagccagaggaatgttccaaagagccagaagcattcagctctccttaactggaagagagaaaaatctgctcacccagagactggaatgtggcacatgcagatacaaatgtgtgcattgaagatttcgctttgtttcttagcggtacctggataccacagttgctgtatggaactcatgttatgctctaaacgatgcatctcagaatttctaagtaaaggattatttttctactatttattgaactttcaaacattctcaaactttggggaaaaggaaaggaaacacaggagaagttttcagcagttgccccgagctgttttgtgtgtaatgaagtggttctttgattaaggagctctatttcttatttaactgatatcccactgccccactccacaaaataggaaaatgaagaaatctttctctctgacttgtttacatcatttcacggaaacacatctttgtttgtaatgcagtattctttctctgtgtttgacagagatggggaggggcagaggaatttaagaggttttaaaagaaatgttatgtttcttatgacttgtttccactcctcgtacaatgctattcttaggtttctacgaaacctaatgttagaaccgcatcctttcagctaagggagggttggatttattttccttgttttagagactacaaatttttaaatatcccattttgactgagaatattgacatataagggaagaagttttctaaattgtgaaagtctggttcttaattaaagaattttttttttaatatcacggttaaaagctgctgccagttagccaagacattatccaccaaattgctttgtgatttatacagggattaatcaaatctggctactataacatggggcattgtaactttaaagtagtgttttaattacagtgatgtattttagactcacattttgtgattcaaatatgttataaaggcattcttgcaccatggtaaagaatgtgtgtggtaaatctccgtttatatgtagttggaaaaaattcactgaataatgttttaatgatagggtattatgatacaatgtaaaaaacaattggttcttcagcagtacagaaagtaaactatatatgtgctatcaggaaaccccttcatactgtgtataaaattgcaatctagtgaaataaaccgtatgcaatgga

SEQ ID NO: 43780 - DNA, 1947 bp, Homo sapiens
gcggccgcccctctggctgctctgcctggtcgcgtgctggctcctgggcgccggggccgaagccgacttctccatcctggacgaggcgcaagtgctggcgagccagatgcggaggctggcggccgaggagctgggggtcgtcaccatgcagcggatattcaactcctttgtttacactgagaaaatctcaaatggagaaagtgaagtacagcagctagccaaaaaaatccgagagaagttcaaccgttacttggatgtggtcaatcggaacaagcaagttgtagaagcatcctatacggctcacctaacctctcccctaactgcaattcaagactgctgtactatcccaccttccatgatggaattcgatgggaactttaataccaatgtgtctagaacaattagttgtgatcgactttctactactgttaatagccgggccttcaatccaggacgagacttaaattcagttcttgcagacaacctgaaatccaaccctggaattaagtggcaatatttcagttcagaagaaggaattttcactgttttcccagcacacaagttccggtgtaagggcagctacgaacaccgcagtagacccatctacgtctctacagtccggccgcagtcaaagcacatagtagtgattctggaccacggggcttcagtcacagacactcagcttcagattgccaaggacgctgctcaggtcatcctcagcgccatcgatgaacatgacaagatttctgtgttaactgtggcagataccgtccggacttgctcactagaccagtgctataagaccttcttgtctccagccaccagtgagacaaaaaggaaaatgtccacctttgttagcagcgtgaagtcttcagacagtcctacccagcacgcagtgggattccaaaaggcatttcagctgattcgaagtacaaacaataacacaaagttccaagcaaatacagacatggtcatcatttacctgtcagctggcattacatcaaaggactcttcggaagaagataaaaaagcgactctccaagtcatcaatgaagaaaatagctttctaaacaactctgtaatgattctcacctatgccctcatgaacgatggggtgactggtttgaaagagctggcttttctgagggatctagctgaacagaattcagggaagtacggtgtgccagaccggacggccttgcctgtgattaagggcagcatgatggtgctgaatcagttgagcaacctggagaccacagtgggcaggttctacacaaaccttcccaaccggatgattgatgaagccgtcttcagcctgcccttctctgatgagatgggagatggtttgataatgactgtgagtaaaccctgttattttggaaacctacttctgggaattgtaggtgtggacgtgaatctggcttacattcttgaagacgtgacgtattaccaagactctttggcttcctatacttttctcatagacgacaaaggatatacacttatgcacccatctcttaccaggccatatttattgtcagagcccccacttcatactgacatcatacattatgaaaatattccaaaatttgaattagttcggcaaaatatcctaagaatcaaatctggctactataacatggggcattgtaactttaaagtagtgttttaattacagtgatgtattttagactcacattttgtgattcaaatatgttataaaggcattcttgcaccatggtaaagaatgtgtgtggtaaatctccgtttatatgtagttggaaaaaattcactgaataatgttttaatgatagggtattatgatacaatgtaaaaaacaattggttcttcagcagtacagaaagtaaactatatatgtgctatcaggaaaccccttcatactgtgtataaaattgcaatctagtgaaataaaccgtatgcaatgga

SEQ ID NO: 43781 - DNA, 934 bp, Homo sapiens
tggatactaatattacaataactctcttgtgccctattttggtgttttaaacttctttgctgtacatttaagaaaatcagaatttcagtagactcctcgtgcagtctgaggaggcagtttcctatctggtttgacttaaggggctgcagaagacattcttatcccacatatttcttctgctgatcagtcagcaactgaaattccaactaatggattccattcttccagttaagacatcatctccagaaaactgtgctagttggcatccagcagtgcccaagtattatttaacccactagaacctgtgactgcatcagctttatatcctggacctcagcctggaacaaaggagagctacacttggatactaaacacaagtggtctggatagattatgctgggaaaagaagcctggagcaggcagtacagtgggagaacaagacagaagtgcttgccttggtgatccaaaaaaggcaggatccggccgggggcaaggtgattattctgtctgatgaggagaataagagccagtttgtggtattgacagaagaatgaaagtaaagttcaaccaatctacaaaggccaaaaatattttcacaggcccccaaaagatgaactccaatctgctgcccctaaacgcattctccactgtctggaagatgtgcaaaggcaacggcacagcgttctccatctcaaatccttcaaagtgctgtcagaataaaagaatccccaccaaaagccccagggaaatctatctgtctgtatggtatggtaatgactgaggttattccagataggattctgggagaaactcagctattgaaatctaatgaatggaactgagaatttcttgttataatactgtttgtttgattgaatatatccttgcatataggaagacataaaaataaataataaaagcaagatattatttg

SEQ ID NO: 43782 - DNA, 523 bp, Homo sapiens
tcagtcttgaagatgggaagatcaggagcagtctggagtcatggtatatgaatgaactagtgagagtgggcacaaagtctgaagatctttgtagtgcagctaatgtctaagggagaatatacctaccctagaagagacattaaacaaccagttcaaccaatctacaaaggccaaaaatattttcacaggcccccaaaagatgaactccaatctgctgcccctaaacgcattctccactgtctggaagatgtgcaaaggcaacggcacagcgttctccatctcaaatccttcaaagtgctgtcagaataaaagaatccccaccaaaagccccagggaaatctatctgtctgtatggtatggtaatgactgaggttattccagataggattctgggagaaactcagctattgaaatctaatgaatggaactgagaatttcttgttataatactgtttgtttgattgaatatatccttgcatataggaagacataaaaataaataataaaagcaagatattatttg

SEQ ID NO: 43783 - DNA, 746 bp, Homo sapiens
tcagtcttgaagatgggaagatcaggagcagtctggagtcatggtatatgaatgaactagtgagagtgggcacaaagtctgaagatctttgtagtgcagctaatgtctaagggagaatatacctaccctagaagagacattaaacaaccaggaagcttactgcaggaaagaaatccctcagagtcctgaagatacagctttcagaacttaggtgaagcaagaggactcaaggtgtgcaagaatggacagtacagaatgctctgctacactgctcagattcccccttcaggaaggaaggacaaattcactcaacttctgggagcattgatggttgagctctcagccatcagacctttttggaagttgccctcttctgaaaagaggcacattgcccaagatctttcctcctccagagcgcaggctgcacctgaagtctgattgatgtggggtatgatggtctggtctcctttccccatctaaaggactgttctaacctcagggctctccttgagtttccttagttagttcttattactatgttgcagtccaacttcttctttggcctaattctactttcctcccattccccaattgttgatcctgacagcaatttccccccaaatttctgtaaactaagcatgatctcagagtcacctgacctgcaacattattacatacactatagtccgtgcacttaaagatttagtgaaagtatgctgctgaagcttgccagaacttcccttctt

SEQ ID NO: 43784 - DNA, 8642 bp, Homo sapiens
  misc_feature (799)..(799): n is a, c, g, or t
tgggtatcaggactcagcccatttccccctctggtgctgagaaatggaggccgaaggagtgatctagaagtgttaattgagcccctaatctatgctagttactgggggtgttgggggagacaggagagagatcccacggggttccggcctcccagggactcaggtcactaatggaggtggcttggcttgtctatgtgctgggccaacagccactggcgaggcaaggcgagggtcagtcacggctggtgccaggaagagggctggttctttggctccctggtctcccgcggtctagcccaagctggccagcggttgacctggctcccctggccccggccaggcctcgtggacccctcatatgccacacgggacatgagcaggccggccgggagccgggtcccgggagctccacgaaggggcctgtcctccatgaccaggacacccgctgcgccttcctcccgaggcctcccgggcctctccagacgcggcgctactgcagacaccagggccgccaagggagcggactcggagccggccctggggcgggcacatgggccccggcgccccccggcgtctccaagccgcgctgcccgggtcgggccaggccaggggagggacagcagcaggtgacgacggcccggccaccggctataaataggggcgcgcgtcagccgcgggcgggagcggcggcggcgggcaggggcccgggggccggggcctggaggacaggcgaggcagcggcgagtgcggggccggcggtcggggagggcggtgccatggggtcgcggagggcccccanccggggctggggcgcgggtgggcggtcgggggcggggggcgacggtgaggacgacggccccgtgtggatccccagcccagccagccggagctacctgctcagcgtgcggcccgagaccagcttatcaagcaaccggttgtctcaccccagctctggaaggagcaccttctgctccatcattgctcagctcacagaggagacccagccgctatttgagaccacgctcaagtcccggtctgtgtccgaggacagcgacgtcaggttcacctgcatcgtcacaggatacccagagccagaggtgacctggtacaaggatgatacggagctggaccgctactgtggcttgccaaaatatgagatcactcatcagggcaaccgccacacactgcagctgtacaggtgtcgagaagaagatgccgccatctaccaggcctctgcccagaacagcaagggcattgtgtcctgctcaggggtcctggaggtgggcaccatgactgagtacaagatccaccagcgctggttcgccaagttgaagcgcaaggctgcggcaaagctgcgcgagatcgagcagagctggaagcacgagaaggcggtgcctggggaggtcgacactctgcgcaagctcagccccgaccgcttccagcgaaagcggcgattgagcggggctcaagcgccgggcccctcggtccctaccagggagcctgagggtgggaccctggcggcttggcaggagggagagactgagactgctcagcactcaggtttgggcctgatcaacagttttgcttctggagaagtgaccaccaacggggaggctgcccccgagaatggagaggacggagagcatggcttgctgacatacatctgtgacgccatggagctggggcctcagagagccctcaaagaggagagtggggccaagaagaaaaagaaagatgaggaatccaagcaaggcctgcggaagccagagttagagaaggcagcccaaagccgccgttcttcagaaaactgcatccccagctcagacgagcctgactcctgtgggactcaggggcccgtgggcgtggagcaggttcagacccagcccagaggcagggctgcacgggggcctgggtcctctggcacagatagtaccaggaagccagcctctgctgtgggcactccagacaaggcccagaaggcccctggcccaggcccaggccaggaagtgtatttctccttgaaggacatgtacctggagaacacccaggcagtcaggcctcttggggaagagggaccccagaccctgagtgtccgggcgcctggggagagtcccaaggggaaggcacccctcagggctagaagcgagggggtgcctggcgctcctggccagcccacacactccttgaccccccagccgactaggcctttcaacagaaagagatttgcccctccaaagcccaaaggagaggccaccactgacagcaagcccatttcttctctgagtcaagctccagaatgcggggcccagagcttaggaaaggccccacctcaggcctctgtgcaggtgccgacgccccctgcccggcggagacatggcacccgggacagcacgttgcaggggcaagcaggccacaggactccaggagaggtcctggaatgccagacaaccacggctcctaccatgtcggccagcagcagctctgatgtagcctccattggggttagcacttccggaagtcaaggtatcattgaacccatggatatggaaacccaggaggatgggagaacatctgctaaccagagaactggaagcaagaagaatgtgcaggcagatgggaagatacaagtggatggaaggaccaggggagatggaacacagacagcccagaggacacgtgcagataggaagacgcaggtggatgctgggacacaagaaagcaagaggccacagtcagacaggagtgcacagaagggcatgatgacacagggaagggcagagacacagctagaaacaacacaggcaggtgagaagatacaggaagacaggaaggcccaggcagataagggcacacaggaagacagaaggatgcagggagagaaggggatgcagggagagaaggggacgcagtcagaggggagcgcgcccacagccatggaaggtcagtctgagcaagaggtggcaaccagcctcggcccaccatccagaacccccaaactcccacctacagcgggtcctagagctcctctgaatattgaatgttttgtacagaccccagaagggtcttgtttcccaaaaaaacctggttgcctgcccagatctgaggaggcagtagtaacagcctccaggaaccatgagcaaactgtgctgggtcccctgtcagggaacctcatgctcccagcacagccgccccatgaggggagtgtggagcaggtgggaggagagagatgccgagggccacagtcatcaggcccagtcgaggccaagcaggaggacagcccgttccagtgccccaaggaggagcggccagggggagtgccgtgtatggatcagggtggctgtcctctagctggcctgagccaggaggtacccacgatgccttctcttcctggaactgggctgacagctagcccaaaggcggggccgtgtagcaccccgacttctcagcacgggagcacagccaccttcctgccctctgaggatcaggtcctgatgagttctgccccaacactgcacctggggctggggacccccactcagagtcacccaccagaaaccatggccaccagcagtgagggggcctgcgcccaggtaccagatgtggaggggcggaccccaggtccccggagctgtgaccctggcctcatagattccctgaagaactacctgcttctgctgctgaagctgtccagcacagagacaagtggagcagggggagagtcccaggtgggggcagccaccggaggtctggtgccctcagccactctgacacccactgtggaagtggctgggcttagtccccggacatcgaggcgcatcctggagcgtgtggagaacaaccacctggtgcagagtgcacagaccctgctgctgagcccctgtacctcccgccgcctcaccggcctcctggaccgtgaggtgcaggctggccgccaggcccttgctgctgcccgaggctcctggggtcctggtcccagctccctcactgtccctgccattgtggtagacgaggaggaccctgggctggcctcagaaggagccagtgagggtgaaggagaggtttcccttgaggggcctggcctcctgggggcctctcaggagagcagcatggctggtcgactgggggaggcgggtgggcaggcagcccctggacaggggccctcagcagagagcatagcccaggagccctcccaagaggagaagttcccaggggaggctctgacaggcctcccggcagctacacctgaggaactggctctaggggcccggaggaagagatttctccctaaggtcagagcagcaggagacggggaggcaaccacacctgaagaaagggagagccccacggtttccccccgggggcccaggaaaagcctggtgcctgggtccccagggactccagggcgggagagacgctcccctacgcagggcagaaaggcgagcatgctggaggtgcctcgggcagaggaggagctggcggcaggagacctgggccccagccccaaggccggcggtctggacacagaggtggccctggatgaaggcaagcaggagacactggccaagcccaggaaagccaaagacctgctgaaagccccacaggtgatccggaagattcgggtggagcagtttcctgatgcctccggtagcctgaagctgtggtgccagtttttcaacattcttagtgactcagtcttgacatgggccaaggatcagcgcccagtgggcgaggtgggcaggagcgcaggggatgaggggccggcggccttggccatcgtgcaggcctcccccgtagactgcggtgtgtatcggtgcaccatccacaatgagcacggctcggcctccaccgacttctgcctcagccctgaggtgttgtcaggattcatctccagagaagaaggtgaagttggagaagagattgagatgacccctatggtgtttgctaagggtctggctgactctggctgctggggggacaagctctttgggcgactggtaagcgaggagctccgagggggtggatatgggtgtggccttcggaaggcctcccaggccaaggtcatctacgggctggaacccatcttcgagtcgggccgcacgtgcatcatcaaggtgtccagcctgcttgtgtttgggcccagcagtgagacttctcttgtgggcagaaactacgacgtcaccatccaggggtgcaagatccagaacatgagtcgggagtactgcaaaatcttcgcagcagaagcccgggccgcgcctggctttggggaggtgcctgagatcatcccactgtatctgatctaccggcctgcaaacaatatcccatatgctaccctggaggaagacctgggcaagcccctggagtcttactgttctcgggaatggggctgtgctgaggctccgacagcatctggcagctctgaggccatgcagaaatgccagaccttccaacactggctgtatcagtggacaaatggcagcttccttgtcacagacttggcaggggttgactggaagatgactgatgtgcagattgctaccaaactccgaggataccagggcctcaaggaaagctgcttccctgccctgctggaccggttcgcctcctcccaccagtgcaatgcctactgtgagctgctggggctgacacctctcaagggcccggaggcggcccacccccaagccaaagccaaaggctctaagagtccatctgctggcaggaaaggctcccagctgagtcctcagccccagaagaaaggcctccctagtcctcagggcacccggaagagtgctccaagttccaaggccacccctcaggcctcagagccagtcaccactcagttgttgggacagcctcccacccaagaggagggctccaaggcccagggcatgcggtagcctccgcagaggctgggggcctccacccagcagcagaccaaccaggaagcagcttgaactggatggagactttccaaatatggaactaactggagaaggtgcacgaaggagacaccacttggggacctctctgagcaggctctcgtgaatcagctcgtcatcagatggctttggtgcatggcacatagcccactggcctcttctggtgccactgtcacccagggctcccgggcctcaagcagtccccacctccgagtgcctggcaacctaggccctccttgaagtttacactttgccactgctggaggctcccctgagtcctctgcatgagttctgcaccccaagcccttgccccagcccagtccagcagcagatgttacaatctgagtgaggacatgcaggccaacttttaccctcctgcatttgcctggccctgatctcgcctgtcctcagggatccagacttcctctgctggtctggcctggtgactctcagggtatcttctccttccagctactttcgctcactgatctcagcttatcctgcaactaaccatccttgagcccagatggggctcagggcccttccagagcctgtcatgtccttgtgcagtggcctttgatgtgtgttcacgctcttcccccttcactcactcgcctgcttcccatgctcccttgtaccccctcgccacatccctgtcttggggcccagctgcagcctgctgcctgcccttcatggctctgcacatggccctttgcttgagggctccccactccctgcccaccaatacccaggtgaggaacagaccctctggcctctcaccccacttcagtgctctcttccccaacttctctcgggctctttgctcatgaggtgagagctggtgtgagggttgtgtcagcagctgtagccagagagaggtgttgactctgagagaccttgcactccatactgaaaggaggtggggtcacagtgaatttcacatcccctctcaaccaggagtggagggctaggtcccttccccatggggagtacacttgggtgttctaggagggatgcagtctatccatgcacttgggtggaggggagtctctgtgcctgggaattaggacccctgctccaaccatcgctcttgatcctggggccccagctctgggtcctcatgtatgggctcccaaggacccagcagcctggatccttccagagcatccctcctggaggcctgggatggggtaggtctgcagctagcctactccctttggaatgcaataaaggcagcattgtgtgccctgcttgccctcatctggtgtggttggaggtctgtggagtcaaggtccccctctcccaggcaggctctctgagggcattctgtagtcccaggcccactggaaaaatgaatctatattttggttcctggaccgaagttcagtcgcagccttctgtggccacagaaagacagcttgtgctgcttgcacaactgagctgctggtgtgtaccccttagcagggtgtctggggacttacgcctttggaattgctcttcattcagaagaggaacacaaaggaagccacccaggaaggaagcacagagctgggggctctggaaacgccctgtgtctctggctacagcaagaccagcccaggagcccaccagcacctgcctctcagctacttgctgaccatttcctgcttctcaagctgcagagaagcttttcattcccacccccacccggaacctccccttgcctaacatttcccctctatggtaacatctctgacttctctacctcctctgtgctcaggtgactccacatcttctgccccagtgtgtccccacctctcccagcctgtatacccagattactttggtgaactgagagctggagtactgttcattcatttattcattcacccactcattcagcagaccttggcattttcacatgatttatctcccactctgattcacatatgtttgaccaaggcactgggcagctgccaatttcccgtcccttctgtagtcccagatgaatggatacagacctctttggggaaggctgcaaggaaggttcacaacatgcatctaagtgttaaaataagtttttccttcaaaaatacatttgacttcctctccatttaaggtctggaaatcaagtgggagatcttgactttaccttggcacttgagacagaactgttggcccagaagtctttagttaaggtcattactaggccatatcttaggggcgtctggcctttttcattcctgggacccacagctcgaggtctggtttccatgccctatcccttacgatgagcgccctattttgttccttctgtctatctctgttgctgagatcagggagcccacgttcacagcagctctttcaagcagcctcccaggcctagagaggaaaatcagcagagcctcgtgaatgtatttctcgtggcaagaagggagctcatcttctgggtcctgccagagggcagtgagggggttgatgggctgggtgcatgccagggacccaatcaagcatttttatcttctgaaatctttgaattcctgcctttcttggatgtttggtcttttgatataatttagcatgggccaacatttggtccagatttgtattagccaagccctcctaaaatagtaataacagtatctggcgatttgagcttttacgtagaatgtagaatctctggtgagtgaacatatcaataaagacaacctgaaccaaaaaaaaaac

SEQ ID NO: 43785 - DNA, 10924 bp, Homo sapiens
  misc_feature (799)..(799): n is a, c, g, or t
  misc_feature (8038)..(8038): n is a, c, g, or t
tgggtatcaggactcagcccatttccccctctggtgctgagaaatggaggccgaaggagtgatctagaagtgttaattgagcccctaatctatgctagttactgggggtgttgggggagacaggagagagatcccacggggttccggcctcccagggactcaggtcactaatggaggtggcttggcttgtctatgtgctgggccaacagccactggcgaggcaaggcgagggtcagtcacggctggtgccaggaagagggctggttctttggctccctggtctcccgcggtctagcccaagctggccagcggttgacctggctcccctggccccggccaggcctcgtggacccctcatatgccacacgggacatgagcaggccggccgggagccgggtcccgggagctccacgaaggggcctgtcctccatgaccaggacacccgctgcgccttcctcccgaggcctcccgggcctctccagacgcggcgctactgcagacaccagggccgccaagggagcggactcggagccggccctggggcgggcacatgggccccggcgccccccggcgtctccaagccgcgctgcccgggtcgggccaggccaggggagggacagcagcaggtgacgacggcccggccaccggctataaataggggcgcgcgtcagccgcgggcgggagcggcggcggcgggcaggggcccgggggccggggcctggaggacaggcgaggcagcggcgagtgcggggccggcggtcggggagggcggtgccatggggtcgcggagggcccccanccggggctggggcgcgggtgggcggtcgggggcggggggcgacggtgaggacgacggccccgtgtggatccccagcccagccagccggagctacctgctcagcgtgcggcccgagaccagcttatcaagcaaccggttgtctcaccccagctctggaaggagcaccttctgctccatcattgctcagctcacagaggagacccagccgctatttgagaccacgctcaagtcccggtctgtgtccgaggacagcgacgtcaggttcacctgcatcgtcacaggatacccagagccagaggtgacctggtacaaggatgatacggagctggaccgctactgtggcttgccaaaatatgagatcactcatcagggcaaccgccacacactgcagctgtacaggtgtcgagaagaagatgccgccatctaccaggcctctgcccagaacagcaagggcattgtgtcctgctcaggggtcctggaggtgggcaccatgactgagtacaagatccaccagcgctggttcgccaagttgaagcgcaaggctgcggcaaagctgcgcgagatcgagcagagctggaagcacgagaaggcggtgcctggggaggtcgacactctgcgcaagctcagccccgaccgcttccagcgaaagcggcgattgagcggggctcaagcgccgggcccctcggtccctaccagggagcctgagggtgggaccctggcggcttggcaggagggagagactgagactgctcagcactcaggtttgggcctgatcaacagttttgcttctggagaagtgaccaccaacggggaggctgcccccgagaatggagaggacggagagcatggcttgctgacatacatctgtgacgccatggagctggggcctcagagagccctcaaagaggagagtggggccaagaagaaaaagaaagatgaggaatccaagcaaggcctgcggaagccagagttagagaaggcagcccaaagccgccgttcttcagaaaactgcatccccagctcagacgagcctgactcctgtgggactcaggggcccgtgggcgtggagcaggttcagacccagcccagaggcagggctgcacgggggcctgggtcctctggcacagatagtaccaggaagccagcctctgctgtgggcactccagacaaggcccagaaggcccctggcccaggcccaggccaggaagtgtatttctccttgaaggacatgtacctggagaacacccaggcagtcaggcctcttggggaagagggaccccagaccctgagtgtccgggcgcctggggagagtcccaaggggaaggcacccctcagggctagaagcgagggggtgcctggcgctcctggccagcccacacactccttgaccccccagccgactaggcctttcaacagaaagagatttgcccctccaaagcccaaaggagaggccaccactgacagcaagcccatttcttctctgagtcaagctccagaatgcggggcccagagcttaggaaaggccccacctcaggcctctgtgcaggtgccgacgccccctgcccggcggagacatggcacccgggacagcacgttgcaggggcaagcaggccacaggactccaggagaggtcctggaatgccagacaaccacggctcctaccatgtcggccagcagcagctctgatgtagcctccattggggttagcacttccggaagtcaaggtatcattgaacccatggatatggaaacccaggaggatgggagaacatctgctaaccagagaactggaagcaagaagaatgtgcaggcagatgggaagatacaagtggatggaaggaccaggggagatggaacacagacagcccagaggacacgtgcagataggaagacgcaggtggatgctgggacacaagaaagcaagaggccacagtcagacaggagtgcacagaagggcatgatgacacagggaagggcagagacacagctagaaacaacacaggcaggtgagaagatacaggaagacaggaaggcccaggcagataagggcacacaggaagacagaaggatgcagggagagaaggggatgcagggagagaaggggacgcagtcagaggggagcgcgcccacagccatggaaggtcagtctgagcaagaggtggcaaccagcctcggcccaccatccagaacccccaaactcccacctacagcgggtcctagagctcctctgaatattgaatgttttgtacagaccccagaagggtcttgtttcccaaaaaaacctggttgcctgcccagatctgaggaggcagtagtaacagcctccaggaaccatgagcaaactgtgctgggtcccctgtcagggaacctcatgctcccagcacagccgccccatgaggggagtgtggagcaggtgggaggagagagatgccgagggccacagtcatcaggcccagtcgaggccaagcaggaggacagcccgttccagtgccccaaggaggagcggccagggggagtgccgtgtatggatcagggtggctgtcctctagctggcctgagccaggaggtacccacgatgccttctcttcctggaactgggctgacagctagcccaaaggcggggccgtgtagcaccccgacttctcagcacgggagcacagccaccttcctgccctctgaggatcaggtcctgatgagttctgccccaacactgcacctggggctggggacccccactcagagtcacccaccagaaaccatggccaccagcagtgagggggcctgcgcccaggtaccagatgtggaggggcggaccccaggtccccggagctgtgaccctggcctcatagattccctgaagaactacctgcttctgctgctgaagctgtccagcacagagacaagtggagcagggggagagtcccaggtgggggcagccaccggaggtctggtgccctcagccactctgacacccactgtggaagtggctgggcttagtccccggacatcgaggcgcatcctggagcgtgtggagaacaaccacctggtgcagagtgcacagaccctgctgctgagcccctgtacctcccgccgcctcaccggcctcctggaccgtgaggtgcaggctggccgccaggcccttgctgctgcccgaggctcctggggtcctggtcccagctccctcactgtccctgccattgtggtagacgaggaggaccctgggctggcctcagaaggagccagtgagggtgaaggagaggtttcccttgaggggcctggcctcctgggggcctctcaggagagcagcatggctggtcgactgggggaggcgggtgggcaggcagcccctggacaggggccctcagcagagagcatagcccaggagccctcccaagaggagaagttcccaggggaggctctgacaggcctcccggcagctacacctgaggaactggctctaggggcccggaggaagagatttctccctaaggtcagagcagcaggagacggggaggcaaccacacctgaagaaagggagagccccacggtttccccccgggggcccaggaaaagcctggtgcctgggtccccagggactccagggcgggagagacgctcccctacgcagggcagaaaggcgagcatgctggaggtgcctcgggcagaggaggagctggcggcaggagacctgggccccagccccaaggccggcggtctggacacagaggtggccctggatgaaggcaagcaggagacactggccaagcccaggaaagccaaagacctgctgaaagccccacaggtgatccggaagattcgggtggagcagtttcctgatgcctccggtagcctgaagctgtggtgccagtttttcaacattcttagtgactcagtcttgacatgggccaaggatcagcgcccagtgggcgaggtgggcaggagcgcaggggatgaggggccggcggccttggccatcgtgcaggcctcccccgtagactgcggtgtgtatcggtgcaccatccacaatgagcacggctcggcctccaccgacttctgcctcagccctgaggtgttgtcaggattcatctccagagaagaaggtgaagttggagaagagattgagatgacccctatggtgtttgctaagggtctggctgactctggctgctggggggacaagctctttgggcgactggtaagcgaggagctccgagggggtggatatgggtgtggccttcggaaggcctcccaggccaaggtcatctacgggctggaacccatcttcgagtcgggccgcacgtgcatcatcaaggtgtccagcctgcttgtgtttgggcccagcagtgagacttctcttgtgggcagaaactacgacgtcaccatccaggggtgcaagatccagaacatgagtcgggagtactgcaaaatcttcgcagcagaagcccgggccgcgcctggctttggggaggtgcctgagatcatcccactgtatctgatctaccggcctgcaaacaatatcccatatgctaccctggaggaagacctgggcaagcccctggagtcttactgttctcgggaatggggctgtgctgaggctccgacagcatctggcagctctgaggccatgcagaaatgccagaccttccaacactggctgtatcagtggacaaatggcagcttccttgtcacagacttggcaggggttgactggaagatgactgatgtgcagattgctaccaaactccgaggataccagggcctcaaggaaagctgcttccctgccctgctggaccggttcgcctcctcccaccagtgcaatgcctactgtgagctgctggggctgacacctctcaagggcccggaggcggcccacccccaagccaaagccaaaggctctaagagtccatctgctggcaggaaaggctcccagctgagtcctcagccccagaagaaaggcctccctagtcctcagggcacccggaagagtgctccaagttccaaggccacccctcaggcctcagagccagtcaccactcagttgttgggacagcctcccacccaagaggagggctccaaggcccagggcatgcggtagcctccgcagaggctgggggcctccacccagcagcagaccaaccaggaagcagcttgaactggatggagactttccaaatatggaactaactggagaaggtgcacgaaggagacaccacttggggacctctctgagcaggctctcgtgaatcagctcgtcatcagatggctttggtgcatggcacatagcccactggcctcttctggtgccactgtcacccagggctcccgggcctcaagcagtccccacctccgagtgcctggcaacctaggccctccttgaagtttacactttgccactgctggaggctcccctgagtcctctgcatgagttctgcaccccaagcccttgccccagcccagtccagcagcagatgttacaatctgagtgaggacatgcaggccaacttttaccctcctgcatttgcctggccctgatctcgcctgtcctcagggatccagacttcctctgctggtctggcctggtgactctcagggtatcttctccttccagctactttcgctcactgatctcagcttatcctgcaactaaccatccttgagcccagatggggctcagggcccttccagagcctgtcatgtccttgtgcagtggcctttgatgtgtgttcacgctcttcccccttcactcactcgcctgcttcccatgctcccttgtaccccctcgccacatccctgtcttggggcccagctgcagcctgctgcctgcccttcatggctctgcacatggccctttgcttgagggctccccactccctgcccaccaatacccaggtgaggaacagaccctctggcctctcaccccacttcagtgctctcttccccaacttctctcgggctctttgctcatgaggtgagagctggtgtgagggttgtgtcagcagctgtagccagagagaggtgttgactctgagagaccttgcactccatactgaaaggaggtggggtcacagtgaatttcacatcccctctcaaccaggagtggagggctaggtcccttccccatggggagtacacttgggtgttctaggagggatgcagtctatccatgcacttgggtggaggggagtctctgtgcctgggaattaggacccctgctccaaccatcgctcttgatcctggggccccagctctgggtcctcatgtatgggctcccaaggacccagcagcctggatccttccagagcatccctcctggaggcctgggatggggtaggtctgcagctagcctactccctttggaatgcaataaaggcagcattgtgtgccctgcttgccctcatctggtgtggttggaggtctgtggagtcaaggtccccctctcccaggcaggctctctgagggcattctgtagtcccaggcccactggaaaaatgaatctatattttggttcctggaccgaagttcagtcgcagccttctgtggccacagaaagacagcttgtgctgcttgcacaactgagctgctggtgtgtaccccttagcagggtgtctggggacttacgcctttggaattgctcttcattcagaagaggaacacaaaggaagccacccaggaaggaagcacagagctgggggctctggaaacgccctgtgtctctggctacagcaagaccagcccaggagcccaccagcacctgcctctcagctacttgctgaccatttcctgcttctcaagctgcagagaagcttttcattcccacccccacccggaacctccccttgcctaacatttcccctctatggtaacatctctgacttctctacctcctctgtgctcaggtgactccacatcttctgccccagtgtgtccccacctctcccagcctgtatacccagattactttggtgaactgagagctggagtactgttcattcatttattcattcacccactcattcagcagacatatactgagtgctactttatgccagaccctgggctggcagctgtttggaggcaaagatgtatgaggccatctcaggagagactacttgttaggattcttgagttttgaccaacagaaatgaacttggaccaacttaagcaaggaaaaagcgttcatgggaaggatgctgggatagctcacaaaaccaaaagaatagctgaacaattaattggccntgggaagggtgggagctggggcaactacgaggcttgcctcccaggagctgctgcggttggcagatcaacaccaacttgccattggttctagtgggtccccttccactcaagattcaaattccaagtgaaagaacctggcctggagctcagggcttcatagagtgggaggggggcagtcttccaaaagatgcggactcttgccacatggaatggtggagtacggaagggtggaaagggtttggtaggtaaaccctgaagatgcttctaacacacgtgctgttctcccatctcacgtatgacgactctcccacaggtaaccaaaaccacatttctctctgcttagggaattcaagatcatatctaacttcgaattccaggggtaatgacacggcttctattctccaaagtccagtgtcattagggataatctccctctttcagttttatcacaattccattttgaaattctacaacctgtagattaactggtaaaattaaccatattcaaccaaaattgtataacccagcaagaatggaagaatgggtaaagtctacagtccatttctagaactggtcatgagaactcatgtttatgatgatggacttttgatctggtggagggacccaaaccttcagttctgaagctcattagtggtcctacctgtgtgacaggcatttactattggactggcagtcccaggacaaactccaggaatccccccatgtccatctctactcctgccctcttttacgtagcagcaatcatattttcccttgatagggttcatcattctagatactccgatgacttctttataatgagcctgaagtggcctggtggctgcctcagcttccagttcagttgaatagctactacgtctttgaggatgtgctccttgctgggggactaaactctccacgccagcccagtcccaaacctaaacctcgggtatgagaaaagcattgagatctagcaatagcagggccatgtccacactgcgtcctatccctgaaggagaaacagcgccaggtatggttgccggctccaagcgcatgctgcctcctgcaggcctgacccagcctctcggggtgttgtttctggtgccatagttgaattttcaacaaaccatttcaccaccctctcaagacagctgctgctggtttgtgggttcctgacaagatgagtgaatgcctgcccatcaacccgttactcttcttttagctgtaaagtgaattctctggttgggtgcagtatgtgaggaggtcacatgatgtttatggcatttgagaattccatggatattgatggcaggagaggcatgatgggttagaaaagcaaatccaaatccagaacaagggcccaaaagggccaagacaaattactgcccctctcagagccacaggtgtagacaggtgaaaacactggacagtgagtgagctacccacacacgacccactggtgccttcagagccttagcctggagcgacagtgtaccgttgataatggaacgcactggccatgccagactttatggctaggcggtcagataacactacgaggggcagcatggccaccaagtgtgccagggccaagtgttcaggctctcccagagcccagtggtgagccagaagggcattttgtacaaggataatggttactttttggccagagcatcacttggctccaaatcctgggttcccgtatcatattttcttgtcaggacttaccgcaagctatgtatggctccgcggtatgccacccatggaaagacacctcatgcaccattgacctgccaggtcacgtggcctgatggcagcgtcggctgcacaaaagactttcccagctgcaatgccttcgcctgctctaggcccaccccaaagctggcagccttctaggtcagttggtaaatgggttagaacaagatgccccaaagtggcataaattgcatggaattaggccttagtggcgagggattcgacatacagtcatttgtcctacattgtgaaggaaacattctgacctcaaacagatccctcaaccccagaactttatagaaggggcagaccttggcattttcacatgatttatctcccactctgattcacatatgtttgaccaaggcactgggcagctgccaatttcccgtcccttctgtagtcccagatgaatggatacagacctctttggggaaggctgcaaggaaggttcacaacatgcatctaagtgttaaaataagtttttccttcaaaaatacatttgacttcctctccatttaaggtctggaaatcaagtgggagatcttgactttaccttggcacttgagacagaactgttggcccagaagtctttagttaaggtcattactaggccatatcttaggggcgtctggcctttttcattcctgggacccacagctcgaggtctggtttccatgccctatcccttacgatgagcgccctattttgttccttctgtctatctctgttgctgagatcagggagcccacgttcacagcagctctttcaagcagcctcccaggcctagagaggaaaatcagcagagcctcgtgaatgtatttctcgtggcaagaagggagctcatcttctgggtcctgccagagggcagtgagggggttgatgggctgggtgcatgccagggacccaatcaagcatttttatcttctgaaatctttgaattcctgcctttcttggatgtttggtcttttgatataatttagcatgggccaacatttggtccagatttgtattagccaagccctcctaaaatagtaataacagtatctggcgatttgagcttttacgtagaatgtagaatctctggtgagtgaacatatcaataaagacaacctgaaccaaaaaaaaaac

SEQ ID NO: 43786 - DNA, 10475 bp, Homo sapiens
  misc_feature (799)..(799): n is a, c, g, or t
  misc_feature (8038)..(8038): n is a, c, g, or t
tgggtatcaggactcagcccatttccccctctggtgctgagaaatggaggccgaaggagtgatctagaagtgttaattgagcccctaatctatgctagttactgggggtgttgggggagacaggagagagatcccacggggttccggcctcccagggactcaggtcactaatggaggtggcttggcttgtctatgtgctgggccaacagccactggcgaggcaaggcgagggtcagtcacggctggtgccaggaagagggctggttctttggctccctggtctcccgcggtctagcccaagctggccagcggttgacctggctcccctggccccggccaggcctcgtggacccctcatatgccacacgggacatgagcaggccggccgggagccgggtcccgggagctccacgaaggggcctgtcctccatgaccaggacacccgctgcgccttcctcccgaggcctcccgggcctctccagacgcggcgctactgcagacaccagggccgccaagggagcggactcggagccggccctggggcgggcacatgggccccggcgccccccggcgtctccaagccgcgctgcccgggtcgggccaggccaggggagggacagcagcaggtgacgacggcccggccaccggctataaataggggcgcgcgtcagccgcgggcgggagcggcggcggcgggcaggggcccgggggccggggcctggaggacaggcgaggcagcggcgagtgcggggccggcggtcggggagggcggtgccatggggtcgcggagggcccccanccggggctggggcgcgggtgggcggtcgggggcggggggcgacggtgaggacgacggccccgtgtggatccccagcccagccagccggagctacctgctcagcgtgcggcccgagaccagcttatcaagcaaccggttgtctcaccccagctctggaaggagcaccttctgctccatcattgctcagctcacagaggagacccagccgctatttgagaccacgctcaagtcccggtctgtgtccgaggacagcgacgtcaggttcacctgcatcgtcacaggatacccagagccagaggtgacctggtacaaggatgatacggagctggaccgctactgtggcttgccaaaatatgagatcactcatcagggcaaccgccacacactgcagctgtacaggtgtcgagaagaagatgccgccatctaccaggcctctgcccagaacagcaagggcattgtgtcctgctcaggggtcctggaggtgggcaccatgactgagtacaagatccaccagcgctggttcgccaagttgaagcgcaaggctgcggcaaagctgcgcgagatcgagcagagctggaagcacgagaaggcggtgcctggggaggtcgacactctgcgcaagctcagccccgaccgcttccagcgaaagcggcgattgagcggggctcaagcgccgggcccctcggtccctaccagggagcctgagggtgggaccctggcggcttggcaggagggagagactgagactgctcagcactcaggtttgggcctgatcaacagttttgcttctggagaagtgaccaccaacggggaggctgcccccgagaatggagaggacggagagcatggcttgctgacatacatctgtgacgccatggagctggggcctcagagagccctcaaagaggagagtggggccaagaagaaaaagaaagatgaggaatccaagcaaggcctgcggaagccagagttagagaaggcagcccaaagccgccgttcttcagaaaactgcatccccagctcagacgagcctgactcctgtgggactcaggggcccgtgggcgtggagcaggttcagacccagcccagaggcagggctgcacgggggcctgggtcctctggcacagatagtaccaggaagccagcctctgctgtgggcactccagacaaggcccagaaggcccctggcccaggcccaggccaggaagtgtatttctccttgaaggacatgtacctggagaacacccaggcagtcaggcctcttggggaagagggaccccagaccctgagtgtccgggcgcctggggagagtcccaaggggaaggcacccctcagggctagaagcgagggggtgcctggcgctcctggccagcccacacactccttgaccccccagccgactaggcctttcaacagaaagagatttgcccctccaaagcccaaaggagaggccaccactgacagcaagcccatttcttctctgagtcaagctccagaatgcggggcccagagcttaggaaaggccccacctcaggcctctgtgcaggtgccgacgccccctgcccggcggagacatggcacccgggacagcacgttgcaggggcaagcaggccacaggactccaggagaggtcctggaatgccagacaaccacggctcctaccatgtcggccagcagcagctctgatgtagcctccattggggttagcacttccggaagtcaaggtatcattgaacccatggatatggaaacccaggaggatgggagaacatctgctaaccagagaactggaagcaagaagaatgtgcaggcagatgggaagatacaagtggatggaaggaccaggggagatggaacacagacagcccagaggacacgtgcagataggaagacgcaggtggatgctgggacacaagaaagcaagaggccacagtcagacaggagtgcacagaagggcatgatgacacagggaagggcagagacacagctagaaacaacacaggcaggtgagaagatacaggaagacaggaaggcccaggcagataagggcacacaggaagacagaaggatgcagggagagaaggggatgcagggagagaaggggacgcagtcagaggggagcgcgcccacagccatggaaggtcagtctgagcaagaggtggcaaccagcctcggcccaccatccagaacccccaaactcccacctacagcgggtcctagagctcctctgaatattgaatgttttgtacagaccccagaagggtcttgtttcccaaaaaaacctggttgcctgcccagatctgaggaggcagtagtaacagcctccaggaaccatgagcaaactgtgctgggtcccctgtcagggaacctcatgctcccagcacagccgccccatgaggggagtgtggagcaggtgggaggagagagatgccgagggccacagtcatcaggcccagtcgaggccaagcaggaggacagcccgttccagtgccccaaggaggagcggccagggggagtgccgtgtatggatcagggtggctgtcctctagctggcctgagccaggaggtacccacgatgccttctcttcctggaactgggctgacagctagcccaaaggcggggccgtgtagcaccccgacttctcagcacgggagcacagccaccttcctgccctctgaggatcaggtcctgatgagttctgccccaacactgcacctggggctggggacccccactcagagtcacccaccagaaaccatggccaccagcagtgagggggcctgcgcccaggtaccagatgtggaggggcggaccccaggtccccggagctgtgaccctggcctcatagattccctgaagaactacctgcttctgctgctgaagctgtccagcacagagacaagtggagcagggggagagtcccaggtgggggcagccaccggaggtctggtgccctcagccactctgacacccactgtggaagtggctgggcttagtccccggacatcgaggcgcatcctggagcgtgtggagaacaaccacctggtgcagagtgcacagaccctgctgctgagcccctgtacctcccgccgcctcaccggcctcctggaccgtgaggtgcaggctggccgccaggcccttgctgctgcccgaggctcctggggtcctggtcccagctccctcactgtccctgccattgtggtagacgaggaggaccctgggctggcctcagaaggagccagtgagggtgaaggagaggtttcccttgaggggcctggcctcctgggggcctctcaggagagcagcatggctggtcgactgggggaggcgggtgggcaggcagcccctggacaggggccctcagcagagagcatagcccaggagccctcccaagaggagaagttcccaggggaggctctgacaggcctcccggcagctacacctgaggaactggctctaggggcccggaggaagagatttctccctaaggtcagagcagcaggagacggggaggcaaccacacctgaagaaagggagagccccacggtttccccccgggggcccaggaaaagcctggtgcctgggtccccagggactccagggcgggagagacgctcccctacgcagggcagaaaggcgagcatgctggaggtgcctcgggcagaggaggagctggcggcaggagacctgggccccagccccaaggccggcggtctggacacagaggtggccctggatgaaggcaagcaggagacactggccaagcccaggaaagccaaagacctgctgaaagccccacaggtgatccggaagattcgggtggagcagtttcctgatgcctccggtagcctgaagctgtggtgccagtttttcaacattcttagtgactcagtcttgacatgggccaaggatcagcgcccagtgggcgaggtgggcaggagcgcaggggatgaggggccggcggccttggccatcgtgcaggcctcccccgtagactgcggtgtgtatcggtgcaccatccacaatgagcacggctcggcctccaccgacttctgcctcagccctgaggtgttgtcaggattcatctccagagaagaaggtgaagttggagaagagattgagatgacccctatggtgtttgctaagggtctggctgactctggctgctggggggacaagctctttgggcgactggtaagcgaggagctccgagggggtggatatgggtgtggccttcggaaggcctcccaggccaaggtcatctacgggctggaacccatcttcgagtcgggccgcacgtgcatcatcaaggtgtccagcctgcttgtgtttgggcccagcagtgagacttctcttgtgggcagaaactacgacgtcaccatccaggggtgcaagatccagaacatgagtcgggagtactgcaaaatcttcgcagcagaagcccgggccgcgcctggctttggggaggtgcctgagatcatcccactgtatctgatctaccggcctgcaaacaatatcccatatgctaccctggaggaagacctgggcaagcccctggagtcttactgttctcgggaatggggctgtgctgaggctccgacagcatctggcagctctgaggccatgcagaaatgccagaccttccaacactggctgtatcagtggacaaatggcagcttccttgtcacagacttggcaggggttgactggaagatgactgatgtgcagattgctaccaaactccgaggataccagggcctcaaggaaagctgcttccctgccctgctggaccggttcgcctcctcccaccagtgcaatgcctactgtgagctgctggggctgacacctctcaagggcccggaggcggcccacccccaagccaaagccaaaggctctaagagtccatctgctggcaggaaaggctcccagctgagtcctcagccccagaagaaaggcctccctagtcctcagggcacccggaagagtgctccaagttccaaggccacccctcaggcctcagagccagtcaccactcagttgttgggacagcctcccacccaagaggagggctccaaggcccagggcatgcggtagcctccgcagaggctgggggcctccacccagcagcagaccaaccaggaagcagcttgaactggatggagactttccaaatatggaactaactggagaaggtgcacgaaggagacaccacttggggacctctctgagcaggctctcgtgaatcagctcgtcatcagatggctttggtgcatggcacatagcccactggcctcttctggtgccactgtcacccagggctcccgggcctcaagcagtccccacctccgagtgcctggcaacctaggccctccttgaagtttacactttgccactgctggaggctcccctgagtcctctgcatgagttctgcaccccaagcccttgccccagcccagtccagcagcagatgttacaatctgagtgaggacatgcaggccaacttttaccctcctgcatttgcctggccctgatctcgcctgtcctcagggatccagacttcctctgctggtctggcctggtgactctcagggtatcttctccttccagctactttcgctcactgatctcagcttatcctgcaactaaccatccttgagcccagatggggctcagggcccttccagagcctgtcatgtccttgtgcagtggcctttgatgtgtgttcacgctcttcccccttcactcactcgcctgcttcccatgctcccttgtaccccctcgccacatccctgtcttggggcccagctgcagcctgctgcctgcccttcatggctctgcacatggccctttgcttgagggctccccactccctgcccaccaatacccaggtgaggaacagaccctctggcctctcaccccacttcagtgctctcttccccaacttctctcgggctctttgctcatgaggtgagagctggtgtgagggttgtgtcagcagctgtagccagagagaggtgttgactctgagagaccttgcactccatactgaaaggaggtggggtcacagtgaatttcacatcccctctcaaccaggagtggagggctaggtcccttccccatggggagtacacttgggtgttctaggagggatgcagtctatccatgcacttgggtggaggggagtctctgtgcctgggaattaggacccctgctccaaccatcgctcttgatcctggggccccagctctgggtcctcatgtatgggctcccaaggacccagcagcctggatccttccagagcatccctcctggaggcctgggatggggtaggtctgcagctagcctactccctttggaatgcaataaaggcagcattgtgtgccctgcttgccctcatctggtgtggttggaggtctgtggagtcaaggtccccctctcccaggcaggctctctgagggcattctgtagtcccaggcccactggaaaaatgaatctatattttggttcctggaccgaagttcagtcgcagccttctgtggccacagaaagacagcttgtgctgcttgcacaactgagctgctggtgtgtaccccttagcagggtgtctggggacttacgcctttggaattgctcttcattcagaagaggaacacaaaggaagccacccaggaaggaagcacagagctgggggctctggaaacgccctgtgtctctggctacagcaagaccagcccaggagcccaccagcacctgcctctcagctacttgctgaccatttcctgcttctcaagctgcagagaagcttttcattcccacccccacccggaacctccccttgcctaacatttcccctctatggtaacatctctgacttctctacctcctctgtgctcaggtgactccacatcttctgccccagtgtgtccccacctctcccagcctgtatacccagattactttggtgaactgagagctggagtactgttcattcatttattcattcacccactcattcagcagacatatactgagtgctactttatgccagaccctgggctggcagctgtttggaggcaaagatgtatgaggccatctcaggagagactacttgttaggattcttgagttttgaccaacagaaatgaacttggaccaacttaagcaaggaaaaagcgttcatgggaaggatgctgggatagctcacaaaaccaaaagaatagctgaacaattaattggccntgggaagggtgggagctggggcaactacgaggcttgcctcccaggagctgctgcggttggcagatcaacaccaacttgccattggttctagtgggtccccttccactcaagattcaaattccaagtgaaagaacctggcctggagctcagggcttcatagagtgggaggggggcagtcttccaaaagatgcggactcttgccacatggaatggtggagtacggaagggtggaaagggtttggtaggtaaaccctgaagatgcttctaacacacgtgctgttctcccatctcacgtatgacgactctcccacaggtaaccaaaaccacatttctctctgcttagggaattcaagatcatatctaacttcgaattccaggggtaatgacacggcttctattctccaaagtccagtgtcattagggataatctccctctttcagttttatcacaattccattttgaaattctacaacctgtagattaactggtaaaattaaccatattcaaccaaaattgtataacccagcaagaatggaagaatgggtaaagtctacagtccatttctagaactggtcatgagaactcatgtttatgatgatggacttttgatctggtggagggacccaaaccttcagttctgaagctcattagtggtcctacctgtgtgacaggcatttactattggactggcagtcccaggacaaactccaggaatccccccatgtccatctctactcctgccctcttttacgtagcagcaatcatattttcccttgatagggttcatcattctagatactccgatgacttctttataatgagcctgaagtggcctggtggctgcctcagcttccagttcagttgaatagctactacgtctttgaggatgtgctccttgctgggggactaaactctccacgccagcccagtcccaaacctaaacctcgggtatgagaaaagcattgagatctagcaatagcagggccatgtccacactgcgtcctatccctgaaggagaaacagcgccaggtatggttgccggctccaagcgcatgctgcctcctgcaggcctgacccagcctctcggggtgttgtttctggtgccatagttgaattttcaacaaaccatttcaccaccctctcaagacagctgctgctggtttgtgggttcctgacaagatgagtgaatgcctgcccatcaacccgttactcttcttttagctgtaaagtgaattctctggttgggttcccgtatcatattttcttgtcaggacttaccgcaagctatgtatggctccgcggtatgccacccatggaaagacacctcatgcaccattgacctgccaggtcacgtggcctgatggcagcgtcggctgcacaaaagactttcccagctgcaatgccttcgcctgctctaggcccaccccaaagctggcagccttctaggtcagttggtaaatgggttagaacaagatgccccaaagtggcataaattgcatggaattaggccttagtggcgagggattcgacatacagtcatttgtcctacattgtgaaggaaacattctgacctcaaacagatccctcaaccccagaactttatagaaggggcagaccttggcattttcacatgatttatctcccactctgattcacatatgtttgaccaaggcactgggcagctgccaatttcccgtcccttctgtagtcccagatgaatggatacagacctctttggggaaggctgcaaggaaggttcacaacatgcatctaagtgttaaaataagtttttccttcaaaaatacatttgacttcctctccatttaaggtctggaaatcaagtgggagatcttgactttaccttggcacttgagacagaactgttggcccagaagtctttagttaaggtcattactaggccatatcttaggggcgtctggcctttttcattcctgggacccacagctcgaggtctggtttccatgccctatcccttacgatgagcgccctattttgttccttctgtctatctctgttgctgagatcagggagcccacgttcacagcagctctttcaagcagcctcccaggcctagagaggaaaatcagcagagcctcgtgaatgtatttctcgtggcaagaagggagctcatcttctgggtcctgccagagggcagtgagggggttgatgggctgggtgcatgccagggacccaatcaagcatttttatcttctgaaatctttgaattcctgcctttcttggatgtttggtcttttgatataatttagcatgggccaacatttggtccagatttgtattagccaagccctcctaaaatagtaataacagtatctggcgatttgagcttttacgtagaatgtagaatctctggtgagtgaacatatcaataaagacaacctgaaccaaaaaaaaaac

SEQ ID NO: 43787 - DNA, 10860 bp, Homo sapiens
  misc_feature (799)..(799): n is a, c, g, or t
  misc_feature (7974)..(7974): n is a, c, g, or t
tgggtatcaggactcagcccatttccccctctggtgctgagaaatggaggccgaaggagtgatctagaagtgttaattgagcccctaatctatgctagttactgggggtgttgggggagacaggagagagatcccacggggttccggcctcccagggactcaggtcactaatggaggtggcttggcttgtctatgtgctgggccaacagccactggcgaggcaaggcgagggtcagtcacggctggtgccaggaagagggctggttctttggctccctggtctcccgcggtctagcccaagctggccagcggttgacctggctcccctggccccggccaggcctcgtggacccctcatatgccacacgggacatgagcaggccggccgggagccgggtcccgggagctccacgaaggggcctgtcctccatgaccaggacacccgctgcgccttcctcccgaggcctcccgggcctctccagacgcggcgctactgcagacaccagggccgccaagggagcggactcggagccggccctggggcgggcacatgggccccggcgccccccggcgtctccaagccgcgctgcccgggtcgggccaggccaggggagggacagcagcaggtgacgacggcccggccaccggctataaataggggcgcgcgtcagccgcgggcgggagcggcggcggcgggcaggggcccgggggccggggcctggaggacaggcgaggcagcggcgagtgcggggccggcggtcggggagggcggtgccatggggtcgcggagggcccccanccggggctggggcgcgggtgggcggtcgggggcggggggcgacggtgaggacgacggccccgtgtggatccccagcccagccagccggagctacctgctcagcgtgcggcccgagaccagcttatcaagcaaccggttgtctcaccccagctctggaaggagcaccttctgctccatcattgctcagctcacagaggagacccagccgctatttgagaccacgctcaagtcccggtctgtgtccgaggacagcgacgtcaggttcacctgcatcgtcacaggatacccagagccagaggtgacctggtacaaggatgatacggagctggaccgctactgtggcttgccaaaatatgagatcactcatcagggcaaccgccacacactgcagctgtacaggtgtcgagaagaagatgccgccatctaccaggcctctgcccagaacagcaagggcattgtgtcctgctcaggggtcctggaggtgggcaccatgactgagtacaagatccaccagcgctggttcgccaagttgaagcgcaaggctgcggcaaagctgcgcgagatcgagcagagctggaagcacgagaaggcggtgcctggggaggtcgacactctgcgcaagctcagccccgaccgcttccagcgaaagcggcgattgagcggggctcaagcgccgggcccctcggtccctaccagggagcctgagggtgggaccctggcggcttggcaggagggagagactgagactgctcagcactcaggtttgggcctgatcaacagttttgcttctggagaagtgaccaccaacggggaggctgcccccgagaatggagaggacggagagcatggcttgctgacatacatctgtgacgccatggagctggggcctcagagagccctcaaagaggagagtggggccaagaagaaaaagaaagatgaggaatccaagcaaggcctgcggaagccagagttagagaaggcagcccaaagccgccgttcttcagaaaactgcatccccagctcagacgagcctgactcctgtgggactcaggggcccgtgggcgtggagcaggttcagacccagcccagaggcagggctgcacgggggcctgggtcctctggcacagatagtaccaggaagccagcctctgctgtgggcactccagacaaggcccagaaggcccctggcccaggcccaggccaggaagtgtatttctccttgaaggacatgtacctggagaacacccaggcagtcaggcctcttggggaagagggaccccagaccctgagtgtccgggcgcctggggagagtcccaaggggaaggcacccctcagggctagaagcgagggggtgcctggcgctcctggccagcccacacactccttgaccccccagccgactaggcctttcaacagaaagagatttgcccctccaaagcccaaaggagaggccaccactgacagcaagcccatttcttctctgagtcaagctccagaatgcggggcccagagcttaggaaaggccccacctcaggcctctgtgcaggtgccgacgccccctgcccggcggagacatggcacccgggacagcacgttgcaggggcaagcaggccacaggactccaggagaggtcctggaatgccagacaaccacggctcctaccatgtcggccagcagcagctctgatgtagcctccattggggttagcacttccggaagtcaaggtatcattgaacccatggatatggaaacccaggaggatgggagaacatctgctaaccagagaactggaagcaagaagaatgtgcaggcagatgggaagatacaagtggatggaaggaccaggggagatggaacacagacagcccagaggacacgtgcagataggaagacgcaggtggatgctgggacacaagaaagcaagaggccacagtcagacaggagtgcacagaagggcatgatgacacagggaagggcagagacacagctagaaacaacacaggcaggtgagaagatacaggaagacaggaaggcccaggcagataagggcacacaggaagacagaaggatgcagggagagaaggggatgcagggagagaaggggacgcagtcagaggggagcgcgcccacagccatggaaggtcagtctgagcaagaggtggcaaccagcctcggcccaccatccagaacccccaaactcccacctacagcgggtcctagagctcctctgaatattgaatgttttgtacagaccccagaagggtcttgtttcccaaaaaaacctggttgcctgcccagatctgaggaggcagtagtaacagcctccaggaaccatgagcaaactgtgctgggtcccctgtcagggaacctcatgctcccagcacagccgccccatgaggggagtgtggagcaggtgggaggagagagatgccgagggccacagtcatcaggcccagtcgaggccaagcaggaggacagcccgttccagtgccccaaggaggagcggccagggggagtgccgtgtatggatcagggtggctgtcctctagctggcctgagccaggaggtacccacgatgccttctcttcctggaactgggctgacagctagcccaaaggcggggccgtgtagcaccccgacttctcagcacgggagcacagccaccttcctgccctctgaggatcaggtcctgatgagttctgccccaacactgcacctggggctggggacccccactcagagtcacccaccagaaaccatggccaccagcagtgagggggcctgcgcccaggtaccagatgtggaggggcggaccccaggtccccggagctgtgaccctggcctcatagattccctgaagaactacctgcttctgctgctgaagctgtccagcacagagacaagtggagcagggggagagtcccaggtgggggcagccaccggaggtctggtgccctcagccactctgacacccactgtggaagtggctgggcttagtccccggacatcgaggcgcatcctggagcgtgtggagaacaaccacctggtgcagagtgcacagaccctgctgctgagcccctgtacctcccgccgcctcaccggcctcctggaccgtgaggtgcaggctggccgccaggcccttgctgctgcccgaggctcctggggtcctggtcccagctccctcactgtccctgccattgtggtagacgaggaggaccctgggctggcctcagaaggagccagtgagggtgaaggagaggtttcccttgaggggcctggcctcctgggggcctctcaggagagcagcatggctggtcgactgggggaggcgggtgggcaggcagcccctggacaggggccctcagcagagagcatagcccaggagccctcccaagaggagaagttcccaggggaggctctgacaggcctcccggcagctacacctgaggaactggctctaggggcccggaggaagagatttctccctaaggtcagagcagcaggagacggggaggcaaccacacctgaagaaagggagagccccacggtttccccccgggggcccaggaaaagcctggtgcctgggtccccagggactccagggcgggagagacgctcccctacgcagggcagaaaggcgagcatgctggaggtgcctcgggcagaggaggagctggcggcaggagacctgggccccagccccaaggccggcggtctggacacagaggtggccctggatgaaggcaagcaggagacactggccaagcccaggaaagccaaagacctgctgaaagccccacaggtgatccggaagattcgggtggagcagtttcctgatgcctccggtagcctgaagctgtggtgccagtttttcaacattcttagtgactcagtcttgacatgggccaaggatcagcgcccagtgggcgaggtgggcaggagcgcaggggatgaggggccggcggccttggccatcgtgcaggcctcccccgtagactgcggtgtgtatcggtgcaccatccacaatgagcacggctcggcctccaccgacttctgcctcagccctgaggtgttgtcaggattcatctccagagaagaaggtgaagttggagaagagattgagatgacccctatggtgtttgctaagggtctggctgactctggctgctggggggacaagctctttgggcgactggtaagcgaggagctccgagggggtggatatgggtgtggccttcggaaggcctcccaggccaaggtcatctacgggctggaacccatcttcgagtcgggccgcacgtgcatcatcaaggtgtccagcctgcttgtgtttgggcccagcagtgagacttctcttgtgggcagaaactacgacgtcaccatccaggggtgcaagatccagaacatgagtcgggagtactgcaaaatcttcgcagcagaagcccgggccgcgcctggctttggggaggtgcctgagatcatcccactgtatctgatctaccggcctgcaaacaatatcccatatgctaccctggaggaagacctgggcaagcccctggagtcttactgttctcgggaatggggctgtgctgaggctccgacagcatctggcagctctgaggccatgcagaaatgccagaccttccaacactggctgtatcagtggacaaatggcagcttccttgtcacagacttggcaggggttgactggaagatgactgatgtgcagattgctaccaaactccgaggataccagggcctcaaggaaagctgcttccctgccctgctggaccggttcgcctcctcccaccagtgcaatgcctactgtgagctgctggggctgacacctctcaagggcccggaggcggcccacccccaagccaaagccaaaggctctaagagtccatctgctggcaggaaaggctcccagctgagtcctcagccccagaagaaaggcctccctagtcctcagggcacccggaagagtgctccaagttccaaggccacccctcaggcctcagagccagtcaccactcagttgttgggacagcctcccacccaagaggagggctccaaggcccagggcatgcggtagcctccgcagaggctgggggcctccacccagcagcagaccaaccaggaagcagcttgaactggatggagactttccaaatatggaactaactggagaaggtgcacgaaggagacaccacttggggacctctctgagcaggctctcgtgaatcagctcgtcatcagatggctttggtgcatggcacatagcccactggcctcttctggtgccactgtcacccagggctcccgggcctcaagcagtccccacctccgagtgcctggcaacctaggccctccttgaagtttacactttgccactgctggaggctcccctgagtcctctgcatgagttctgcaccccaagcccttgccccagcccagtccagcagcagatgttacaatctgagtgaggacatgcaggccaacttttaccctcctgcatttgcctggccctgatctcgcctgtcctcagggatccagacttcctctgctggtctggcctggtgactctcagggtatcttctccttccagctactttcgctcactgatctcagcttatcctgcaactaaccatccttgagcccagatggggctcagggcccttccagagcctgtcatgtccttgtgcagtggcctttgatgtgtgttcacgctcttcccccttcactcactcgcctgcttcccatgctcccttgtaccccctcgccacatccctgtcttggggcccagctgcagcctgctgcctgcccttcatggctctgcacatggccctttgcttgagggctccccactccctgcccaccaatacccaggtgaggaacagaccctctggcctctcaccccacttcagtgctctcttccccaacttctctcgggctctttgctcatgaggtgagagctggtgtgagggttgtgtcagcagctgtagccagagagaggtgttgactctgagagaccttgcactccatactgaaaggaggtggggtcacagtgaatttcacatcccctctcaaccaggagtggagggctaggtcccttccccatggggagtacacttgggtgttctaggagggatgcagtctatccatgcacttgggtggaggggagtctctgtgcctgggaattaggacccctgctccaaccatcgctcttgatcctggggccccagctctgggtcctcatgtatgggctcccaaggacccagcagcctggatccttccagagcatccctcctggaggcctgggatggggtaggtctgcagctagcctactccctttggaatgcaataaaggcagcattgtgtgccctgcttgccctcatctggtgtggttggaggtctgtggagtcaaggtccccctctcccaggcaggctctctgagggcattctgtagtcccaggcccactggaaaaatgaatctatattttggttcctggaccgaagttcagtcgcagccttctgtggccacagaaagacagcttgtgctgcttgcacaactgagctgctggtgtgtaccccttagcagggtgtctggggacttacgcctttggaattgctcttcattcagaagaggaacacaaaggaagccacccaggaaggaagcaccagcacctgcctctcagctacttgctgaccatttcctgcttctcaagctgcagagaagcttttcattcccacccccacccggaacctccccttgcctaacatttcccctctatggtaacatctctgacttctctacctcctctgtgctcaggtgactccacatcttctgccccagtgtgtccccacctctcccagcctgtatacccagattactttggtgaactgagagctggagtactgttcattcatttattcattcacccactcattcagcagacatatactgagtgctactttatgccagaccctgggctggcagctgtttggaggcaaagatgtatgaggccatctcaggagagactacttgttaggattcttgagttttgaccaacagaaatgaacttggaccaacttaagcaaggaaaaagcgttcatgggaaggatgctgggatagctcacaaaaccaaaagaatagctgaacaattaattggccntgggaagggtgggagctggggcaactacgaggcttgcctcccaggagctgctgcggttggcagatcaacaccaacttgccattggttctagtgggtccccttccactcaagattcaaattccaagtgaaagaacctggcctggagctcagggcttcatagagtgggaggggggcagtcttccaaaagatgcggactcttgccacatggaatggtggagtacggaagggtggaaagggtttggtaggtaaaccctgaagatgcttctaacacacgtgctgttctcccatctcacgtatgacgactctcccacaggtaaccaaaaccacatttctctctgcttagggaattcaagatcatatctaacttcgaattccaggggtaatgacacggcttctattctccaaagtccagtgtcattagggataatctccctctttcagttttatcacaattccattttgaaattctacaacctgtagattaactggtaaaattaaccatattcaaccaaaattgtataacccagcaagaatggaagaatgggtaaagtctacagtccatttctagaactggtcatgagaactcatgtttatgatgatggacttttgatctggtggagggacccaaaccttcagttctgaagctcattagtggtcctacctgtgtgacaggcatttactattggactggcagtcccaggacaaactccaggaatccccccatgtccatctctactcctgccctcttttacgtagcagcaatcatattttcccttgatagggttcatcattctagatactccgatgacttctttataatgagcctgaagtggcctggtggctgcctcagcttccagttcagttgaatagctactacgtctttgaggatgtgctccttgctgggggactaaactctccacgccagcccagtcccaaacctaaacctcgggtatgagaaaagcattgagatctagcaatagcagggccatgtccacactgcgtcctatccctgaaggagaaacagcgccaggtatggttgccggctccaagcgcatgctgcctcctgcaggcctgacccagcctctcggggtgttgtttctggtgccatagttgaattttcaacaaaccatttcaccaccctctcaagacagctgctgctggtttgtgggttcctgacaagatgagtgaatgcctgcccatcaacccgttactcttcttttagctgtaaagtgaattctctggttgggtgcagtatgtgaggaggtcacatgatgtttatggcatttgagaattccatggatattgatggcaggagaggcatgatgggttagaaaagcaaatccaaatccagaacaagggcccaaaagggccaagacaaattactgcccctctcagagccacaggtgtagacaggtgaaaacactggacagtgagtgagctacccacacacgacccactggtgccttcagagccttagcctggagcgacagtgtaccgttgataatggaacgcactggccatgccagactttatggctaggcggtcagataacactacgaggggcagcatggccaccaagtgtgccagggccaagtgttcaggctctcccagagcccagtggtgagccagaagggcattttgtacaaggataatggttactttttggccagagcatcacttggctccaaatcctgggttcccgtatcatattttcttgtcaggacttaccgcaagctatgtatggctccgcggtatgccacccatggaaagacacctcatgcaccattgacctgccaggtcacgtggcctgatggcagcgtcggctgcacaaaagactttcccagctgcaatgccttcgcctgctctaggcccaccccaaagctggcagccttctaggtcagttggtaaatgggttagaacaagatgccccaaagtggcataaattgcatggaattaggccttagtggcgagggattcgacatacagtcatttgtcctacattgtgaaggaaacattctgacctcaaacagatccctcaaccccagaactttatagaaggggcagaccttggcattttcacatgatttatctcccactctgattcacatatgtttgaccaaggcactgggcagctgccaatttcccgtcccttctgtagtcccagatgaatggatacagacctctttggggaaggctgcaaggaaggttcacaacatgcatctaagtgttaaaataagtttttccttcaaaaatacatttgacttcctctccatttaaggtctggaaatcaagtgggagatcttgactttaccttggcacttgagacagaactgttggcccagaagtctttagttaaggtcattactaggccatatcttaggggcgtctggcctttttcattcctgggacccacagctcgaggtctggtttccatgccctatcccttacgatgagcgccctattttgttccttctgtctatctctgttgctgagatcagggagcccacgttcacagcagctctttcaagcagcctcccaggcctagagaggaaaatcagcagagcctcgtgaatgtatttctcgtggcaagaagggagctcatcttctgggtcctgccagagggcagtgagggggttgatgggctgggtgcatgccagggacccaatcaagcatttttatcttctgaaatctttgaattcctgcctttcttggatgtttggtcttttgatataatttagcatgggccaacatttggtccagatttgtattagccaagccctcctaaaatagtaataacagtatctggcgatttgagcttttacgtagaatgtagaatctctggtgagtgaacatatcaataaagacaacctgaaccaaaaaaaaaac

SEQ ID NO: 43788 - DNA, 6302 bp, Homo sapiens
  misc_feature (799)..(799): n is a, c, g, or t
  misc_feature (3416)..(3416): n is a, c, g, or t
tgggtatcaggactcagcccatttccccctctggtgctgagaaatggaggccgaaggagtgatctagaagtgttaattgagcccctaatctatgctagttactgggggtgttgggggagacaggagagagatcccacggggttccggcctcccagggactcaggtcactaatggaggtggcttggcttgtctatgtgctgggccaacagccactggcgaggcaaggcgagggtcagtcacggctggtgccaggaagagggctggttctttggctccctggtctcccgcggtctagcccaagctggccagcggttgacctggctcccctggccccggccaggcctcgtggacccctcatatgccacacgggacatgagcaggccggccgggagccgggtcccgggagctccacgaaggggcctgtcctccatgaccaggacacccgctgcgccttcctcccgaggcctcccgggcctctccagacgcggcgctactgcagacaccagggccgccaagggagcggactcggagccggccctggggcgggcacatgggccccggcgccccccggcgtctccaagccgcgctgcccgggtcgggccaggccaggggagggacagcagcaggtgacgacggcccggccaccggctataaataggggcgcgcgtcagccgcgggcgggagcggcggcggcgggcaggggcccgggggccggggcctggaggacaggcgaggcagcggcgagtgcggggccggcggtcggggagggcggtgccatggggtcgcggagggcccccanccggggctggggcgcgggtgggcggtcgggggcggggggcgacggtgaggacgacggccccgtgtggatccccagcccagccagccggagctacctgctcagcgtgcggcccgagaccagcttatcaagcaaccggttgtctcaccccagctctggaaggagcaccttctgctccatcattgctcagctcacagaggagacccagccgctatttgagaccacgctcaagtcccggtctgtgtccgaggacagcgacgtcaggttcacctgcatcgtcacaggatacccagagccagaggtgacctggtacaaggatgatacggagctggaccgctactgtggcttgccaaaatatgagatcactcatcagggcaaccgccacacactgcagctgtacaggtgtcgagaagaagatgccgccatctaccaggcctctgcccagaacagcaagggcattgtgtcctgctcaggggtcctggaggtgggcaccatgactgagtacaagatccaccagcgctggttcgccaagttgaagcgcaaggctgcggcaaagctgcgcgagatcgagcagagctggaagcacgagaaggcggtgcctggggaggtcgacactctgcgcaagctcagccccgaccgcttccagcgaaagcggcgattgagcggggctcaagcgccgggcccctcggtccctaccagggagcctgagggtgggaccctggcggcttggcaggagggagagactgagactgctcagcactcaggtttgggcctgatcaacagttttgcttctggagaagtgaccaccaacggggaggctgcccccgagaatggagaggacggagagcatggcttgctgacatacatctgtgacgccatggagctggggcctcagagagccctcaaagaggagagtggggccaagaagaaaaagaaagatgaggaatccaagcaaggcctgcggaagccagagttagagaaggcagcccaaagccgccgttcttcagaaaactgcatccccagctcagacgagcctgactcctgtgggactcaggggcccgtgggcgtggagcaggttcagacccagcccagaggcagggctgcacgggggcctgggtcctctggcacagatagtaccaggaagccagcctctgctgtgggcactccagacaaggcccagaaggcccctggcccaggcccaggccaggaagtgtatttctccttgaaggacatgtacctggagaacacccaggcagtcaggcctcttggggaagagggaccccagaccctgagtgtccgggcgcctggggagagtcccaaggggaaggcacccctcagggctagaagcgagggggtgcctggcgctcctggccagcccacacactccttgaccccccagccgactaggcctttcaacagaaagagatttgcccctccaaagcccaaaggagaggccaccactgacagcaagcccatttcttctctgagtcaagctccagaatgcggggcccagagcttaggaaaggccccacctcaggcctctgtgcaggtgccgacgccccctgcccggcggagacatggcacccgggacagcacgttgcaggggcaagcaggccacaggactccaggagaggtcctggaatgccagacaaccacggctcctaccatgtcggccagcagcagctctgatgtagcctccattggggttagcacttccggaagtcaaggtatcattgaacccatggatatggaaacccaggaggatgggagaacatctgctaaccagagaactggaagcaagaagaatgtgcaggcagatgggaagatacaagtggatggaaggaccaggggagatggaacacagacagcccagaggacacgtgcagataggaagacgcaggtggatgctgggacacaagaaagcaagaggccacagtcagacaggagtgcacagaagggcatgatgacacagggaagggcagagacacagctagaaacaacacaggcaggtgagaagatacaggaagacaggaaggcccaggcagataagggcacacaggaagacagaaggatgcagggagagaaggggatgcagggagagaaggggacgcagtcagaggggagcgcgcccacagccatggaaggtcagtctgagcaagaggtggcaaccagcctcggcccaccatccagaacccccaaactcccacctacagcgggtcctagagctcctctgaatattgaatgttttgtacagaccccagaagggtcttgtttcccaaaaaaacctggttgcctgcccagtgtgtccccacctctcccagcctgtatacccagattactttggtgaactgagagctggagtactgttcattcatttattcattcacccactcattcagcagacatatactgagtgctactttatgccagaccctgggctggcagctgtttggaggcaaagatgtatgaggccatctcaggagagactacttgttaggattcttgagttttgaccaacagaaatgaacttggaccaacttaagcaaggaaaaagcgttcatgggaaggatgctgggatagctcacaaaaccaaaagaatagctgaacaattaattggccntgggaagggtgggagctggggcaactacgaggcttgcctcccaggagctgctgcggttggcagatcaacaccaacttgccattggttctagtgggtccccttccactcaagattcaaattccaagtgaaagaacctggcctggagctcagggcttcatagagtgggaggggggcagtcttccaaaagatgcggactcttgccacatggaatggtggagtacggaagggtggaaagggtttggtaggtaaaccctgaagatgcttctaacacacgtgctgttctcccatctcacgtatgacgactctcccacaggtaaccaaaaccacatttctctctgcttagggaattcaagatcatatctaacttcgaattccaggggtaatgacacggcttctattctccaaagtccagtgtcattagggataatctccctctttcagttttatcacaattccattttgaaattctacaacctgtagattaactggtaaaattaaccatattcaaccaaaattgtataacccagcaagaatggaagaatgggtaaagtctacagtccatttctagaactggtcatgagaactcatgtttatgatgatggacttttgatctggtggagggacccaaaccttcagttctgaagctcattagtggtcctacctgtgtgacaggcatttactattggactggcagtcccaggacaaactccaggaatccccccatgtccatctctactcctgccctcttttacgtagcagcaatcatattttcccttgatagggttcatcattctagatactccgatgacttctttataatgagcctgaagtggcctggtggctgcctcagcttccagttcagttgaatagctactacgtctttgaggatgtgctccttgctgggggactaaactctccacgccagcccagtcccaaacctaaacctcgggtatgagaaaagcattgagatctagcaatagcagggccatgtccacactgcgtcctatccctgaaggagaaacagcgccaggtatggttgccggctccaagcgcatgctgcctcctgcaggcctgacccagcctctcggggtgttgtttctggtgccatagttgaattttcaacaaaccatttcaccaccctctcaagacagctgctgctggtttgtgggttcctgacaagatgagtgaatgcctgcccatcaacccgttactcttcttttagctgtaaagtgaattctctggttgggtgcagtatgtgaggaggtcacatgatgtttatggcatttgagaattccatggatattgatggcaggagaggcatgatgggttagaaaagcaaatccaaatccagaacaagggcccaaaagggccaagacaaattactgcccctctcagagccacaggtgtagacaggtgaaaacactggacagtgagtgagctacccacacacgacccactggtgccttcagagccttagcctggagcgacagtgtaccgttgataatggaacgcactggccatgccagactttatggctaggcggtcagataacactacgaggggcagcatggccaccaagtgtgccagggccaagtgttcaggctctcccagagcccagtggtgagccagaagggcattttgtacaaggataatggttactttttggccagagcatcacttggctccaaatcctgggttcccgtatcatattttcttgtcaggacttaccgcaagctatgtatggctccgcggtatgccacccatggaaagacacctcatgcaccattgacctgccaggtcacgtggcctgatggcagcgtcggctgcacaaaagactttcccagctgcaatgccttcgcctgctctaggcccaccccaaagctggcagccttctaggtcagttggtaaatgggttagaacaagatgccccaaagtggcataaattgcatggaattaggccttagtggcgagggattcgacatacagtcatttgtcctacattgtgaaggaaacattctgacctcaaacagatccctcaaccccagaactttatagaaggggcagaccttggcattttcacatgatttatctcccactctgattcacatatgtttgaccaaggcactgggcagctgccaatttcccgtcccttctgtagtcccagatgaatggatacagacctctttggggaaggctgcaaggaaggttcacaacatgcatctaagtgttaaaataagtttttccttcaaaaatacatttgacttcctctccatttaaggtctggaaatcaagtgggagatcttgactttaccttggcacttgagacagaactgttggcccagaagtctttagttaaggtcattactaggccatatcttaggggcgtctggcctttttcattcctgggacccacagctcgaggtctggtttccatgccctatcccttacgatgagcgccctattttgttccttctgtctatctctgttgctgagatcagggagcccacgttcacagcagctctttcaagcagcctcccaggcctagagaggaaaatcagcagagcctcgtgaatgtatttctcgtggcaagaagggagctcatcttctgggtcctgccagagggcagtgagggggttgatgggctgggtgcatgccagggacccaatcaagcatttttatcttctgaaatctttgaattcctgcctttcttggatgtttggtcttttgatataatttagcatgggccaacatttggtccagatttgtattagccaagccctcctaaaatagtaataacagtatctggcgatttgagcttttacgtagaatgtagaatctctggtgagtgaacatatcaataaagacaacctgaaccaaaaaaaaaac

SEQ ID NO: 43789 - DNA, 7186 bp, Homo sapiens
  misc_feature (799)..(799): n is a, c, g, or t
tgggtatcaggactcagcccatttccccctctggtgctgagaaatggaggccgaaggagtgatctagaagtgttaattgagcccctaatctatgctagttactgggggtgttgggggagacaggagagagatcccacggggttccggcctcccagggactcaggtcactaatggaggtggcttggcttgtctatgtgctgggccaacagccactggcgaggcaaggcgagggtcagtcacggctggtgccaggaagagggctggttctttggctccctggtctcccgcggtctagcccaagctggccagcggttgacctggctcccctggccccggccaggcctcgtggacccctcatatgccacacgggacatgagcaggccggccgggagccgggtcccgggagctccacgaaggggcctgtcctccatgaccaggacacccgctgcgccttcctcccgaggcctcccgggcctctccagacgcggcgctactgcagacaccagggccgccaagggagcggactcggagccggccctggggcgggcacatgggccccggcgccccccggcgtctccaagccgcgctgcccgggtcgggccaggccaggggagggacagcagcaggtgacgacggcccggccaccggctataaataggggcgcgcgtcagccgcgggcgggagcggcggcggcgggcaggggcccgggggccggggcctggaggacaggcgaggcagcggcgagtgcggggccggcggtcggggagggcggtgccatggggtcgcggagggcccccanccggggctggggcgcgggtgggcggtcgggggcggggggcgacggtgaggacgacggccccgtgtggatccccagcccagccagccggagctacctgctcagcgtgcggcccgagaccagcttatcaagcaaccggttgtctcaccccagctctggaaggagcaccttctgctccatcattgctcagctcacagaggagacccagccgctatttgagaccacgctcaagtcccggtctgtgtccgaggacagcgacgtcaggttcacctgcatcgtcacaggatacccagagccagaggtgacctggtacaaggatgatacggagctggaccgctactgtggcttgccaaaatatgagatcactcatcagggcaaccgccacacactgcagctgtacaggtgtcgagaagaagatgccgccatctaccaggcctctgcccagaacagcaagggcattgtgtcctgctcaggggtcctggaggtgggcaccatgactgagtacaagatccaccagcgctggttcgccaagttgaagcgcaaggctgcggcaaagctgcgcgagatcgagcagagctggaagcacgagaaggcggtgcctggggaggtcgacactctgcgcaagctcagccccgaccgcttccagcgaaagcggcgattgagcggggctcaagcgccgggcccctcggtccctaccagggagcctgagggtgggaccctggcggcttggcaggagggagagactgagactgctcagcactcaggtttgggcctgatcaacagttttgcttctggagaagtgaccaccaacggggaggctgcccccgagaatggagaggacggagagcatggcttgctgacatacatctgtgacgccatggagctggggcctcagagagccctcaaagaggagagtggggccaagaagaaaaagaaagatgaggaatccaagcaaggcctgcggaagccagagttagagaaggcagcccaaagccgccgttcttcagaaaactgcatccccagctcagacgagcctgactcctgtgggactcaggggcccgtgggcgtggagcaggttcagacccagcccagaggcagggctgcacgggggcctgggtcctctggcacagatagtaccaggaagccagcctctgctgtgggcactccagacaaggcccagaaggcccctggcccaggcccaggccaggaagtgtatttctccttgaaggacatgtacctggagaacacccaggcagtcaggcctcttggggaagagggaccccagaccctgagtgtccgggcgcctggggagagtcccaaggggaaggcacccctcagggctagaagcgagggggtgcctggcgctcctggccagcccacacactccttgaccccccagccgactaggcctttcaacagaaagagatttgcccctccaaagcccaaaggagaggccaccactgacagcaagcccatttcttctctgagtcaagctccagaatgcggggcccagagcttaggaaaggccccacctcaggcctctgtgcaggtgccgacgccccctgcccggcggagacatggcacccgggacagcacgttgcaggggcaagcaggccacaggactccaggagaggtcctggaatgccagacaaccacggctcctaccatgtcggccagcagcagctctgatgtagcctccattggggttagcacttccggaagtcaaggtatcattgaacccatggatatggaaacccaggaggatgggagaacatctgctaaccagagaactggaagcaagaagaatgtgcaggcagatgggaagatacaagtggatggaaggaccaggggagatggaacacagacagcccagaggacacgtgcagataggaagacgcaggtggatgctgggacacaagaaagcaagaggccacagtcagacaggagtgcacagaagggcatgatgacacagggaagggcagagacacagctagaaacaacacaggcaggtgagaagatacaggaagacaggaaggcccaggcagataagggcacacaggaagacagaaggatgcagggagagaaggggatgcagggagagaaggggacgcagtcagaggggagcgcgcccacagccatggaaggtcagtctgagcaagaggtggcaaccagcctcggcccaccatccagaacccccaaactcccacctacagcgggtcctagagctcctctgaatattgaatgttttgtacagaccccagaagggtcttgtttcccaaaaaaacctggttgcctgcccagatctgaggaggcagtagtaacagcctccaggaaccatgagcaaactgtgctgggtcccctgtcagggaacctcatgctcccagcacagccgccccatgaggggagtgtggagcaggtgggaggagagagatgccgagggccacagtcatcaggcccagtcgaggccaagcaggaggacagcccgttccagtgccccaaggaggagcggccagggggagtgccgtgtatggatcagggtggctgtcctctagctggcctgagccaggaggtacccacgatgccttctcttcctggaactgggctgacagctagcccaaaggcggggccgtgtagcaccccgacttctcagcacgggagcacagccaccttcctgccctctgaggatcaggtcctgatgagttctgccccaacactgcacctggggctggggacccccactcagagtcacccaccagaaaccatggccaccagcagtgagggggcctgcgcccaggtaccagatgtggaggggcggaccccaggtccccggagctgtgaccctggcctcatagattccctgaagaactacctgcttctgctgctgaagctgtccagcacagagacaagtggagcagggggagagtcccaggtgggggcagccaccggaggtctggtgccctcagccactctgacacccactgtggaagtggctgggcttagtccccggacatcgaggcgcatcctggagcgtgtggagaacaaccacctggtgcagagtgcacagaccctgctgctgagcccctgtacctcccgccgcctcaccggcctcctggaccgtgaggtgcaggctggccgccaggcccttgctgctgcccgaggctcctggggtcctggtcccagctccctcactgtccctgccattgtggtagacgaggaggaccctgggctggcctcagaaggagccagtgagggtgaaggagaggtttcccttgaggggcctggcctcctgggggcctctcaggagagcagcatggctggtcgactgggggaggcgggtgggcaggcagcccctggacaggggccctcagcagagagcatagcccaggagccctcccaagaggagaagttcccaggggaggctctgacaggcctcccggcagctacacctgaggaactggctctaggggcccggaggaagagatttctccctaaggtcagagcagcaggagacggggaggcaaccacacctgaagaaagggagagccccacggtttccccccgggggcccaggaaaagcctggtgcctgggtccccagggactccagggcgggagagacgctcccctacgcagggcagaaaggcgagcatgctggaggtgcctcgggcagaggaggagctggcggcaggagacctgggccccagccccaaggccggcggtctggacacagaggtggccctggatgaaggcaagcaggagacactggccaagcccaggaaagccaaagacctgctgaaagccccacaggtgatccggaagattcgggtggagcagtttcctgatgcctccggtagcctgaagctgtggtgccagtttttcaacattcttagtgactcagtcttgacatgggccaaggatcagcgcccagtgggcgaggtgggcaggagcgcaggggatgaggggccggcggccttggccatcgtgcaggcctcccccgtagactgcggtgtgtatcggtgcaccatccacaatgagcacggctcggcctccaccgacttctgcctcagccctgaggtgttgtcaggattcatctccagagaagaaggtgaagttggagaagagattgagatgacccctatggtgtttgctaagggtctggctgactctggctgctggggggacaagctctttgggcgactggtaagcgaggagctccgagggggtggatatgggtgtggccttcggaaggcctcccaggccaaggtcatctacgggctggaacccatcttcgagtcgggccgcacgtgcatcatcaaggtgtccagcctgcttgtgtttgggcccagcagtgagacttctcttgtgggcagaaactacgacgtcaccatccaggggtgcaagatccagaacatgagtcgggagtactgcaaaatcttcgcagcagaagcccgggccgcgcctggctttggggaggtgcctgagatcatcccactgtatctgatctaccggcctgcaaacaatatcccatatgctaccctggaggaagacctgggcaagcccctggagtcttactgttctcgggaatggggctgtgctgaggctccgacagcatctggcagctctgaggccatgcagaaatgccagaccttccaacactggctgtatcagtggacaaatggcagcttccttgtcacagacttggcaggggttgactggaagatgactgatgtgcagattgctaccaaactccgaggataccagggcctcaaggaaagctgcttccctgccctgctggaccggttcgcctcctcccaccagtgcaatgcctactgtgagctgctggggctgacacctctcaagggcccggaggcggcccacccccaagccaaagccaaaggctctaagagtccatctgctggcaggaaaggctcccagctgagtcctcagccccagaagaaaggcctccctagtcctcagggcacccggaagagtgctccaagttccaaggccacccctcaggcctcagagccagtcaccactcagttgttgggacagcctcccacccaagaggagggctccaaggcccagggcatgcggtagcctccgcagaggctgggggcctccacccagcagcagaccaaccaggaagcagcttgaactggatggagactttccaaatatggaactaactggagaaggtgcacgaaggagacaccacttggggacctctctgagcaggctctcgtgaatcagctcgtcatcagatggctttggtgcatggcacatagcccactggcctcttctggtgccactgtcacccagggctcccgggcctcaagcagtccccacctccgagtgcctggcaacctaggccctccttgaagtttacactttgccactgctggaggctcccctgagtcctctgcatgagttctgcaccccaagcccttgccccagcccagtccagcagcagatgttacaatctgagtgaggacatgcaggccaacttttaccctcctgcatttgcctggccctgatctcgcctgtcctcagggatccagacttcctctgctggtctggcctggtgactctcagggtatcttctccttccagctactttcgctcactgatctcagcttatcctgcaactaaccatccttgagcccagatggggctcagggcccttccagagcctgtcatgtccttgtgcagtggcctttgatgtgtgttcacgctcttcccccttcactcactcgcctgcttcccatgctcccttgtaccccctcgccacatccctgtcttggggcccagctgcagcctgctgcctgcccttcatggctctgcacatggccctttgcttgagggctccccactccctgcccaccaatacccaggtgaggaacagaccctctggcctctcaccccacttcagtgctctcttccccaacttctctcgggctctttgctcatgaggtgagagctggtgtgagggttgtgtcagcagctgtagccagagagaggtgttgactctgagagaccttgcactccatactgaaaggaggtggggtcacagtgaatttcacatcccctctcaaccaggagtggagggctaggtcccttccccatggggagtacacttgggtgttctaggagggatgcagtctatccatgcacttgggtggaggggagtctctgtgcctgggaattaggacccctgctccaaccatcgctcttgatcctggggccccagctctgggtcctcatgtatgggctcccaaggacccagcagcctggatccttccagagcatccctcctggaggcctgggatggggtaggtctgcagctagcctactccctttggaatgcaataaaggcagcattgtgtgccctg

SEQ ID NO: 43790 - DNA, 515 bp, Homo sapiens
gctctttgggcgactggtaagcgaggagctccgagggggtggatatgggtgtggccttcggaaggcctcccaggccaaggtcatctacgggctggaacccatcttcgagtcgggccgcacgtgcatcatcaaggtgtccagcctgcttgtgtttgggcccagcagtgagacttctcttgtgggcagaaactacgacgtcaccatccaggtactatgtcccatcttcacaccccattcttttattctctcaccccctcccctttcccagcccaggtcctgttaggatgcccagtatcgaggcagaaggcatctcagtctcaaccttatgaggctcctaggaggaccttgtggaaagcctgagatgcagcccagaattcagatgcttggcctcagagagcttgagagcttcaaaacgacttgggccatagttttcaaactctatgtttgcagcagaaaccttccccctgccccatacataatctctcatggaagccttgtttatatgtgagataaaa

SEQ ID NO: 43791 - DNA, 721 bp, Homo sapiens
agtgtatacagaaaagaagatatattttatttaataaacatccagtgttgaccttttgacaaataattaccattttatattaaatcaagtgagaatcttggaatttttccccctcattttaactcactatgttttacaaacccttccccctcaccttgaccccctcttcctgttgaaaatagtccctctccttccttgtttccttttctttagataatttttgaaaccttttattaagtatttcaagtgggaaggtaagtaatgttagatccttagttcttggagctcagagtctagtgatagataaaaatatgtaaacaaatagttacaacattttgcaacaaagcttagaaagaaacatgatagaagacagtttctgctaatatgacttcaactcaaaattttacggtccagaactgtcttatgatgggcaaagacggaagaaagtggggactgtatcattagttgagaaggtttacagagcactattcccttcagtcagtgttactgagtacctgttctgccttattcactgtgccacatgctggggacagcaggtgaacaacgttggccctcagttactccacagcctattcagggctgtagaaagacaaatagcaatcgcagtgcagccttagagatgtacatgggatacagcaagaatgtggtagccatagtggtgttgccagaagtaattctggagatttaaatctgagtataa

SEQ ID NO: 43792 - DNA, 336 bp, Homo sapiens
ttggctttttaaggtatatagtaatgtcatctacaaatgaataaaatttgttctacttttctgatgtttgtatgtattttgctttctgatctgactgcatagctagaatttacaacacaatattagcttattgtgaagaaagcaagcacattctaatatgtgcatgactttaatagacatgagtttagagttttaatttttaaggtagtatttgatgtatcttgataaatcatgtttatcatgtataaggtttatctgtatccatgttccatggatagaaggtttttctctaatttcttagtgttactgatttcttatttgatgaataggttttta

SEQ ID NO: 43793 - DNA, 1720 bp, Homo sapiens
gcaggatccatttatcattcattggtaaaggatatattccttgttcttaccaagtgtacatttaactcttgctgacatgttcagtgtattttattacttttaatgctgtcttaaaatgaacattctttaaagttggacaggaaggtggcatttcttatttattaacatttttaactttaaacatattgtgactcatctagaccttttaataagacgatcaacttcacacttagggaaaaaattaaaatgtgatggccacttctaataattcaggtagttataagggatctggaagaaatccagtctttatgaatatactattagttgggcattaaaaaatcagtatatattttaactttttgtgacatgctaacacattttcagaataattattgcatagtagaatttattactccagaacagaaagaccttacttcatttcaaatgaagttaattaatttacatttctgggtaaaaactggttctataaattaagtagagtagcttctttatgataaagacaattttctgaaaagtgaacaattctgttaaaagaactttattgatgtgtagatttcgcactttatttctgagactgcgttcatgtagttgttccccaatgtttgagtactaagagaacttgagaaaattacttcataaacatatggaaactgaaaatggactctctttgtgacaaagatattcaacagaaaatattgaccctgcattgcaaaacacaggttcgggttccctaagtcccacagtgtaatgattacaaatatcctagtgtccggtctagaaagactttctagggagaagactagtggaattttctaaaggtttagttttagcttttataacttaaatttggccctgttacggtctttttaatttggaaccataagggtatctcccctcccttcaggaataacttattggaaaactgaaaagaatcactgaatggaatgttcattttatggcagttgttttaagttttaaaatacacagaggaaaatattgtggaaggacctctttgttgctttcccttctaagttgtcttcttcttcttcttcttcttcttcttcttcttctttggtccttaagtgaaataaagactctaaaactaatttgtatattatcagccagagatgcggatggcagtcgagccaaatcgcatggctttcagatcaggtattctgcacattcattccaaggtcatagatttttaaaaggacctggatttgaagagatggcaaatgatgagccatcagaaaacttaatttggaaaacatgtatgtagccagtgtggatattgtggcctctctcaagacacattgacactgtagacttcattcagtccagtgtgagtattttggagtaggttggatgtagattttgtttttatcgttgatttgtaccgacagaaatagacatttcatcatgtaaaattcctgttattctggaaaaacctattgttttgatcttcttgttttctgacttggaagtatcctttcaaaaaaactcttaagatatctaggtctaaaaagcacttcatgagatgctaaagctgacccactggttgaaaatgttgaccctatcctgttatttaaatgtgaacatttattgtacattcagtgagttatagtgttaatagtcttgtgctatgcagcaggtgtaaaaattaataaatatattttttaataaacatgtttgtatgtgt

SEQ ID NO: 43794 - DNA, 413 bp, Homo sapiens
tcgctcccagatacagggatgagtaactggaagtgggcataaaagagtaggggcgtgaattaagaacgcactggatctgcgcggcagagggaggagagagcgaaatttggcggatttggagcagaaatgcacagcggtattgatgagtagatccttggattcagaggttggctgaaacgcaccatgcctgcttccatcttttgctctgtaaagttgtgaattgctcatgcctatagggaggaaggatggcacatgggattccttctcaaggcaaagttaccataacggtggatgagtacagctcaaaccccacccaggcattcacgcactacaacatcaaccagagcagattccagcctccacatgtacatatgtaagtatcgcttatgaacttaacaaaattagcaatcaag

SEQ ID NO: 43795 - DNA, 2371 bp, Homo sapiens
tcgctcccagatacagggatgagtaactggaagtgggcataaaagagtaggggcgtgaattaagaacgcactggatctgcgcggcagagggaggagagagcgaaatttggcggatttggagcagaaatgcacagcggtattgatgagtagatccttggattcagaggttggctgaaacgcaccatgcctgcttccatcttttgctctgtaaagttgtgaattgctcatgcctatagggaggaaggatggcacatgggattccttctcaaggcaaagttaccataacggtggatgagtacagctcaaaccccacccaggcattcacgcactacaacatcaaccagagcagattccagcctccacatgtacatatggtcgaccccatcccatatgacactccaaaaccagcgggccacacgcggtttgtctgcatctcagacacacactccagaacagatggtatccagatgccttatggggacatccttctccacacaggcgatttcaccgagctgggactgccctcagaggttaagaagtttaatgactggttaggaaacctgccatatgaatataaaatagtgattgctgggaatcatgaactgacatttgataaggaattcatggcagaccttgttaaacaggactactaccgtttcccctctgtgtccaaattgaaaccagaggactttgacaatgttcagtccctcctgacaaacagtatttacttacaagattcggaggtaacagtgaagggattcaggatatacggtgcaccttggaccccgtggtttaatggatggggctttaacctacccagaggtcagtctctgctggacaagtggaacctcatccctgagggcattgacatactcatgacacatggacctcctctaggttttcgagactgggttccaaaggagcttcaaagagtgggctgtgtggagctgttaaacacggttcagaggcgagtccggcccaagctccatgtgtttggtggaatccatgaaggttatggcatcatgaccgacggttacacaacgtacatcaatgcctcgacgtgtacagtcagctttcaaccgaccaaccctccaattatatttgaccttccaaacccacagggttcctgaagctctaaatgccctattggaatgtgagggaaggtctataaactgccatttttctaattataaacttacattctcttacttatttacaaaccctgtgagttctttttgtaaattgttggaacacaaatgatgctagaggttgtgcttcttattttattttattttaaatggggcatccatttgaaatcagaggaacattgtgaatttgtaaaatgacttctgttttctcaaaggccatgccattgtaaattgttagtgttcgccaaaggacagccaagctttcttttaaaaagtgataaaagtcttattttaatatgctttaagctgaaagaaaaaaaaataagaaacaggcagtgttttaaaaaccaacacagatttgcacaactgtttaagagtattgtttgaaatattttaattttcaatgttttgttgttgttgttttcttggtaatgcttcttttttgcagatgtggtcccaatttatagcaatcttctcaacagaagtaggcatggaaaagacttcttttcatactctcactataaagaaagctgcattgagaagaaaatggctgtcatttaaaggatggtttaactagtgagattcctattgtggttatacaaggtctcattgtttgtttgtttcttttaaattatttcagctttaaaaatacagaaatggaatctgtcaagagcaggtatttcatacggttaaaaaaatgaacatgcagactccttttcaatatgggtttatatatataagtattttttgtgtattatgactacgttaggagtttattattgtcaaggacagtacaactgcaaagggatgctgtatagcagcacatcagaagtcggaaggaactgacacattctctcagagctcaaggtcttaaagagcttgagttaaatctaggtacagttacaggcatgtatagacttaaatggatgcaatggaagctaactaaaataaggcttagttgtcctttctatttaaataccccaagttgtcttcttacttcctctcccctctcccattttgcactgtgtgtcgatgcaatcttcgctagcacaaaatattgtcgctaatagtcatttctgttttcccattgtaaatgctgttgagctttattctattttatgttactttgttaatgaaatttaggaaagcagttgtttctttaaatttattgtgatattctatatctagcggcctttatatgcaaataaaattgcaagattttt

SEQ ID NO: 43796 - DNA, 2309 bp, Homo sapiens
agcagtgccagcaggagcggcggccgaggaggtgacggaggtggcaacgggggactgagcgaaaatgcacagcggtattgatgagtagatccttggattcagaggttggctgaaacgcaccatgcctgcttccatcttttgctctgtaaagttgtgaattgctcatgcctatagggaggaaggatggcacatgggattccttctcaaggcaaagttaccataacggtggatgagtacagctcaaaccccacccaggcattcacgcactacaacatcaaccagagcagattccagcctccacatgtacatatggtcgaccccatcccatatgacactccaaaaccagcgggccacacgcggtttgtctgcatctcagacacacactccagaacagatggtatccagatgccttatggggacatccttctccacacaggcgatttcaccgagctgggactgccctcagaggttaagaagtttaatgactggttaggaaacctgccatatgaatataaaatagtgattgctgggaatcatgaactgacatttgataaggaattcatggcagaccttgttaaacaggactactaccgtttcccctctgtgtccaaattgaaaccagaggactttgacaatgttcagtccctcctgacaaacagtatttacttacaagattcggaggtaacagtgaagggattcaggatatacggtgcaccttggaccccgtggtttaatggatggggctttaacctacccagaggtcagtctctgctggacaagtggaacctcatccctgagggcattgacatactcatgacacatggacctcctctaggttttcgagactgggttccaaaggagcttcaaagagtgggctgtgtggagctgttaaacacggttcagaggcgagtccggcccaagctccatgtgtttggtggaatccatgaaggttatggcatcatgaccgacggttacacaacgtacatcaatgcctcgacgtgtacagtcagctttcaaccgaccaaccctccaattatatttgaccttccaaacccacagggttcctgaagctctaaatgccctattggaatgtgagggaaggtctataaactgccatttttctaattataaacttacattctcttacttatttacaaaccctgtgagttctttttgtaaattgttggaacacaaatgatgctagaggttgtgcttcttattttattttattttaaatggggcatccatttgaaatcagaggaacattgtgaatttgtaaaatgacttctgttttctcaaaggccatgccattgtaaattgttagtgttcgccaaaggacagccaagctttcttttaaaaagtgataaaagtcttattttaatatgctttaagctgaaagaaaaaaaaataagaaacaggcagtgttttaaaaaccaacacagatttgcacaactgtttaagagtattgtttgaaatattttaattttcaatgttttgttgttgttgttttcttggtaatgcttcttttttgcagatgtggtcccaatttatagcaatcttctcaacagaagtaggcatggaaaagacttcttttcatactctcactataaagaaagctgcattgagaagaaaatggctgtcatttaaaggatggtttaactagtgagattcctattgtggttatacaaggtctcattgtttgtttgtttcttttaaattatttcagctttaaaaatacagaaatggaatctgtcaagagcaggtatttcatacggttaaaaaaatgaacatgcagactccttttcaatatgggtttatatatataagtattttttgtgtattatgactacgttaggagtttattattgtcaaggacagtacaactgcaaagggatgctgtatagcagcacatcagaagtcggaaggaactgacacattctctcagagctcaaggtcttaaagagcttgagttaaatctaggtacagttacaggcatgtatagacttaaatggatgcaatggaagctaactaaaataaggcttagttgtcctttctatttaaataccccaagttgtcttcttacttcctctcccctctcccattttgcactgtgtgtcgatgcaatcttcgctagcacaaaatattgtcgctaatagtcatttctgttttcccattgtaaatgctgttgagctttattctattttatgttactttgttaatgaaatttaggaaagcagttgtttctttaaatttattgtgatattctatatctagcggcctttatatgcaaataaaattgcaagattttt

SEQ ID NO: 43797 - DNA, 2642 bp, Homo sapiens
cgccggggagcgcgcacggagcggcgcctcggccgcctgcttcctggagctgtgctcctttgaccccagtggcagtccctgtcactgcaccgctcgctctccctccggctcgccgcgccctcgctccctctcctcgccccctcgctcgctctctccccagatcgaggctgctcgggtcctttctccccccgcctccctctagcgccgcgccccctggcccccagccccagcctgcggcgggacctccggggtcgaaggttctggcccgctcgcgcccctcgccgcccccgcgcgcccccagcgctcctccagccggctcgggccgctcggctatggatcgcctgctcgccgggcgctgaaggcatccccgggatccggagcgcagcccgggaaagaaatgcacagcggtattgatgagtagatccttggattcagaggttggctgaaacgcaccatgcctgcttccatcttttgctctgtaaagttgtgaattgctcatgcctatagggaggaaggatggcacatgggattccttctcaaggcaaagttaccataacggtggatgagtacagctcaaaccccacccaggcattcacgcactacaacatcaaccagagcagattccagcctccacatgtacatatggtcgaccccatcccatatgacactccaaaaccagcgggccacacgcggtttgtctgcatctcagacacacactccagaacagatggtatccagatgccttatggggacatccttctccacacaggcgatttcaccgagctgggactgccctcagaggttaagaagtttaatgactggttaggaaacctgccatatgaatataaaatagtgattgctgggaatcatgaactgacatttgataaggaattcatggcagaccttgttaaacaggactactaccgtttcccctctgtgtccaaattgaaaccagaggactttgacaatgttcagtccctcctgacaaacagtatttacttacaagattcggaggtaacagtgaagggattcaggatatacggtgcaccttggaccccgtggtttaatggatggggctttaacctacccagaggtcagtctctgctggacaagtggaacctcatccctgagggcattgacatactcatgacacatggacctcctctaggttttcgagactgggttccaaaggagcttcaaagagtgggctgtgtggagctgttaaacacggttcagaggcgagtccggcccaagctccatgtgtttggtggaatccatgaaggttatggcatcatgaccgacggttacacaacgtacatcaatgcctcgacgtgtacagtcagctttcaaccgaccaaccctccaattatatttgaccttccaaacccacagggttcctgaagctctaaatgccctattggaatgtgagggaaggtctataaactgccatttttctaattataaacttacattctcttacttatttacaaaccctgtgagttctttttgtaaattgttggaacacaaatgatgctagaggttgtgcttcttattttattttattttaaatggggcatccatttgaaatcagaggaacattgtgaatttgtaaaatgacttctgttttctcaaaggccatgccattgtaaattgttagtgttcgccaaaggacagccaagctttcttttaaaaagtgataaaagtcttattttaatatgctttaagctgaaagaaaaaaaaataagaaacaggcagtgttttaaaaaccaacacagatttgcacaactgtttaagagtattgtttgaaatattttaattttcaatgttttgttgttgttgttttcttggtaatgcttcttttttgcagatgtggtcccaatttatagcaatcttctcaacagaagtaggcatggaaaagacttcttttcatactctcactataaagaaagctgcattgagaagaaaatggctgtcatttaaaggatggtttaactagtgagattcctattgtggttatacaaggtctcattgtttgtttgtttcttttaaattatttcagctttaaaaatacagaaatggaatctgtcaagagcaggtatttcatacggttaaaaaaatgaacatgcagactccttttcaatatgggtttatatatataagtattttttgtgtattatgactacgttaggagtttattattgtcaaggacagtacaactgcaaagggatgctgtatagcagcacatcagaagtcggaaggaactgacacattctctcagagctcaaggtcttaaagagcttgagttaaatctaggtacagttacaggcatgtatagacttaaatggatgcaatggaagctaactaaaataaggcttagttgtcctttctatttaaataccccaagttgtcttcttacttcctctcccctctcccattttgcactgtgtgtcgatgcaatcttcgctagcacaaaatattgtcgctaatagtcatttctgttttcccattgtaaatgctgttgagctttattctattttatgttactttgttaatgaaatttaggaaagcagttgtttctttaaatttattgtgatattctatatctagcggcctttatatgcaaataaaattgcaagattttt

SEQ ID NO: 43798 - DNA, 2529 bp, Homo sapiens
tcgctcccagatacagggatgagtaactggaagtgggcataaaagagtaggggcgtgaattaagaacgcactggatctgcgcggcagagggaggagagagcgaaatttggcggatttggagcagaaatgcacagcggtattgatgagtagatccttggattcagaggttggctgaaacgcaccatgcctgcttccatcttttgctctgtaaagttgtgaattgctcatgcctatagggaggaaggatggcacatgggattccttctcaaggcaaagttaccataacggtggatgagtacagctcaaaccccacccaggcattcacgcactacaacatcaaccagagcagattccagcctccacatgtacatatggtcgaccccatcccatatgacactccaaaaccagcgggccacacgcggtttgtctgcatctcagacacacactccagaacagatggtatccagatgccttatggggacatccttctccacacaggcgatttcaccgagctgggactgccctcagaggttaagaagtttaatgactggttaggaaacctgccatatgaatataaaatagtgattgctgggaatcatgaactgacatttgataaggaattcatggcagaccttgttaaacaggactactaccgtttcccctctgtgtccaaattgaaaccagaggactttgacaatgttcagtccctcctgacaaacagtatttacttacaagattcggaggtaacagtgaagggattcaggatatacggtgcaccttggaccccgtggtttaatggatggggctttaacctacccagaggtcagtctctgctggacaagtggaacctcatccctgagggcattgacatactcatgacacatggacctcctctaggttttcgagactgggttccaaaggagcttcaaagagtgggctgtgtggagctgttaaacacggttcagaggcgagtccggcccaagctccatgtgtttggtggaatccatgaaggttatggcatcatgaccgacggttacacaacgtacatcaatgcctcgacgtgtacagtcagctttcaaccgaccaaccctccaattatatttgaccttccaaacccacagggttcctgaagctctaaatgccctattggaatgtgagggaaggtctataaactgccatttttctaattataaacttacattctcttacttatttacaaaccctgtgagttctttttgtaaattgttggaacacaaatgatgctagaggttgtgcttcttattttattttattttaaatggggcatccatttgaaatcagaggaacattgtgaatttgtaaaatgacttctgttttctcaaaggccatgccattgtaaattgttagtgttcgccaaaggacagccaagctttcttttaaaaagtgataaaagtcttattttaatatgctttaagctgaaagaaaaaaaaataagaaacaggcagtgttttaaaaaccaacacagatttgcacaactgtttaagagtattgtttgaaatattttaattttcaatgttttgttgttgttgttttcttggtaatgcttcttttttgcagatgtggtcccaatttatagcaatcttctcaacagaagtaggcatggaaaagacttcttttcatactctcactataaagaaagctgcattgagaagaaaatggctgtcatttaaaggatggtttaactagtgagattcctattgtggttatacaaggtctcattgtttgtttgtttcttttaaattatttcagctttaaaaatacagaaatggaatctgtcaagagcaggtatttcatacggttaaaaaaatgaacatgcagactccttttcaatatgggtttatatatataagtattttttgtgtattatgactacgttaggagtttattattgtcaaggacagtacaactgcaaagggatgctgtatagcagcacatcagaagtcggaaggaactgacacattctctcagagctcaaggtcttaaagagcttgagttaaatctaggtacagttacaggcatgtatagacttaaatggatgcaatggaagctaactaaaataaggcttagttgtcctttctatttaaataccccaagttgtcttcttacttcctctcccctctcccattttgcactgtgtgtcgatgcaatcttcgctagcacaaaatattgtcgctaatagtcatttctgttttcccattgtaaatgctgttgagctttattctattttatgttactttgttaatgaaatttaggaaagcagttgtttctttaaatttattgtgatattctatatctagcggcctttatatgcaaataaaattgcaagatttttaaattcgtgctgtttagagggttggatggtggaggatggtagtttcgtcctggggaaggagggatttattcatatgcaacatcagtaatgcctttcagaagaattagaataagtgatttttttccctaattttcaataaatttttattacccaccatt

SEQ ID NO: 43799 - DNA, 2618 bp, Homo sapiens
cgccggggagcgcgcacggagcggcgcctcggccgcctgcttcctggagctgtgctcctttgaccccagtggcagtccctgtcactgcaccgctcgctctccctccggctcgccgcgccctcgctccctctcctcgccccctcgctcgctctctccccagatcgaggctgctcgggtcctttctccccccgcctccctctagcgccgcgccccctggcccccagccccagcctgcggcgggacctccggggtcgaaggttctggcccgctcgcgcccctcgccgcccccgcgcgcccccagcgctcctccagccggctcgggccgctcggctatggatcgcctgctcgccgggcgctgaaggcatccccgggatccggagcgcagcccgggaaagaaatgcacagcggtattgatgagtagatccttggattcagaggttggctgaaacgcaccatgcctgcttccatcttttgctctgtaaagttgtgaattgctcatgcctatagggaggaaggatggcacatgggattccttctcaaggcaaagttaccataacggtggatgagtacagctcaaaccccacccaggcattcacgcactacaacatcaaccagagcagattccagcctccacatgtacatatgaaacctgccatatgaatataaaatagtgattgctgggaatcatgaactgacatttgataaggaattcatggcagaccttgttaaacaggactactaccgtttcccctctgtgtccaaattgaaaccagaggactttgacaatgttcagtccctcctgacaaacagtatttacttacaagattcggaggtaacagtgaagggattcaggatatacggtgcaccttggaccccgtggtttaatggatggggctttaacctacccagaggtcagtctctgctggacaagtggaacctcatccctgagggcattgacatactcatgacacatggacctcctctaggttttcgagactgggttccaaaggagcttcaaagagtgggctgtgtggagctgttaaacacggttcagaggcgagtccggcccaagctccatgtgtttggtggaatccatgaaggttatggcatcatgaccgacggttacacaacgtacatcaatgcctcgacgtgtacagtcagctttcaaccgaccaaccctccaattatatttgaccttccaaacccacagggttcctgaagctctaaatgccctattggaatgtgagggaaggtctataaactgccatttttctaattataaacttacattctcttacttatttacaaaccctgtgagttctttttgtaaattgttggaacacaaatgatgctagaggttgtgcttcttattttattttattttaaatggggcatccatttgaaatcagaggaacattgtgaatttgtaaaatgacttctgttttctcaaaggccatgccattgtaaattgttagtgttcgccaaaggacagccaagctttcttttaaaaagtgataaaagtcttattttaatatgctttaagctgaaagaaaaaaaaataagaaacaggcagtgttttaaaaaccaacacagatttgcacaactgtttaagagtattgtttgaaatattttaattttcaatgttttgttgttgttgttttcttggtaatgcttcttttttgcagatgtggtcccaatttatagcaatcttctcaacagaagtaggcatggaaaagacttcttttcatactctcactataaagaaagctgcattgagaagaaaatggctgtcatttaaaggatggtttaactagtgagattcctattgtggttatacaaggtctcattgtttgtttgtttcttttaaattatttcagctttaaaaatacagaaatggaatctgtcaagagcaggtatttcatacggttaaaaaaatgaacatgcagactccttttcaatatgggtttatatatataagtattttttgtgtattatgactacgttaggagtttattattgtcaaggacagtacaactgcaaagggatgctgtatagcagcacatcagaagtcggaaggaactgacacattctctcagagctcaaggtcttaaagagcttgagttaaatctaggtacagttacaggcatgtatagacttaaatggatgcaatggaagctaactaaaataaggcttagttgtcctttctatttaaataccccaagttgtcttcttacttcctctcccctctcccattttgcactgtgtgtcgatgcaatcttcgctagcacaaaatattgtcgctaatagtcatttctgttttcccattgtaaatgctgttgagctttattctattttatgttactttgttaatgaaatttaggaaagcagttgtttctttaaatttattgtgatattctatatctagcggcctttatatgcaaataaaattgcaagatttttaaattcgtgctgtttagagggttggatggtggaggatggtagtttcgtcctggggaaggagggatttattcatatgcaacatcagtaatgcctttcagaagaattagaataagtgatttttttccctaattttcaataaatttttattacccaccatt

SEQ ID NO: 43800 - DNA, 1888 bp, Homo sapiens
gatgatcttgattgtgtcatggtcaacccagaattatgacagtctgggaagattaggaggagaataaactgctacttaaaccttttctcagcagcattggaaagcatgtgtttccagcaataactcctgggaactatttggaccccgtggtttaatggatggggctttaacctacccagaggtcagtctctgctggacaagtggaacctcatccctgagggcattgacatactcatgacacatggacctcctctaggttttcgagactgggttccaaaggagcttcaaagagtgggctgtgtggagctgttaaacacggttcagaggcgagtccggcccaagctccatgtgtttggtggaatccatgaaggttatggcatcatgaccgacggttacacaacgtacatcaatgcctcgacgtgtacagtcagctttcaaccgaccaaccctccaattatatttgaccttccaaacccacagggttcctgaagctctaaatgccctattggaatgtgagggaaggtctataaactgccatttttctaattataaacttacattctcttacttatttacaaaccctgtgagttctttttgtaaattgttggaacacaaatgatgctagaggttgtgcttcttattttattttattttaaatggggcatccatttgaaatcagaggaacattgtgaatttgtaaaatgacttctgttttctcaaaggccatgccattgtaaattgttagtgttcgccaaaggacagccaagctttcttttaaaaagtgataaaagtcttattttaatatgctttaagctgaaagaaaaaaaaataagaaacaggcagtgttttaaaaaccaacacagatttgcacaactgtttaagagtattgtttgaaatattttaattttcaatgttttgttgttgttgttttcttggtaatgcttcttttttgcagatgtggtcccaatttatagcaatcttctcaacagaagtaggcatggaaaagacttcttttcatactctcactataaagaaagctgcattgagaagaaaatggctgtcatttaaaggatggtttaactagtgagattcctattgtggttatacaaggtctcattgtttgtttgtttcttttaaattatttcagctttaaaaatacagaaatggaatctgtcaagagcaggtatttcatacggttaaaaaaatgaacatgcagactccttttcaatatgggtttatatatataagtattttttgtgtattatgactacgttaggagtttattattgtcaaggacagtacaactgcaaagggatgctgtatagcagcacatcagaagtcggaaggaactgacacattctctcagagctcaaggtcttaaagagcttgagttaaatctaggtacagttacaggcatgtatagacttaaatggatgcaatggaagctaactaaaataaggcttagttgtcctttctatttaaataccccaagttgtcttcttacttcctctcccctctcccattttgcactgtgtgtcgatgcaatcttcgctagcacaaaatattgtcgctaatagtcatttctgttttcccattgtaaatgctgttgagctttattctattttatgttactttgttaatgaaatttaggaaagcagttgtttctttaaatttattgtgatattctatatctagcggcctttatatgcaaataaaattgcaagatttttaaattcgtgctgtttagagggttggatggtggaggatggtagtttcgtcctggggaaggagggatttattcatatgcaacatcagtaatgcctttcagaagaattagaataagtgatttttttccctaattttcaataaatttttattacccaccatt

SEQ ID NO: 43801 - DNA, 1800 bp, Homo sapiens
agtgaccaggggaagagttttgcagaaatttcttcctgaactgataaggaaggaccccgtggtttaatggatggggctttaacctacccagaggtcagtctctgctggacaagtggaacctcatccctgagggcattgacatactcatgacacatggacctcctctaggttttcgagactgggttccaaaggagcttcaaagagtgggctgtgtggagctgttaaacacggttcagaggcgagtccggcccaagctccatgtgtttggtggaatccatgaaggttatggcatcatgaccgacggttacacaacgtacatcaatgcctcgacgtgtacagtcagctttcaaccgaccaaccctccaattatatttgaccttccaaacccacagggttcctgaagctctaaatgccctattggaatgtgagggaaggtctataaactgccatttttctaattataaacttacattctcttacttatttacaaaccctgtgagttctttttgtaaattgttggaacacaaatgatgctagaggttgtgcttcttattttattttattttaaatggggcatccatttgaaatcagaggaacattgtgaatttgtaaaatgacttctgttttctcaaaggccatgccattgtaaattgttagtgttcgccaaaggacagccaagctttcttttaaaaagtgataaaagtcttattttaatatgctttaagctgaaagaaaaaaaaataagaaacaggcagtgttttaaaaaccaacacagatttgcacaactgtttaagagtattgtttgaaatattttaattttcaatgttttgttgttgttgttttcttggtaatgcttcttttttgcagatgtggtcccaatttatagcaatcttctcaacagaagtaggcatggaaaagacttcttttcatactctcactataaagaaagctgcattgagaagaaaatggctgtcatttaaaggatggtttaactagtgagattcctattgtggttatacaaggtctcattgtttgtttgtttcttttaaattatttcagctttaaaaatacagaaatggaatctgtcaagagcaggtatttcatacggttaaaaaaatgaacatgcagactccttttcaatatgggtttatatatataagtattttttgtgtattatgactacgttaggagtttattattgtcaaggacagtacaactgcaaagggatgctgtatagcagcacatcagaagtcggaaggaactgacacattctctcagagctcaaggtcttaaagagcttgagttaaatctaggtacagttacaggcatgtatagacttaaatggatgcaatggaagctaactaaaataaggcttagttgtcctttctatttaaataccccaagttgtcttcttacttcctctcccctctcccattttgcactgtgtgtcgatgcaatcttcgctagcacaaaatattgtcgctaatagtcatttctgttttcccattgtaaatgctgttgagctttattctattttatgttactttgttaatgaaatttaggaaagcagttgtttctttaaatttattgtgatattctatatctagcggcctttatatgcaaataaaattgcaagatttttaaattcgtgctgtttagagggttggatggtggaggatggtagtttcgtcctggggaaggagggatttattcatatgcaacatcagtaatgcctttcagaagaattagaataagtgatttttttccctaattttcaataaatttttattacccaccatt

SEQ ID NO: 43802 - DNA, 1334 bp, Homo sapiens
cgccggggagcgcgcacggagcggcgcctcggccgcctgcttcctggagctgtgctcctttgaccccagtggcagtccctgtcactgcaccgctcgctctccctccggctcgccgcgccctcgctccctctcctcgccccctcgctcgctctctccccagatcgaggctgctcgggtcctttctccccccgcctccctctagcgccgcgccccctggcccccagccccagcctgcggcgggacctccggggtcgaaggttctggcccgctcgcgcccctcgccgcccccgcgcgcccccagcgctcctccagccggctcgggccgctcggctatggatcgcctgctcgccgggcgctgaaggcatccccgggatccggagcgcagcccgggaaagaaatgcacagcggtattgatgagtagatccttggattcagaggttggctgaaacgcaccatgcctgcttccatcttttgctctgtaaagttgtgaattgctcatgcctatagggaggaaggatggcacatgggattccttctcaaggcaaagttaccataacggtggatgagtacagctcaaaccccacccaggcattcacgcactacaacatcaaccagagcagattccagcctccacatgtacatatgaaacctgccatatgaatataaaatagtgattgctgggaatcatgaactgacatttgataaggaattcatggcagaccttgttaaacaggactactaccgtttcccctctgtgtccaaattgaaaccagaggactttgacaatgttcagtccctcctgacaaacagtatttacttacaagattcggaggtaacagtgaagggattcaggatatacggtgcaccttgtgaccacaagtgaagctgaggtggctttgggcagcattaagtgaacaaaaagggcaaaatgagaagaggcaggaaatgggaaaagttttacggctccctcctacttcccacatttctttgaggccgaattaattggtgtgattccattctcaatttaagaaatcaaggttaaatgacttgcccacaattgcattgagctggaactagggcataggtctgctgtctccagatctccagctgacttcccacggcagcctgtcagtcagtgaaattaatctgcagtcattcgcagacacctgaaaatgtcccctcccacccctcaaattgcataataatgagtcctacagcagaaaacagttgtattctttcaaaagtttctctaatgtttttgaaatacacaaggaaatagtaaaagttaagtgaacatttgaaatacaggcttcttttatcattaaaataacgtc

SEQ ID NO: 43803 - DNA, 880 bp, Homo sapiens
agcagtgccagcaggagcggcggccgaggaggtgacggaggtggcaacgggggactgagcgaaaatgcacagcggtattgatgagtagatccttggattcagaggttggctgaaacgcaccatgcctgcttccatcttttgctctgtaaagttgtgaattgctcatgcctatagggaggaaggatggcacatgggattccttctcaaggcaaagttaccataacggtggatgagtacagctcaaaccccacccaggcattcacgcactacaacatcaaccagagcagattccagcctccacatgtacatatggtcgaccccatcccatatgacactccaaaaccagcgggccacacgcggtttgtctgcatctcagacacacactccagaacagatggtatccagatgccttatggggacatccttctccacacaggcgatttcaccgagctgggactgccctcagaggttaagaagtttaatgactggttaggaaacctgccatatgaatataaaatagtgattgctgggaatcatgaactgacatttgataaggaattcatggcagaccttgttaaacaggactactaccgtttcccctctgtgtccaaattgaaaccagaggactttgacaatgttcagtccctcctgacaaacagtatttacttacaagattcggaggtaacagtgaagggattcaggatatacggtgcaccttggtaagtgatgattcaaacagttttccacattgctttttagctcagtaccaagaaaacacagctcagatttagatgctttaaatgaaaatgattaggatgaaaggaaaccttattgctgtatttccaacaaaatacatactgtactgctgcaaaatgcaaca

SEQ ID NO: 43804 - DNA, 358 bp, Homo sapiens
ggtcgaccccatcccatatgacactccaaaaccagcgggccacacgcggtttgtctgcatctcagacacacactccagaacagatggtatccagatgccttatggggacatccttctccacacaggcgatttcaccgagctgggactgccctcagaggttaagaagtttaatgactggttaggtaaggaatgattgcgttctggcggccccaattaacctttcccgtccgagtgtcactcactgcgtcctaattgaattagagcacttggaagccagctcagccatttctcgtatgatatgcggtggtgtctagctttaatccaattctgttaattaaagatgaatttttagatattt

SEQ ID NO: 43805 - DNA, 497 bp, Homo sapiens
caaaaaaaaaaaaaaaaaaattgagaactgaacccattttcttttttaaagacagggtctcccaggctggagcgcagcgtatgatcctagctcactgcagcatcaaactcttggattcaagtgatcctcctgtctcagcctcccaagcagctggaaccacaggcatgcaccaccatacccagctaattttttcttttttctttttttttttgtagagacgggacctcattttttgacccaagctgctttcaaactcctggcctcccaaacagatctccaattaccattaccccaaatcagaaactggatcccaggctatatcaccaaacaagaccaccagattcccaatctgtcacttccaaccagccagctggatcccagactgtcaccaaaatagacaagacctttggtctctgtccccttgatgagacagcaagccctccaatttctcctaccccaaaccaaacctcgaatctcaaggttgttcaggagagaca

SEQ ID NO: 43806 - DNA, 284 bp, Homo sapiens
aattgcttgaacctggggggatggaggttgcaagtcacagtgagcagagattgcaccacttcactccagcctgggcaaaagagcaaaactccgtctcaaaataaataaataaataaaaatagaacaggccatgctgtagctccttaatgtaataatacactttatgtgatttttttcactatgtaggacaatgggttctttctctttcatacataaaaatattagtaaaaagaagatgtcaaaatattttggccctattttcagcagataaaacgagagagaaa

SEQ ID NO: 43807 - DNA, 447 bp, Homo sapiens
atatgtatgtttacattctgatttgctgatatttattgtaatacagcatacatatgaaagagtacagaaattatacatgcacagctcagcaagttttcatcaatttaacatacctgtgtaattggcaccagaaatatgaaacattattatttctcacccatcttatagaattatagattagtaccatctgtttttgaaatttgtatgaatgaaaccatatgatatctatttatttgtatgtatcttatttcatgcaacttaatgattttgagattcattgatgctgttgtgtgcagcagtggtttgttcttttttcatttctcagtagtatttcattgtatgactataccataatttatttactctttctaagactgatggacatttgggtcatgttcagtttttggctattaataataatcatacaattaaaataataaaagctgt

SEQ ID NO: 43808 - DNA, 2257 bp, Homo sapiens
ggctgcttgggaggcgcgggctgcttggggggcggcgcggcggggcccgcgggctgctcggcgctgccggccgcgttgcccatggtggtccccacccagccggccaggcgcctccagcctcggaaatccagctttccgggggacggggacgaggctcccggcccgggcgggggcgagggggcagcggctggcggtggcggcgggggtctcggcagcggggggcgctcggctcagcggcgcgcaggggccggagcgcggcgtcccatcggggcggccccgtccgtgggaccgggcggcgagctgcagggttgggggaggaagtcaggctgcaggccgccggggccagagggctgggccgggggcaggaagctgcggcgctggctcccccctcggcgattttcgaacttctgctgtcgctccccgtgcgcgcaaaccgcagttcgccgccgccgccgccgggcacccagccccaggggggcgggctggagggagggggcgggcgctggccgggggacccccgcaaccatggcgggcggggagtgggctgccgagccgcttcacctgccgcagagggggcggccggcgccgcttcacctgccggagcgggaggccaccgaggcgaggccgaggcggcggcgcgctcggcggcgcctccgggtcctagaaccgcatcctcccgctcgcctcgggcgagggattggccgggtctgggtgaaggggatcacggcctggggattggaggggcacatcttctccgcaccgaggatctcagcgactgcgagcacggctcggagacccacggtggtgcagcgttggggcgccagggctgcgttcccgtctcgcgtcccggactgagaaggtgggaacccccttccaggccccccaccttttatttctctcctcccctgcttagcccagagacgagctgaggacgagggggagccatctccaaacaggaactcctaaacagggtggggggcgcggacgcaggccagtggagacccccgccacctgtcccacctcgaccaaccgtgcgcctgtgcagggcacccctacaggttttagaatgggggcacctatggaatatggcaggctgcgagaagctgggcccgccaaggtggtcccaaggaggagtggggggttgcggaaaggaggatgagagccagccacaaggctggaaaaggagtgggcaccgcagaggagggaaaaagaatcttgacactgtcaccgccagggatctaggggggcctcttaccttggagaataacaatctctgatgtctgctaattacagaaatactttcagagctctttcattcatcctgacaatggccagagaaggtaggtattggtagccttattttagagatggggaaactgaggctgagagtaggtaagtaagctgtccaagggcactcagctaacaaaggacagaagcaagcctcctcactgtctacctccaaaacctacactggcttggagttgctgtcctggccctccactgcccatctcatgtaggacgggagagtatggggggctggggtcccatctatagcctgaatttgagactttcagttgctcctctcattccccatttaatttgtggggatccccaactgacccctccctacacttccagggcactgaggagggagggcccgctgaaggagccccgaattatctctaggccaggtcaggagccattagtgtcccctcccctgacagcatcctcctccttctgccctcacattcagagccactgacaagactttaagcaagagacggagagttaacatctaatctggaggaagaccctggaaggagccagccccttcccccaggctgacctggtttaagcctttcttctgccaaggtcaccagcaccccagatgggtgagagatgtgatcactggtttcgtggcctgaccaaggacctccaagattctgtggcagatgagaaatgccttggtccttgggctgcttgcagcctagcgagggacagacttttaacctctctaggagagtggctgcttcaagtcatcctatgggaccagctgttcatgcttcctcttgcccagaactacttctgtgagaggaaaagagaagggtaggagcgtgccctgcagctggaaacccaagccaggcggggagccacgaatgcagtagttatcagactgtatcttcaatcctgggggcttctcaagccattgccagccactcttcacccaaggcctggtggaataaagctgggctaagta

SEQ ID NO: 43809 - DNA, 2261 bp, Homo sapiens
ggctgcttgggaggcgcgggctgcttggggggcggcgcggcggggcccgcgggctgctcggcgctgccggccgcgttgcccatggtggtccccacccagccggccaggcgcctccagcctcggaaatccagctttccgggggacggggacgaggctcccggcccgggcgggggcgagggggcagcggctggcggtggcggcgggggtctcggcagcggggggcgctcggctcagcggcgcgcaggggccggagcgcggcgtcccatcggggcggccccgtccgtgggaccgggcggcgagctgcagggttgggggaggaagtcaggctgcaggccgccggggccagagggctgggccgggggcaggaagctgcggcgctggctcccccctcggcgattttcgaacttctgctgtcgctccccgtgcgcgcaaaccgcagttcgccgccgccgccgccgggcacccagccccaggggggcgggctggagggagggggcgggcgctggccgggggacccccgcaaccatggcgggcggggagtgggctgccgagccgcttcacctgccgcagagggggcggccggcgccgcttcacctgccggagcgggaggccaccgaggcgaggccgaggcggcggcgcgctcggcggcgcctccgggtcctagaaccgcatcctcccgctcgcctcgggcgagggattggccgggtctgggtgaaggggatcacggcctggggattggaggggcacatcttctccgcaccgaggatctcagcgactgcgagcacggctcggagacccacggtggtgcagcgttggggcgccagggctgcgttcccgtctcgcgtcccggactgagaaggtgggaacccccttccaggccccccaccttttatttctctcctcccctgcttagcccagagacgagctgaggacgagggggagccatctccaaacaggaactcctaaacagggtggggggcgcggacgcaggccagtggagacccccgccacctgtcccacctcgaccaaccgtgcgcctgtgcagggcacccctacaggttttagaatgggggcacctatggaatatggcaggctgcgagaagctgggcccgccaaggtggtcccaaggaggagtggggggttgcggaaaggaggatgagagccagccacaaggctggaaaaggagtgggcaccgcagaggagggaaaaagaatcttgacactgtcaccgccagggatctaggggggcctcttaccttggagaataacaatctctgatgtctgctaattacagaaatactttcagagctctttcattcatcctgacaatggccagagaaggtaggtattggtagccttattttagagatggggaaactgaggctgagagtaggtaagtaagctgtccaagggcactcagctaacaaaggacagaagcaagcctcctcactgtctacctccaaaacctacactggcttggagttgctgtcctggccctccactgcccatctcatgtaggacgggagagtatggggggctggggtcccatctatagcctgaatttgagactttcagttgctcctctcattccccatttaatttgtggggatccccaactgacccctccctacacttccagggcactgaggagggagggcccgctgaaggagccccgaattatctctaggccaggtcaggagccattagtgtcccctcccctgacagcatcctcctccttctgccctcacattcagagccactgacaagactttaagcaagagacggagagttaacatctaatctggaggaagaccctggaaggagccagccccttcccccaggctgacctggtttaagcctttcttctgccaaggtcaccagcaccccagatgggtgagagatgtgatcactggtttcgtggcctgaccaaggacctccaagatggagtctctcgctgttgcccaggctggagtgcagtggctcggtctcagctcactgcaacctccacctcccaggtccaagcaattatccagtctcagcctcctcagtagctgggaccacaggtgcgtgccaccacacccagctcatttttgtatttttagtagagacggggttttgctatgttgaccaagctggtctcgaactcctgacctcaagtgatccgcctgcctcggcctcccaaagtgctgggattacaggcatgaggcaccccgtccagcctggaagacttttttttttaatgaataaaaacacattttttta

SEQ ID NO: 43810 - DNA, 2840 bp, Homo sapiens
  misc_feature (2579)..(2579): n is a, c, g, or t
  misc_feature (2581)..(2582): n is a, c, g, or t
ggctgcttgggaggcgcgggctgcttggggggcggcgcggcggggcccgcgggctgctcggcgctgccggccgcgttgcccatggtggtccccacccagccggccaggcgcctccagcctcggaaatccagctttccgggggacggggacgaggctcccggcccgggcgggggcgagggggcagcggctggcggtggcggcgggggtctcggcagcggggggcgctcggctcagcggcgcgcaggggccggagcgcggcgtcccatcggggcggccccgtccgtgggaccgggcggcgagctgcagggttgggggaggaagtcaggctgcaggccgccggggccagagggctgggccgggggcaggaagctgcggcgctggctcccccctcggcgattttcgaacttctgctgtcgctccccgtgcgcgcaaaccgcagttcgccgccgccgccgccgggcacccagccccaggggggcgggctggagggagggggcgggcgctggccgggggacccccgcaaccatggcgggcggggagtgggctgccgagccgcttcacctgccgcagagggggcggccggcgccgcttcacctgccggagcgggaggccaccgaggcgaggccgaggcggcggcgcgctcggcggcgcctccgggtcctagaaccgcatcctcccgctcgcctcgggcgagggattggccgggtctgggtgaaggggatcacggcctggggattggaggggcacatcttctccgcaccgaggatctcagcgactgcgagcacggctcggagacccacggtggtgcagcgttggggcgccagggctgcgttcccgtctcgcgtcccggactgagaaggtgggaacccccttccaggccccccaccttttatttctctcctcccctgcttagcccagagacgagctgaggacgagggggagccatctccaaacaggaactcctaaacagggtggggggcgcggacgcaggccagtggagacccccgccacctgtcccacctcgaccaaccgtgcgcctgtgcagggcacccctacaggttttagaatgggggcacctatggaatatggcaggctgcgagaagctgggcccgccaaggtggtcccaaggaggagtggggggttgcggaaaggaggatgagagccagccacaaggctggaaaaggagtgggcaccgcagaggagggaaaaagaatcttgacactgtcaccgccagggatctaggggggcctcttaccttggagaataacaatctctgatgtctgctaattacagaaatactttcagagctctttcattcatcctgacaatggccagagaaggtaggtattggtagccttattttagagatggggaaactgaggctgagagtaggtaagtaagctgtccaagggcactcagctaacaaaggacagaagcaagcctcctcactgtctacctccaaaacctacactggcttggagttgctgtcctggccctccactgcccatctcatgtaggacgggagagtatggggggctggggtcccatctatagcctgaatttgagactttcagttgctcctctcattccccatttaatttgtggggatccccaactgacccctccctacacttccagggcactgaggagggagggcccgctgaaggagccccgaattatctctaggccaggtcaggagccattagtgtcccctcccctgacagcatcctcctccttctgccctcacattcagagccactgacaagactttaagcaagagacggagagttaacatctaatctggaggaagaccctggaaggagccagccccttcccccaggctgacctggtttaagcctttcttctgccaaggtcaccagcaccccagatgggtgagagatgtgatcactggtttcgtggcctgaccaaggacctccaaggaggtatctttcccatcttggcccacagaggaggaaatcctagaagggatgactgaagcttgggactaacacattggtggatctgtgctaccccctgctggccgtagacggtatgacagccaagatagggcaaggcttcgaggggcgatggatggattcaccgcagcggcgacatttctggactgttgtcaccttcagtgcagtcactgggaatattcagaacccaggtgattgataaggttttcccagggatctcttctctccccttcaccattactcagtaggagcttccttaaaaacggaaaacgagaggccgggcgcggtggctcacgcctgtaatcccagcactttgggaggcggaggcgggcggatcacgaggtcaggagatcgagaccatcctggctaacacaaccccgtctctacttaaaatacaaaaaattggccgggcgtggtggcacgcgcctgtagttccagctactcaggaggctgaggcaggagaatcgcttgaacccgggaggcagaggaggttgcagtgagctgagatggcgccactgcactccagcctggccgactgagactccatctcaaaaaaaaaaaaaaaaaaaggaaaaaggggccgggcgcggtggctcacgtctntnntcctagcactttgggagaccaaggcgggcagatcacgaggtcaggaatttgagactagtgtggccaacatggtgaaaccccatctctactaaaaatacaaaaaattagccgggtgtggtggcgcatgcctgtaatcctagctactcgggaggccgaggcaggagaatcgcttgaacccaggaggccgaggttgcagtgagccgagatcacgccattgcactccagcctgggcgacagagcaagactccgtcttgaggg

SEQ ID NO: 43811 - DNA, 452 bp, Homo sapiens
ctttcctagattggaatacagattagcattttatttgtgtctcaatttatggctaatttttcattttcttgatgacttgggatgtcttccaggagaaagggcagaatttattttgctgaccttctgaatttaatttgctattgttctttttttaatatttaaaaaagttgtaataatttttattttttctgccatgcttggcaaagatgaggtctcactatgttgcgcaggctggtcctgaactccttagctcaagtgatcaatccgccttggcctcccaaagtgctgggattacaggtgtgtgccaccacacctggcctaatggtaaatgtggccaaaatacaggagtgttctgctttaaaaaaaaatgaaagtttatggggaatttgaagcataaccaaaagcatgaagaataacaaaatgaacccccatgtatccatcatcatttgtta

SEQ ID NO: 43812 - DNA, 190 bp, Homo sapiens
gataacattttgaaaactggaaagatggtatactgtttttagaggaataaacatatttgtggtttttaaaaaaaagagcaacttcctttgcactgtatacccttttgtattattaggattttatactatgtttatatgttgcctatttaataaatcgcttaaagttatatatcttgaatatctttccata

SEQ ID NO: 43813 - DNA, 367 bp, Homo sapiens
tgctctgctgcccaggatggagttcagtggctcaatcatagttcactgcagcctcatactcctggatagagtgtatgtaatcaattattgagagaagatagaagagtacagataatatctatattcacacaaatctgcaaaatatagctttattcatattgtttctgttcattttatgaaacaaacagcttcaagtcattgggcctcatttcagtgccctatgtgaatccactaatgtacagagaggtaggatttgagcattaatcggcctagaacttgaaattgtcatatcagtgttgaagctgtgtaactgacaggcatttgggagaccctgtttaagcatttttggccttctcataaaaagtac

SEQ ID NO: 43814 - DNA, 561 bp, Homo sapiens
atactccagtgacatagaaaacaaattctacctaggttcttttccctgccccagttctgatcagattcaccatttttggaggccttatttaggtctggcctcactctggagtgttcccttacaaaactgatttataaagattcaagtttttgggggtaaatcctgctgactttctagagctgctgctcacagtatcctgaaacccaaaagcagatacataagaaaaataaactatacattttaagatcttaatttttaaattttgtagtaaaaccagtgcttacagaaacgttccatttagcagattttctgttcctgcagatccagtagctgctctacaagtcataaacaagtaaacataaacacaaaaaaatttctctaaactacattctaaatcctgagaattattgaacacttagtatgaactttcaaggtgttagtaggacataataacaaataataacacataatgtgttattcccagcacagtgctctgcaacatactattgagcacatagtacctgcttaataaacattgcattagttcatgtgtaaaaaaaa

SEQ ID NO: 43815 - DNA, 467 bp, Homo sapiens
tagcaccatgagcttcaataccctgtccttttgagtttttacggaggcttcactacataggcattactgattaaaccattggctgttggtgataatcttatcaccaatttaatggtgaaacttaatcttcagctcctctcacctcctgggaggttgcggggtggggatgaaaagtcccaatcctctaatcctgccttggtcttttgctgccagtccccatcctgaagctacctaggggatgccagctaccagtcaattcgtttgcatacaaaaagatatcactttggagtttctaagtgtatacgaggaaatgaggtcaaagaccaaatatatatatttcactatatcacacttacaaacttttgtttactgtttctcttctcctactctattataaacctttgagggtgggggactgtgagttatttatctttatatttcaagccaagtatggactgtgagttatt

SEQ ID NO: 43816 - DNA, 427 bp, Homo sapiens
tgcagtcagcactctccagtgattagaatgggggaaagaatccactatttgtacagggtttatctttatcatactaaaatgctgagtgagtggaggtctgggaatgaaaatcagaagtcttcttcttcttttaattcataagcctcacttaaatcagaacacatttaactatttatatatcaaaaacgtccccaaacaccataagaccagcacagagttgctgccctaaaatgtataattagtgaaaaatttacctctgcttccatttaaagcatggcagtgggttgggtgtcattatgtagtataaaaactggactagataaactgctattttagagcattattagcattctctgaatatatgtatatatacatatatatacgcacacacacacacacacataaatatatatatatatatatatat

SEQ ID NO: 43817 - DNA, 479 bp, Homo sapiens
gtgaagatggtcagatccacagaggcttgtgcatgtgctaggttttttgctaaggggggataaactgtccagccagttccagcactggcttcgaccactgaagacgcaagtaggagtagaaaagatggagggagaagtcagaagctcatattatttatcccggggaatgccatatcgggcatttttattaacataaaaatgtaaatgcctgtttattgtttttgttagacatgacctataaataaactctggaagacaattataattagaagacaaaaggtaaaccttgacaatttaaagtaatgtcggaacggagaaagtctagaagataaaagaacaagtatgtttctaatgtcctcagctcacatagaatgactgcagtaaagcgaaggatgaaagacacaagaatggtatctaaagttatgtataatgtaacagcaagttgtggggactgtgcctttccacactgattgaatttt

SEQ ID NO: 43818 - DNA, 371 bp, Homo sapiens
gctcgacctgcagtgagccaagatcacacctctgtcactccagccttgaattcttgggctcaagcaatcctcccacctcagcctcccgagtagctgggacgacaggtgtgtgccagcacacttggctaattttttattttttttagagatgggagtctcactatattgtccaggctggtctcgaaatcctggcttctagtgctccttctcccttggcctcccaaagtgttgcgattgattacgggtgtgagccaccacactggcctaaaaagcaatctccaaaacggaaagtaacatgatataaatgatctggtagccacttggtagcacaactgcacacacacagacaaatgttacaaatgacgtcgaca

SEQ ID NO: 43819 - DNA, 318 bp, Homo sapiens
acaaagctcatccttgcccaattctcatttaatgaataagaagactaaatacttcagaaaatcaaagactaccttactaatagacttagataaatggatttcagtttagacccaagaagggaagtcaaatctatagatacagcatctaagaagttgagaccttggttctctattctactctccctattattggccttatgaccacaagttggtcagttcgcctccctaagcctcagtttctcacagggaaaataggaatattagcaaatgacagagcaaattcacaggactgctatcataggattaaataaaacaaca

SEQ ID NO: 43820 - DNA, 297 bp, Homo sapiens
gtatcaaagtgacaatgtaccttccatttctctctctctttttttaaaaacaggtatgtgcattcaggtgtcaattgggagaaggaatgctaattttattacctggctgtacagtttcttatgatacgtggcatgtgctgggaactgccagacatagcagcagttttaaaatatatatgaagtaaaagtcaattcctttccttttccttttccttttgtttttctttttctttctttttttttttaaaggcagagtcttacttcgtcaccgggctggagtgcagtggtgcaatctaa

SEQ ID NO: 43821 - DNA, 373 bp, Homo sapiens
gaaccattccacaaaaacatacactactttcctcctagctcaaaggataccacctacatggagccttacttgactgccctcagttatcctttgacataccacgtagagcactttataaaaagatgctacatgtgtttacaactttttattctccctaaactgtaagcaacttgaaggcagattctatgcttatacatcactgtgttcctaaaatctagtatagagactggaacataggaccagtcctccagaaataatctttaagttattttaatgaaatgttttatacatacaaaataatatatgtaatgaataataaagtgaacatcattgagctcaccaactagcttcaaataaatattaccaataccat

SEQ ID NO: 43822 - DNA, 301 bp, Homo sapiens
actttaaaacatttcaaagaaaatgtgatacagatgggaatcaaattgaaaaaaatgactgaccacctgattcaacatagataaaggccatctctgtcggtaaatttaaatgggttagattcatttgcacacccctgcaagctcccaaatcaagaacagcagagatggccaggcacggtggcttacactggtaatctcagcactttgggaggctaaggcgtgtggatcacctgaggtcaggagtttgagaccagcctggccaacatggtgaaaccccatctctactaaaaattaaaaaaaa

SEQ ID NO: 43823 - DNA, 603 bp, Homo sapiens
ttcttatccctagactcttctgatatgtccccagtgagaaggaaaatctgctttgtcaatccacacttactattgacttaattatccaacaacattttaagtgcctactatgggcttaaacaagtgctgaattatattgttgaccactgtgttcactcccacctctaggagagcccaaacttgttgggaaatagtaaaggctaggagaggcagcattttaattagcttctggctagattttacaaacctcaacaaatttatgctctgctcagggctgctgctgaatgcaatggcactggcttactcaaaataataataatggccaggcacggtgtctcacgcctgtaatcccagcactttgggatgctgaggcaggtggatcacctgaggtcaggagttcaagaccagtctgaccaatatggtgaaaccccacctctattaaaaatacaaaaattagctgggcatggtggcatgcacttttagtcccagttactctggaggctgagacaggagaactgcttgcacccaggaggcagaggttgcagtgagctgaggtcgcacaactgcactccagcccaggcaacagagattccgtctcaaaaa

SEQ ID NO: 43824 - DNA, 418 bp, Homo sapiens
tttggcgggccctttgtctcgctcctgccagagttttagttgcctgtctctgctattctgcgtcctccacctcgggagccccaggtgactttgtcacagccggtgggtgtgcgggttgagcatcccgagatgggagagcggcctgtgaaaccggctggaccggcctccccacagtccgctcctgggtcgccgacctgagtccccgctggcacagctccgctccaggccactctggccgcaagatggcggctggactcgcagccaggaccacagcgtcccgccagtttctgcgcggcgccagtccggggctctctgggcagctctgcacccgcaatcccgagtatttcccgggttgttcagggaagacaggcgggtcatcggcagaatccccactcggtgtatgcgttggaggggctgc

SEQ ID NO: 43825 - DNA, 365 bp, Homo sapiens
gcctgatttatctaaggaattcttggcaaaactaatataataccacaagcatgcacagaataccagcttattgagggagaggttaaccagggaaactgaaatcattcagagctatattagttaataaaattctccaagttaatattttcctgggctcccaatatgtgtattgaaattgactaaactttgctaattttaagttagcagtaatattatccaaaagcatttgaaagttaacagtttgttgatcgcaaagtatttagtgacaattattttatagagcaaatgtgtttccaaggagactattttctgtttcgctgtggttttgggttcaggcaactgtgacaatgtccaagtaaagacag

SEQ ID NO: 43826 - DNA, 439 bp, Homo sapiens
tctttttcaatgaatggcacataagtagagaccaagattgatgcctgtggatcctactgtgatagtctagtgttggggaaaacaggtaccagacatccataaaactgtgtggtaagtgttgtgctgggtgaagtatggagtgtcatggggacacagggaaaggccctaacctagacataagaggtccaagaaggcttcctgaaggaagtactcagaacaattaagaaactgaagcacatagaggagaagtcactgtcccaaagtcacatagcctgaaacgaggcagagctggtgcagagcaatgaaatggcattggcacacgggctgtggtcttcgctcgaagcgtgtgctatttagatgctgcagaagtcagtgttaagacaacatgaaggatgttagtcctgtctatgaggagtcaatacaactttggctacaccac

SEQ ID NO: 43827 - DNA, 311 bp, Homo sapiens
gtaatttcagctactcaaaagggtgaggcaggagaatcgctttaacctgggaggccaaggttccagtgagccaagattgcccccctgcactccagcctgggagacagagtgagactttgtttcaaaaaaaaaaaaaaaaaaaaaaaaaaaaggctaactaaggcaaaacctataagaagcaggcaacaaattcaacagatacttttgatgacgagacatccctttttacagagaaaaataggtcacatgcaaagcatcagaaatcaaaagtggcattgtatttttcaacatttacaataaaaacaatgttt

SEQ ID NO: 43828 - DNA, 430 bp, Homo sapiens
ggtctcgtgcagcccctcagactttgcggcaccgcaccaagaggtgcccacagttatccagctcaatgtgatagaatctctttcatttttcttaatgaaggtgaacttaataaaagcaaacacatgatgattgttgatatattttatttctctgagccttctctgccacataatcccactgcctttaactttcttggcctcgttgggcacatgctgtttatttaacatgctgatacgagtgttagagaaatagcacattgctgagccctcaaagaaaagcttcaccctagcaggcccagaaacgaagagaggctgatgatcagctaaagcacgttagccaaaagcattcttaggtgcagtcgtactgagaagccccgcgtgaagtcctgactcagtgttccctgacattaagccccctgaaatgtgagca

SEQ ID NO: 43829 - DNA, 366 bp, Homo sapiens
gtatagaatgagcttgaacgagctttcttaatacaaaatgaaaagaagattaatttcgggtttatagtatatgtgggaaggagagctgttcaagagttaaagacttaaaaaattatagtcttaaatgcatgtctgcaaattatattagaactttattagggctgggcacagtggctcatgccagtaatcccaacactttggaaggctgaggcaggcggatcacttgagtccaggagtttgagatcagcctgagcatcatgatgagacctcatcactacaaaaactcaaaaattacctgagtgtgatggtgagcacctgtggtcccagctactcaggaggctgatgaggcagaattgcttgagccca

SEQ ID NO: 43830 - DNA, 281 bp, Homo sapiens
caaaatggggaaatctgatggtacccatctcacagagctgttgtgaggagtaaatatgtgtaacttaacacagtaccaagtacctatcaacgctgcagtaaatgttgctattaaaaccattattactgctatacacaggcaattaaagaggaaaagccacaagggcctggaatgggccagtgtattttcatgcagaagtgcattttcagggctcctggctgaacctctcttttcaatttgaacatgtaagtgactgtggctagaccacatgcaaactattc

SEQ ID NO: 43831 - DNA, 549 bp, Homo sapiens
ccctcacggattacctcaaactcctgggctcaagcaatccacctcagcctcttgagtagctgggactacaggcatgcaccaccacacctggcttattattattattttttttgtagagcctgggcaacatggcaagacctcttctctacccaaaaaaaaaattaagaagacattagttaggcattgtgacatgtgcctgtaatcccagcttcccaaagtgctgggactacaggcctgagccaccacccccagccttataacactgtttttgttttttgttttttgttttattttgctatctttgttgtccagtttttgttgttatctcttacatatctcttgaatatgtacagttttctcttgctgtttatcttaagcacgtagcgttatgcttggtacatttagcatttttcctgcccaaagaaacttaaagtattgagtagtgcttttggaggtagggaaactcccagttactcatttcattcaagatagattgcccaaaatttttatactgaatccttttttgtgtgtgtttaattaattgaggta

SEQ ID NO: 43832 - DNA, 436 bp, Homo sapiens
agagcagtgagggtattgacattagggtcaaccaagttgattttctgtgccatgttagaggtagtgtaaatcatgaacccatattcttgatggctgtttacttctatgtgttctttgccccctcccacaaattttctagtaaaggtttcctttggcagggcatggtggttcaagtctaaaatctcagcattttggaaaaccaagatgggaggatcacttgatgccaggagttcaagaccagcctgggcaacatagccagatgtcaactctccaaaaatattttaaaaatttagccaagcatggtggtgcacctgtagtcccaggtactcgggaagttgaggtgtgaggattgctttagcccagagttcaaggctgcagtgagtccttattgtgccactgcactccagcctggatgatggagtaaaatccccatctc

SEQ ID NO: 43833 - DNA, 380 bp, Homo sapiens
tggaggcgatagagatgtttagtacctaaattttggtgatggtatcacaggtgtatgcatatgtccaaactcatcaagatgtactctttatatgtatgtgatttttttgtgtatctattatacctcagtaaagctttataaatgatcaaaacaaaactgtgttccccccacacacaccaccccaatacaaacacagaagagctaggcaaaaggaaactctataatggcagggaactgctctgatcctgcctggtgggccacctgctttgtggaagttttcacatctagtgttcattattctttcttctgagactgtcttcctagcccctcccctcctccccctcagccacacccccatcagccagagctgctcagtcagt

SEQ ID NO: 43834 - DNA, 426 bp, Homo sapiens
agggtttcgccacgttggccaggctggtctccaattcctgacctcaggtgatccgcccacctcagcctcccaaagtgccaggattacaggcatgagccactgcacctggctaagttttaattttttgtagagatgaggtctcactatgttccccaggctggtcttgaagtcctgggattacaggtatgaaccaccacgcctggcctcccttcttttttccatactacctaagaaatgcagtgtgtatttacacgtacagcccatctcaatcacacatggctggtggccactgtagtgtgagcacagctcttggttctgggctactccttcaggccttgctctgaactgcagtcactccagcatgaacttatctgattagtctccccttaggagtttgcttctagcatgggcacaactgtttttagc

SEQ ID NO: 43835 - DNA, 464 bp, Homo sapiens
atattcctctgataattacggtatccctgttacagaaatagagaggaagatgcgagaactcgttccttcattcatgtgagcaaacatccccagatactgggcattcaaggccatatcagatatgccacatacctgtgtgggcacagagaggaaaatcctcagttatgtattatccagctagactagatctgaagggggacagtctctataatagcaccttggccacacttcctgagaaattcatccttatttccatcccatttatagctgtcatcataaagtaggtcatccttacaactcactttgggaagtaatgcagggcaagtgaggttagttccagtttaaaggtggagaaacaggatcaaggacttgaccaaatcccagcattatttagtaggggaagacagaatggcatttgcagtccacaggtccaaaggccagcctactccacattttcttatctt

SEQ ID NO: 43836 - DNA, 505 bp, Homo sapiens
aatatatccataattacataaatataataatttcactcttaaaaatacaactctgagacattgagggtacagaactagaagatcatccttggactgtcttttactacaaggacatgaagataggtagctgcatttactatttctgccatgaggcagtaaccaataatgatcatcaccaaatcttctatcaaaatgctgattagccattctcactgaaacccaacaaatcatctaggagagaagagaagatcagcttttaaccacaacttgccatttctacacctattcccaaagcagtagccaagaaggggtaaagacgtttttacggtgaccataataattaaacattccaaacagaaaatgcaaataataaacactctagttgaaagctcaaaaggagaatatacttttgatatagttattatgacatgagtaagcataaatttcagatttaaattaatgaaaacaaaaatgtaattttaaacacattaaaatgctactagat

SEQ ID NO: 43837 - DNA, 602 bp, Homo sapiens
aatatatccataattacataaatataataatttcactcttaaaaatacaactctgagacattgagggtacagaactagaagatcatccttggactgtcttttactacaaggacatgaagataggtagctgcatttactatttctgccatgaggcagtaaccaataatgatcatcaccaaatcttctatcaaaatgctgattagccattctcactgaaacccaacaaatcatctaggagagaagagaagatcagcttttaaccacaacttgccatttctacacctattcccaaagcagtagccaagaaggggtaaagacgtttttacggtgaccataataattaaacattccaaacagaaaatgcaaataataaacactctagttgaaagctcaaaaggagaatatacttttgatatagttattatgacatgagtaagcataaatttcagatttaaattaatgaaaacaaaaatgtaattttaaacacattaaaatgctactagatttttttctttctaattttttttttagacacaaggtctccctctgtcacccaggctgcatttactccttttgctaataaaagtgtttgtagattgtca

SEQ ID NO: 43838 - DNA, 204 bp, Homo sapiens
tttcttacttttgatttttttaaaaaaatacttaaaaatatggactgcttcatgaatttgtgtgtcgtctttgcataggggccatgctaatcttctctgtatcgttccaattttagtacatgtgctgcttaagcaagcaccagtttaccattttatacaatgcaatgtatctttgacattattccataaagatctccatcccta

SEQ ID NO: 43839 - DNA, 309 bp, Homo sapiens
gagcgaaactcagtctaaaaaaaaagtcaccacaaatagttgaaatttaaagccagtccaatactccccctacatagtccaacttttaaagtgacctattccttaaaggggtctcttttgtttaagctgttaacaatgtaaactgttttacatttcacttgctctttttgacattaaccataagaggctgaaggtgaccaaaagaaatgaaaagacattaagccaggtacagtgttgtgcactaccagctactcagaaagctgaagcaggaagatctcttaagctcaagagtttgagatccctgtatct

SEQ ID NO: 43840 - DNA, 434 bp, Homo sapiens
tggcttgctcaaagacacagtaaagaaagagccaactctggtgtcttcagacaagggtcatgcctgctacaactcccacatttcatggctacaatttcccttctgtgacctatatccttggatgctctgacttaattctaaaatagccagttgacacagcccttcaatctggcaaacctaccattgcttaatagaaattaataggccaattttgattcaagaaatactatgtaaagaccagtattttcagtttaactttgaaagaaaattttactatatttgaaaaatataagcaaagcatatttccaaagacaaaggttctggtgggttggaaagggaagaaacaatttgcaaaatcacactctagtatatgaaaagactgcagattttagtctactaaaatcctcaatatatttagcaaatccccaatacag

SEQ ID NO: 43841 - DNA, 491 bp, Homo sapiens
gcacgagatgtaaggtacttggggctaaccaaagttaaatacatatgacaagtacctgaatctagataatctaatggtaagatatcgtttgctctctggacttcatgggctcaccccagcaatggggtgcctggaaatgaagagatctttcttgtgtctcatcctctgggctcccagcctccctcaacatcatgacctccatctgtaacacccaccatcctggagcagcatcctggatattggaactctgaagtctaacctaagagaacaaggacaagcctctctatgaaaggtttgcccttccagatccagttgagctctgctctggagccagactctctgaagcatagcccagctctagctcttaccagttatgtgatcaggaatgagagttaatgtttctatgtttctgattcttcatttgtaaaatgaggataataaaaatttaacttcagaggtttgttgtgaggaataaaagccattagcacaga

SEQ ID NO: 43842 - DNA, 384 bp, Homo sapiens
cttgaactatttgccatggtgtctagtcatcctctctatactttttccagccttggcccaaaacagttagctcacattatttatcttatctgattttgtaatattttttgcctttttccacgtgttctgaattttctttatttgaaattgaaatgccgtctggtgttttatctgtttattcaagtcacagaattttagagtttgttggagtactggaaatttagtaagaaggctgaccttcaagtcttgactatgtgactgataagcttaggacttggtgaagtctcctcttttcgagacagtttccttaactgtaaaatgagaaggtagagttaaatgtcattaactattcccatgattatcaagggataagtatagtagaaa

SEQ ID NO: 43843 - DNA, 936 bp, Homo sapiens
cattctcctagctaattcctatccaaagtgatgatggaatttttattctactttttcatagctacaagtacagctgacactgttcatgacaccgttcaccactaatttcccatctttcaattttcttgttaattttctttccttcccatcccaatcctgatgctgaacctctgcaccagctgtaaaatggttacaggtgattttcattgtcctatcactactttctaattgtctacagtgagtagatagtgcttttaaatgagaaaaaggtgcgtgtaaaatacaccttcagctactaaaattgtatatgaattgtcttattaaacttatcacctttctacacactagctgcccacatctggccaaacagaaaaactgactttatcagtaaaaaacgatctgtgacttcaaaaacaatgttcaaaatataatccacttttcaaacaaagatcaagtaaccccacttttaaactgataactcaatgttttgttaatgtgaattgaattacaaaattcaaaatgttaatatttctttattaagacatctgatgggtataatgagtcaatttaagtagatacaaaatgtaaaattgttatgccaaagttctatttagtaatttttcaaaaatttattcataaaccatattttggtgagtttcagtgttaagaaaattccgatcgccataagtatgggaggccgaggtgggcagatcatgaggtcaggagatcgagaccatcctggctaacacggtgaaacaccgtctctactacaaatacaaaaaaaaattagccgggcgcggtggtgggcgcctgcagtcccagcttctagggaggctgaggcgggagaatggcgtgaacccggcaggcagagcttgcagtgagccgagatcgtgccactgcactccagcctgggcaacagagcgagactccgtctca

SEQ ID NO: 43844 - DNA, 360 bp, Homo sapiens
ttttttaatcgacactcttagagggtcgttatgaggattacctgagtcaatatttgcaaagtgtttagcaaccaggcatgtggtaatcattacatatgtttgctaaataacacaagtgtagtcaatcaacaaggtccatcctgctgatgctgggtctgggaggttgggactgagatttccactttacagatgaggagactgaggacccggagaggaagagacttgccctcagatggcactcaaacctgaggtctgtctcccttcaaccttctctcttccagcacccccaggtcacctccctccctcctcaggcgcctggcctggcccgggtgggcgcagtgccccacactgacagaggcc

SEQ ID NO: 43845 - DNA, 404 bp, Homo sapiens
ggagcctgttaatagcattcctgaggcagcagcagttttaaaaagcaaagtgtttctatttctggtctgacactaagagacctctgacttatggggcttcccaatgcctcccccaattattccttcagggaagtcactcttgactttattagtgccagtaaaggtaaaagtgggggcatgctaccactccttttttcacttgaacttgtggccctaaagagttagggccaatgtgataaaacaagtaggaaggtcgaatgatcagccaagaattcttttccatttcatgtttaaagcaagatacgactaaccactttgtgtacaactagttttaagaattgtttcagggctaatttgggaagcattagaaaataaaaagctattgtagcccttttagaaacatc

SEQ ID NO: 43846 - DNA, 1209 bp, Homo sapiens
ggttcttttccttaccagttaagcctcagtagaatcctcatgacctttggttgaattacatggacacttattaaaggctctcaatggtcccgcactgttctaagcactggacaggacaccaaataagaatgtagcagggaggaactcaagatgctgaccatctcattgaggagacagggcatatttgaatctggaccgtaagtgctacaggacaatgatggggaaaaaagacatctctgtggaatggttggaatggtatcatagaaaaaagactagagaagatagaatttgggccaagccttgaaaagagtatgggtcgaattcagctggtgaaggatggcgaatttccagacctgtaggatgatctaattactccctactcacagagttggagtaattaagtcacaggaccactctgaacagaatggacagagtggaggagtagctgagaggtaaagttcccgcaggcaagatgaaaccttccaccttgacccttggatgcctgcaggaggaggtggaccttgattggagaagctttaaaaagccctagtttacaaaagtaagctgtggtgagaaaaattatagcacctggtattcctgggtgacactatctggaaggggtgggaggaaaggcttaccaggttgttagaaatgttctgtatctctgttacagaggtggttacacaggcgtatacatttaccaaattccatccgacttacacttaaaatcagtgcattttcgtggggcatggccacaagcacctgggtcctgtgtcctagctactccaaaggccaaggtgggaggattgcttgagcccaggagttcaaggctacagttagctatgatcacattccattgcactctagcctgggtgacagtgtgagaccctgtctgtaattcgttctgtgcattttattgtctataaattgtgtttgaattttttaaaaattttaagttgtatttaaacaaagagaacctatggattaaaagactttaaaataatagcaaccaatggaaatacatgactggaattctgatgcgaacaccctattaaagaaattttttagagactattggagattgggcacagtagctcatgcctgtaattccagtactttcagaggccaaggtgggtggatagcttgaacccagcagttcgagactagcctgggcaacatagtgaaacccatctctattaaaaatacgaa

SEQ ID NO: 43847 - DNA, 403 bp, Homo sapiens
taatattcaatgagcccagatccgcggctggttcgccgggttgaggcgggggtagcgggcggggccggcgctggggagcccgcgacccgggcggggagggcgtgtgtcgggggggcggtggcggcgaggcgggcgcgcgggatggaacactgagacaccgacggaatgctccgaatcgccacataatcccctggaacggccgcgcacaacgccattggcttcttccttctccgcgcgccgccgccgtctcccacctccgcctcatcgcctccctctccgcccgctgcctccggagctgggggggaaacgcgaagccccactgcaatggagcccgccgccgcggccacggtacagcgactccccgagctcggcagggaggaccgagcttcggctccggcggccg

SEQ ID NO: 43848 - DNA, 534 bp, Homo sapiens
cctcacagacacaccccaaaataaagttttacttgctatcttcccatcctttaatgcagccacaatgacatataaaattaaccatcatgttatatgaagtcttgggagtggactggaagaatggggcttaggatctagctttaaggaagtcaagcaatgaaatgtcacatatttttaaaaggacaaaccacaaaaactgtgaaaagcaatagtggtgtcatcagcaaatagaaatttttgagaattcctagaaggcagaaagaagatagggttggaaaatctaagagaaaaggaaccaagataagtgtgcttttcccatagggaggccctgcagtagcttcaagttaagtcgataaagacaaagaggaggcatagatcatggggcaaccagtgatcaggtatccaccaaggaacctcagtttagacatcatggtctgtttgggataccatttttgactataagataaagctgtgatccaatctgtaaagaaacctcaagggaggatgctaggataagcattagggcctctactg

SEQ ID NO: 43849 - DNA, 368 bp, Homo sapiens
acaagattcaagtgggattcagttttcagagtgctggcaaacagcctggaaacagctctataagctcctggaatcctccagaggactgcagaactccataaaccatattctgacatcatccctgtctgggtatagacaggaccagcagccacccaggaatggccttaaagaatccctaatgaattaatcatcataaaccagctcgggagcaggagaacatgctcatgccgtcagtctgcctttgcccaggagttccacctcccattcaccaattaactttacagttgcatctgcctttcctgccaagctctcccataaaggaatttatcaccttctgttctgcttttcttcccaaatgtgaatcagaa

SEQ ID NO: 43850 - DNA, 219 bp, Homo sapiens
gataaaccatgccgcaataataaccttgtactagtcatttttaacatgtgaaagtatatctgcaagatacatttccagaaatgggattagccaatcatatgatattaagccaaccttttgatctctttgagctgcatttgttaactaataaattaagctcatatttacctcataggatcattattataatgaaataaccatataaacaattattgtaca

SEQ ID NO: 43851 - DNA, 3168 bp, Homo sapiens
accattcttccggtttcagaagttaaggctggtgtcctggccccagtccacctctgggagcgcctgcgccgctccgcggagagtccgtggatctcacaggttcccagttttccagacctgaagtgttttccaatcaaagcgaagagacgatctgtggatgttgaatatgcaaggagctgaagagagagacattagaagagagacttgtccaggctgggtaaacaagaacaagcctgctctggagcaggatgtctgtaaaattgactcatcagggatagtagtaaagaggttccaagaggatgaataccaagattctacatttgaagaaaaatatgcatgtgagggcatgaaggaaaactctcctagggagattgctgaatcatgccttttccaggaaggaggttttgggagaataactttcatccacaaagaagcaccccctgaaattattagtcaaggatataattttgagaaaagcttgcttttgacctcaagccttgttacacgtctcagggtttctacagaagagagtctgcatcagtgggaaacaagtaatatacaaaccaatgatatttcagaccaaagtaaatgtccaactctctgcacacagaaaaaatcttggaaatgtaatgaatgtggaaaaacctttactcagagctcatcccttacccaacatcagagaactcatactggagagagaccctacacatgtgaggaatgtgggaaagcctttagtcgtagttcattccttgttcaacatcaaagaattcacactggagtgaaaccatatggatgtgagcagtgtgggaaaacatttcgatgtcgatcatttcttactcagcatcaaagaattcacactggagagaaaccttataaatgcaatgaatgtgggaattccttccgcaatcactcacatctcactgaacaccagagaattcacactggagagaaaccttataaatgcaataggtgtgggaaggcattcaatcagaatacacaccttattcatcatcagagaattcacactggtgagaagccttacatatgcagtgaatgtggctcttcttttcgaaaacactcaaatcttacgcaacatcagagaattcacactggggaaaaaccccataaatgtgacgaatgtgggaaaactttccaaacaaaggcaaacctctctcagcatcagagaattcatagtggagagaaaccctataaatgtaaagaatgtggcaaagccttttgtcagagcccatctcttattaaacaccagcgaattcatactggagaaaaaccatataagtgtaaagaatgtggcaaagcgtttactcagagcaccccactcactaaacatcagagaatacatacaggggagagaccctacaaatgcagtgaatgtggtaaagccttcattcagagcatttgccttattcggcaccagagaagtcacactggagaaaaaccctataaatgcaatgaatgtggaaagggctttaatcagaacacctgcctcactcagcatatgagaattcatactggagagaagccctataaatgtaaagaatgtgggaaagcctttgctcatagctcatctcttactgaacatcatagaactcacactggtgagaagctctataaatgtagtgagtgtgagaaaaccttccgcaagtatgcacaccttagtgaacattacagaattcacactggtgagaagccttatgagtgtattgagtgtggaaagttcttcagacatagttcagtccttttcagacatcagaaacttcacagtggtgactaatgctgccatttaggttatgacagtttctctagcgaggatgactacgaatctgactgggagtagaggggcaggtagagttcctggagggaaggatgaaggagccttggctactgtactctgagaggaatgtttccagaaatggaggtgggagcttagggaatgcagagcctacttgaggtgggcatctgggaatacagggtagaaagaaattcctgcttttcagataaagcctacacattgccactgtctccccatgtgactcttacagcttgaggaggcatttgttagcacttctgttcactttactacatcctgccccacattctgacttgtcacccattttcgttggctggcaggttgagatgtttttcttaaacactgcctgtcagtgtgaagtggcacagctctgatgtagtgctaagtctagcctccagatttgaggcagccctgaccatgctaccatgggggaggctcccaacctgtggaagtggtcctgtgaaaaggagacagaaacaagtaagagccaaaaaaaaaaaaaaaaaaaatccatatccattcattaaaaaaatgagatataaagcaacaactgggctgacctctatagatctgccagtaaagaaggctttctttcattatcagggtgaaggtctttcctgattcttccaagctttgaggtgactcagagctaagaatgaaataggagaccaagttagaattcatgatactggtttatggggaggcagtcatacctgttcagagaaccaggaagactcaatatctatctcagaggaaatatggttacccaggaaagaaatggtctgctagagtgataagactcagaacaggaagcctgcatgtgactgagcaagtcacctacataaccctgcctgtactaaggtgtacacctgtctattgtaagtttgcctaggctgttggtgtacagagaccagaggagagagacacactaggactaacaatgtcctaacaaaatggtacttagtttgttggtctttaggagaaagcattagtaatgaaagaagaaagaattttcacttggttggacattggggctgcttaagaaagttgacatttgtcgtggaatgactttggaaagacttctaaaagaatctttttcaaatccctgaaaatcaggatagcacattttgctactgactgtgacagtgttttattcttttgagagaaatgacatagttttccctttatttcccaaattcctttcatgttcttaactgctacccagaaattgagcttcagaagattgaggatagcctttgattggtatttaaaataatttctaagctgtgaagcttatagcatttttaaagtatggctattaaaaacactaagttgataaa

SEQ ID NO: 43852 - DNA, 3244 bp, Homo sapiens
accattcttccggtttcagaagttaaggctggtgtcctggccccagtccacctctgggagcgcctgcgccgctccgcggagagtccgtggatctcacaaaaatgtttgctgacccttgacattgacaaactgctgacagctcagatgatccatgattggaaggatgtggtcatcaccaagatgtctttctttctccggttcccagttttccagacctgaagtgttttccaatcaaagcgaagagacgatctgtggatgttgaatatgcaaggagctgaagagagagacattagaagagagacttgtccaggctgggtaaacaagaacaagcctgctctggagcaggatgtctgtaaaattgactcatcagggatagtagtaaagaggttccaagaggatgaataccaagattctacatttgaagaaaaatatgcatgtgagggcatgaaggaaaactctcctagggagattgctgaatcatgccttttccaggaaggaggttttgggagaataactttcatccacaaagaagcaccccctgaaattattagtcaaggatataattttgagaaaagcttgcttttgacctcaagccttgttacacgtctcagggtttctacagaagagagtctgcatcagtgggaaacaagtaatatacaaaccaatgatatttcagaccaaagtaaatgtccaactctctgcacacagaaaaaatcttggaaatgtaatgaatgtggaaaaacctttactcagagctcatcccttacccaacatcagagaactcatactggagagagaccctacacatgtgaggaatgtgggaaagcctttagtcgtagttcattccttgttcaacatcaaagaattcacactggagtgaaaccatatggatgtgagcagtgtgggaaaacatttcgatgtcgatcatttcttactcagcatcaaagaattcacactggagagaaaccttataaatgcaatgaatgtgggaattccttccgcaatcactcacatctcactgaacaccagagaattcacactggagagaaaccttataaatgcaataggtgtgggaaggcattcaatcagaatacacaccttattcatcatcagagaattcacactggtgagaagccttacatatgcagtgaatgtggctcttcttttcgaaaacactcaaatcttacgcaacatcagagaattcacactggggaaaaaccccataaatgtgacgaatgtgggaaaactttccaaacaaaggcaaacctctctcagcatcagagaattcatagtggagagaaaccctataaatgtaaagaatgtggcaaagccttttgtcagagcccatctcttattaaacaccagcgaattcatactggagaaaaaccatataagtgtaaagaatgtggcaaagcgtttactcagagcaccccactcactaaacatcagagaatacatacaggggagagaccctacaaatgcagtgaatgtggtaaagccttcattcagagcatttgccttattcggcaccagagaagtcacactggagaaaaaccctataaatgcaatgaatgtggaaagggctttaatcagaacacctgcctcactcagcatatgagaattcatactggagagaagccctataaatgtaaagaatgtgggaaagcctttgctcatagctcatctcttactgaacatcatagaactcacactggtgagaagctctataaatgtagtgagtgtgagaaaaccttccgcaagtatgcacaccttagtgaacattacagaattcacactggtgagaagccttatgagtgtattgagtgtggaaagttcttcagacatagttcagtccttttcagacatcagaaacttcacagtggtgactaatgctgccatttaggttatgacagtttctctagcgaggatgactacgaatctgactgggagtagaggggcaggtagagttcctggagggaaggatgaaggagccttggctactgtactctgagaggaatgtttccagaaatggaggtgggagcttagggaatgcagagcctacttgaggtgggcatctgggaatacagggtagaaagaaattcctgcttttcagataaagcctacacattgccactgtctccccatgtgactcttacagcttgaggaggcatttgttagcacttctgttcactttactacatcctgccccacattctgacttgtcacccattttcgttggctggcaggttgagatgtttttcttaaacactgcctgtcagtgtgaagtggcacagctctgatgtagtgctaagtctagcctccagatttgaggcagccctgaccatgctaccatgggggaggctcccaacctgtggaagtggtcctgtgaaaaggagacagaaacaagtaagagccaaaaaaaaaaaaaaaaaaaatccatatccattcattaaaaaaatgagatataaagcaacaactgggctgacctctatagatctgccagtaaagaaggctttctttcattatcagggtgaaggtctttcctgattcttccaagctttgaggtgactcagagctaagaatgaaataggagaccaagttagaattcatgatactgctgttcagagaaccaggaagactcaatatctatctcagaggaaatatggttacccaggaaagaaatggtctgctagagtgataagactcagaacaggaagcctgcatgtgactgagcaagtcacctacataaccctgcctgtactaaggtgtacacctgtctattgtaagtttgcctaggctgttggtgtacagagaccagaggagagagacacactaggactaacaatgtcctaacaaaatggtacttagtttgttggtctttaggagaaagcattagtaatgaaagaagaaagaattttcacttggttggacattggggctgcttaagaaagttgacatttgtcgtggaatgactttggaaagacttctaaaagaatctttttcaaatccctgaaaatcaggatagcacattttgctactgactgtgacagtgttttattcttttgagagaaatgacatagttttccctttatttcccaaattcctttcatgttcttaactgctacccagaaattgagcttcagaagattgaggatagcctttgattggtatttaaaataatttctaagctgtgaagcttatagcatttttaaagtatggctattaaaaacactaagttgataaa

SEQ ID NO: 43853 - DNA, 3146 bp, Homo sapiens
accattcttccggtttcagaagttaaggctggtgtcctggccccagtccacctctgggagcgcctgcgccgctccgcggagagtccgtggatctcacaggttcccagttttccagacctgaagtgttttccaatcaaagcgaagagacgatctgtggatgttgaatatgcaaggagctgaagagagagacattagaagagagacttgtccaggctgggtaaacaagaacaagcctgctctggagcaggatgtctgtaaaattgactcatcagggatagtagtaaagaggttccaagaggatgaataccaagattctacatttgaagaaaaatatgcatgtgagggcatgaaggaaaactctcctagggagattgctgaatcatgccttttccaggaaggaggttttgggagaataactttcatccacaaagaagcaccccctgaaattattagtcaaggatataattttgagaaaagcttgcttttgacctcaagccttgttacacgtctcagggtttctacagaagagagtctgcatcagtgggaaacaagtaatatacaaaccaatgatatttcagaccaaagtaaatgtccaactctctgcacacagaaaaaatcttggaaatgtaatgaatgtggaaaaacctttactcagagctcatcccttacccaacatcagagaactcatactggagagagaccctacacatgtgaggaatgtgggaaagcctttagtcgtagttcattccttgttcaacatcaaagaattcacactggagtgaaaccatatggatgtgagcagtgtgggaaaacatttcgatgtcgatcatttcttactcagcatcaaagaattcacactggagagaaaccttataaatgcaatgaatgtgggaattccttccgcaatcactcacatctcactgaacaccagagaattcacactggagagaaaccttataaatgcaataggtgtgggaaggcattcaatcagaatacacaccttattcatcatcagagaattcacactggtgagaagccttacatatgcagtgaatgtggctcttcttttcgaaaacactcaaatcttacgcaacatcagagaattcacactggggaaaaaccccataaatgtgacgaatgtgggaaaactttccaaacaaaggcaaacctctctcagcatcagagaattcatagtggagagaaaccctataaatgtaaagaatgtggcaaagccttttgtcagagcccatctcttattaaacaccagcgaattcatactggagaaaaaccatataagtgtaaagaatgtggcaaagcgtttactcagagcaccccactcactaaacatcagagaatacatacaggggagagaccctacaaatgcagtgaatgtggtaaagccttcattcagagcatttgccttattcggcaccagagaagtcacactggagaaaaaccctataaatgcaatgaatgtggaaagggctttaatcagaacacctgcctcactcagcatatgagaattcatactggagagaagccctataaatgtaaagaatgtgggaaagcctttgctcatagctcatctcttactgaacatcatagaactcacactggtgagaagctctataaatgtagtgagtgtgagaaaaccttccgcaagtatgcacaccttagtgaacattacagaattcacactggtgagaagccttatgagtgtattgagtgtggaaagttcttcagacatagttcagtccttttcagacatcagaaacttcacagtggtgactaatgctgccatttaggttatgacagtttctctagcgaggatgactacgaatctgactgggagtagaggggcaggtagagttcctggagggaaggatgaaggagccttggctactgtactctgagaggaatgtttccagaaatggaggtgggagcttagggaatgcagagcctacttgaggtgggcatctgggaatacagggtagaaagaaattcctgcttttcagataaagcctacacattgccactgtctccccatgtgactcttacagcttgaggaggcatttgttagcacttctgttcactttactacatcctgccccacattctgacttgtcacccattttcgttggctggcaggttgagatgtttttcttaaacactgcctgtcagtgtgaagtggcacagctctgatgtagtgctaagtctagcctccagatttgaggcagccctgaccatgctaccatgggggaggctcccaacctgtggaagtggtcctgtgaaaaggagacagaaacaagtaagagccaaaaaaaaaaaaaaaaaaaatccatatccattcattaaaaaaatgagatataaagcaacaactgggctgacctctatagatctgccagtaaagaaggctttctttcattatcagggtgaaggtctttcctgattcttccaagctttgaggtgactcagagctaagaatgaaataggagaccaagttagaattcatgatactgctgttcagagaaccaggaagactcaatatctatctcagaggaaatatggttacccaggaaagaaatggtctgctagagtgataagactcagaacaggaagcctgcatgtgactgagcaagtcacctacataaccctgcctgtactaaggtgtacacctgtctattgtaagtttgcctaggctgttggtgtacagagaccagaggagagagacacactaggactaacaatgtcctaacaaaatggtacttagtttgttggtctttaggagaaagcattagtaatgaaagaagaaagaattttcacttggttggacattggggctgcttaagaaagttgacatttgtcgtggaatgactttggaaagacttctaaaagaatctttttcaaatccctgaaaatcaggatagcacattttgctactgactgtgacagtgttttattcttttgagagaaatgacatagttttccctttatttcccaaattcctttcatgttcttaactgctacccagaaattgagcttcagaagattgaggatagcctttgattggtatttaaaataatttctaagctgtgaagcttatagcatttttaaagtatggctattaaaaacactaagttgataaa

SEQ ID NO: 43854 - DNA, 1863 bp, Homo sapiens
tgctactactgaatacgcggccgcctaaacaagcgtttactcagagcaccccactcactaaacatcagagaatacatacaggggagagaccctacaaatgcagtgaatgtggtaaagccttcattcagagcatttgccttattcggcaccagagaagtcacactggagaaaaaccctataaatgcaatgaatgtggaaagggctttaatcagaacacctgcctcactcagcatatgagaattcatactggagagaagccctataaatgtaaagaatgtgggaaagcctttgctcatagctcatctcttactgaacatcatagaactcacactggtgagaagctctataaatgtagtgagtgtgagaaaaccttccgcaagtatgcacaccttagtgaacattacagaattcacactggtgagaagccttatgagtgtattgagtgtggaaagttcttcagacatagttcagtccttttcagacatcagaaacttcacagtggtgactaatgctgccatttaggttatgacagtttctctagcgaggatgactacgaatctgactgggagtagaggggcaggtagagttcctggagggaaggatgaaggagccttggctactgtactctgagaggaatgtttccagaaatggaggtgggagcttagggaatgcagagcctacttgaggtgggcatctgggaatacagggtagaaagaaattcctgcttttcagataaagcctacacattgccactgtctccccatgtgactcttacagcttgaggaggcatttgttagcacttctgttcactttactacatcctgccccacattctgacttgtcacccattttcgttggctggcaggttgagatgtttttcttaaacactgcctgtcagtgtgaagtggcacagctctgatgtagtgctaagtctagcctccagatttgaggcagccctgaccatgctaccatgggggaggctcccaacctgtggaagtggtcctgtgaaaaggagacagaaacaagtaagagccaaaaaaaaaaaaaaaaaaaatccatatccattcattaaaaaaatgagatataaagcaacaactgggctgacctctatagatctgccagtaaagaaggctttctttcattatcagggtgaaggtctttcctgattcttccaagctttgaggtgactcagagctaagaatgaaataggagaccaagttagaattcatgatactgctgttcagagaaccaggaagactcaatatctatctcagaggaaatatggttacccaggaaagaaatggtctgctagagtgataagactcagaacaggaagcctgcatgtgactgagcaagtcacctacataaccctgcctgtactaaggtgtacacctgtctattgtaagtttgcctaggctgttggtgtacagagaccagaggagagagacacactaggactaacaatgtcctaacaaaatggtacttagtttgttggtctttaggagaaagcattagtaatgaaagaagaaagaattttcacttggttggacattggggctgcttaagaaagttgacatttgtcgtggaatgactttggaaagacttctaaaagaatctttttcaaatccctgaaaatcaggatagcacattttgctactgactgtgacagtgttttattcttttgagagaaatgacatagttttccctttatttcccaaattcctttcatgttcttaactgctacccagaaattgagcttcagaagattgaggatagcctttgattggtatttaaaataatttctaagctgtgaagcttatagcatttttaaagtatggctattaaaaacactaagttgataaa

SEQ ID NO: 43855 - DNA, 1947 bp, Homo sapiens
ttttttttttttgagacagagtctcactcttgcccaggctggagtggagtggcataaacacagctcactacggcctcaaccttctgggctcggatgattctcctgcctcagcctcctgagtagcaggaactgcaggtgtgagtcatcacactcagctaatttttttttttttttttttactttttgtagagatggggttctcactgcattgcccaggctggtcttgaatttctgggctcaggtgatcttcccacctcagcctcctgagtagctgggaccacaggtgcatgctaatttttaaaattttttgtttttaaatgctggtcttcaactcttgtccccaagtagctgggattggggcatgaggcactgtgctaacttcatgttgaaattgaattgccattctaacagtgttaagagatggggcctgtaagaggtgattaggctgtgagggctccactctccaagggcggagttaatgttatgaaagggtaagtccagcccgcttgtgcctctcttgccctccagtgttcaaagcaccatcttggaggtggaattcccaagtcggccagttcctggatcttggactgtccggtctccagaaccgtgagccaataaacctctgttccttgtaaatgagtcagcctcaggtattctcttgtagcagcacaaatggaggcagacacttccttcaccaatctcatgggaggcccactcctgtgagctgcctctagttccccaggccacagactccatcagggctcacctggagccgtccctgtctcacctggaagctctcccactcctctggccagcctgggcatctccacccaatatgagtgatggcgactgattcccttactttagcaagctgggaataaggaatgtttgcctgttcttattcaggggtctctgcatctccacacttgcacaggttgtgtgtacatacattttcctgtctttctggtaagcccctggggtggagctctgggccacagggcaggaaaactcagtgttgctaggaactgccagacattttcccggagtgagtgcagcatttacattcccaccagaagtgtgccaggttcttgtcatactgcgtcctcgccagcgcttggtgctgtcagtcttcttagtttccatttagagattcagtgtttaaattttgaacgtcttgggtgaacaccttggtttgagaaaaagaaatgacccaaagtgcagcacagaaagacagagctggaaaatatgagatgggatgagacaagaagatggagagtttagtatgacatccgcaatttacgagtaattccagaaggaggggaaagagaatatggggtggaggcaagtattcagagaaatacggctgagaactttcccaaaccaacaggagcccctgctccttaggttcaggaaccagcagctcccaagcagcatagttaaaaagctctacccaaacagtcacgtcttggtgaaagtacagaatctcatgacaaagagatcttaaggcagaaaagaaagagattatctggaaagaagaaaataagtagttgattaaaagcaacagtggaagccagaaagatagtaaataatatcttcaaagtcctgggagaaaatagtgatagcctagaattgtgtacccagaaaatccgtctttcaagaatgaggggccaggcgcagtggctcacgtctgtattcccagcactttgggaggccaaggcaggtggatcacctgaggtcaggagttcaagaccagcctgatcaacatggtgaaaccctgtctctactaaaaatataaaaattagctgggtgtggtggcatattcctgtagtcccggctgctcgggaggctgaggcaggagaatcacttgagcccaggaggcagaggttgcagtgagccaagattgtgccattgcactccagcctgggcaatagaatgagactctgtctc

SEQ ID NO: 43856 - DNA, 1600 bp, Homo sapiens
ttttttttttttgagacagagtctcactcttgcccaggctggagtggagtggcataaacacagctcactacggcctcaaccttctgggctcggatgattctcctgcctcagcctcctgagtagcaggaactgcaggtgtgagtcatcacactcagctaatttttttttttttttttttactttttgtagagatggggttctcactgcattgcccaggctggtcttgaatttctgggctcaggtgatcttcccacctcagcctcctgagtagctgggaccacaggtgcatgctaatttttaaaattttttgtttttaaatgctggtcttcaactcttgtccccaagtagctgggattggggcatgaggcactgtgctaacttcatgttgaaattgaattgccattctaacagtgttaagagatggggcctgtaagaggtgattaggctgtgagggctccactctccaagggcggagttaatgttatgaaagggtaagtccagcccgcttgtgcctctcttgccctccagtgttcaaagcaccatcttggaggtggaattcccaagtcggccagttcctggatcttggactgtccggtctccagaaccgtgagccaataaacctctgttccttgtaaatgagtcagcctcaggtattctcttgtagcagcacaaatggaggcagacacttccttcaccaatctcatgggaggcccactcctgtgagctgcctctagttccccaggccacagactccatcagggctcacctggagccgtccctgtctcacctggaagctctcccactcctctggccagcctgggcatctccacccaatatgagtgatggcgactgattcccttactttagcaagctgggaataaggaatgtttgcctgttcttattcaggggtctctgcatctccacacttgcacaggttgtgtgtacatacattttcctgtctttctggtaagcccctggggtggagctctgggccacagggcaggaaaactcagtgttgctaggaactgccagacattttcccggagtgagtgcagcatttacattcccaccagaagtgtgccaggttcttgtcatactgcgtcctcgccagcgcttggtgctgtcagtcttcttagtttccatttagagattcagtgtttaaattttgaacgtcttgggtgaacaccttggtttgagaaaagtaagaaaaagggtctgtctggctatgggccatggagacccagggcagtgctccacgtgccaaccctggggcagggagcccaagctaggactgtgactgtctgggctgtgggcatctgaccatctccagtgtccccgtctttgatttccctggcgatggtgctagcttagtttgtgcgcatcggcatttgtgggagaaatgaaggattaatacattttgttttatgtcagactctctcagtgagaagttctcagggacaataatagcagggggtcctgctgaagaaaaactgggagatggctgagctctggtccatctttcattgattcattcatttcttcattcaaccatgtattgaatgcttatagccaatgaaaataaagtacacagtatatttta

SEQ ID NO: 43857 - DNA, 1491 bp, Homo sapiens
gggtagatggattcacatggagggttatggaatagagtatggttaccatctccccaggaaacggcttggtcctgatgcggagatggggttctcactgcattgcccaggctggtcttgaatttctgggctcaggtgatcttcccacctcagcctcctgagtagctgggaccacaggtgcatgctaatttttaaaattttttgtttttaaatgctggtcttcaactcttgtccccaagtagctgggattggggcatgaggcactgtgctaacttcatgttgaaattgaattgccattctaacagtgttaagagatggggcctgtaagaggtgattaggctgtgagggctccactctccaagggcggagttaatgttatgaaagggtaagtccagcccgcttgtgcctctcttgccctccagtgttcaaagcaccatcttggaggtggaattcccaagtcggccagttcctggatcttggactgtccggtctccagaaccgtgagccaataaacctctgttccttgtaaatgagtcagcctcaggtattctcttgtagcagcacaaatggaggcagacacttccttcaccaatctcatgggaggcccactcctgtgagctgcctctagttccccaggccacagactccatcagggctcacctggagccgtccctgtctcacctggaagctctcccactcctctggccagcctgggcatctccacccaatatgagtgatggcgactgattcccttactttagcaagctgggaataaggaatgtttgcctgttcttattcaggggtctctgcatctccacacttgcacaggttgtgtgtacatacattttcctgtctttctggtaagcccctggggtggagctctgggccacagggcaggaaaactcagtgttgctaggaactgccagacattttcccggagtgagtgcagcatttacattcccaccagaagtgtgccaggttcttgtcatactgcgtcctcgccagcgcttggtgctgtcagtcttcttagtttccatttagagattcagtgtttaaattttgaacgtcttgggtgaacaccttggtttgagaaaagtaagaaaaagggtctgtctggctatgggccatggagacccagggcagtgctccacgtgccaaccctggggcagggagcccaagctaggactgtgactgtctgggctgtgggcatctgaccatctccagtgtccccgtctttgatttccctggcgatggtgctagcttagtttgtgcgcatcggcatttgtgggagaaatgaaggattaatacattttgttttatgtcagactctctcagtgagaagttctcagggacaataatagcagggggtcctgctgaagaaaaactgggagatggctgagctctggtccatctttcattgattcattcatttcttcattcaaccatgtattgaatgcttatagccaatgaaaataaagtacacagtatatttta

SEQ ID NO: 43858 - DNA, 243 bp, Homo sapiens
gcaccaagccactcatgaggaatcctctcccatgatccaaacacctcccactaggcccacctccagtactggggatcaaatttcaacaagagacttggcaggaccaaacgaaccatatccaaatcacagcaagtcctttgcctattttttaaaaagttgtttgggtatttttgttgttgagttgtaggaattctttatatattttagatgttaacccctgttcggatatatgatttgcaaata

SEQ ID NO: 43859 - DNA, 430 bp, Homo sapiens
atgtttccttgacctgccttctcagtcttggtagccagttctctctctctgttcagtacatgttcatagagcagtaagtaagagctgagctagctctgggggaccagcagagcatgcctgccctcagtgagtgcaagtgccgtggaagaaaggtacagtgagaaaagttacagtgcagtgcaaatgccctaagagagagttccgaatcactgctttagaaggcagtgggaaaaacacaacttcaatcttgcttacagcaaatatttcagagacacttggtttcctatagtgaattcagtaaagtctgaaccttaaaaggggggtaagcacattattatcttttctatttcatattttaggacattcatagaacacccgaaatgataatatgatgtgaaatgattgttaaatggtttctttagaatttcta

SEQ ID NO: 43860 - DNA, 325 bp, Homo sapiens
catccttctatctccaacagaagagtgaactcatgtttaacttcatgtaggtacagatgggatatttatcaatatgtatatagtacatagattaatagacacacatatttccttgttctgtcagctgacaaggtctagaagcagtgactgctcagtagcagtaagcagaccttacattcaaatcttggtttctaatattctccaacacaaggaaccaggactccttttagaaatggcagattctaggactgggttggaaaaaactacaagatgagcctggagcattttgtagtgccagaaactaaggaagttctcacaaaaaaaa

SEQ ID NO: 43861 - DNA, 1933 bp, Homo sapiens
catgcgccaccacacccggctaattttgtatttttagtagagatgggtttctccatgttggtcgggctggtctcgaactcccgacctcaggtgatctgcctgcctcagcctcccaaagtgctgggattacaggtgtgagccaccgcgcccggccgagaatgacatcttaaagccaccattgcgttcctcatttgtgaactgtcttctcatattttaagtcaagtctataagatcatttttaacctaagttccaactttgttggactccttaaaataagcacccatgaaagccagccagcccttcctccttccctcaccaccctccgtctcttcggctgcttgctctttagtgtagattagtggaagccattcacagaatgtagactcatgtataggtcaccgtttctttcccccactagaaatcacattcactaagcagtggattgaatttaagagtgctgcccctgcccggcgcagtagggcgtgcctctagttccagctactcgggagtctgaggcagaggatggcatgtgccaggagtttgaggctgcagtgcactatgcttgcacctgtgaatagccactgcactccatcttgggcaacacagtgagacccccatctataaaaagagagcactgcctgaacctcggtggcactgggaagctctggcctgagagttaaacacccatgctgaatgatacagtgtgcattctctccagctgcaaactttcttcaactttcctaaattcttactaaattcagaggaataggataaagatcacttagagaaagggtgcttatggacatagcctgagtttcctttaacctctctgcaatgggtgcttttaactagcttctacatggcaagctgtttcagtttgcaaaatcactgcccagcatgtttgaggtcagttggcaccttaaaacacctgttctccagcccttggacagtggagagaatctgtaaaagtgtgaccccctctaagatttcgttttaaatgatcagattcggttccagttttattcttgttgagtttttccctatgaaggctccttttgaatgtgtcttgagacccaaattgagcatgttgctgttattcctgccctgcacctgtggagcaggagtggcagggctggctgtgctgggttccagctcgctcccaccgagggactagcttggcctttgcgctttgattccagatagtaagatgagtggaagtgtttatcgagcatgcaaaagaaaccctcacggctaagggctctgggagttgtgtctgtgtgacctgagagtgatccatctcctgcctgtgtgaggtagcagtgggcacttttcattgagacaaactccagggtgtccagagggggttctgccccttgtgaaggcccattcctggcacttagagacagaaagaactcagcaatctttcgttctagttatattcggtctttgaaactgacaatctttgaaatgtgaatactgtaacaatatgttttcttggattgttgtctttaaaaaggatttttgtgaagcaattgatttatcaaagcaaaaaaattaaaaatagaaacttgctttatggatgttttattttataaagctcatgtcaccaaaagctgcttctccattttatgtaaaacattgagaatgttttcatgttttctggtgacatgtagggtctgtagtcacccctgcatattgagaaactaggaccacactgcatcggactagtcaggtccatttacatgtccaagaatcttttcttaaattccttactttgttcattcattggctgttcaggcagaaaatggaaacaggtagcttttatgttttttattatagttttccacaaatctaattattttgatagttacaagaagataatgattcatcagtaagctaacataatccctttcatagttcatattataaatt

SEQ ID NO: 43862 - DNA, 1898 bp, Homo sapiens
catgcgccaccacacccggctaattttgtatttttagtagagatgggtttctccatgttggtcgggctggtctcgaactcccgacctcaggtgatctgcctgcctcagcctcccaaagtgctgggattacaggtgtgagccaccgcgcccggccgagaatgacatcttaaagccaccattgcgttcctcatttgtgaactgtcttctcatattttaagtcaagtctataagatcatttttaacctaagttccaactttgttggactccttaaaataagcacccatgaaagccagccagcccttcctccttccctcaccaccctccgtctcttcggctgcttgctctttagtgtagattagtggaagccattcacagaatgtagactcatgtataggtcaccgtttctttcccccactagaaatcacattcactaagcagtggattgaatttaagagtgctgcccctgcccggcgcagtagggcgtgcctctagttccagctactcgggagtctgaggcagaggatggcatgtgccaggagtttgccactgcactccatcttgggcaacacagtgagacccccatctataaaaagagagcactgcctgaacctcggtggcactgggaagctctggcctgagagttaaacacccatgctgaatgatacagtgtgcattctctccagctgcaaactttcttcaactttcctaaattcttactaaattcagaggaataggataaagatcacttagagaaagggtgcttatggacatagcctgagtttcctttaacctctctgcaatgggtgcttttaactagcttctacatggcaagctgtttcagtttgcaaaatcactgcccagcatgtttgaggtcagttggcaccttaaaacacctgttctccagcccttggacagtggagagaatctgtaaaagtgtgaccccctctaagatttcgttttaaatgatcagattcggttccagttttattcttgttgagtttttccctatgaaggctccttttgaatgtgtcttgagacccaaattgagcatgttgctgttattcctgccctgcacctgtggagcaggagtggcagggctggctgtgctgggttccagctcgctcccaccgagggactagcttggcctttgcgctttgattccagatagtaagatgagtggaagtgtttatcgagcatgcaaaagaaaccctcacggctaagggctctgggagttgtgtctgtgtgacctgagagtgatccatctcctgcctgtgtgaggtagcagtgggcacttttcattgagacaaactccagggtgtccagagggggttctgccccttgtgaaggcccattcctggcacttagagacagaaagaactcagcaatctttcgttctagttatattcggtctttgaaactgacaatctttgaaatgtgaatactgtaacaatatgttttcttggattgttgtctttaaaaaggatttttgtgaagcaattgatttatcaaagcaaaaaaattaaaaatagaaacttgctttatggatgttttattttataaagctcatgtcaccaaaagctgcttctccattttatgtaaaacattgagaatgttttcatgttttctggtgacatgtagggtctgtagtcacccctgcatattgagaaactaggaccacactgcatcggactagtcaggtccatttacatgtccaagaatcttttcttaaattccttactttgttcattcattggctgttcaggcagaaaatggaaacaggtagcttttatgttttttattatagttttccacaaatctaattattttgatagttacaagaagataatgattcatcagtaagctaacataatccctttcatagttcatattataaatt

SEQ ID NO: 43863 - DNA, 1787 bp, Homo sapiens
  misc_feature (1787)..(1787): n is a, c, g, or t
catgcgccaccacacccggctaattttgtatttttagtagagatgggtttctccatgttggtcgggctggtctcgaactcccgacctcaggtgatctgcctgcctcagcctcccaaagtgctgggattacaggtgtgagccaccgcgcccggccgagaatgacatcttaaagccaccattgcgttcctcatttgtgaactgtcttctcatattttaagtcaagtctataagatcatttttaacctaagttccaactttgttggactccttaaaataagcacccatgaaagccagccagcccttcctccttccctcaccaccctccgtctcttcggctgcttgctctttagtgtagattagtggaagccattcacagaatgtagactcatgtataggtcaccgtttctttcccccactagaaatcacattcactaagcagtggattgaatttaagagtgctgcccctgcccggcgcagtagggcgtgcctctagttccagctactcgggagtctgaggcagaggatggcatgtgccaggagtttgaggctgcagtgcactatgcttgcacctgtgaatagccactgcactccatcttgggcaacacagtgagacccccatctataaaaagagagcactgcctgaacctcggtggcactgggaagctctggcctgagagttaaacacccatgctgaatgatacagtgtgcattctctccagctgcaaactttcttcaactttcctaaattcttactaaattcagaggaataggataaagatcacttagagaaagggtgcttatggacatagcctgagtttcctttaacctctctgcaatgggtgcttttaactagcttctacatggcaagctgtttcagtttgcaaaatcactgcccagcatgtttgaggtcagttggcaccttaaaacacctgttctccagcccttggacagtggagagaatctgtaaaagtgtgaccccctctaagatttcgttttaaatgatcagattcggttccagttttattcttgttgagtttttccctatgaaggctccttttgaatgtgtcttgagacccaaattgagcatgttgctgttattcctgccctgcacctgtggagcaggagtggcagggctggctgtgctgggttccagctcgctcccaccgagggactagcttggcctttgcgctttgattccagatagtaagatgagtggaagtgtttatcgagcatgcaaaagaaaccctcacggctaagggctctgggagttgtgtctgtgtgacctgagagtgatccatctcctgcctgtgtgaggtagcagtgggcacttttcattgagacaaactccagggtgtccagagggggttctgccccttgtgaaggcccattcctggcacttagagacagaaagaactcagcaatctttcgttctagttatattcggtctttgaaactgacaatctttgaaatgtgaatactgtaacaatatgttttcttggattgttgtctttaaaaaggatttttgtgaagcaattgatttatcaaagcaaaaaaattaaaattaaaaaaaaaaaaaaggggggcgacaggaatattcccaagggccaagttaggtatccagctttgtacaagggccattaggagcgttaaaaacagagggcggtaaagtggagggaaatgtacaggattggagaccactggcgggaatgaaacaaaacggaataaagatagaaaatgtggaacagatacaagaacaaagaaaagtgagtgctgatattaggtcttcn

SEQ ID NO: 43864 - DNA, 410 bp, Homo sapiens
tgttccctcacctggtggtggcttttcccacgggcgcactttgatcactcctgggctgctcacgactcatgtctctttctctgtgcttgttatccttgaacacaaagtttcattgaaaaagaattactcgtgttagccaggatggtctcgatctcctgacctcgtgatctgcccccctcggcctcccagagtgctgggattacacaatgaaaccctgtctctactaaaaatacaaaaaattagctgagtgtggtgacaggcacctgtagtcccagctactctggagactgaggcaggagaatggcgtgaacctgggaggcagagcttgcagtgagccgagattgcgccaccgcactccagcctgggcgacagagtgagactccgtctcaaaaaaaataaaaagaaaggaa

SEQ ID NO: 43865 - DNA, 1745 bp, Homo sapiens
acttcccaccgagaggggacggagcgtgcccacctcccaggggtgaggggggacccacctgagatgtgtgcacattttatttatttattgttttgagacagagtctcgctgtgcactccagcttgggtgagagtgggactctgtcttagaaagaaaaaaaaaagtatttggacacagacatgcatgcaaggaaggccaatgatgccggccaccaccaggagctgggagaggcccagggcagatccccttcagccttggagggacctagccctggccacaccttcatctcagacttgcggcccagagaactgaatgagaataaatgtgcgtgaagcccctcagtccacaggatgtggtactggaagcccccactcaagaaggctccagtgaatgctggcacgttcagccaggatgcctccgtgaagctggagacctctgccctgggtcgggaggggaaactgctccaatccagggactgccacatgggaggggacggagcgtgcccacctcccaggggtgaggggggacccacctgagatgtgtgcacattttatttatttattgttttgagacagagtctcgctgtgtcacccaggctggagtgcagtggtgaaatctcggctcattgcagccccttccttccaggctcaagtgatcctcccgcctcagccccgggtagctgggactacaggtgtgcacgagcacacccggctaatctttgtattttttgtagacagaaggtctcaccatgttgcccaggatggtctcgaactcctgggctcaagcgacctacctacctcggcctcacaaagtgtgcacattgtaatatcgtgatttcatatttggagaatcagcaaccaaccagccaaccatgttgcttttataagacagagctgagaaagcaaagcttggctgtcgtcttggctctggtaccacccacgagatgcgggcgattctcagctcagggcgtggaggcgtggtgtgggggagtctatttgccatttttgtttgtcagcagggggcaggggttctcaaagattgcaaaatgctgctgcaggtcaggaaggttattttgggtgcctgtgggggaggtgaaacaaggtcccatgactgttttgcagaaccttgtctgtggagggtagaggttgcggcaggggcctgtgggccttacttggtgagaaggtaggtctagctggctccattcagtatttgagacatttggaatttgtctgcatttaaaaccaagagatcacacacacctgtctggatttggagtttctcttgaaaactcgccagtccggccgtctgagcctgcactgacgcctggtgaagctgtgcaggggccgcccctctccctttcgccacagtcctctccactccctttcgcctctccctggcctgctgcactcactgataggaaattctgaccccagactcggagcagccttcccgtggttcggtttttgcttccgcgaaaaagccaaaggccttggccagagagccagctgttcctacctctaccccacgcttccaaggcaaccttctccacttatcttaggccgagagacagctcttcaagaacgtacatggatcctgattttctcacgaagtcccgatggaaccctgtgctgttgagacatcagtgtgtaaaactctctgtgtccctgttgggctgtccagacagtctggactcttgtaaatttgagatttaattaaaggaaacaaaccaaaaaaaaagcggaaca

SEQ ID NO: 43866 - DNA, 1192 bp, Homo sapiens
tacttgagagatgacgagggaagatcacttgagcccaggagttaagaggctgcatggtgaaatctcggctcattgcagccccttccttccaggctcaagtgatcctcccgcctcagccccgggtagctgggactacaggtgtgcacgagcacacccggctaatctttgtattttttgtagacagaaggtctcaccatgttgcccaggatggtctcgaactcctgggctcaagcgacctacctacctcggcctcacaaagtgtgcacattgtaatatcgtgatttcatatttggagaatcagcaaccaaccagccaaccatgttgcttttataagacagagctgagaaagcaaagcttggctgtcgtcttggctctggtaccacccacgagatgcgggcgattctcagctcagggcgtggaggcgtggtgtgggggagtctatttgccatttttgtttgtcagcagggggcaggggttctcaaagattgcaaaatgctgctgcaggtcaggaaggttattttgggtgcctgtgggggaggtgaaacaaggtcccatgactgttttgcagaaccttgtctgtggagggtagaggttgcggcaggggcctgtgggccttacttggtgagaaggtaggtctagctggctccattcagtatttgagacatttggaatttgtctgcatttaaaaccaagagatcacacacacctgtctggatttggagtttctcttgaaaactcgccagtccggccgtctgagcctgcactgacgcctggtgaagctgtgcaggggccgcccctctccctttcgccacagtcctctccactccctttcgcctctccctggcctgctgcactcactgataggaaattctgaccccagactcggagcagccttcccgtggttcggtttttgcttccgcgaaaaagccaaaggccttggccagagagccagctgttcctacctctaccccacgcttccaaggcaaccttctccacttatcttaggccgagagacagctcttcaagaacgtacatggatcctgattttctcacgaagtcccgatggaaccctgtgctgttgagacatcagtgtgtaaaactctctgtgtccctgttgggctgtccagacagtctggactcttgtaaatttgagatttaattaaaggaaacaaaccaaaaaaaaagcggaaca

SEQ ID NO: 43867 - DNA, 1834 bp, Homo sapiens
acttcccaccgagaggggacggagcgtgcccacctcccaggggtgaggggggacccacctgagatgtgtgcacattttatttatttattgttttgagacagagtctcgctgtgcactccagcttgggtgagagtgggactctgtcttagaaagaaaaaaaaaagtatttggacacagacatgcatgcaaggaaggccaatgatgccggccaccaccaggagctgggagaggcccagggcagatccccttcagccttggagggacctagccctggccacaccttcatctcagacttgcggcccagagaactgaatgagaataaatgtgcgtgaagcccctcagtccacaggatgtggtactggaagcccccactcaagaaggctccagtgaatgctggcacgttcagccaggatgcctccgtgaagctggagacctctgccctgggtcgggaggggaaactgctccaatccagggactgccacatgggaggggacggagcgtgcccacctcccaggggtgaggggggacccacctgagatgtgtgcacattttatttatttattgttttgagacagagtctcgctgtgtcacccaggctggagtgcagtggtgaaatctcggctcattgcagccccttccttccaggctcaagtgatcctcccgcctcagccccgggtagctgggactacaggtgtgcacgagcacacccggctaatctttgtattttttgtagacagaaggtctcaccatgttgcccaggatggtctcgaactcctgggctcaagcgacctacctacctcggcctcacaaagtgtgcacattgtaatatcgtgatttcatatttggagaatcagcaaccaaccagccaaccatgttgcttttataagacagagctgagaaagcaaagcttggctgtcgtcttggctctggtaccacccacgagatgcgggcgattctcagctcagggcgtggaggcgtggtgtgggggagtctatttgccatttttgtttgtcagcagggggcaggggttctcaaagattgcaaaatgctgctgcaggtcaggaaggttattttgggtgcctgtgggggaggtgaaacaaggtcccatgactgttttgcagaaccttgtctgtggagggtagaggttgcggcaggggcctgtgggccttacttggtgagaaggtaggtctagctggctccattcagtatttgagacatttggaatttgtctgcatttaaaaccaagagatcacacacacctgtctggatttggagtttctcttgaaaactcgccagtccggccgtctgagcctgcactgacgcctggtgaagctgtgcaggggccgcccctctccctttcgccacagtcctctccactccctttcgcctctccctggcctgctgcactcactgataggaaattctgaccccagactcggagcagccttcccgtggttcggtttttgcttccgcgaaaaagccaaaggccttggccagagagccagctgttcctacctcttgccgccgttcctaggaacggcggcaagacggaaagaggaggaaatggggtgtgatgggtcaaaggcaggacaggtaagccatggtcctcaaaccaaagagccctctctgtaggtcctctgatctttgagtgtgagctcaagccctcccagtggacacagaaaaaggcctggtagtaagtggtttgcattgtgaggtatgaggatccctggtacattcagcagcatgtgggtcttcggaaatcagcccacaagataagaacactgcaaccaaactcataactaatactggctaatttaactattgtccaaaagag

SEQ ID NO: 43868 - DNA, 1655 bp, Homo sapiens
acttcccaccgagaggggacggagcgtgcccacctcccaggggtgaggggggacccacctgagatgtgtgcacattttatttatttattgttttgagacagagtctcgctgtgcactccagcttgggtgagagtgggactctgtcttagaaagaaaaaaaaaagtatttggacacagacatgcatgcaaggaaggccaatgatgccggccaccaccaggagctgggagaggcccagggcagatccccttcagccttggagggacctagccctggccacaccttcatctcagacttgcggcccagagaactgaatgagaataaatgtgcgtgaagcccctcagtccacaggatgtggtactggaagcccccactcaagaaggctccagtgaatgctggcacgttcagccaggatgcctccgtgaagctggagacctctgccctgggtcgggaggggaaactgctccaatccagggactgccacatgggaggggacggagcgtgcccacctcccaggggtgaggggggacccacctgagatgtgtgcacattttatttatttattgttttgagacagagtctcgctgtgtcacccaggctggagtgcagtggtgaaatctcggctcattgcagccccttccttccaggctcaagtgatcctcccgcctcagccccgggtagctgggactacaggtgtgcacgagcacacccggctaatctttgtattttttgtagacagaaggtctcaccatgttgcccaggatggtctcgaactcctgggctcaagcgacctacctacctcggcctcacaaagtgtgcacattgtaatatcgtgatttcatatttggagaatcagcaaccaaccagccaaccatgttgcttttataagacagagctgagaaagcaaagcttggctgtcgtcttggctctggtaccacccacgagatgcgggcgattctcagctcagggcgtggaggcgtggtgtgggggagtctatttgccatttttgtttgtcagcagggggcaggggttctcaaagattgcaaaatgctgctgcaggtcaggaaggttattttgggtgcctgtgggggaggtgaaacaaggtcccatgactgttttgcagaaccttgtctgtggagggtagaggttgcggcaggggcctgtgggccttacttggtgagaaggtaggtctagctggctccattcagtatttgagacatttggaatttgtctgcatttaaaaccaagagatcacacacacctgtctggatttggagtttctcttgaaaactcgccagtccggccgtggcctgctgcactcactgataggaaattctgaccccagactcggagcagccttcccgtggttcggtttttgcttccgcgaaaaagccaaaggccttggccagagagccagctgttcctacctctaccccacgcttccaaggcaaccttctccacttatcttaggccgagagacagctcttcaagaacgtacatggatcctgattttctcacgaagtcccgatggaaccctgtgctgttgagacatcagtgtgtaaaactctctgtgtccctgttgggctgtccagacagtctggactcttgtaaatttgagatttaattaaaggaaacaaaccaaaaaaaaagcggaaca

SEQ ID NO: 43869 - DNA, 1660 bp, Homo sapiens
acttcccaccgagaggggacggagcgtgcccacctcccaggggtgaggggggacccacctgagatgtgtgcacattttatttatttattgttttgagacagagtctcgctgtgcactccagcttgggtgagagtgggactctgtcttagaaagaaaaaaaaaagtatttggacacagacatgcatgcaaggaaggccaatgatgccggccaccaccaggagctgggagaggcccagggcagatccccttcagccttggagggacctagccctggccacaccttcatctcagacttgcggcccagagaactgaatgagaataaatgtgcgtgaagcccctcagtccacaggatgtggtactggaagcccccactcaagaaggctccagtgaatgctggcacgttcagccaggatgcctccgtgaagctggagacctctgccctgggtcgggaggggaaactgctccaatccagggactgccacatgggaggggacggagcgtgcccacctcccaggggtgaggggggacccacctgagatgtgtgcacattttatttatttattgttttgagacagagtctcgctgtgtcacccaggctggagtgcagtggtgaaatctcggctcattgcagccccttccttccaggctcaagtgatcctcccgcctcagccccgggtagctgggactacaggtgtgcacgagcacacccggctaatctttgtattttttgtagacagaaggtctcaccatgttgcccaggatggtctcgaactcctgggctcaagcgacctacctacctcggcctcacaaagtgtgcacattgtaatatcgtgatttcatatttggagaatcagcaaccaaccagccaaccatgttgcttttataagacagagctgagaaagcaaagcttggctgtcgtcttggctctggtaccacccacgagatgcgggcgattctcagctcagggcgtggaggcgtggtgtgggggagtctatttgccatttttgtttgtcagcagggggcaggggttctcaaagattgcaaaatgctgctgcaggtcaggaaggttattttgggtgcctgtgggggaggtgaaacaaggtcccatgactgttttgcagaaccttgtctgtggagggtagaggttgcggcaggggcctgtgggccttacttggtgagaaggtaggtctagctggctccattcagtatttgagacatttggaatttgtctgcatttaaaaccaagagatcacacacacctgtctggatttggagtttctcttgaaaactcgccagtccggccgtctgagcctgcactgacgcctggtgaagctgtgcaggggccgcccctctccctttcgccacagtcctctccactccctttcgcctctccctggcctgctgcactcactgataggaaattctgaccccagaaccccacgcttccaaggcaaccttctccacttatcttaggccgagagacagctcttcaagaacgtacatggatcctgattttctcacgaagtcccgatggaaccctgtgctgttgagacatcagtgtgtaaaactctctgtgtccctgttgggctgtccagacagtctggactcttgtaaatttgagatttaattaaaggaaacaaaccaaaaaaaaagcggaaca

SEQ ID NO: 43870 - DNA, 1579 bp, Homo sapiens
acttcccaccgagaggggacggagcgtgcccacctcccaggggtgaggggggacccacctgagatgtgtgcacattttatttatttattgttttgagacagagtctcgctgtgcactccagcttgggtgagagtgggactctgtcttagaaagaaaaaaaaaagtatttggacacagacatgcatgcaaggaaggccaatgatgccggccaccaccaggagctgggagaggcccagggcagatccccttcagccttggagggacctagccctggccacaccttcatctcagacttgcggcccagagaactgaatgagaataaatgtgcgtgaagcccctcagtccacaggatgtggtactggaagcccccactcaagaaggctccagtgaatgctggcacgttcagccaggatgcctccgtgaagctggagacctctgccctgggtcgggaggggaaactgctccaatccagggactgccacatgggaggggacggagcgtgcccacctcccaggggtgaggggggacccacctgagatgtgtgcacattttatttatttattgttttgagacagagtctcgctgtgtcacccaggctggagtgcagtggtgaaatctcggctcattgcagccccttccttccaggctcaagtgatcctcccgcctcagccccgggtagctgggactacaggtgtgcacgagcacacccggctaatctttgtattttttgtagacagaaggtctcaccatgttgcccaggatggtctcgaactcctgggctcaagcgacctacctacctcggcctcacaaagtgtgcacattgtaatatcgtgatttcatatttggagaatcagcaaccaaccagccaaccatgttgcttttataagacagagctgagaaagcaaagcttggctgtcgtcttggctctggtaccacccacgagatgcgggcgattctcagctcagggcgtggaggcgtggtgtgggggagtctatttgccatttttgtttgtcagcagggggcaggggttctcaaagattgcaaaatgctgctgcaggtcaggaaggttattttgggtgcctgtgggggaggtgaaacaaggtcccatgactgttttgcagaaccttgtctgtggagggtagaggttgcggcaggggcctgtgggccttacttggtgagaaggtaggtctagctggctccattcagtatttgagacatttggaatttgtggcctgctgcactcactgataggaaattctgaccccagactcggagcagccttcccgtggttcggtttttgcttccgcgaaaaagccaaaggccttggccagagagccagctgttcctacctctaccccacgcttccaaggcaaccttctccacttatcttaggccgagagacagctcttcaagaacgtacatggatcctgattttctcacgaagtcccgatggaaccctgtgctgttgagacatcagtgtgtaaaactctctgtgtccctgttgggctgtccagacagtctggactcttgtaaatttgagatttaattaaaggaaacaaaccaaaaaaaaagcggaaca

SEQ ID NO: 43871 - DNA, 1077 bp, Homo sapiens
acttcccaccgagaggggacggagcgtgcccacctcccaggggtgaggggggacccacctgagatgtgtgcacattttatttatttattgttttgagacagagtctcgctgtgcactccagcttgggtgagagtgggactctgtcttagaaagaaaaaaaaaagtatttggacacagacatgcatgcaaggaaggccaatgatgccggccaccaccaggagctgggagaggcccagggcagatccccttcagccttggagggacctagccctggccacaccttcatctcagacttgcggcccagagaactgaatgagaataaatgtgcgtgaagcccctcagtccacaggatgtggtactggaagcccccactcaagaaggctccagtgaatgctggcacgttcagccaggatgcctccgtgaagctggagacctctgccctgggtcgggaggggaaactgctccaatccagggactgccacatgggaggggacggagcgtgcccacctcccaggggtgaggggggacccacctgagatgtgtgcacattttatttatttattgttttgagacagagtctcgctgtgtcacccaggctggagtgcagtggtgaaatctcggctcattgcagccccttccttccaggctcaagtgatcctcccgcctcagccccgggtagctgggactacaggtgtgcacgagcacacccggctaatctttgtattttttgtagacagaaggtctcaccatgttgcccaggatggtctcgaactcctgggctcaagcgacctacctacctcggcctcacaaagtgtgcacattgtaatatcgtgatttcatatttggagaatcagcaaccaaccagccaaccatgttgcttttataagacagagctgagaaagcaaagcttggctgtcgtcttggctctggtaccacccacgagatgcgggcgattctcagctcagggcgtggaggcgtggtgtgggggagtctatttgccatttttgtttgtcagcagggggcagggactgcttcagtttcgttatcgcgtccgcgtatttagtaatagtagcgccc

SEQ ID NO: 43872 - DNA, 587 bp, Homo sapiens
acttcccaccgagaggggacggagcgtgcccacctcccaggggtgaggggggacccacctgagatgtgtgcacattttatttatttattgttttgagacagagtctcgctgtgcactccagcttgggtgagagtgggactctgtcttagaaagaaaaaaaaaagtatttggacacagacatgcatgcaaggaaggccaatgatgccggccaccaccaggagctgggagaggcccagggcagatccccttcagccttggagggacctagccctggccacaccttcatctcagacttgcggcccagagaactgaatgagaataaatgtgcgtgaagcccctcagtccacaggatgtggtactggaagcccccactcaagaaggctccagtgaatgctggcacgttcagccaggatgcctccgtgaagctggagacctctgccctgggtcgggaggggaaactgctccaatccagggactgccacatgggaggggacggagcgtgcccacctcccaggggtgaggggggacccacctgagattgcaccactgcacttcagcctggtgacagagcgagactcgtctcaaaa

SEQ ID NO: 43873 - DNA, 207 bp, Homo sapiens
gtgaccgatgatcatgccactgcactccagcttgggtgagagtgggactctgtcttagaaagaaaaaaaaaagtatttggacacagacatgcatgcaaggaaggccaatgatgccggccaccaccaggagctgggagaggcccagggcagatccccttcagccttggagggacctagccctggccacaccttcatctcagacttgcg

SEQ ID NO: 43874 - DNA, 2062 bp, Homo sapiens
atttttagtttgttgaagttcgtgactgcttcactctctcattcttagcttgaatttggaaatgacttttgatgacctaaagatccagactgtgaaggaccagcctgatgagaagtcaaatggaaaaaaagctaaaggtcttcagtttctttactctccatggtggtgcctggctgctgcgactctaggggtcctttgcctgggattagtagtgaccattatggtgctgggcatgcaattatcccaggtgtctgacctcctaacacaagagcaagcaaacctaactcaccagaaaaagaaactggagggacagatctcagcccggcaacaagcagaagaagcttcacaggagtcagaaaacgaactcaaggaaatgatagaaacccttgctcggaagctgaatgagaaatccaaagagcaaatggaacttcaccaccagaatctgaatctccaagaaacactgaagagagtagcaaattgttcagctccttgtccgcaagactggatctggcatggagaaaactgttacctattttcctcgggctcatttaactgggaaaagagccaagagaagtgcttgtctttggatgccaagttgctgaaaattaatagcacagctgatctggacttcatccagcaagcaatttcctattccagttttccattctggatggggctgtctcggaggaaccccagctacccatggctctgggaggacggttctcctttgatgccccacttatttagagtccgaggcgctgtctcccagacatacccttcaggtacctgtgcatatatacaacgaggagctgtttatgcggaaaactgcattttagctgccttcagtatatgtcagaagaaggcaaacctaagagcacagtgaatttgaaggctctggaagaaaagaaaaaagtctttgagttttattctggaatttaagctattctttgtcacttgggtgccaaacatgagagcccagaaaactgtcatttagctggctgcagaactcctttgcagaaactggggttccaggtgcctggcacctttatgtcaacatttttgattctagctacctgtattatttcacctagcttgtcccaagcttccctgccagcctgaagtccattttcccctttttattttaaaatttgactcctcttcaagcttgaaaaccctctgaactcagtcttctttacctcattatcaccttcccctcacactcctaaaattgcatgaaagacagaacatggagaacttgctcaagtgcaggcagagagcaaaaaggggaaatatgtctgggaaaaagtgcacgtgaagaaacaaagaaggacagaggccattccgaaatcaagaaactcatgttcttaactttaaaaaaggtatcaatccttggtttttaaactgtggtccatctccagactctaccacttacggacagacagacagacagacacacacacacacacacacacacacattttgggacaagtggggagcccaagaaagtaattagtaagtgagtggtcttttctgtaagctaatccacaacctgttaccacttcctgaatcagttattatttcttcatttttttttctaccagaggacagattaatagatttaacccttcacaacagttcttgttagaatcatgggatgtgtggcccagaggtaagaatagaatttctttccctaaagaacataccttttgtagatgaactcttctcaactctgttttgctatgctataattccgaaacatacaagacaaaaaaaatgaagacactcaatctagaacaaactaagccaggtatgcaaatatcgctgaatagaaacagatggaattagaaatatatcttctatttttaggcttctatttcctttccacccactcttcacaggctattctactttaaaggaagcctttttattttgctgcacacaatctagcaggaatctttttttttttttaagagctgtgtcatccttatgtaggcaagagatgtttgcttttgttaaaagctttattgagatataattaacataaaataaactgaacatattt

SEQ ID NO: 43875 - DNA, 1082 bp, Homo sapiens
atttttagtttgttgaagttcgtgactgcttcactctctcattcttagcttgaatttggaaatgacttttgatgacctaaagatccagactgtgaaggaccagcctgatgagaagtcaaatggaaaaaaagctaaaggtactagggatgggaaaatgtgtacagggaaagaatcccagtgttagccccaaaatgtaaattcaccgaagaatgggattagaaagctaaacacccaagtatgggaaaatagaattaataccatttacttaaaagaaaaacaagaaggctataatgatgatgatgatgacaacttatttataacaatttatactgagtatttactacaggttattctatatgttattcactttcagagtattatttctcagaatcttcgcaataacattttgagattggtactattactatctcccttttacagagagctaactgggcatcaggaggactaacaacatcatccagtttcacggagctaataagtggtagagctaggactgtaccacaaactcccatttatccagaattctatacatcggagggctcgggaaccaaatttatctggtgtatataacgataatttctgtaagagtccttcaggcactacaaaaacctgaagtacctcatgaattatgcaggcaaagtaaatgatattcagtatagtttagcataagttacattttgttgtgtactactgcttggaaaaattgtaagttctgtttgacccatacagtaattaaattgcatagctataaattaattcataatcccaattccacagacaatctgggtaaattgccttttattctatatctgttctgaggaaaatgaacagaatataaggagagaaagagagacaagtattgtcagaaatttggataaagaaattccaaattacatttccaaaaacaaaacagaaatttctctcaatagagaacataagtgtgagcatggagtgatttaacatttgagccaatgaactaaattgctataaaaactgctgatatttataggtaaaaccagaagtgaacaatagtcattcgtttctttactcattcattattt

SEQ ID NO: 43876 - DNA, 477 bp, Homo sapiens
cagaggataatgataggagtaccttatttgtttatctcacaaggtgaggaaaccaaatacattgtatgggatgttttcctacacaaccagtaatatctgtgatttttttttttttagtggtggaacacataattgtatattcatacacctgtgagctatgtgatttttttttcaaaatggtgaatatttctcttgtaaaatcaagcctacacttggcgtgagtgtaggatatgctgttaatataagctaaattaatatcaaggtttcatccctacttttctttgattaataaccccagttccaggttgtaattttggtggactcataattgaatagcataaaattattcataaagttatttgaggtaatctcagttgattaactgaagaaagcttgtttgcttgatgtctgatatttatgttacttttgtgtgcacatgtgtacacgtggtgtaggaggggggatactctagagcgg

SEQ ID NO: 43877 - DNA, 3198 bp, Homo sapiens
cagaggataatgataggagtaccttatttgtttatctcacaaggtgaggaaaccaaatacattgtatgggatgttttcctacacaaccagtaatatctgtgatttttttttttttagtggtggaacacataattgtatattcatacacctgtgagctatgtgatttttttttcaaaatggtgaatatttctcttgtaaaatcaagcctacacttggcgtgagtgtaggatatgctgttaatataagctaaattaatatcaaggtttcatccctacttttctttgattaataaccccagttccaggttgtaattttggtggactcataattgaatagcataaaattattcataaagttatttgaggtaatctcagttgattaactgaagaaagcttgtttgcttgatgtctgatatttatgttacttttgtgtgcacatgtgtacacgtggtgtatattaaaaacttcaggctctctgcactgtggatgaatttgatccaaccaagctagactgtgagtttcttgaggagtaattgtcgggaaagtagataaagtataagctttagaatcatatatttagattcaaatatctggtatcgaatcctggctctgaatttactggctgtgtgaccatgggtaaattacttaaattccttaactctccctgttttccattcctaaatgtgtatgatgaattatttgcagagccatttggaggactagtggtatggaatgcaaactatttatgtctatttactaaaacataaacagagtaaatcaccaagtacagacaggctccaaggaatggtttgcttacttgttcactcttttttgtctttctgattctatcctctgtcactctaggtcttcagtttctttactctccatggtggtgcctggctgctgcgactctaggggtcctttgcctgggattagtagtgaccattatggtgctgggcatgcaattatcccaggtgtctgacctcctaacacaagagcaagcaaacctaactcaccagaaaaagaaactggagggacagatctcagcccggcaacaagcagaagaagcttcacaggagtcagaaaacgaactcaaggaaatgatagaaacccttgctcggaagctgaatgagaaatccaaagagcaaatggaacttcaccaccagaatctgaatctccaagaaacactgaagagagtagcaaattgttcagctccttgtccgcaagactggatctggcatggagaaaactgttacctattttcctcgggctcatttaactgggaaaagagccaagagaagtgcttgtctttggatgccaagttgctgaaaattaatagcacagctgatctggacttcatccagcaagcaatttcctattccagttttccattctggatggggctgtctcggaggaaccccagctacccatggctctgggaggacggttctcctttgatgccccacttatttagagtccgaggcgctgtctcccagacatacccttcaggtacctgtgcatatatacaacgaggagctgtttatgcggaaaactgcattttagctgccttcagtatatgtcagaagaaggcaaacctaagagcacagtgaatttgaaggctctggaagaaaagaaaaaagtctttgagttttattctggaatttaagctattctttgtcacttgggtgccaaacatgagagcccagaaaactgtcatttagctggctgcagaactcctttgcagaaactggggttccaggtgcctggcacctttatgtcaacatttttgattctagctacctgtattatttcacctagcttgtcccaagcttccctgccagcctgaagtccattttcccctttttattttaaaatttgactcctcttcaagcttgaaaaccctctgaactcagtcttctttacctcattatcaccttcccctcacactcctaaaattgcatgaaagacagaacatggagaacttgctcaagtgcaggcagagagcaaaaaggggaaatatgtctgggaaaaagtgcacgtgaagaaacaaagaaggacagaggccattccgaaatcaagaaactcatgttcttaactttaaaaaaggtatcaatccttggtttttaaactgtggtccatctccagactctaccacttacggacagacagacagacagacacacacacacacacacacacacacattttgggacaagtggggagcccaagaaagtaattagtaagtgagtggtcttttctgtaagctaatccacaacctgttaccacttcctgaatcagttattatttcttcatttttttttctaccagaggacagattaatagatttaacccttcacaacagttcttgttagaatcatgggatgtgtggcccagaggtaagaatagaatttctttccctaaagaacataccttttgtagatgaactcttctcaactctgttttgctatgctataattccgaaacatacaagacaaaaaaaatgaagacactcaatctagaacaaactaagccaggtatgcaaatatcgctgaatagaaacagatggaattagaaatatatcttctatttttaggcttctatttcctttccacccactcttcacaggctattctactttaaaggaagcctttttattttgctgcacacaatctagcaggaatctttttttttttttaagagctgtgtcatccttatgtaggcaagagatgtttgcttttgttaaaagctttattgagatataattaacataaaataaactgaacatatttaaagtgtactatttgataagttttcacaccttgtggagaacatgcatactacaattaagagagtgaacatatccatcatccctcaaagtgtcacaatgctcctcctgatgactcctccccagaaaaccaccaatcggctttcattttgcattttgtagttttatgtgaatggaatcatatagtatgtcttttttttttgtctggcttctttcactttgcataattattttgagattcatatgtctccatcttgatgctcgtatgaattcattcttttaaatgttgaatattcccttgtatggatataccacaattcatttacccatttacttgttgatgacatttgggttgttttagttttgggatattacaaataaagctgctgtgaacatttgtgtacaaaaaagtat

SEQ ID NO: 43878 - DNA, 2596 bp, Homo sapiens
ttgagggtaaacctacataaagtgagcccatgggtaaattacttaaattccttaactctccctgttttccattcctaaatgtgtatgatgaattatttgcagagccatttggaggactagtggtatggaatgcaaactatttatgtctatttactaaaacataaacagagtaaatcaccaagtacagacaggctccaaggaatggtttgcttacttgttcactcttttttgtctttctgattctatcctctgtcactctaggtcttcagtttctttactctccatggtggtgcctggctgctgcgactctaggggtcctttgcctgggattagtagtgaccattatggtgctgggcatgcaattatcccaggtgtctgacctcctaacacaagagcaagcaaacctaactcaccagaaaaagaaactggagggacagatctcagcccggcaacaagcagaagaagcttcacaggagtcagaaaacgaactcaaggaaatgatagaaacccttgctcggaagctgaatgagaaatccaaagagcaaatggaacttcaccaccagaatctgaatctccaagaaacactgaagagagtagcaaattgttcagctccttgtccgcaagactggatctggcatggagaaaactgttacctattttcctcgggctcatttaactgggaaaagagccaagagaagtgcttgtctttggatgccaagttgctgaaaattaatagcacagctgatctggacttcatccagcaagcaatttcctattccagttttccattctggatggggctgtctcggaggaaccccagctacccatggctctgggaggacggttctcctttgatgccccacttatttagagtccgaggcgctgtctcccagacatacccttcaggtacctgtgcatatatacaacgaggagctgtttatgcggaaaactgcattttagctgccttcagtatatgtcagaagaaggcaaacctaagagcacagtgaatttgaaggctctggaagaaaagaaaaaagtctttgagttttattctggaatttaagctattctttgtcacttgggtgccaaacatgagagcccagaaaactgtcatttagctggctgcagaactcctttgcagaaactggggttccaggtgcctggcacctttatgtcaacatttttgattctagctacctgtattatttcacctagcttgtcccaagcttccctgccagcctgaagtccattttcccctttttattttaaaatttgactcctcttcaagcttgaaaaccctctgaactcagtcttctttacctcattatcaccttcccctcacactcctaaaattgcatgaaagacagaacatggagaacttgctcaagtgcaggcagagagcaaaaaggggaaatatgtctgggaaaaagtgcacgtgaagaaacaaagaaggacagaggccattccgaaatcaagaaactcatgttcttaactttaaaaaaggtatcaatccttggtttttaaactgtggtccatctccagactctaccacttacggacagacagacagacagacacacacacacacacacacacacacattttgggacaagtggggagcccaagaaagtaattagtaagtgagtggtcttttctgtaagctaatccacaacctgttaccacttcctgaatcagttattatttcttcatttttttttctaccagaggacagattaatagatttaacccttcacaacagttcttgttagaatcatgggatgtgtggcccagaggtaagaatagaatttctttccctaaagaacataccttttgtagatgaactcttctcaactctgttttgctatgctataattccgaaacatacaagacaaaaaaaatgaagacactcaatctagaacaaactaagccaggtatgcaaatatcgctgaatagaaacagatggaattagaaatatatcttctatttttaggcttctatttcctttccacccactcttcacaggctattctactttaaaggaagcctttttattttgctgcacacaatctagcaggaatctttttttttttttaagagctgtgtcatccttatgtaggcaagagatgtttgcttttgttaaaagctttattgagatataattaacataaaataaactgaacatatttaaagtgtactatttgataagttttcacaccttgtggagaacatgcatactacaattaagagagtgaacatatccatcatccctcaaagtgtcacaatgctcctcctgatgactcctccccagaaaaccaccaatcggctttcattttgcattttgtagttttatgtgaatggaatcatatagtatgtcttttttttttgtctggcttctttcactttgcataattattttgagattcatatgtctccatcttgatgctcgtatgaattcattcttttaaatgttgaatattcccttgtatggatataccacaattcatttacccatttacttgttgatgacatttgggttgttttagttttgggatattacaaataaagctgctgtgaacatttgtgtacaaaaaagtat

SEQ ID NO: 43879 - DNA, 2418 bp, Homo sapiens
atttttagtttgttgaagttcgtgactgcttcactctctcattcttagcttgaatttggaaatgacttttgatgacctaaagatccagactgtgaaggaccagcctgatgagaagtcaaatggaaaaaaagctaaaggtcttcagtttctttactctccatggtggtgcctggctgctgcgactctaggggtcctttgcctgggattagtagtgaccattatggtgctgggcatgcaattatcccaggtgtctgacctcctaacacaagagcaagcaaacctaactcaccagaaaaagaaactggagggacagatctcagcccggcaacaagcagaagaagcttcacaggagtcagaaaacgaactcaaggaaatgatagaaacccttgctcggaagctgaatgagaaatccaaagagcaaatggaacttcaccaccagaatctgaatctccaagaaacactgaagagagtagcaaattgttcagctccttgtccgcaagactggatctggcatggagaaaactgttacctattttcctcgggctcatttaactgggaaaagagccaagagaagtgcttgtctttggatgccaagttgctgaaaattaatagcacagctgatctggacttcatccagcaagcaatttcctattccagttttccattctggatggggctgtctcggaggaaccccagctacccatggctctgggaggacggttctcctttgatgccccacttatttagagtccgaggcgctgtctcccagacatacccttcaggtacctgtgcatatatacaacgaggagctgtttatgcggaaaactgcattttagctgccttcagtatatgtcagaagaaggcaaacctaagagcacagtgaatttgaaggctctggaagaaaagaaaaaagtctttgagttttattctggaatttaagctattctttgtcacttgggtgccaaacatgagagcccagaaaactgtcatttagctggctgcagaactcctttgcagaaactggggttccaggtgcctggcacctttatgtcaacatttttgattctagctacctgtattatttcacctagcttgtcccaagcttccctgccagcctgaagtccattttcccctttttattttaaaatttgactcctcttcaagcttgaaaaccctctgaactcagtcttctttacctcattatcaccttcccctcacactcctaaaattgcatgaaagacagaacatggagaacttgctcaagtgcaggcagagagcaaaaaggggaaatatgtctgggaaaaagtgcacgtgaagaaacaaagaaggacagaggccattccgaaatcaagaaactcatgttcttaactttaaaaaaggtatcaatccttggtttttaaactgtggtccatctccagactctaccacttacggacagacagacagacagacacacacacacacacacacacacacattttgggacaagtggggagcccaagaaagtaattagtaagtgagtggtcttttctgtaagctaatccacaacctgttaccacttcctgaatcagttattatttcttcatttttttttctaccagaggacagattaatagatttaacccttcacaacagttcttgttagaatcatgggatgtgtggcccagaggtaagaatagaatttctttccctaaagaacataccttttgtagatgaactcttctcaactctgttttgctatgctataattccgaaacatacaagacaaaaaatagaaacagatggaattagaaatatatcttctatttttaggcttctatttcctttccacccactcttcacaggctattctactttaaaggaagcctttttattttgctgcacacaatctagcaggaatctttttttttttttaagagctgtgtcatccttatgtaggcaagagatgtttgcttttgttaaaagctttattgagatataattaacataaaataaactgaacatatttaaagtgtactatttgataagttttcacaccttgtggagaacatgcatactacaattaagagagtgaacatatccatcatccctcaaagtgtcacaatgctcctcctgatgactcctccccagaaaaccaccaatcggctttcattttgcattttgtagttttatgtgaatggaatcatatagtatgtcttttttttttgtctggcttctttcactttgcataattattttgagattcatatgtctccatcttgatgctcgtatgaattcattcttttaaatgttgaatattcccttgtatggatataccacaattcatttacccatttacttgttgatgacatttgggttgttttagttttgggatattacaaataaagctgctgtgaacatttgtgtacaaaaaagtat

SEQ ID NO: 43880 - DNA, 2143 bp, Homo sapiens
agagtcttaatgcaactgtgattcagtatcccaggtgtctgacctcctaacacaagagcaagcaaacctaactcaccagaaaaagaaactggagggacagatctcagcccggcaacaagcagaagaagcttcacaggagtcagaaaacgaactcaaggaaatgatagaaacccttgctcggaagctgaatgagaaatccaaagagcaaatggaacttcaccaccagaatctgaatctccaagaaacactgaagagagtagcaaattgttcagctccttgtccgcaagactggatctggcatggagaaaactgttacctattttcctcgggctcatttaactgggaaaagagccaagagaagtgcttgtctttggatgccaagttgctgaaaattaatagcacagctgatctgatttagagtccgaggcgctgtctcccagacatacccttcaggtacctgtgcatatatacaacgaggagctgtttatgcggaaaactgcattttagctgccttcagtatatgtcagaagaaggcaaacctaagagcacagtgaatttgaaggctctggaagaaaagaaaaaagtctttgagttttattctggaatttaagctattctttgtcacttgggtgccaaacatgagagcccagaaaactgtcatttagctggctgcagaactcctttgcagaaactggggttccaggtgcctggcacctttatgtcaacatttttgattctagctacctgtattatttcacctagcttgtcccaagcttccctgccagcctgaagtccattttcccctttttattttaaaatttgactcctcttcaagcttgaaaaccctctgaactcagtcttctttacctcattatcaccttcccctcacactcctaaaattgcatgaaagacagaacatggagaacttgctcaagtgcaggcagagagcaaaaaggggaaatatgtctgggaaaaagtgcacgtgaagaaacaaagaaggacagaggccattccgaaatcaagaaactcatgttcttaactttaaaaaaggtatcaatccttggtttttaaactgtggtccatctccagactctaccacttacggacagacagacagacagacacacacacacacacacacacacacattttgggacaagtggggagcccaagaaagtaattagtaagtgagtggtcttttctgtaagctaatccacaacctgttaccacttcctgaatcagttattatttcttcatttttttttctaccagaggacagattaatagatttaacccttcacaacagttcttgttagaatcatgggatgtgtggcccagaggtaagaatagaatttctttccctaaagaacataccttttgtagatgaactcttctcaactctgttttgctatgctataattccgaaacatacaagacaaaaaaaatgaagacactcaatctagaacaaactaagccaggtatgcaaatatcgctgaatagaaacagatggaattagaaatatatcttctatttttaggcttctatttcctttccacccactcttcacaggctattctactttaaaggaagcctttttattttgctgcacacaatctagcaggaatctttttttttttttaagagctgtgtcatccttatgtaggcaagagatgtttgcttttgttaaaagctttattgagatataattaacataaaataaactgaacatatttaaagtgtactatttgataagttttcacaccttgtggagaacatgcatactacaattaagagagtgaacatatccatcatccctcaaagtgtcacaatgctcctcctgatgactcctccccagaaaaccaccaatcggctttcattttgcattttgtagttttatgtgaatggaatcatatagtatgtcttttttttttgtctggcttctttcactttgcataattattttgagattcatatgtctccatcttgatgctcgtatgaattcattcttttaaatgttgaatattcccttgtatggatataccacaattcatttacccatttacttgttgatgacatttgggttgttttagttttgggatattacaaataaagctgctgtgaacatttgtgtacaaaaaagtat

SEQ ID NO: 43881 - DNA, 1237 bp, Homo sapiens
cagaggataatgataggagtaccttatttgtttatctcacaaggtgaggaaaccaaatacattgtatgggatgttttcctacacaaccagtaatatctgtgatttttttttttttagtggtggaacacataattgtatattcatacacctgtgagctatgtgatttttttttcaaaatggtgaatatttctcttgtaaaatcaagcctacacttggcgtgagtgtaggatatgctgttaatataagctaaattaatatcaaggtttcatccctacttttctttgattaataaccccagttccaggttgtaattttggtggactcataattgaatagcataaaattattcataaagttatttgaggtaatctcagttgattaactgaagaaagcttgtttgcttgatgtctgatatttatgttacttttgtgtgcacatgtgtacacgtggtgtatattaaaaacttcaggctctctgcactgtggatgaatttgatccaaccaagctagactgtgagtttcttgaggagtaattgtcgggaaagtagataaagtataagctttagaatcatatatttagattcaaatatctggtatcgaatcctggctctgaatttactggctgtgtgaccatgggtaaattacttaaattccttaactctccctgttttccattcctaaatgtgtatgatgaattatttgcagagccatttggaggactagtggtatggaatgcaaactatttatgtctatttactaaaacataaacagagtaaatcaccaagtacagacaggctccaaggaatggtttgcttacttgttcactcttttttgtctttctgattctatcctctgtcactctaggtcttcagtttctttactctccatggtggtgcctggctgctgcgactctaggggtcctttgcctgggattagtagtgaccattatggtgctgggcatgcaatgtaagtgctaaaatacggaactgatgtttattggggcaggggtgttggaaatgaggttaataaatatggtttataagtttctttcataacaactacaaacagccttgatatagattcattttaggcaaaatgtttttaagagtgaccatgaaaataaaggggtatattgttcatcttccaatggatagagccatgaaataaaaattacaattggtaggcatttttttgtttgtttgttttgttttgttttgtttcttttgttttcataactt

SEQ ID NO: 43882 - DNA, 666 bp, Homo sapiens
atttttagtttgttgaagttcgtgactgcttcactctctcattcttagcttgaatttggaaatgacttttgatgacctaaagatccagactgtgaaggaccagcctgatgagaagtcaaatggaaaaaaagctaaaggtcttcagtttctttactctccatggtggtgcctggctgctgcgactctaggggtcctttgcctgggattagtagtgaccattatggtgctgggcatgcaattatcccaggtgtctgacctcctaacacaagagcaagcaaacctaactcaccagaaaaagaaactggagggacagatctcagcccggcaacaagcagaagaagcttcacaggagtcagaaaacgaactcaaggaaatgatagaaacccttgctcggaagctgaatgagaaatccaaagagcaaatggaacttcaccaccagaatctgaatctccaagaaacactgaagagagtagcaaattgttcagctccttgtccgcaagactggatctggcatggagaaaactgttacctattttcctcgggctcatttaactgggaaaagagccaagagaagtgcttgtctttggatttctcattcagcttccgagcaagcgcatctatcatttacttgagctcgcttgctgactcctgtgaagcttcttcatg

SEQ ID NO: 43883 - DNA, 2472 bp, Homo sapiens
atttttagtttgttgaagttcgtgactgcttcactctctcattcttagcttgaatttggaaatgacttttgatgacctaaagatccagactgtgaaggaccagcctgatgagaagtcaaatggaaaaaaagctaaaggtcttcagtttctttactctccatggtggtgcctggctgctgcgactctaggggtcctttgcctgggattagtagtgaccattatggtgctgggcatgcaattatcccaggtgtctgacctcctaacacaagagcaagcaaacctaactcaccagaaaaagaaactggagggacagatctcagcccggcaacaagcagaagaagcttcacaggagtcagaaaacgaactcaaggaaatgatagaaacccttgctcggaagctgaatgagaaatccaaagagcaaatggaacttcaccaccagaatctgaatctccaagaaacactgaagagagtagcaaattgttcagctccttgtccgcaagactggatctggcatggagaaaactgttacctattttcctcgggctcatttaactgggaaaagagccaagagaagtgcttgtctttggatgccaagttgctgaaaattaatagcacagctgatctggacttcatccagcaagcaatttcctattccagttttccattctggatggggctgtctcggaggaaccccagctacccatggctctgggaggacggttctcctttgatgccccacttatttagagtccgaggcgctgtctcccagacatacccttcaggtacctgtgcatatatacaacgaggagctgtttatgcggaaaactgcattttagctgccttcagtatatgtcagaagaaggcaaacctaagagcacagtgaatttgaaggctctggaagaaaagaaaaaagtctttgagttttattctggaatttaagctattctttgtcacttgggtgccaaacatgagagcccagaaaactgtcatttagctggctgcagaactcctttgcagaaactggggttccaggtgcctggcacctttatgtcaacatttttgattctagctacctgtattatttcacctagcttgtcccaagcttccctgccagcctgaagtccattttcccctttttattttaaaatttgactcctcttcaagcttgaaaaccctctgaactcagtcttctttacctcattatcaccttcccctcacactcctaaaattgcatgaaagacagaacatggagaacttgctcaagtgcaggcagagagcaaaaaggggaaatatgtctgggaaaaagtgcacgtgaagaaacaaagaaggacagaggccattccgaaatcaagaaactcatgttcttaactttaaaaaaggtatcaatccttggtttttaaactgtggtccatctccagactctaccacttacggacagacagacagacagacacacacacacacacacacacacacattttgggacaagtggggagcccaagaaagtaattagtaagtgagtggtcttttctgtaagctaatccacaacctgttaccacttcctgaatcagttattatttcttcatttttttttctaccagaggacagattaatagatttaacccttcacaacagttcttgttagaatcatgggatgtgtggcccagaggtaagaatagaatttctttccctaaagaacataccttttgtagatgaactcttctcaactctgttttgctatgctataattccgaaacatacaagacaaaaaaaatgaagacactcaatctagaacaaactaagccaggtatgcaaatatcgctgaatagaaacagatggaattagaaatatatcttctatttttaggcttctatttcctttccacccactcttcacaggctattctactttaaaggaagcctttttattttgctgcacacaatctagcaggaatctttttttttttttaagagctgtgtcatccttatgtaggcaagagatgtttgcttttgttaaaagctttattgagatataattaacataaaataaactgaacatatttaaagtgtactatttgataagttttcacaccttgtggagaacatgcatactacaattaagagagtgaacatatccatcatccctcaaagtgtcacaatgctcctcctgatgactcctccccagaaaaccaccaatcggctttcattttgcattttgtagttttatgtgaatggaatcatatagtatgtcttttttttttgtctggcttctttcactttgcataattattttgagattcatatgtctccatcttgatgctcgtatgaattcattcttttaaatgttgaatattcccttgtatggatataccacaattcatttacccatttacttgttgatgacatttgggttgttttagttttgggatattacaaataaagctgctgtgaacatttgtgtacaaaaaagtat

SEQ ID NO: 43884 - DNA, 764 bp, Homo sapiens
atttttagtttgttgaagttcgtgactgcttcactctctcattcttagcttgaatttggaaatgacttttgatgacctaaagatccagactgtgaaggaccagcctgatgagaagtcaaatggaaaaaaagctaaaggtcttcagtttctttactctccatggtggtgcctggctgctgcgactctaggggtcctttgcctgggattagtagtgaccattatggtgctgggcatgcaattatcccaggtgtctgacctcctaacacaagagcaagcaaacctaactcaccagaaaaagaaactggagggacagatctcagcccggcaacaagcagaagaagcttcacaggagtcagaaaacgaactcaaggaaatgatagaaacccttgctcggaagctgaatgagaaatccaaagagcaaatggaacttcaccaccagaatctgaatctccaagaaacactgaagagagtagcaaattgttcagctccttgtccgcaagactggatctggcatggagaaaactgttacctattttcctcgggctcatttaactgggaaaagagccaagagaagtgcttgtctttggatgccaagttgctgaaaattaatagcacagctgatctggacttcatccagcaagcaatttcctattccagttttccattctggatggggctgtctcggaggaaccccagctacccatggctctgggaggacggttctcctttgatgccccacttgtaagtttcccattctttttgat

SEQ ID NO: 43885 - DNA, 2356 bp, Homo sapiens
atttttagtttgttgaagttcgtgactgcttcactctctcattcttagcttgaatttggaaatgacttttgatgacctaaagatccagactgtgaaggaccagcctgatgagaagtcaaatggaaaaaaagctaaaggtcttcagtttctttactctccatggtggtgcctggctgctgcgactctaggggtcctttgcctgggattagtagtgaccattatggtgctgggcatgcaattatcccaggtgtctgacctcctaacacaagagcaagcaaacctaactcaccagaaaaagaaactggagggacagatctcagcccggcaacaagcagaagaagcttcacaggagtcagaaaacgaactcaaggaaatgatagaaacccttgctcggaagctgaatgagaaatccaaagagcaaatggaacttcaccaccagaatctgaatctccaagaaacactgaagagagtagcaaattgttcagctccttgtccgcaagactggatctggcatggagaaaactgttacctattttcctcgggctcatttaactgggaaaagagccaagagaagtgcttgtctttggatgccaagttgctgaaaattaatagcacagctgatctgatttagagtccgaggcgctgtctcccagacatacccttcaggtacctgtgcatatatacaacgaggagctgtttatgcggaaaactgcattttagctgccttcagtatatgtcagaagaaggcaaacctaagagcacagtgaatttgaaggctctggaagaaaagaaaaaagtctttgagttttattctggaatttaagctattctttgtcacttgggtgccaaacatgagagcccagaaaactgtcatttagctggctgcagaactcctttgcagaaactggggttccaggtgcctggcacctttatgtcaacatttttgattctagctacctgtattatttcacctagcttgtcccaagcttccctgccagcctgaagtccattttcccctttttattttaaaatttgactcctcttcaagcttgaaaaccctctgaactcagtcttctttacctcattatcaccttcccctcacactcctaaaattgcatgaaagacagaacatggagaacttgctcaagtgcaggcagagagcaaaaaggggaaatatgtctgggaaaaagtgcacgtgaagaaacaaagaaggacagaggccattccgaaatcaagaaactcatgttcttaactttaaaaaaggtatcaatccttggtttttaaactgtggtccatctccagactctaccacttacggacagacagacagacagacacacacacacacacacacacacacattttgggacaagtggggagcccaagaaagtaattagtaagtgagtggtcttttctgtaagctaatccacaacctgttaccacttcctgaatcagttattatttcttcatttttttttctaccagaggacagattaatagatttaacccttcacaacagttcttgttagaatcatgggatgtgtggcccagaggtaagaatagaatttctttccctaaagaacataccttttgtagatgaactcttctcaactctgttttgctatgctataattccgaaacatacaagacaaaaaaaatgaagacactcaatctagaacaaactaagccaggtatgcaaatatcgctgaatagaaacagatggaattagaaatatatcttctatttttaggcttctatttcctttccacccactcttcacaggctattctactttaaaggaagcctttttattttgctgcacacaatctagcaggaatctttttttttttttaagagctgtgtcatccttatgtaggcaagagatgtttgcttttgttaaaagctttattgagatataattaacataaaataaactgaacatatttaaagtgtactatttgataagttttcacaccttgtggagaacatgcatactacaattaagagagtgaacatatccatcatccctcaaagtgtcacaatgctcctcctgatgactcctccccagaaaaccaccaatcggctttcattttgcattttgtagttttatgtgaatggaatcatatagtatgtcttttttttttgtctggcttctttcactttgcataattattttgagattcatatgtctccatcttgatgctcgtatgaattcattcttttaaatgttgaatattcccttgtatggatataccacaattcatttacccatttacttgttgatgacatttgggttgttttagttttgggatattacaaataaagctgctgtgaacatttgtgtacaaaaaagtat

SEQ ID NO: 43886 - DNA, 2437 bp, Homo sapiens
tatcagtatcagtaataaaagtattataataaagtatcagtaataaaagtattataataaaaagtattattaggacaggtaaactcatccatctactgtgagctgctggcttggagaacgacttttgaggagccagtttcctgaggagaaatgcttttataaagcactcattgctttgtaaaaggagacaaaactgatcctaaatgaccactccagggttgctgattttgtttctggctcatgtctgcctagtaaaccaccagcaagctgctgaaccaggctggaaacaacattgttgcaactgggagggacatagagtactgtgaaagcagcgttccaacacatcttcacttttacacagggataggcagagacttccaacatagaggttcttaaacttcgaggggttacaatccccttgcaaatatttttatagctatggaccctctcctcagatctacagccaacattttcagtgcaccttaggaggtcattttagtccacgcctctgaaaaagctgcactccaacggctgaagagcaagccatacggccgagaatggggctccctttgccttcatgaaagctacttcccccaacactaagactcagctgtacgtttgcttagctcagtcacatttacattcttctgggtgaactgtaccttttgagtacctgccttcattttctagaatcagacctaacaaggtcagtagaagcctgggcagcagcgggcctggaaagacgaggcagccagcatgaactgctgttctctccctgaccacaaggcgtcgtcttcctccagggtcaagtaattgttcttgttccgcctcacaggaatgtggggaggaaggacgttaacactataaaatgctgcgtcctaccttaaacttgtactgtgagaaagctggaaacttccacctgtacagtgggtctggtttgcatgtttagtttcatttgtgggaactgcttgtccaagagtgagctcaggtcagggcagtttgtgcctatgagaattagctcagctatcaggcaggtttttagacacctttttaaaatgtgctcgtgtttggtttgttttgcttactgtcagtcctgggtcaatcaaaggtttgtaagggtgagaatttttatgcactgctatatcgcaagtgcttaaaacagagactggcccagatgaggcattcttcaaatgtttgttgaaatgaatggacaaactcttaggataaatcctaatttgttggcaactgttatttgattttagaaggcaaactgattttattttagagaggggaaggggaggggaggctcattagcctcttggtagaaagaggactatttctgcaaatgaataggtttccaccttaagtagtgacagtccttaacttcttattatggagtgagtcttgaccgctttccaagttcaatagaagttcaagattgcctctcagtgattagggaaattgaagcttttaaagctcctggtctcagtaattcctcagaataaacctctttaaaagggatattgatggaaatgtacaattaccagtaattgaggttttatctgaggggatggagatgatgaaatggttccttcttggaagttgttggcattttggctttatttttcacaaataaagtgaaaccatttaaaacgattgacaacgattatatagtgccatgtggaatacaatagatattaatttgtggttggtttttctgcctgctttaaatgaaatgtattatgtttctgggttccttttttagctgtaaaaatacttcgtcactaaagcatgaaatttaatcagcagttgttcttcaagttcctgaaagctataaaagtttctcatgacttgagtggttttttccctgcccaccagaggagaaagcccttgtagaattctgcagtgttacaagtgttccctacaaaaactgaaaccatcagctcctctttaacaagttggctttttaaaagcacgtaattacaatttaatggtattctgtaaagtggtgctctaggcataatttaaattctttttaatgactatatttcttcaaaactttgaaagaaaaatgtgttctttttgctgcatcctttgtaagaagactgccaacagaggaaaaaggactttacaaattaagaccatcttggtttcatttccacaaagatgagaacaaatcatggtgttaggaaaggatccttagaagaacacaagaatttgaaagcccttggtggttatcactactatatttcatatttccacagaagtgacttagccaagctctgcattttgagcctgctgactttcatttaaaaggaatgaaaggctgaaaatccaggctgctgtgtctgtagataaaggtcaaaccatgtttgagttcttcactgttgtgtccacctaaataaaactgagtaagtaatgaaaaaaagtcttaata

SEQ ID NO: 43887 - DNA, 1232 bp, Homo sapiens
gcaatgctaggtataatagggaccaacctgtggagatgcccggtattccagcagctcaatccagtctgattttattttagagaggggaaggggaggggaggctcattagcctcttggtagaaagaggactatttctgcaaatgaataggtttccaccttaagtagtgacagtccttaacttcttattatggagtgagtcttgaccgctttccaagttcaatagaagttcaagattgcctctcagtgattagggaaattgaagcttttaaagctcctggtctcagtaattcctcagaataaacctctttaaaagggatattgatggaaatgtacaattaccagtaattgaggttttatctgaggggatggagatgatgaaatggttccttcttggaagttgttggcattttggctttatttttcacaaataaagtgaaaccatttaaaacgattgacaacgattatatagtgccatgtggaatacaatagatattaatttgtggttggtttttctgcctgctttaaatgaaatgtattatgtttctgggttccttttttagctgtaaaaatacttcgtcactaaagcatgaaatttaatcagcagttgttcttcaagttcctgaaagctataaaagtttctcatgacttgagtggttttttccctgcccaccagaggagaaagcccttgtagaattctgcagtgttacaagtgttccctacaaaaactgaaaccatcagctcctctttaacaagttggctttttaaaagcacgtaattacaatttaatggtattctgtaaagtggtgctctaggcataatttaaattctttttaatgactatatttcttcaaaactttgaaagaaaaatgtgttctttttgctgcatcctttgtaagaagactgccaacagaggaaaaaggactttacaaattaagaccatcttggtttcatttccacaaagatgagaacaaatcatggtgttaggaaaggatccttagaagaacacaagaatttgaaagcccttggtggttatcactactatatttcatatttccacagaagtgacttagccaagctctgcattttgagcctgctgactttcatttaaaaggaatgaaaggctgaaaatccaggctgctgtgtctgtagataaaggtcaaaccatgtttgagttcttcactgttgtgtccacctaaataaaactgagtaagtaatgaaaaaaagtcttaata

SEQ ID NO: 43888 - DNA, 381 bp, Homo sapiens
tcaccttaatatgtttttaatacatgtgatatttttgtaggtctagaattgtgaaatcaattctcttaaacatcttattatagaagtgtctgctgctatcctttgagcactaaccccaccacctgtaatgcatcatgccaatataagtgatagaattgctttgctaaattcttaagggcttatgtcagggaaaaactttgaaattagctgggtacagtggctcatgcctataatctcagtgctttgggaggccaaggtgggagaatcacttggctgggagaccagcctgagcaattcagcaagaccccttctctacaaaaactgcaaaacttagccaggtttggtggcacacgcctgtagtcatagctactgggaagactg

SEQ ID NO: 43889 - DNA, 793 bp, Homo sapiens
tgtgtctctcctgcagcctccattctgggtgcctccacccccttgccgtcgtcatggtaactgatgagcagcatgtgaccgaaagctctctgcccccccaaccccataccccctccccatcttgtgatcaccctcattacctcttctgggccccctgtggacctgcgttgacccagcatgggctacaatgggggagttgggtaatcgctcccggtaggttcctccccaacccccgaggcggggtcaggtggagcgtgggcgccagagcagcccctctgccttgggtgtcttggagatgacttggcgccccccggagccccgtcatggctgtggctgcgtccacaacactgcatcagcagagtcctggggaagccatttaggaatctgaagccctggatttctgctttgtcccttcaggggttcctgagcctgttaaaaaaaaaaaaaaatctaggaagaggccctggaaggaaaaaggggagggagatagcctattttacaaggtctgaaatgatgtgtcttatccttctggcttaaaccaagctgggcttaaaacatcttttaaaaaaaatctgtattctatttttttctctctgtttatcgctctccttctgcctctgttaatctttgtttctgtgtagttgcatcctgtttctgtctgaaaacccttgtctttctgaatccatctttcagtctctcacattctgtctttcccctcctccttcaccttccctccgtccctctcccttgcgcacttgccgggtaccagctgagtgcatccttttcccaaacc

SEQ ID NO: 43890 - DNA, 322 bp, Homo sapiens
aaccatcattagtcccaaaaattcacattgtagactgtgaattttgatcaatgaaatgaaaattcttagaagaaaattataaaaatgaataatattcaagaaatgaatacttttttcccagaacactacttttatactggtaaaagagggcattgaactaaaatgagtggagcctaatagagaagctatgctacctactctgcttgtagtgaatgtctgcatttcagtagcttaacaaaatcaaagttacatcttactcatatcaaagtacgatatggttatttctgatcagtaaggggaacggggactggcattgctataa

SEQ ID NO: 43891 - DNA, 525 bp, Homo sapiens
cacgaggggaactcatacatttctgggggcttcgaacatcagtcagtgaaggaccctgcaagactgaaaaaaagtcactacagttatctcagcctactgccttgaaaaagtttctattccagagcagggaaggaagagcccaggcagagcttgggagattgtggagtgaggagaccaagctgagagtgtggagagacccaaatgtcaagaatttccaaggcggagttctggagaggagagagctgcggagagaagagtctgaagataacgggtgattcccctggatgatttcgcagagcactgtgtgtgaggaaactcacccaggctgaggaatgacccaccacgaaggatcagagggagtggacccgggaactcacacaggcctgggaatgtctgttcctgccagccagctggaaagccttataattcaaggggttttgggtacagtacaaaaaaggcgcttgcctcagtcctggaggataattagccctagactaagtgcttctcttacctcacctgtcagat

SEQ ID NO: 43892 - DNA, 494 bp, Homo sapiens
gcttcttatccttgagtctgttgggggccctggagtctgagccagcttctctgtgttggaaacacctggacagggctgggctcaggtggattagagggggtgtgtatatctgtgagtagtttctggaatccttctttcccctgaatgagttatgtgcacttatctgtcccacaaaggataaagggacacatgggttaggggaggttttggaggcagttcccctcccaccccccagcccaccaaatgcttaggtatagactagtcactaaggtggaaggaatgtaggaatctcaggctctcagagtcagacctcagaaggctcccaggcaatgatccttgaggtgcagaaacccccttctcagccctgccccacatccttcatgagcattcctcaaactctgcctgaatgtctccagagcccgagaactcaccgcttctttggtggccccttccagctggggacagttctgaaataaagctcttccttctcagca

SEQ ID NO: 43893 - DNA, 388 bp, Homo sapiens
gtgtttgcaaggaagacttggccaaggaacaaaaggactgcccagcaaccaccagaggcgaggggagccgcacagaccaggttctcactcgcagcctccaaaataagccaacaccttgatttcagacctctggcctccagaaccgtgagagagtacatttccatggctgaagccaccaagtacatggtcattcgttatggtgatcctagagaacaatccaacccaccgtgagccagacagagacaaacaggaaccagtttctaccctcaagcggcgtccctgaaacggcaggttcacggacaagggctgttgtgagagtaaatgagatcatggctgtggaggcagacagccggggcaagagaggggcttttatgactactactggggt

SEQ ID NO: 43894 - DNA, 308 bp, Homo sapiens
gtgatgtatattctaaaataccccagaagtagaaataaagagttagtgaaatggtataataattaaatttaactgtaccaggtgcttctgaccctaaaggacctattctagggcccctaccctactattctgattcacattgcatcaacttctacctccacctccacaataagtgttctctaaagttgcaggttgagaatatagtaggtgcccaggacaaaagcccttttcactgtggaggactccaggccactttgcataaaatcagaaagggaacatggcttttcaaactgagagaaacccagagt

SEQ ID NO: 43895 - DNA, 432 bp, Homo sapiens
atatcaactgtggggccctggaggaaggcacgctggtggctgcaaactgcagcactccaagaccctgggtctgtgccaaggggacccagtgatctgggctctgcctggtcctcagcctgccaggcagatgcagcaccccctacaggggaggccagttgagagcttgggcagcctcttcctggacccagttatccaggtcttcatgctctgctcaagggggccacatgagcgagcctaggagctggacttcaacccaggaagatgcatccgagggaaaggagattttctatggcctcaggcctgagtgccaatattagtctccagcttctgtggatgatcggtttgatgacattgggatggttgtttagcatttctgtgccttggtttcattaaaatgacaatttccccctagaggaaaaagacagggttaac

SEQ ID NO: 43896 - DNA, 375 bp, Homo sapiens
atttagatattttctcccaacctaagaaaaacacacataatgtctacagagtaaaagagaaaaccagtatgagttgacatgactttattcctagcattttttttcttcaaaaattgtggtaatttacctacacattagatcactctaccttggctacttccaatttgtattatagctgtggaatgaattcagtagccctggaagtctagtcaaggtggttgaatataataaaatgtatgctgttcatcatagtttttcttaatactacagttactttgtttccaagtttgaattttttgccagatttggccaacataaaatctagtttcataagcaaaaatgtcagaaaaattccctttcccttaattagtagca

SEQ ID NO: 43897 - DNA, 480 bp, Homo sapiens
caggctgaagtatttaagattcctaaaagtttcaataaaaaagagtgtgtgtctgtgtaaagatggagaggagagagcatgcaaatgtggcaaaatatcaacatctggggagcctagataaaggcgctcactgaactctttaaactgttctagaagggtaactttttcaaaacagtatcttaggattaaaaaaaaaattcagagttccaacttcatgatgcaaggcactgtcttaagattaactggacatttctagcccctccccaattcagagacaaaaccacagaggaaaaccattacaattttttagaaaacctataatgtataaacaataaaaagatgcccatattaaaggattactatcaaacagtattatgactctctaaggctttattctgacaggctaaggcaaaaagctgaggggtttatggctttgttttaaaccacgttcataagaagaaggctgagagcgaacgtttt

SEQ ID NO: 43898 - DNA, 597 bp, Homo sapiens
ggcacgagcaaaccccagcattacacaatatacccacgtaacaaacctacacatataccctttaatcgataaagaaagttgaaattattttttaaaaaagaagaaattaccaggccaaaaaaaaaaaaatctatatactgctgatgatactcactattaacgtattacatcagattttttgcctcagatgctcctaggaacttgtacttaaatctgggatatctatcctttgactaggtgcctcattagatttcatgcagtttcaaattttagatttcaaattataattctgatttgatggatggatcccaggttgtcctttttgctttatgtttttatgtaaagaggcaacagttcagcaataatttatatttattttgaatgtaatttatttttatgtatcaactttgccttttcaatacttttttttttttaagagacagggtctcactgtgttgctcaggctagactcaaactcctaggctcaagccatcctgccacctcagcctcccaagtagctgggacttgggtcccagttacacaggtgtacgctactgctcctggcagcttctgaatattttgcttaagcagatgtta

SEQ ID NO: 43899 - DNA, 320 bp, Homo sapiens
tactgctgactgatttaagcatgcttaatgtgtttattttttaattgttttcatctttaggtagtcttgagagtcttttaaaaatttacagtaaatacagatgtatcttgaagctctcctcatcagtgagaagtccaacacaaatttaatttttaataaatgacatttgagttattttttcaaaacttgtagtatcagatcacctggcaaaaaatttattattcagaattttctttaatatataagtttgttcttttgcaaatgaatgatactaaaaaaagttaaagttcttcagagtttattcattaagcattttaact

SEQ ID NO: 43900 - DNA, 445 bp, Homo sapiens
tatctagctttcatctttcagagtacctagcataggacttggcaccaagtagcccatagtaaacagttattcaaccataatgtatgattttcttttctacttttcactggtatgtttttgtttaaaaagggtaaaccaccagggatggaaatgtccttgctatgttatccttcttctctaattagcaaccacccttcacaatctgccacattacatttaaaaaggattttcaaattagacatttatgcctgggcattaaccagggactgatgaatcagtgccatcagcagaacactgccctgactggcagacatggcaccattgtcaagacttgtaatttactcctggcttttcaaatagtcagtgtgtaactccaggcaaggtttaattatctcctgttaaaatgggaataatatgacccacccccactttgcttcccatgggt

SEQ ID NO: 43901 - DNA, 403 bp, Homo sapiens
ttagtttaaatgcaagacagtataagggtctgataaatttgaggatcagtatactgaatgcattcttagtgttggcttttctaaattatgtgctagttatcccacattatgttcattcacagtagcatttttccagtaatactgctttcaagacaaagtaatagtttgctagaatgttattgctttttgtttaacccttaatgtttttaataagatgttaagtaccctcaggtttgcacttgaacagcctattattaataagcaagatgtgctacgctttgcaaaaatcaacataattctactgtttgtactcagtcatctgatgcttctagtaaccaagcaaaagaaaacatacttaattaaatcagtcttatttgcaagcactagttttaagtattaagag

SEQ ID NO: 43902 - DNA, 376 bp, Homo sapiens
tttagtactgtgggccaatggacaaccttcaatcatcttttctacactgaccctcagacattctatctgctctcacggactcctttatttaccatgaataaagttccaaaatctacatattcatcccaagtctctttccagttccccttcttacattgcctatttgccatttctcccttcaataccctatacttcactcaaattcaacataccaaaaataaaaggccaggcacggtggctcacacctgtaatcccaggactttgggaggctgaggcaggtggatcacctgaggtcaggagtctgaccagcctgaccaatatggtgaaaccccgtctctacctaaaatacaaaaattagccaggcgtggtggcatgt

SEQ ID NO: 43903 - DNA, 180 bp, Homo sapiens
agcagagggcacagctcctgctccctgcccctgggattttcccagccccccccacgccagccccagtggcacagctcccatacaccatgctgtgcaggtagctcaggtgggcaaagggcagaaccctgaggggaaaatcctcactgcctctcacctgagtggcatctgaaatgttgtggg

SEQ ID NO: 43904 - DNA, 651 bp, Homo sapiens
actgcataatttccctttgttcccttcaacctcaacagatacacagctacacacaaaatctccaagactaccttccttccttctctatctaccagattcttattttcctttgtaactctcttctagaatcaccttcctccaaaaggattttttttatccaggtatctatctttctcaacacaactttactcactgccacaccacttcagcatttcttcttttctagatatttggcaattgtgtatttgtcatttgggatcaaatttgattcctgtttcatcacaacattgcctaaacagcaatgcttctgattctacatttgaaaattaaagcttatacacaaagtttaagattgtctctttttttttgtttgttttcttttcttttttgtttttgttaagactgtctcttgtaaaaaatgtttgcacagttgtcatatgtttgcatgacaagctgatcatggttccttacaaagtatacccaaggtatttgctctcaaccttttctcaccacccagtgcacacacacagaaattcactaacatgggtgctcaataattgaaaggaaccaaaagctgttggtggaacgtaagtgtccctccctcttctcttcccaccacctcaggcacaacaacgattagcagcttctgtg

SEQ ID NO: 43905 - DNA, 1237 bp, Homo sapiens
actgcataatttccctttgttcccttcaacctcaacagatacacagctacacacaaaatctccaagactaccttccttccttctctatctaccagattcttattttcctttgtaactctcttctagaatcaccttcctccaaaaggattttttttatccaggtatctatctttctcaacacaactttactcactgccacaccacttcagcatttcttcttttctagatatttggcaattgtgtatttgtcatttgggatcaaatttgattcctgtttcatcacaacattgcctaaacagcaatgcttctgattctacatttgaaaattaaagcttatacacaaagtttaagattgtctctttttttttgtttgttttcttttcttttttgtttttgttaagactgtctcttgtaaaaaatgtttgcacagttgtcatatgtttgcatgacaagctgatcatggttccttacaaagtatacccaaggtatttgctctcaaccttttctcaccacccagtgcacacacacagaaattcactaacatgggtgctcaataattgttattgacaagaattccaaacagttggtcaaatgactttttacttacaacatggagccataagtcataagataatttaatttatgaagaatcaatatgaaataaagacttaaagctcaatcttgttacctgtttggtgaacaactctggaaagtcaggataaaggaaagccaagtcgacagctgttttatctaagcagtaagaatatgcagatgggaccctcttctgttctcctaccatgtttgttccaggattccaatttgaaatctgtatgtgccccttgacacctcaatgctttgtcaagcacctcatttctctggctttagttttatagacaaagaaaccaaatacatggtgatggagcagcttatcacagtatgtttttagaaacaccaatgctaaaattaccagtccccaagtgtcaggtgaaattactataagaattaagtgagaattactttgatctaaagtattaatgaaaatggtagtgtcagtcatgattctggataattactcaaatagacaattttaaaaattgggacaacacattaatatgagaatatactgttataaagagaaaataggccgggtagggtggctcactcatgtaatcctagcattttgggaggctgaggtgggcggattgcttgagtccaggagtttgagaccagcctgggc

SEQ ID NO: 43906 - DNA, 401 bp, Homo sapiens
gacctggtctttttcatctctgtattaatgaactatgtatctatgtatgatacatacatgcatactatcatctgtgtatgaactgtgagcaagtgtgatataagaattggttgtgaggccgggcgcggtggctcacacctgttatcccagcagtttgggaggctgaggcaggaggatcacttgagcccaggagtttgagacaagcctgggcaacatggtgaaaccctgtgtctacaaaaaaatacaaaaattagtcaggcgtggtggtgcgcacctgaagtcccagctactctggaggctgaggcaggaggattgcttgagcccaggaagtggaggctgcagtgagccaagattgtgccactgcactccaggctaatcaacagagcaagacccagcgtcca

SEQ ID NO: 43907 - DNA, 349 bp, Homo sapiens
tttttgagctatacttcagctcaaaaagaggagctttttgatgtgatttgtcaagaatgtagattgttttcttgtgtgaattcttccctgtataatcctgatcattctattttagtggtaagagcccgagaaggagtatggatacctgtaaggctttcccgtccttggaaagcctctccttctgtgcatattattactgaaattcttcaaaagattttgaggcactcttggcgttaaattgctgctttaattttagtcattatgggatgattgctgtcacagctactgccacggcagctgggagttgctttgcattccacagtacaaacagcagactatgtaaataatt

SEQ ID NO: 43908 - DNA, 301 bp, Homo sapiens
atcctcaaattatattctcgcatgtatcagagattaaaataaatgtataatgtttattataaatatagactaaaagaattacagtattttaactttgaagtactattgcattcatgaatgattacgcacttagtttataggctcttagcctgaatagatgttcagtaaacaaggaacttttgaaaaattacatcatattatcagttacatttaataattaatttctgacattaatttgattcctcaaaagtgttgatgatcctctcttattgagtatgtagttgatgcccatcattttcaa

SEQ ID NO: 43909 - DNA, 343 bp, Homo sapiens
tgggagagtgtgctagggggaggagctgcaagaagggatgctccctaagctgatgccggggctcacccctgtgaactggctgtgctgcagtcagcagggcagctcctctgtgccaggtgctccacaggcatcatctctgacatcttcagtgcccttgcaggaagcccctccatatggctgtttctcagttgagaacacgaatcctttagtggttagaactgaaggcaggctgggcatggtggctcatgcctgtaatcccagcactttggaggccaagtacctgaggtcaggagtttgagaccagcctggccaacatggcaaaaccccatctctactaaaaata

SEQ ID NO: 43910 - DNA, 730 bp, Homo sapiens
ttcttttccctgggtcctgggagctgaggcaggaggagaagtggggggatgggagtggagagggagggcgggaaatcccagtgtggggagagggtcgatcagaccggcttggctccctgggcacctctgtcagagccccgcccagggctgcgtggccgcccatataagtggctctgggctgagacggagaagtcagtgcccgtgtctccacacgtctgcctccatcactgccatcgcgatcctgcagctatgtcctaccctgtgaccagtcagccccagtgcgccaccaccagctgctaccagacccagctcagtgactggcacacaggtctcacggactgctgcaacgacatgcctgtctgtctgtgcggcacttttgctcctctgtgccttgcctgccgcatctccgacgactttggcgagtgctgctgcgcgccctacctgcccggaggcctgcactccatccgcaccggcatgcgggagcgctaccacatccagggctccgtcgggcacgactgggcggccctcaccttttgtctgccctgcgccctctgccagatggcgcgggaactgaagatccgagagtaaggaagttccctgtcttccccgtccttttccaccagtctcgcctctggccttctctggccactcctgggagggactgcctcaccacccctgtcccgctgccagaaatacacccacaataaaaacctgaaaaccaaaaaaaaaa

SEQ ID NO: 43911 - DNA, 339 bp, Homo sapiens
atgattatataattgttaaatcacttaggagaattgtaaaaataaaatgtacaacaaacatgtagcagctacattgctaacaaaacgtgtatttccataaataagtgtacctttaacacttttcaaagaacattatctccgaaaatctcgttttattttcagtaaaatagctactgaagtgactccatttccttgaggtaaccacaaggaaaacaatgcatagaatcaaggcaattacacagacaattcaggcatttactcaaaaattcattttttaataataggtaactttggtcgtgtaaatacagtctgtcccaggtgtggtctccctattacagt

SEQ ID NO: 43912 - DNA, 540 bp, Homo sapiens
ttttttgaggctgaaaggggcacccagaatggtctttaaaccatgactgggggccttttcagaatgtgacgccaggttatcgctctctggctgggactctgtagtgcactttgtgggaccacacggagacagattcgaagtaggatggatggattctctaggtccttgagcatgttccagttaggcaagaggccagaggagatgcatagcttactctgagcatcttgacggtggacctcatggaatgtctttcaagcttcccatcttcatgttttaaaaaatccggttatctaaggaacgaagtttcagacccaccagaactgtagaagggcatcggatcctggtcagcagggtctcactccagttcttcggggtctgagactctctggaagagccaagaatgtgggctggggagtggagggaacagatgcggggcaccagtggatacctgaagaccccagcctgtgcctcctcaccagccaggaaagccagagatttttaacaaaaagttagaactttgtgtcaagcccttcaagcaaa

SEQ ID NO: 43913 - DNA, 427 bp, Homo sapiens
ttgcattccttccttggcttcctcactagactgaattcctgagagtggagaggatgtgtcttgtttccactcccagcactgtccggtccaaccagcgagaagtgattgctggttttgggagactccttgctctccttccttcttcgcccgggtcttgggtgctgaccttatgaaagggcagcctggggtttttcttggcatcaccagcacatagctgggttatgcacacagcacgttgcccagttcctgggcttggagggagtgtgctcatgtttgatggttacaacaatggatgggaacccatagccagtggcttcgatgcctctgtcctgatgggaagctgagaaggaattgacggtacccttctttcttttgggtcactaaccgtcctgcagcttcagcgtttctttgtgctggagcaagtgca

SEQ ID NO: 43914 - DNA, 419 bp, Homo sapiens
gtctgtgcctgggaaggggtgtgcgcatgggaagggtctgcgcctgggaaggggtgtgggctgccgtgcttggccctgtttgtcagtgctcctcccagatgtctgatgctactgcatccagccccaccagtaggcacacgctctgtgttcccgggtccccgtccccagctctcagggatgcactgcggtctggtccagcctcctttgggcactcacctgtgggacccctgaattcctctccatccattactgcccagccagccaggcctcctacaggtgtctccccttaaaagaagtttccagtcaggtttggtagctcatgcttgtaatcccaggattttgggaaaccaaggtgggaggatcacttgaggtcaagagtttgagaccagcgtgggcaacatagtgaaactgtctctaca

SEQ ID NO: 43915 - DNA, 609 bp, Homo sapiens
gcgtcgacgaggcctctaggagacaggctagggtgggaagcgttaagacagggtaggtgccatcaggagcctccaaacctgccccagagccaccagtctgcctctgcgggcctctctctgacgcccttccaatctgtgccctttctgcagctgtcttccctccattgtcataaatacaatcatgcagccaagtgagtccagactcagccagctctttctcatccatacccagggctctgcaatctgctttcttctccttctccctttgtagcccataattgtgatgatctgccccacacaccaaagtccactgtctcagaacctcaccccagaccctctgggggcccttgccttaacagtcagcttctcactgaccaccctcagctgaggctgaggttccctgacacatagcagttctctgctctggtggtgccctagaatcacttgaaaagattggacaaaacactgaggcccggctgggcgcggtggctcacgcctgtaatcccactactcgggaggctgaggcaggagaatggcgtgaacccgggaggtggagcttgcagtgaactgagatcacgcccctgcactccagcctgggcgacagagcga

SEQ ID NO: 43916 - DNA, 586 bp, Homo sapiens
cagtgagcatctgagctttgaacctcaaagaccaaaatgccctgcccattttcctgcttatcagctgaggaatctttacccacattgacacatgggcttgttctgacccaagtgcatgcaggcttccagagcagattcagaggcctaacttagtcctttagctttcctcccagcacagaactcccaaggttatctgcaagtaggccttgcctagagagactgagttttcaagttgtcagttttcccaaattgtcctcaagcatcttcctctggaatcaccttactgtttagtaaacattcagaggacttgctacacatctgggcagtctgcattgtaattcatatgtgtttacacatttgtgtcttcatctgctaaagcacctttgaaccatattgtaattcataatatctgaagcaattattatgaattgtagtaattcataatattgaagcgattcataatatctgaagcaatccccagatacgggttaggcatggccctgctctgagcaggatggcaaaagtggcagtccgtgacgcagcccttgttaccccaggctattactaaatggtggtggtggtttta

SEQ ID NO: 43917 - DNA, 392 bp, Homo sapiens
aaaaatgtcccatgaacaaataccaagtcatctgaggcttgtccacatgatttaccagcattttttcacacgacaaagatgtgaaggaaaactggggaaatgtgtcagccactattggcatgaaccagagatatttacaggggagggtgagggactatagtccagagtctcctcagattcttaaaacagcaaggattatgcaaagataaaaagcaaaagtaaacactaaaactgtgaatgaagcaagaacacaaagaggggaaatccttctatggaaacaagctttccttcagaggagaaaaacaagactctgctaaaaaaaatctgtcagcctggagtaatagatggaggctggtgtctgcaccgtgcctccctagtccacgtttctctgc

SEQ ID NO: 43918 - DNA, 473 bp, Homo sapiens
gactccgtctcaaaaaaaaaaaaaaagagaaaaaaatatatatatatcctggagaatatgaatgtattaaattatcacatgcaccctgaaaagatatgtatatatcctggagagttttgcgttaaagatctccctttaaaaaaaaatttttttttttttacagctagtggtattccattgtgtatgtttcccataacaaatgttaatgacctgcagtgagatccctattggtggaaatttgagttgtttttactacttttatattacaaacaatgctgcaataaatattattaggctagtgcccctctgtacatattcaagcacttctagaagataagttcctggaagcagcattaatgagttagcggtggctacatatgccgtggtgatagctgctgtccagttgcccctccatgggcagaaacctgtgggagggtcagaccagactctttaagtcattcttgaggacaagt

SEQ ID NO: 43919 - DNA, 528 bp, Homo sapiens
actgttcctcccatagcctcagcctcctcactgtttctcccatagcctcagcctcctgtttctttgcggacttcagtgccttcctcctcctcctcctctcctccttagagctgcagcctcctcctcttccctgtcctgtgcacccactgactcaggttcatgagatcctgtgggaggctctgctgcaggctctctagaggaccccatgacacctctgccatccagcgaactcttctggataaatggctcctggatgcctcagggttaacccttgtacactctgcacacagagctgccttcatggtctcactgcctcttagagatgccattgttactctcagctcatcatgttcccaaccaaaggcagagatggaaatagacgtgcttgagtggccgggctcatggttgtagatcttcaggcccttccctgcaatatcctgcccgtgcccactgcagccccatcagctggacacacagacacccttgatcagagtctggacaccagagtgcttccttctctcctggagc

SEQ ID NO: 43920 - DNA, 409 bp, Homo sapiens
gcctactactactactactactaaattcgcggccggtcgacgctgaggcaggagaattgcttgaacccagggggcagaggttgcagtgagctgagatcacgccattgcactccagcctgggcaacagagcaagacgccgtctcagcctcccgagtagttaggactacaggcgtgtgccaccacgcctgactagtttttgtatttttagtagagatgaagtttcactgtgttgcccaggctggtctcgaactcctgacctcaggtggtccacctacctcagcctcccaaagtgctgggattacaggcgtgagccaactgtgcctggcctgtactttcataagaactagaaaggtgacagtatatcaacaatacatgggtgcaaacatgcacacaacttaggaggatgaga

SEQ ID NO: 43921 - DNA, 355 bp, Homo sapiens
aaggggcaaacaagttctgtgcctattttataaggatattattcccatatatgagggttctgcctttatgatctaatgattcccaaaaggccccaccacccaatatcatcatttttggagttactatttcaaaataagcattttggggggatgcaacattcagaccatagcagctgtacaattggcaaaaggattgcctgtttttaaatctctgaatttgattttttttcccaaatacctttactagaaagaaaatttaaacattttacatttttactttacatggagaaaattcatgtcttgctctgttgtaagtttcatattattctctgtttaaagttcccaatcagaacat

SEQ ID NO: 43922 - DNA, 525 bp, Homo sapiens
  misc_feature (2)..(5): n is a, c, g, or t
  misc_feature (7)..(7): n is a, c, g, or t
  misc_feature (9)..(10): n is a, c, g, or t
cnnnncnanntttttttgtggagttaaacaaacttgccaggaatgtgatatttcagatcacttaatcaaggaaaagccgaacctatcttcagtcagaggagattgttgctgagttggtttatagttttctgatcccagaggtgcaaaaatactttgtcaaagaaaaagtgaggaacgcacagcggaaacatattcttgcagcccatcagatcatccacagttacacggaaagcatggttcaaaagaaattaactgagggagagcaagatgaggcctcaaatgctgccatgttacttgagaaagaaactcaaaatgagaacaacagctaagattgtgatttttttgtaaaagaagctgtacgaatcatcataaataattccaatagtctgcacttctcccaaggtgtgcactgctcataaacttgccagtgtgtgattcatgagaaaggagatttattttccttaaacatccaataatttaaaatgattttcaataataataatcaaatgaaaaagcttcattctc

SEQ ID NO: 43923 - DNA, 459 bp, Homo sapiens
tgagctcataaactcatcatcaatcatgaggaacgcacagcggaaacatattcttgcagcccatcagatcatccacagttacacggaaagcatggttcaaaagaaattaactgagggagagcaagatgaggcctcaaatgctgccatgttacttgagaaagaaactcaaaatgagaacaacagctaagtccttggtccaatagaatggaatcttaagtctcaatcaaaaggaatcatggaaggagggttgagatgagagggaagattgtgatttttttgtaaaagaagctgtacgaatcatcataaataattccaatagtctgcacttctcccaaggtgtgcactgctcataaacttgccagtgtgtgattcatgagaaaggagatttattttccttaaacatccaataatttaaaatgattttcaataataataatcaaatgaaaaagcttcattctc

SEQ ID NO: 43924 - DNA, 1874 bp, Homo sapiens
aatttgattaaactccaatattatctttaataaaaaacttgacatttcccttcatatctgagaagacacactttaccttgttgataaaattgaaagaaaaaaaacccattctccatggtcactaacagaaacgtcttgctaaatcctcttgcttatttgagggctgtggtccatcagtgactgaccagacaatcgactttctcgtgcctcagttttcctcataagaacttgggttggagccaattgagaggtaatattcccagtaaaaattaaatgcattctgaaagtgaattgactgccaagagttttgagtaatccagcacttcttctaataatcaccactcataatggaatttgtgtccttaaagttatgttattcttttcaaggtgtcactggttgaaaaccatttggccggactggaaggaagggcactagcagacatgtttgacttcctgtccaaagagctggtgagactgcaggaggagaggaggatccatgcctttgtcatgctggctgagcgccagcggcgggtacgagaggctgaagagagtggtcggcgccaggtggaaaaacagcgcctgcgggaggaggacgagatatttaaggaggtggctaaagttcaccatagtactataagctcctacctagaagacataatactgaataccgaagcaaatactgcagaagaacaagccagggcagaaatagagaagatggctgagaaaatcaatgacattgcttatgaaatggaaagccgccgaacctatcttcagtcagaggagattgttgctgagttggtttatagttttctgatcccagaggtgcaaaaatactttgtcaaagaaaaagtgaggaacgcacagcggaaacatattcttgcagcccatcagatcatccacagttacacggaaagcatggttcaaaagaaattaactgagggagagcaagatgaggcctcaaatgctgccatgttacttgagaaagaaactcaaaatgagaacaacagctaagattgtgatttttttgtaaaagaagctgtacgaatcatcataaataattccaatagtctgcacttctcccaaggtgtgcactgctcataaacttgccagtgtgtgattcatgagaaaggagatttattttccttaaacatccaataatttaaaatgattttcaataataataatcaaatgaaaaagcttcattctcttcagtgtcttctagatgccctacttaaagagaacattttcttatgtctcatttcaatattttgttaactatgaggatgtgctggtttgttgaatcaaacaaaaggaaatgttgtggaatatttttccaagtagttttggttcactattcacaggacattggcattatctactaaggctgaaaatgtgcatattccatgactcaggattttatctcctagatatatattcaacagaaatgcatgagtatgtgcaccaacaggcatgacaaaaatatttatagtagtggtgttcacaatagtcccaaactggaaacccaagtgtccatctccatcggaacagaaaactatactttggtctgcttctacagtggcacatcaacccacctttgagctttagatctaagaagtgtgttcatgcaacagccatagagatggtgctattaaaaggcaatctgcccatcctgtgtattgacaagcatcaggattccaggaggattcttcctgattcaaagactgtcaaataggaaaaaagaaaacagtaaatgaacaaaaacatcaacatggggtccaagtaatgaatttatagaggaaaatgtatgctactctgaaaacaaagcttatgttagagaatatcttactgtaagaaacaaggaaaattgcagaaac

SEQ ID NO: 43925 - DNA, 4519 bp, Homo sapiens
gacttgtttctaaatcacaattcccaaattattaatttctatggagaaatatgtgttaccatgttatctagactagctggtcagggtatttgcctccccagagacaagtctacttgggaaatcaagtgtatccaaaggctgcttgttaatttaatggcaaatcagttgattttaaagggtggtacagtatagtcaatcatgaatattcttcatcactttaaagatatacctgataaacagatacttataatagcagggcaatattttgttgaactttgtaaaaataacagttccatcatcagcaaacttacaaacttaaggggtgaattctgaagatagctgattttttttttaaccgtgttcaccaattctgagatatcatgtggtttgcatctttctagtgcaccaaatatgggagatggtataaatgtattgcttctttcacttgcaaattggcatagtgcgtatatacaaggtctttcccttgaagaattttttgggttacccaggctcaaaaggagttttgttcgtaggagagaagaaagtgtgttcagggtgtagtacttgaaaacatgctagactttctttatgaattccacttctgtaagctgacttggaatactcagaaaagaaaaacatcttgacaactgttgctggtagaagtggtagagtaacagggccacatgcacaacagagcatgagctgctgcagagtcagacaatatttaaacttttaaatttgttttccaattaagagattacattactttgccattattctcagcctaggggtagatatgttctatctgttatgctacttgattgtttattttgcagatccattgtttattgtgtcaagtgagaaagaccatacacaggcaaatatccaagctaccctgattcgcagcagactggtatgtctaattcatcagccaaggctacctgatgaacctgaaccatctagtttgcctgactgcattgatcagattgactaatcaccaaatcttcactggattttaggttccacagaaattaccttgccaagattactggagggcaaagcatcttaatacgtgtggctcattgtgaggattaagtcaccaataatgaacagagaacccataagctaatttatttcaatgggataaatttaataatatatgcccatgttaaaagaattcaagtagtataaaagcatatacagtgtgaagtaaattctagccctatcccctaccccctccacataaacagccattgtcatcagtttcttgggcatgtatttaaagatattttacgcatacagcaataacccctcttcttatgctgtatacattgttttgtatgtttttaaaaagagtttacaatgtaattaaaatgctttagaaaagctgatggtataattttgtcctttgcctcccttctctaacattagagaaaagttcccaggtttaaaaccatgttcagtaacctgatccattatccaagatactctctatattggagcaagtcagatcctgtcccaccatttatcagtcgggaatggaagggacataaggagaaacacagagaagccctccggcagctcaccacaactgacgcttcttttcagatgcctaaagaagtttatgaagatcctgaagttactggaaagaatcgctataaatactttgaaaggccttttctcccattttttcagcagatgccattcaatgttgtttatgccgtatccaaatggagtcttgctccatcactcaggctggagtgcagtggcgtgatctcggctcgctgcaacctccacctccagggttcaagtgattctccttcctcagcctcccaagtagctgggattacagggcagaaccatacacttttcctcctacttctactaagcacctatccatcccttcaaagtctactgtgggcactcagactgattatcgggatgctgacgttcaaacagatccatactctccagaatatgtagtatgtcaggactcaatccctgagctcttgaccctggctacgcttacttggggtcggggtctcccagcaggacaagctgaggtggagatgatagaaagagcccgcgagaagcgtgcttgggaagcctctctccccgctctgagtgacacctcccagtttgagaagaggaggaaaatgatgaatgaaatggagaggaaggagtgggccttcagagagcaggagattgaaaaactgcaggagattcgcctggaagttctaaaagagctgttgaggaagcgtgaagagaatcagaatgaagtgaatatgaagcacttgaatgcccggtggtctaaactgcaggagggaaaagaggcaaaaatggcaaaaattcagcgcacgcatgtatcaacaatcagaaaacttgtaggaaagagaaagaatatagaagggaagttggagagaagaaatatcatcaaggattattctgattatgcatcacaggtctatggacctctgtctcgtcttgggtgtttcccagacaacaactcagaggactttgtagtaaaaaactactatctcaacacctatgaaggattagtggaacttgagtcatgtctcccagattttgtgacacaaccccaaatcagagctccaaaacctaaagtcattaccaccaaagctggttttctgaagagggcagcaaggttggactatgagttggcagaggttcataaggcactgttggataagaagaataaagttcttgaagtaaagaaaccccctcgcttccttcaaagaaacccaatacctcaacctcggcttccaactccaaccttggaaatgacgtccaatgaagaagaagaaatggaaatggctgtgatctaccttcaaaagttactccggggcagagtcgttcagaacatgatgtttgaagggaaagaaaagcgactggagttgatccaggagttgcgcacctgccacgcactacaagaagatgaaaagctggtgaaaaaagccgagaagcaagtgaccctggccttacagcggcagaggaacttgcatgagcacaaggtgtcactggttgaaaaccatttggccggactggaaggaagggcactagcagacatgtttgacttcctgtccaaagagctggtgagactgcaggaggagaggaggatccatgcctttgtcatgctggctgagcgccagcggcgggtacgagaggctgaagagagtggtcggcgccaggtggaaaaacagcgcctgcgggaggaggacgagatatttaaggaggtggctaaagttcaccatagtactataagctcctacctagaagacataatactgaataccgaagcaaatactgcagaagaacaagccagggcagaaatagagaagatggctgagaaaatcaatgacattgcttatgaaatggaaagccgccgaacctatcttcagtcagaggagattgttgctgagttggtttatagttttctgatcccagaggtgcaaaaatactttgtcaaagaaaaagtgaggaacgcacagcggaaacatattcttgcagcccatcagatcatccacagttacacggaaagcatggttcaaaagaaattaactgagggagagcaagatgaggcctcaaatgctgccatgttacttgagaaagaaactcaaaatgagaacaacagctaagattgtgatttttttgtaaaagaagctgtacgaatcatcataaataattccaatagtctgcacttctcccaaggtgtgcactgctcataaacttgccagtgtgtgattcatgagaaaggagatttattttccttaaacatccaataatttaaaatgattttcaataataataatcaaatgaaaaagcttcattctcttcagtgtcttctagatgccctacttaaagagaacattttcttatgtctcatttcaatattttgttaactatgaggatgtgctggtttgttgaatcaaacaaaaggaaatgttgtggaatatttttccaagtagttttggttcactattcacaggacattggcattatctactaaggctgaaaatgtgcatattccatgactcaggattttatctcctagatatatattcaacagaaatgcatgagtatgtgcaccaacaggcatgacaaaaatatttatagtagtggtgttcacaatagtcccaaactggaaacccaagtgtccatctccatcggaacagaaaactatactttggtctgcttctacagtggcacatcaacccacctttgagctttagatctaagaagtgtgttcatgcaacagccatagagatggtgctattaaaaggcaatctgcccatcctgtgtattgacaagcatcaggattccaggaggattcttcctgattcaaagactgtcaaataggaaaaaagaaaacagtaaatgaacaaaaacatcaacatggggtccaagtaatgaatttatagaggaaaatgtatgctactctgaaaacaaagcttatgttagagaatatcttactgtaagaaacaaggaaaattgcagaaac

SEQ ID NO: 43926 - DNA, 2948 bp, Homo sapiens
gacttgtttctaaatcacaattcccaaattattaatttctatggagaaatatgtgttaccatgttatctagactagctggtcagggtatttgcctccccagagacaagtctacttgggaaatcaagtgtatccaaaggctgcttgttaatttaatggcaaatcagttgattttaaagggtggtacagtatagtcaatcatgaatattcttcatcactttaaagatatacctgataaacagatacttataatagcagggcaatattttgttgaactttgtaaaaataacagttccatcatcagcaaacttacaaacttaaggggtgaattctgaagatagctgattttttttttaaccgtgttcaccaattctgagatatcatgtggtttgcatctttctagtgcaccaaatatgggagatggtataaatgtattgcttctttcacttgcaaattggcatagtgcgtatatacaaggtctttcccttgaagaattttttgggttacccaggctcaaaaggagttttgttcgtaggagagaagaaagtgtgttcagggtgtagtacttgaaaacatgctagactttctttatgaattccacttctgtaagctgacttggaatactcagaaaagaaaaacatcttgacaactgttgctggtagaagtggtagagtaacagggccacatgcacaacagagcatgagctgctgcagagtcagacaatatttaaacttttaaatttgttttccaattaagagattacattactttgccattattctcagcctaggggtagatatgttctatctgttatgctacttgattgtttattttgcagatccattgtttattgtgtcaagtgagaaagaccatacacaggcaaatatccaagctaccctgattcgcagcagactggtatgtctaattcatcagccaaggctacctgatgaacctgaaccatctagtttgcctgactgcattgatcagattgactaatcaccaaatcttcactggattttaggttccacagaaattaccttgccaagattactggagggcaaagcatcttaatacgtgtggctcattgtgaggattaagtcaccaataatgaacagagaacccataagctaatttatttcaatgggataaatttaataatatatgcccatgttaaaagaattcaagtagtataaaagcatatacagtgtgaagtaaattctagccctatcccctaccccctccacataaacagccattgtcatcagtttcttgggcatgtatttaaagatattttacgcatacagcaataacccctcttcttatgctgtatacattgttttgtatgtttttaaaaagagtttacaatgtaattaaaatgctttagaaaagctgatggtataattttgtcctttgcctcccttctctaacattagagaaaagttcccaggtttaaaaccatgttcagtaacctgatccattatccaagatactctctatattggagcaagtcagatcctgtcccaccatttatcagtcgggaatggaagggacataaggagaaacacagagaagccctccggcagctcaccacaactgacgcttcttttcagatgcctaaagaagtttatgaagatcctgaagttactggaaagaatcgctataaatactttgaaaggccttttctcccattttttcagcagatgccattcaatgttgtttatgccgtatccaaatggagtcttgctccatcactcaggctggagtgcagtggcgtgatctcggctcgctgcaacctccacctccagggttcaagtgattctccttcctcagcctcccaagtagctgggattacagggcagaaccatacacttttcctcctacttctactaagcacctatccatcccttcaaagtctactgtgggcactcagactgattatcgggatgctgacgttcaaacagatccatactctccagaatatgtagtatgtcaggactcaatccctgagctcttgaccctggctacgcttacttggggtcggggtctcccagcaggacaagctgaggtggagatgatagaaagagcccgcgagaagcgtgcttgggaagcctctctccccgctctgagtgacacctcccagtttgagaagaggaggaaaatgatgaatgaaatggagaggaaggagtgggccttcagagagcaggagattgaaaaactgcaggagattcgcctggaagttctaaaagagctgttgaggaagcgtgaagagaatcagaatgaagtgaatatgaagcacttgaatgcccggtggtctaaactgcaggagggaaaagaggcaaaaatggcaaaaattcagcgcacgcatgtatcaacaatcagaaaacttgtaggaaagagaaagaatatagaagggaagttggagagaagaaatatcatcaaggattattctgattatgcatcacaggtctatggacctctgtctcgtcttgggtgtttcccagacaacaactcagaggactttgtagtaaaaaactactatctcaacacctatgaaggattagtggaacttgagtcatgtctcccagattttgtgacacaaccccaaatcagagctccaaaacctaaagtcattaccaccaaagctggttttctgaagagggcagcaaggttggactatgagttggcagaggttcataaggcactgttggataagaagaataaagttcttgaagtaaagaaaccccctcgcttccttcaaagaaacccaatacctcaacctcggcttccaactccaaccttggaaatgacgtccaatgaagaagaagaaatggaaatggctgtgatctaccttcaaaagttactccggggcagagtcgttcagaacatggtgtgtaggtccaaccgctggccctgcatttctcttttgagaataaattttttagaatgcata

SEQ ID NO: 43927 - DNA, 410 bp, Homo sapiens
cagatttttttaagtgctagaatttggaaactgacacactgtgaagtaagaaacatctggatccataaggcttataaatagcagagctgggatatgtgtggggctgtctgagttcaaagctagggctcagacacactgtatcacaggaattttttgcatgtattgatctgataatgtttctaaaagatgacataatcataaacatttgttttgctcttttttacagattgtgatttttttgtaaaagaagctgtacgaatcatcataaataattccaatagtctgcacttctcccaaggtgtgcactgctcataaacttgccagtgtgtgattcatgagaaaggagatttattttccttaaacatccaataatttaaaatgattttcaataataataatcaaatgaaaaa

SEQ ID NO: 43928 - DNA, 3131 bp, Homo sapiens
gacttgtttctaaatcacaattcccaaattattaatttctatggagaaatatgtgttaccatgttatctagactagctggtcagggtatttgcctccccagagacaagtctacttgggaaatcaagtgtatccaaaggctgcttgttaatttaatggcaaatcagttgattttaaagggtggtacagtatagtcaatcatgaatattcttcatcactttaaagatatacctgataaacagatacttataatagcagggcaatattttgttgaactttgtaaaaataacagttccatcatcagcaaacttacaaacttaaggggtgaattctgaagatagctgattttttttttaaccgtgttcaccaattctgagatatcatgtggtttgcatctttctagtgcaccaaatatgggagatggtataaatgtattgcttctttcacttgcaaattggcatagtgcgtatatacaaggtctttcccttgaagaattttttgggttacccaggctcaaaaggagttttgttcgtaggagagaagaaagtgtgttcagggtgtagtacttgaaaacatgctagactttctttatgaattccacttctgtaagctgacttggaatactcagaaaagaaaaacatcttgacaactgttgctggtagaagtggtagagtaacagggccacatgcacaacagagcatgagctgctgcagagtcagacaatatttaaacttttaaatttgttttccaattaagagattacattactttgccattattctcagcctaggggtagatatgttctatctgttatgctacttgattgtttattttgcagatccattgtttattgtgtcaagtgagaaagaccatacacaggcaaatatccaagctaccctgattcgcagcagactggtatgtctaattcatcagccaaggctacctgatgaacctgaaccatctagtttgcctgactgcattgatcagattgactaatcaccaaatcttcactggattttaggttccacagaaattaccttgccaagattactggagggcaaagcatcttaatacgtgtggctcattgtgaggattaagtcaccaataatgaacagagaacccataagctaatttatttcaatgggataaatttaataatatatgcccatgttaaaagaattcaagtagtataaaagcatatacagtgtgaagtaaattctagccctatcccctaccccctccacataaacagccattgtcatcagtttcttgggcatgtatttaaagatattttacgcatacagcaataacccctcttcttatgctgtatacattgttttgtatgtttttaaaaagagtttacaatgtaattaaaatgctttagaaaagctgatggtataattttgtcctttgcctcccttctctaacattagagaaaagttcccaggtttaaaaccatgttcagtaacctgatccattatccaagatactctctatattggagcaagtcagatcctgtcccaccatttatcagtcgggaatggaagggacataaggagaaacacagagaagccctccggcagctcaccacaactgacgcttcttttcagatgcctaaagaagtttatgaagatcctgaagttactggaaagaatcgctataaatactttgaaaggccttttctcccattttttcagcagatgccattcaatgttgtttatgccgtatccaaatggagtcttgctccatcactcaggctggagtgcagtggcgtgatctcggctcgctgcaacctccacctccagggttcaagtgattctccttcctcagcctcccaagtagctgggattacagggcagaaccatacacttttcctcctacttctactaagcacctatccatcccttcaaagtctactgtgggcactcagactgattatcgggatgctgacgttcaaacagatccatactctccagaatatgtagtatgtcaggactcaatccctgagctcttgaccctggctacgcttacttggggtcggggtctcccagcaggacaagctgaggtggagatgatagaaagagcccgcgagaagcgtgcttgggaagcctctctccccgctctgagtgacacctcccagtttgagaagaggaggaaaatgatgaatgaaatggagaggaaggagtgggccttcagagagcaggagattgaaaaactgcaggagattcgcctggaagttctaaaagagctgttgaggaagcgtgaagagaatcagaatgaagtgaatatgaagcacttgaatgcccggtggtctaaactgcaggagggaaaagaggcaaaaatggcaaaaattcagcgcacgcatgtatcaacaatcagaaaacttgtaggaaagagaaagaatatagaagggaagttggagagaagaaatatcatcaaggattattctgattatgcatcacaggtctatggacctctgtctcgtcttgggtgtttcccagacaacaactcagaggactttgtagtaaaaaactactatctcaacacctatgaaggattagtggaacttgagtcatgtctcccagattttgtgacacaaccccaaatcagagctccaaaacctaaagtcattaccaccaaagctggttttctgaagagggcagcaaggttggactatgagttggcagaggttcataaggcactgttggataagaagaataaagttcttgaagtaaagaaaccccctcgcttccttcaaagaaacccaatacctcaacctcggcttccaactccaaccttggaaatgacgtccaatgaagaagaagaaatggaaatggctgtgatctaccttcaaaagttactccggggcagagtcgttcagaacatgatgtttgaagggaaagaaaagcgactggagttgatccaggagttgcgcacctgccacgcactacaagaagatgaaaagctggtgaaaaaagccgagaagcaagtgaccctggccttacagcggcagaggaacttgcatgagcacaaggttttcctttttttgttttcttgttactttcttgttaaattttctcccttgattttatcatcacacagcaccattataataaaaattaatgaaatgatg

SEQ ID NO: 43929 - DNA, 1749 bp, Homo sapiens
aatttgattaaactccaatattatctttaataaaaaacttgacatttcccttcatatctgagaagacacactttaccttgttgataaaattgaaagaaaaaaaacccattctccatggtcactaacagaaacgtcttgctaaatcctcttgcttatttgagggctgtggtccatcagtgactgaccagacaatcgactttctcgtgcctcagttttcctcataagaacttgggttggagccaattgagaggtaatattcccagtaaaaattaaatgcattctgaaagtgaattgactgccaagagttttgagtaatccagcacttcttctaataatcaccactcataatggaatttgtgtccttaaagttatgttattcttttcaaggtgtcactggttgaaaaccatttggccggactggaaggaagggcactagcagacatgtttgacttcctgtccaaagagctggtgagactgcaggaggagaggaggatccatgcctttgtcatgctggctgagcgccagcggcgggtacgagaggctgaagagagtggtcggcgccaggtggaaaaacagcgcctgcgggaggaggacgagatatttaaggaggtggctaaagttcaccatagtactataagctcctacctagaagacataatactgaataccgaagcaaatactgcagaagaacaagccagggcagaaatagagaagatggctgagaaaatcaatgacattgcttatgaaatggaaagccgccgaacctatcttcagtcagaggagattgttgctgagttggtttatagttttctgatcccagaggtgcaaaaatactttgtcaaagaaaaagtgaggaacgcacagcggaaacatattcttgcagcccatcagatcatccacagttacacggaaagcatggttcaaaagaaattaactgagggagagcaagatgaggcctcaaatgctgccatgttacttgagaaagaaactcaaaatgagaacaacagctaagattgtgatttttttgtaaaagaagctgtacgaatcatcataaataattccaatagtctgcacttctcccaaggtgtgcactgctcataaacttgccagtgtgtgattcatgagaaaggagatttattttccttaaacatccaataatttaaaatgattttcaataataataatcaaatgaaaaagcttcattctcttcagtgtcttctagatgccctacttaaagagaacattttcttatgtctcatttcaatattttgttaactatgaggatgtgctggtttgttgaatcaaacaaaaggaaatgttgtggaatatttttccaagtagttttggttcactattcacaggacattggcattatctactaaggctgaaaatgtgcatattccatgactcaggattttatctcctagatatatattcaacagaaatgcatgagtatgtgcaccaacaggcatgacaaaaatatttatagtagtggtgttcacaatagtcccaaaatggtgctattaaaaggcaatctgcccatcctgtgtattgacaagcatcaggattccaggaggattcttcctgattcaaagactgtcaaataggaaaaaagaaaacagtaaatgaacaaaaacatcaacatggggtccaagtaatgaatttatagaggaaaatgtatgctactctgaaaacaaagcttatgttagagaatatcttactgtaagaaacaaggaaaattgcagaaac

SEQ ID NO: 43930 - DNA, 1067 bp, Homo sapiens
  misc_feature (2)..(5): n is a, c, g, or t
  misc_feature (7)..(7): n is a, c, g, or t
  misc_feature (9)..(10): n is a, c, g, or t
cnnnncnanntttttttgtggagttaaacaaacttgccaggaatgtgatatttcagatcacttaatcaaggaaaagccgaacctatcttcagtcagaggagattgttgctgagttggtttatagttttctgatcccagaggtgcaaaaatactttgtcaaagaaaaagtgaggaacgcacagcggaaacatattcttgcagcccatcagatcatccacagttacacggaaagcatggttcaaaagaaattaactgagggagagcaagatgaggcctcaaatgctgccatgttacttgagaaagaaactcaaaatgagaacaacagctaagattgtgatttttttgtaaaagaagctgtacgaatcatcataaataattccaatagtctgcacttctcccaaggtgtgcactgctcataaacttgccagtgtgtgattcatgagaaaggagatttattttccttaaacatccaataatttaaaatgattttcaataataataatcaaatgaaaaagcttcattctcttcagtgtcttctagatgccctacttaaagagaacattttcttatgtctcatttcaatattttgttaactatgaggatgtgctggtttgttgaatcaaacaaaaggaaatgttgtggaatatttttccaagtagttttggttcactattcacaggacattggcattatctactaaggctgaaaatgtgcatattccatgactcaggattttatctcctagatatatattcaacagaaatgcatgagtatgtgcaccaacaggcatgacaaaaatatttatagtagtggtgttcacaatagtcccaaaatggtgctattaaaaggcaatctgcccatcctgtgtattgacaagcatcaggattccaggaggattcttcctgattcaaagactgtcaaataggaaaaaagaaaacagtaaatgaacaaaaacatcaacatggggtccaagtaatgaatttatagaggaaaatgtatgctactctgaaaacaaagcttatgttagagaatatcttactgtaagaaacaaggaaaattgcagaaac

SEQ ID NO: 43931 - DNA, 469 bp, Homo sapiens
  misc_feature (1)..(1): n is a, c, g, or t
  misc_feature (3)..(3): n is a, c, g, or t
  misc_feature (6)..(6): n is a, c, g, or t
  misc_feature (8)..(8): n is a, c, g, or t
ngnacnanggctcaaagagaagtataagactaggtctttatatttgtaagttacttacactctagatatcaaacgaaatgtaactcacatgaagtgcttcaatgttgaatagtgaggaacgcacagcggaaacatattcttgcagcccatcagatcatccacagttacacggaaagcatggttcaaaagaaattaactgagggagagcaagatgaggcctcaaatgctgccatgttacttgagaaagaaactcaaaatgagaacaacagctaagattgtgatttttttgtaaaagaagctgtacgaatcatcataaataattccaatagtctgcacttctcccaaggtgtgcactgctcataaacttgccagtgtgtgattcatgagaaaggagatttattttccttaaacatccaataatttaaaatgattttcaataataataatcaaatgaaaaagcttcattctc

SEQ ID NO: 43932 - DNA, 503 bp, Homo sapiens
aaaaaggaaaagagattgggaaacatgacgatctcagatggggcttgagtctcagagaagcagtacgtttgggtcccagcaggcagcaaagactaacaggaggagacccccagacaggtggaaacagcgcagggtctgagatcagaccaaatccgcaaagcctccagaggtagatttggccctcactcttccccacatcatagttaggtgatagcccctcacaatgtccccacctcccccaggtcccagttacagagcaggagcctgtggccagcataacgcaggactggaggggcgctaagatccaggacactatggcaggcctggcgccgggaatccctgtggtctggacagtgagggcggtgaaaaggatctggacacctccctccccttggcccactttgatttcacccctgccagggttcgtgagctgattccatgcactttctgcctgagtgggagcagcacactgaatgactgtcccatcctccctctcccccaca

SEQ ID NO: 43933 - DNA, 358 bp, Homo sapiens
aggtctccctcatctctacaggtttaacaactctgattcttggaattgtaatggcaagggcaatttcacagcctggatctccctgtgttgcccaggccagtcttgaactcaaagcaatccttctgcctcggcctcccaaagtgcagggatttcaggcgtgaaccatcatgcccagcctcaatattgtattttattctttgatttctttttttctgtattttattatttgaatttaaaaattaatttggggtaaattgatgtttatatgatattgagtcttcccatttgtgtgtatggatatggtatatttctccatttatttgtgtctttcaataaaagtttaacatgacgttaaaat

SEQ ID NO: 43934 - DNA, 423 bp, Homo sapiens
ctggggtacggggacagttctttggtgcagtgatcagcatgtccttaacagactgttcccgaggtaatgcctactgcgatctgctcacctgtgatctgtccacatgccgtctgcctgcgctgggttctgtgcgtgcacgcaagtctctctggtccagaagccagagctgggatggaattcaaggaaccacaaaagtctccctctcactgtcaattttgaagaatgaataaggggtaggcaggcaaaggcaaaaaactcagggtgagggcataaatagaagcagaggtatcgaggcaggaaacagcacagccaggtcacagcagttcagcacccactgggacaagcgcaagacaagaagtatggaaggaacacaggcaggcgagaaaggtagggccaggttcgagaaggattcctgcgtcctgt

SEQ ID NO: 43935 - DNA, 467 bp, Homo sapiens
aattgataagggacttgtcatcaaaactcttgtaatagagagtcttcctctattctctggaaactcaaaattaggacaaagttgtgtcattctttcattttctgaatacattctcttaaaactggggaaactgggccgggtgcggtggctcacacctgtaatcccagcactttgggaagccgaggcgggcagatcacgaggtcaagagatcgagaccatcctggctaacatggtgaaaccccgtctctactaaattacaaaaaaaattagccgggcgtggtggcgggcgcctgtagtcccagttcctcaggaggctgaggcaggagaatggcgtgaacccgggaggcggagcttgcagtgagccgagatagtgccactgcacttcagcctgggcaagagcgaaactccgtctcaaaaacaaacaaacaaacaaaaaactggggaaactgaaaggggcaaattgtcct

SEQ ID NO: 43936 - DNA, 775 bp, Homo sapiens
tgataaagaagtccgcagaggagcacatctcccaaaatgaaatcttactttctctcgtgagaaccaaggcaggaagactgtggtgaggggctctttccttttcacactcatgcttcaggacgacccactgtgtttggggctctctgtgctcataccttgtgtggtgtgaaccagtgaccctgtgtctgttaggattggtggttgggtggcatcaggctgaagaataggtgagcgggatcgtgctgttcagcaggaaaactcaaccacaggaaaagaccacttccagaacgtgggtctgctctggatgcaaataaatacattgattttaacataagttttgtttggagaacagtttaagtttttagaggaaaatattacttttatcatctctgtgtagaaataaaggcaagagagaaatataaggaagtagacactccctattttcatactgttaggatgcagaatgtaatgccattttgaaagtacataggaggtcatttaaacaaaaaattattgaacaaatactagtaatgattttacaagttgttgttttgttttgttttaggtgagaaaccttttgaatgtaacatttgtgggaaacatttctctcaggtgggaatactcttatttattgttaataattggaaacctgcaacacagtgtttttttattggaaataagacatacttttgtacttgtgagagaagcctctaatgatgtctgtaacttaaagacttcagaataaattaggataaatcgttttcaagaaaacaga

SEQ ID NO: 43937 - DNA, 341 bp, Homo sapiens
aaagccacaagcatgaatgggattaccaagaaattagatatagactatagatagaaaaggaaagaagttctaggattgagcccagaaaattcctatgtaaagatatcaggaaaaataaacctaggcatttctttttcttttcagctgagcaactcagagccaaagcaatttttcgactaactctccttaagagggttaccagaaaatttttgtatttatgattggaaaagtagttaactgtatataccatgaaactatggaatcttgagactaaaatagaccttaacctaaaggataataaattcaacttgttggtttttcaacagcaaatactctgaact

SEQ ID NO: 43938 - DNA, 133 bp, Homo sapiens
ccgctttccattcatgccacctggggatactcatgcctatcttggagggttgtgggaagggttctaagagcatatgcgtgtgacatttcttgtggacagtaggccctcataaatggggcgctcctccacctct

SEQ ID NO: 43939 - DNA, 361 bp, Homo sapiens
agcatcctagcaagatacctgacacatagtaggcacccaggaaatgacctttattataatcgtcctgctagtatatgttactttttgcccactcattcagcaaacatttatggacacctctcacgtgctgggcattgctctggggatggttgttggcctcgttgctctctgtatcccaggagagataccagctcagagtgcttcaactataacgtctaatgtttcagaatcaattttgaggtgtggtgaggtgttttttttttttttttattttactaattttccagatggtttctctctattgaaagtttatctagaaaggggtcatctcacagcttttattttctcctcaacttgcttt

SEQ ID NO: 43940 - DNA, 326 bp, Homo sapiens
ctgctttggttcagatcttggctgtagcactcagccaaccctggaaaataaacctctgcctgttctctcatctataaaatggggacaagcactaatgtcataggattgttatggtagagttacatgagtttcatgcatatcacagttaaacagctcctgatgcatggcaagtgcccaataaatgttagctattgtcatgttagaggaaatagattttgtggcctgggacatgtaatgctgccttagcagaaattcagctggttcatttaagctctaaatttatgagctttttattgattaaacccatcactgtagatcctcttaga

SEQ ID NO: 43941 - DNA, 336 bp, Homo sapiens
tagtcccagctactcgggaggctgaggcaggagaatggcatgaacctgggaggtggagcttgcagtgagctgagatcgtgccactgcactccagcctgggcgacagagagagactccgtctcaaaaataaaaaaaaaaaaaaaaaaaaaggacaataggagaaaaatgtgtctatggactgggtactatgtgaaaacaagttaacaacctcatacaccaagtcctggcctcaagtgatcgatctgcccatcttggcttcccaaagtgctgggattacaggcataagccaccatgctcagcccaaccttagccatctgaacctcattcccatccccc

SEQ ID NO: 43942 - DNA, 360 bp, Homo sapiens
ggaataacgcacataaaatgaccagcgtagtatctggcacatgataaaaattctttgtcatcattagtgactatcatttttatctatgcacatttttatctatgctcaactgggtataaacatgcctgcatatagactatccctacgttttgtcactattgaactcagctgcctagttactgcctaataagcatctctgtttcacctcttccactgtaggcattcagtgtgttttgctgctgactcaaacaatggtacaccaacagaaaacacccatataaaaatgtcattgcaatgatatgacatctgaggaggattttaaaatgcagaagcatcttgttcttatccaattgggcaatg

SEQ ID NO: 43943 - DNA, 418 bp, Homo sapiens
taccctgaagagtaatcacctgtttacgtgtttgcctctgaggagactctctaagtccctcatggtgatataccttttgctggctaatagcattgattctggttaataatgattgataaatatatgtaaaaaatgaataaatttttaagaccaaaaatttgccataattaagaactctgagaatctcggtctgctgggcacaggcaactagggaacagtgggttgcagtccaggtacatatatggtgcaatgggattgcaggaagaaacaattaaaatttgtgctgggagtctaggaaggcatggaggatgtgacatttgaacttagatgtggaggtaggcaacaggtcttgacacccatttggatcccacaatcaggcctaactaatgaatttatacactatctccactgaaggcca

SEQ ID NO: 43944 - DNA, 281 bp, Homo sapiens
gctgggattacaggcgcttgccaccacacctggctaattttttgtaattttagtagagatggggtttcgccatgttggtcaggctggtctcgaattccagaccacaggtgatctgcccgcctcggcctcccaaagtgctgggattacaggcgtgagccactgcacctggccccaaatttatatcttaacatcatggcagggcatggagaagaaaggccagtgggctgctcctatccactgactgggggttggccaactgcctggagattctgacgtcgacg

SEQ ID NO: 43945 - DNA, 616 bp, Homo sapiens
  misc_feature (443)..(443): n is a, c, g, or t
  misc_feature (470)..(470): n is a, c, g, or t
gcatttttttagagccaaggtttcaccatgttggcccacctcagcctcccaaggtgctgggattacaggcgtgagccacgcgcgcccggcccatttatgtgtaatcttaattcaacacttattgagcgcctactgtatgtttggcataaaatggtggtccctaatttcaaaagatttggagtctagagggcagaaattgaagaggttggtgctctgcagtctgagtccgcccacagactgaataaatatgggaaaaaaatcttccccacggcggaggagttctcagtcccacgcgcccagagtcgcacccactcgagccacccgcctgttgccgtcgccacgccctccagccgcagccccagcgcgcattcctacgggtcgccgggtctgtcgccagcgatcgaatgaagtcggctgatcccccacgtgtggctgctccagtngacacccaggggaggcctcggtccttnacccctagagcaaccaatgggctggccttaaattcttcagcgggggcgttctttttctttcctcccaagcaggcggccgttgggtcggccgaaggcagcagcgactactacggctcttcctctccaatgggatcccctgtctgccc

SEQ ID NO: 43946 - DNA, 620 bp, Homo sapiens
gcatttttttagagccaaggtttcaccatgttggcccacctcagcctcccaaggtgctgggattacaggcgtgagccacgcgcgcccggcccatttatgtgtaatcttaattcaacacttattgagcgcctactgtatgtttggcataaaatggtggtccctaatttcaaaagatttggagtctagagggcagaaattgaagaggttggtgctctgcagtctgagtccgcccacagactgaataaataagctctgcgtcggcgcccctcacctttctttcatggccagacttttctctggcggttccacagctgtcctgacagtggaattcagacggggtgaccaagcccctagcccacctaccagcgaaatccagcatcagttccagggcagccggacccgcgcccggggacgactgacccttagcccaaggctgcgggggcgtcggagtcctgaagcgcaggcgaggcagggccagcgggacagggagactcaaggccccaggggatctgggcgtttgaagactcaggtcagactctgaggcgcccgtctaaagagaccggttgtcttttccctaattcaggaggccaggctgtcccttggggcgtcgtacctcgtgc

SEQ ID NO: 43947 - DNA, 574 bp, Homo sapiens
gcatttttttagagccaaggtttcaccatgttggcccacctcagcctcccaaggtgctgggattacaggcgtgagccacgcgcgcccggcccatttatgtgtaatcttaattcaacacttattgagcgcctactgtatgtttggcataaaatggtggtccctaatttcaaaagatttggagtctagagggcagaaattgaagaggttggtgctctgcagtctgagtccgcccacagactgaataaatactctggcggttccacagctgtcctgacagtggaattcagacggggtgaccaagcccctagcccacctaccagcgaaatccagcatcagttccagggcagccggacccgcgcccggggacgactgacccttagcccaaggctgcgggggcgtcggagtcctgaagcgcaggcgaggcagggccagcgggacagggagactcaaggccccaggggatctgggcgtttgaagactcaggtcagactctgaggcgcccgtctaaagagaccggttgtcttttccctaattcaggaggccaggctgtcccttggggcgtcgtacctcgtgc

SEQ ID NO: 43948 - DNA, 650 bp, Homo sapiens
ctgaagacactttctctatatttccctgataacttctttacctctattctgatgtcaattgctttagggattcgggctgggcctgagatcttcctgacccaagggacaccaaagaccctacagaaccatcccaacatattgcaaagcttcaaggagagtagggactcaaattagtatagccctgttggatatatgtgcacaaatcaccattctacttggttctgggggttgggggaaggggtgctgagggatggaggacaatagcatgtgaggaaatacaaaagagaccctactgggaggtgcactagaaagaagggcaagaagccaagaggaaaaaaaaaaagccaaccctcccctcccctcccatcccctcctctttccttcccttcttttcctcccacctcagccacccaaatgactaggacaacaggcacacaccatcatgcctggataattttttagtgttttgtaaagacagaggagtctcactatgtcacccaggctggtctagaactcctggccttaagcagtcctcccacctctgcctctccaagtactgatattacaggcatgagccactgcaccggggaggcctacagtcgttctttatagtttaccctcttttttcctgcattctataaatactcaaa

SEQ ID NO: 43949 - DNA, 511 bp, Homo sapiens
ctgttccacctcagatcattaggcattagttagattctcataaggagcgtgcaacctagatccctcgcacgcacagttcacaataaggtttgcgctcctatgagaatctaatgctgctgccgatctgacaggaggcggagctcaaacagcaatgcgtggctggtccatcgctcactgttgtgtggcccagttcctaacaggccatggacccgtactagtctacagacatgggggttggggactcctggtttaatgggtatagagtttcagttttgcaaaatgaaaagagttctggagattggctgcacaacaatgtgaatgtacttaacaatactgaactgtacacttaaaaatagttaagatggggctggatatgatggctcaggcctgtaattccagtgctttgggaggctgaggcgggggcattgcttgaacccaagagttggaagttaagtgaggtatgattacgccacgcacaccagcctgggcaacagagcaagaccatgtcata

SEQ ID NO: 43950 - DNA, 3016 bp, Homo sapiens
  misc_feature (1413)..(1413): n is a, c, g, or t
aagcactgtacgctcgattacggatcggcggcgacggcgggcgggcggggactcggcgcgggcgccctcccggccagcggcggcagcccctcctccccggcgccctcaggaccccccagagacccccggcggcggcagcctgccttgctctgccaggaaccatgagtgaggcccgcagggacagcacgagcagcctgcagcgcaagaagccaccctggctaaagctggacattccctctgcggtgcccctgacggcagaagagcccagcttcctgcagcccctgaggcgacaggctttcctgaggagtgtgagtatgccagccgagacagcccacatctcttcaccccaccatgagctccggcggccggtgctgcaacgccagacgtccatcacacagaccatccgcagggggaccgccgactggtttggagtgagcaaggacagtgacagcacccagaaatggcagcgcaagagcatccgtcactgcagccagcgctacgggaagctgaagccccaggtcctccgggagctggacctgcccagccaggacaacgtgtcgctgaccagcaccgagacgccacccccactctacgtggggccatgccagctgggcatgcagaagatcatagaccccctggcccgtggccgtgccttccgtgtggcagatgacactgcggaaggcctgagtgccccacacactcccgtcacgccgggtgctgcctccctctgctccttctccagctcccgctcaggtttccaccggctcccgcggcggcgcaagcgagagtcggtggccaagatgagcttccgggcggccgcagcgctgatgaaaggccgctccgttagggatggcacctttcgccgggcacagcgtcgaagcttcactccagctagctttctggaggaggacacaactgatttccccgatgagctggacacatccttctttgcccgggaaggtatcctccatgaagagctgtccacatacccggatgaagttttcgagtccccatcggaggcagcgctaaaggactgggagaaggcaccggagcaggcggacctcaccggcggggccctggaccgcagcgagcttgagcgcagccacctgatgctgcccttggagcgaggctggcggaagcagaaggagggcgccgcagccccgcagcccaaggtgcggctccgacaggaggtggtgagcaccgcggggccgcgacggggccagcgtatcgcggtgccggtgcgcaagctcttcgcccgggagaagcggccgtatgggctgggcatggtgggacggctcaccaaccgcacctaccgcaagcgcatcgacagcttcgtcaagcgccagatcgaggacatggacgaccacaggcccttcttcacctactggcttaccttcgtgcactcgctcgtcnccatcctagccgtgtgcatctatggcatcgcgcccgtgggcttctcgcagcatgagacggtggactcggtgctgcggaaccgcggggtctacgagaacgtcaagtacgtgcagcaggagaacttctggatcgggcccagctcggaggccctcatccacctgggcgccaagttttcgccctgcatgcgccaggacccgcaggtgcacagcttcattcgctcggcgcgcgagcgcgagaagcactccgcctgctgcgtgcgcaacgacaggtcgggctgcgtgcagacctcggaggaggagtgctcgtccacgctggcagtgtgggtgaagtggcccatccatcccagcgccccagagcttgcgggccacaagagacagtttggctctgtctgccaccaggatcccagggtgtgtgatgagccctcctccgaagaccctcatgagtggccagaagacatcaccaagtggccgatctgcaccaaaaacagcgctgggaaccacaccaaccatccccacatggactgtgtcatcacaggacggccctgctgcattggcaccaagggcaggtgtgagatcacctcccgggagtactgtgacttcatgaggggctacttccatgaggaggccacgctctgctctcaggtgcactgcatggatgatgtgtgtgggctcctgccttttctcaaccccgaggtgcctgaccagttctaccgcctgtggctatccctcttcctgcacgccgggatcttgcactgcctggtgtccatctgcttccagatgactgtcctgcgggacctggagaagctggcaggctggcaccgcatagccatcatctacctgctgagtggtgtcaccggcaacctggccagtgccatcttcctgccataccgagcagaggtgggtcctgctggctcccagttcggcatcctggcctgcctcttcgtggagctcttccagagctggcagatcctggcgcggccctggcgtgccttcttcaagctgctggctgtggtgctcttcctcttcacctttgggctgctgccgtggattgacaactttgcccacatctcggggttcatcagtggcctcttcctctccttcgccttcttgccctacatcagctttggcaagttcgacctgtaccggaaacgctgccagatcatcatctttcaggtggtcttcctgggcctcctggctggcctggtggtcctcttctacgtctatcctgtccgctgtgagtggtgtgagttcctcacctgcatccccttcactgacaagttctgtgagaagtacgaactggacgctcagctccactgagctggctgcgggctccagcggccgtgtgctccagcaggccagagccagacacgacctccctgagcctcacaggcttacaggagtcacctgctccatgtggggactggcctgtttcctgaacacagacctctttcttgtgccttgttcacttctgttgaacccctcgtactgccgggcatttattatactacttcctgtcataaccttctaacttgtttcttgacgaccacctcatgtggccaataaatggactgggagcgttttagctgccattaacttgaacaggg

SEQ ID NO: 43951 - DNA, 3139 bp, Homo sapiens
  misc_feature (1536)..(1536): n is a, c, g, or t
aagcactgtacgctcgattacggatcggcggcgacggcgggcgggcggggactcggcgcgggcgccctcccggccagcggcggcagcccctcctccccggcgccctcaggaccccccagagacccccggcggcggcagcctgccttgctctgccaggaaccatgagtgaggcccgcagggacagcacgagcagcctgcagcgcaagaagccaccctggctaaagctggacattccctctgcggtgcccctgacggcagaagagcccagcttcctgcagcccctgaggcgacaggctttcctgaggagtgtgagtatgccagccgagacagcccacatctcttcaccccaccatgagctccggcggccggtgctgcaacgccagacgtccatcacacagaccatccgcagaccctggtccctggagtgactacaggcctggggcagggcatgctgccccggaggagggcctttgaagtcccctgcctgggaggggcgatctggccgccccttgctgagtccctgccatgccagggggaccgccgactggtttggagtgagcaaggacagtgacagcacccagaaatggcagcgcaagagcatccgtcactgcagccagcgctacgggaagctgaagccccaggtcctccgggagctggacctgcccagccaggacaacgtgtcgctgaccagcaccgagacgccacccccactctacgtggggccatgccagctgggcatgcagaagatcatagaccccctggcccgtggccgtgccttccgtgtggcagatgacactgcggaaggcctgagtgccccacacactcccgtcacgccgggtgctgcctccctctgctccttctccagctcccgctcaggtttccaccggctcccgcggcggcgcaagcgagagtcggtggccaagatgagcttccgggcggccgcagcgctgatgaaaggccgctccgttagggatggcacctttcgccgggcacagcgtcgaagcttcactccagctagctttctggaggaggacacaactgatttccccgatgagctggacacatccttctttgcccgggaaggtatcctccatgaagagctgtccacatacccggatgaagttttcgagtccccatcggaggcagcgctaaaggactgggagaaggcaccggagcaggcggacctcaccggcggggccctggaccgcagcgagcttgagcgcagccacctgatgctgcccttggagcgaggctggcggaagcagaaggagggcgccgcagccccgcagcccaaggtgcggctccgacaggaggtggtgagcaccgcggggccgcgacggggccagcgtatcgcggtgccggtgcgcaagctcttcgcccgggagaagcggccgtatgggctgggcatggtgggacggctcaccaaccgcacctaccgcaagcgcatcgacagcttcgtcaagcgccagatcgaggacatggacgaccacaggcccttcttcacctactggcttaccttcgtgcactcgctcgtcnccatcctagccgtgtgcatctatggcatcgcgcccgtgggcttctcgcagcatgagacggtggactcggtgctgcggaaccgcggggtctacgagaacgtcaagtacgtgcagcaggagaacttctggatcgggcccagctcggaggccctcatccacctgggcgccaagttttcgccctgcatgcgccaggacccgcaggtgcacagcttcattcgctcggcgcgcgagcgcgagaagcactccgcctgctgcgtgcgcaacgacaggtcgggctgcgtgcagacctcggaggaggagtgctcgtccacgctggcagtgtgggtgaagtggcccatccatcccagcgccccagagcttgcgggccacaagagacagtttggctctgtctgccaccaggatcccagggtgtgtgatgagccctcctccgaagaccctcatgagtggccagaagacatcaccaagtggccgatctgcaccaaaaacagcgctgggaaccacaccaaccatccccacatggactgtgtcatcacaggacggccctgctgcattggcaccaagggcaggtgtgagatcacctcccgggagtactgtgacttcatgaggggctacttccatgaggaggccacgctctgctctcaggtgcactgcatggatgatgtgtgtgggctcctgccttttctcaaccccgaggtgcctgaccagttctaccgcctgtggctatccctcttcctgcacgccgggatcttgcactgcctggtgtccatctgcttccagatgactgtcctgcgggacctggagaagctggcaggctggcaccgcatagccatcatctacctgctgagtggtgtcaccggcaacctggccagtgccatcttcctgccataccgagcagaggtgggtcctgctggctcccagttcggcatcctggcctgcctcttcgtggagctcttccagagctggcagatcctggcgcggccctggcgtgccttcttcaagctgctggctgtggtgctcttcctcttcacctttgggctgctgccgtggattgacaactttgcccacatctcggggttcatcagtggcctcttcctctccttcgccttcttgccctacatcagctttggcaagttcgacctgtaccggaaacgctgccagatcatcatctttcaggtggtcttcctgggcctcctggctggcctggtggtcctcttctacgtctatcctgtccgctgtgagtggtgtgagttcctcacctgcatccccttcactgacaagttctgtgagaagtacgaactggacgctcagctccactgagctggctgcgggctccagcggccgtgtgctccagcaggccagagccagacacgacctccctgagcctcacaggcttacaggagtcacctgctccatgtggggactggcctgtttcctgaacacagacctctttcttgtgccttgttcacttctgttgaacccctcgtactgccgggcatttattatactacttcctgtcataaccttctaacttgtttcttgacgaccacctcatgtggccaataaatggactgggagcgttttagctgccattaacttgaacaggg

SEQ ID NO: 43952 - DNA, 3528 bp, Homo sapiens
  misc_feature (1536)..(1536): n is a, c, g, or t
aagcactgtacgctcgattacggatcggcggcgacggcgggcgggcggggactcggcgcgggcgccctcccggccagcggcggcagcccctcctccccggcgccctcaggaccccccagagacccccggcggcggcagcctgccttgctctgccaggaaccatgagtgaggcccgcagggacagcacgagcagcctgcagcgcaagaagccaccctggctaaagctggacattccctctgcggtgcccctgacggcagaagagcccagcttcctgcagcccctgaggcgacaggctttcctgaggagtgtgagtatgccagccgagacagcccacatctcttcaccccaccatgagctccggcggccggtgctgcaacgccagacgtccatcacacagaccatccgcagaccctggtccctggagtgactacaggcctggggcagggcatgctgccccggaggagggcctttgaagtcccctgcctgggaggggcgatctggccgccccttgctgagtccctgccatgccagggggaccgccgactggtttggagtgagcaaggacagtgacagcacccagaaatggcagcgcaagagcatccgtcactgcagccagcgctacgggaagctgaagccccaggtcctccgggagctggacctgcccagccaggacaacgtgtcgctgaccagcaccgagacgccacccccactctacgtggggccatgccagctgggcatgcagaagatcatagaccccctggcccgtggccgtgccttccgtgtggcagatgacactgcggaaggcctgagtgccccacacactcccgtcacgccgggtgctgcctccctctgctccttctccagctcccgctcaggtttccaccggctcccgcggcggcgcaagcgagagtcggtggccaagatgagcttccgggcggccgcagcgctgatgaaaggccgctccgttagggatggcacctttcgccgggcacagcgtcgaagcttcactccagctagctttctggaggaggacacaactgatttccccgatgagctggacacatccttctttgcccgggaaggtatcctccatgaagagctgtccacatacccggatgaagttttcgagtccccatcggaggcagcgctaaaggactgggagaaggcaccggagcaggcggacctcaccggcggggccctggaccgcagcgagcttgagcgcagccacctgatgctgcccttggagcgaggctggcggaagcagaaggagggcgccgcagccccgcagcccaaggtgcggctccgacaggaggtggtgagcaccgcggggccgcgacggggccagcgtatcgcggtgccggtgcgcaagctcttcgcccgggagaagcggccgtatgggctgggcatggtgggacggctcaccaaccgcacctaccgcaagcgcatcgacagcttcgtcaagcgccagatcgaggacatggacgaccacaggcccttcttcacctactggcttaccttcgtgcactcgctcgtcnccatcctagccgtgtgcatctatggcatcgcgcccgtgggcttctcgcagcatgagacggtggactcggtgctgcggaaccgcggggtctacgagaacgtcaagtacgtgcagcaggagaacttctggatcgggcccagctcggaggccctcatccacctgggcgccaagttttcgccctgcatgcgccaggacccgcaggtgcacagcttcattcgctcggcgcgcgagcgcgagaagcactccgcctgctgcgtgcgcaacgacaggtcgggctgcgtgcagacctcggaggaggagtgctcgtccacgctggcagtgtgggtgaagtggcccatccatcccagcgccccagagcttgcgggccacaagagacagtttggctctgtctgccaccaggatcccagggtgtgtgatgagccctcctccgaagaccctcatgagtggccagaagacatcaccaagtggccggtgagctgcagtgggggggttgttagggagccctccgtgtcatgtgggggagaatgccacaccccacccactggtgataccagagattcccatcatgggaccacctcacgttttcagaggctgtgcacctgccctttgtacagcctgtccatcaaccagcgcctgcccctctgagcaagtagatcaagagaactagatggagacttgaaaggtcaagtgacattattccagtttgatagagactcagtgtggtggcctgcttgaagtcaaggaagccacaccgttttctgctttatgagcccacccatctttgcctctacccccaaacgtggtgtggggccaaaggttgggggaggccctgactcagctcgtcctcatttgtgacccagatctgcaccaaaaacagcgctgggaaccacaccaaccatccccacatggactgtgtcatcacaggacggccctgctgcattggcaccaagggcaggtgtgagatcacctcccgggagtactgtgacttcatgaggggctacttccatgaggaggccacgctctgctctcaggtgcactgcatggatgatgtgtgtgggctcctgccttttctcaaccccgaggtgcctgaccagttctaccgcctgtggctatccctcttcctgcacgccgggatcttgcactgcctggtgtccatctgcttccagatgactgtcctgcgggacctggagaagctggcaggctggcaccgcatagccatcatctacctgctgagtggtgtcaccggcaacctggccagtgccatcttcctgccataccgagcagaggtgggtcctgctggctcccagttcggcatcctggcctgcctcttcgtggagctcttccagagctggcagatcctggcgcggccctggcgtgccttcttcaagctgctggctgtggtgctcttcctcttcacctttgggctgctgccgtggattgacaactttgcccacatctcggggttcatcagtggcctcttcctctccttcgccttcttgccctacatcagctttggcaagttcgacctgtaccggaaacgctgccagatcatcatctttcaggtggtcttcctgggcctcctggctggcctggtggtcctcttctacgtctatcctgtccgctgtgagtggtgtgagttcctcacctgcatccccttcactgacaagttctgtgagaagtacgaactggacgctcagctccactgagctggctgcgggctccagcggccgtgtgctccagcaggccagagccagacacgacctccctgagcctcacaggcttacaggagtcacctgctccatgtggggactggcctgtttcctgaacacagacctctttcttgtgccttgttcacttctgttgaacccctcgtactgccgggcatttattatactacttcctgtcataaccttctaacttgtttcttgacgaccacctcatgtggccaataaatggactgggagcgttttagctgccattaacttgaacaggg

SEQ ID NO: 43953 - DNA, 1196 bp, Homo sapiens
cccgccttgaaatttccgccgacaccgttccctttttgtatcccctagggctttcacatgaacaccccaaaaaagagcagttccagggaatgatcatcggggaataggaaattccagtcacttgaaaatagtttggtaacaaacacgggggttggttatcaacttacacccggccttaaagagatatgctcatgcataaacgctctgaacaggtgatttggctctgcttctcaggtgcactgcatggatgatgtgtgtgggctcctgccttttctcaaccccgaggtgcctgaccagttctaccgcctgtggctatccctcttcctgcacgccgggatcttgcactgcctggtgtccatctgcttccagatgactgtcctgcgggacctggagaagctggcaggctggcaccgcatagccatcatctacctgctgagtggtgtcaccggcaacctggccagtgccatcttcctgccataccgagcagaggtgggtcctgctggctcccagttcggcatcctggcctgcctcttcgtggagctcttccagagctggcagatcctggcgcggccctggcgtgccttcttcaagctgctggctgtggtgctcttcctcttcacctttgggctgctgccgtggattgacaactttgcccacatctcggggttcatcagtggcctcttcctctccttcgccttcttgccctacatcagctttggcaagttcgacctgtaccggaaacgctgccagatcatcatctttcaggtggtcttcctgggcctcctggctggcctggtggtcctcttctacgtctatcctgtccgctgtgagtggtgtgagttcctcacctgcatccccttcactgacaagttctgtgagaagtacgaactggacgctcagctccactgagctggctgcgggctccagcggccgtgtgctccagcaggccagagccagacacgacctccctgagcctcacaggcttacaggagtcacctgctccatgtggggactggcctgtttcctgaacacagacctctttcttgtgccttgttcacttctgttgaacccctcgtactgccgggcatttattatactacttcctgtcataaccttctaacttgtttcttgacgaccacctcatgtggccaataaatggactgggagcgttttagctgccattaacttgaacaggg

SEQ ID NO: 43954 - DNA, 3124 bp, Homo sapiens
  misc_feature (1521)..(1521): n is a, c, g, or t
aagcactgtacgctcgattacggatcggcggcgacggcgggcgggcggggactcggcgcgggcgccctcccggccagcggcggcagcccctcctccccggcgccctcaggaccccccagagacccccggcggcggcagcctgccttgctctgccaggaaccatgagtgaggcccgcagggacagcacgagcagcctgcagcgcaagaagccaccctggctaaagctggacattccctctgcggtgcccctgacggcagaagagcccagcttcctgcagcccctgaggcgacaggctttcctgaggagtgtgagtatgccagccgagacagcccacatctcttcaccccaccatgagctccggcggccggtgctgcaacgccagacgtccatcacacagaccatccgcagcagccgacaagtacgcttcgggcgtgtccacactctgcccctcttgggtccccgggctgcccgcagggctttcccacagcgccagtctctctcttggtccctgctcagggggaccgccgactggtttggagtgagcaaggacagtgacagcacccagaaatggcagcgcaagagcatccgtcactgcagccagcgctacgggaagctgaagccccaggtcctccgggagctggacctgcccagccaggacaacgtgtcgctgaccagcaccgagacgccacccccactctacgtggggccatgccagctgggcatgcagaagatcatagaccccctggcccgtggccgtgccttccgtgtggcagatgacactgcggaaggcctgagtgccccacacactcccgtcacgccgggtgctgcctccctctgctccttctccagctcccgctcaggtttccaccggctcccgcggcggcgcaagcgagagtcggtggccaagatgagcttccgggcggccgcagcgctgatgaaaggccgctccgttagggatggcacctttcgccgggcacagcgtcgaagcttcactccagctagctttctggaggaggacacaactgatttccccgatgagctggacacatccttctttgcccgggaaggtatcctccatgaagagctgtccacatacccggatgaagttttcgagtccccatcggaggcagcgctaaaggactgggagaaggcaccggagcaggcggacctcaccggcggggccctggaccgcagcgagcttgagcgcagccacctgatgctgcccttggagcgaggctggcggaagcagaaggagggcgccgcagccccgcagcccaaggtgcggctccgacaggaggtggtgagcaccgcggggccgcgacggggccagcgtatcgcggtgccggtgcgcaagctcttcgcccgggagaagcggccgtatgggctgggcatggtgggacggctcaccaaccgcacctaccgcaagcgcatcgacagcttcgtcaagcgccagatcgaggacatggacgaccacaggcccttcttcacctactggcttaccttcgtgcactcgctcgtcnccatcctagccgtgtgcatctatggcatcgcgcccgtgggcttctcgcagcatgagacggtggactcggtgctgcggaaccgcggggtctacgagaacgtcaagtacgtgcagcaggagaacttctggatcgggcccagctcggaggccctcatccacctgggcgccaagttttcgccctgcatgcgccaggacccgcaggtgcacagcttcattcgctcggcgcgcgagcgcgagaagcactccgcctgctgcgtgcgcaacgacaggtcgggctgcgtgcagacctcggaggaggagtgctcgtccacgctggcagtgtgggtgaagtggcccatccatcccagcgccccagagcttgcgggccacaagagacagtttggctctgtctgccaccaggatcccagggtgtgtgatgagccctcctccgaagaccctcatgagtggccagaagacatcaccaagtggccgatctgcaccaaaaacagcgctgggaaccacaccaaccatccccacatggactgtgtcatcacaggacggccctgctgcattggcaccaagggcaggtgtgagatcacctcccgggagtactgtgacttcatgaggggctacttccatgaggaggccacgctctgctctcaggtgcactgcatggatgatgtgtgtgggctcctgccttttctcaaccccgaggtgcctgaccagttctaccgcctgtggctatccctcttcctgcacgccgggatcttgcactgcctggtgtccatctgcttccagatgactgtcctgcgggacctggagaagctggcaggctggcaccgcatagccatcatctacctgctgagtggtgtcaccggcaacctggccagtgccatcttcctgccataccgagcagaggtgggtcctgctggctcccagttcggcatcctggcctgcctcttcgtggagctcttccagagctggcagatcctggcgcggccctggcgtgccttcttcaagctgctggctgtggtgctcttcctcttcacctttgggctgctgccgtggattgacaactttgcccacatctcggggttcatcagtggcctcttcctctccttcgccttcttgccctacatcagctttggcaagttcgacctgtaccggaaacgctgccagatcatcatctttcaggtggtcttcctgggcctcctggctggcctggtggtcctcttctacgtctatcctgtccgctgtgagtggtgtgagttcctcacctgcatccccttcactgacaagttctgtgagaagtacgaactggacgctcagctccactgagctggctgcgggctccagcggccgtgtgctccagcaggccagagccagacacgacctccctgagcctcacaggcttacaggagtcacctgctccatgtggggactggcctgtttcctgaacacagacctctttcttgtgccttgttcacttctgttgaacccctcgtactgccgggcatttattatactacttcctgtcataaccttctaacttgtttcttgacgaccacctcatgtggccaataaatggactgggagcgttttagctgccattaacttgaacaggg

SEQ ID NO: 43955 - DNA, 3649 bp, Homo sapiens
  misc_feature (1536)..(1536): n is a, c, g, or t
aagcactgtacgctcgattacggatcggcggcgacggcgggcgggcggggactcggcgcgggcgccctcccggccagcggcggcagcccctcctccccggcgccctcaggaccccccagagacccccggcggcggcagcctgccttgctctgccaggaaccatgagtgaggcccgcagggacagcacgagcagcctgcagcgcaagaagccaccctggctaaagctggacattccctctgcggtgcccctgacggcagaagagcccagcttcctgcagcccctgaggcgacaggctttcctgaggagtgtgagtatgccagccgagacagcccacatctcttcaccccaccatgagctccggcggccggtgctgcaacgccagacgtccatcacacagaccatccgcagaccctggtccctggagtgactacaggcctggggcagggcatgctgccccggaggagggcctttgaagtcccctgcctgggaggggcgatctggccgccccttgctgagtccctgccatgccagggggaccgccgactggtttggagtgagcaaggacagtgacagcacccagaaatggcagcgcaagagcatccgtcactgcagccagcgctacgggaagctgaagccccaggtcctccgggagctggacctgcccagccaggacaacgtgtcgctgaccagcaccgagacgccacccccactctacgtggggccatgccagctgggcatgcagaagatcatagaccccctggcccgtggccgtgccttccgtgtggcagatgacactgcggaaggcctgagtgccccacacactcccgtcacgccgggtgctgcctccctctgctccttctccagctcccgctcaggtttccaccggctcccgcggcggcgcaagcgagagtcggtggccaagatgagcttccgggcggccgcagcgctgatgaaaggccgctccgttagggatggcacctttcgccgggcacagcgtcgaagcttcactccagctagctttctggaggaggacacaactgatttccccgatgagctggacacatccttctttgcccgggaaggtatcctccatgaagagctgtccacatacccggatgaagttttcgagtccccatcggaggcagcgctaaaggactgggagaaggcaccggagcaggcggacctcaccggcggggccctggaccgcagcgagcttgagcgcagccacctgatgctgcccttggagcgaggctggcggaagcagaaggagggcgccgcagccccgcagcccaaggtgcggctccgacaggaggtggtgagcaccgcggggccgcgacggggccagcgtatcgcggtgccggtgcgcaagctcttcgcccgggagaagcggccgtatgggctgggcatggtgggacggctcaccaaccgcacctaccgcaagcgcatcgacagcttcgtcaagcgccagatcgaggacatggacgaccacaggcccttcttcacctactggcttaccttcgtgcactcgctcgtcnccatcctagccgtgtgcatctatggcatcgcgcccgtgggcttctcgcagcatgagacggtggactcggtgctgcggaaccgcggggtctacgagaacgtcaagtacgtgcagcaggagaacttctggatcgggcccagctcggaggccctcatccacctgggcgccaagttttcgccctgcatgcgccaggacccgcaggtgcacagcttcattcgctcggcgcgcgagcgcgagaagcactccgcctgctgcgtgcgcaacgacaggtcgggctgcgtgcagacctcggaggaggagtgctcgtccacgctggcagtgtgggtgaagtggcccatccatcccagcgccccagagcttgcgggccacaagagacagtttggctctgtctgccaccaggatcccagggtgtgtgatgagccctcctccgaagaccctcatgagtggccagaagacatcaccaagtggccggtgagctgcagtgggggggttgttagggagccctccgtgtcatgtgggggagaatgccacaccccacccactggtgataccagagattcccatcatgggaccacctcacgttttcagaggctgtgcacctgccctttgtacagcctgtccatcaaccagcgcctgcccctctgagcaagtagatcaagagaactagatggagacttgaaaggtcaagtgacattattccagtttgatagagactcagtgtggtggcctgcttgaagtcaaggaagccacaccgttttctgctttatgagcccacccatctttgcctctacccccaaacgtggtgtggggccaaaggttgggggaggccctgactcagctcgtcctcatttgtgacccagatctgcaccaaaaacagcgctgggaaccacaccaaccatccccacatggactgtgtcatcacaggacggccctgctgcattggcaccaagggcaggtgtgagatcacctcccgggagtactgtgacttcatgaggggctacttccatgaggaggccacgctctgctctcaggtgcactgcatggatgatgtgtgtgggctcctgccttttctcaaccccgaggtgcctgaccagttctaccgcctgtggctatccctcttcctgcacgccgggcaagtgacactgtgggccgggtcgggggtctcagggccctcaggattggctggctgggggtggcagaaaggtcacttccctgctgaatgtctcccgacccccgcctgctactgactacaggatcttgcactgcctggtgtccatctgcttccagatgactgtcctgcgggacctggagaagctggcaggctggcaccgcatagccatcatctacctgctgagtggtgtcaccggcaacctggccagtgccatcttcctgccataccgagcagaggtgggtcctgctggctcccagttcggcatcctggcctgcctcttcgtggagctcttccagagctggcagatcctggcgcggccctggcgtgccttcttcaagctgctggctgtggtgctcttcctcttcacctttgggctgctgccgtggattgacaactttgcccacatctcggggttcatcagtggcctcttcctctccttcgccttcttgccctacatcagctttggcaagttcgacctgtaccggaaacgctgccagatcatcatctttcaggtggtcttcctgggcctcctggctggcctggtggtcctcttctacgtctatcctgtccgctgtgagtggtgtgagttcctcacctgcatccccttcactgacaagttctgtgagaagtacgaactggacgctcagctccactgagctggctgcgggctccagcggccgtgtgctccagcaggccagagccagacacgacctccctgagcctcacaggcttacaggagtcacctgctccatgtggggactggcctgtttcctgaacacagacctctttcttgtgccttgttcacttctgttgaacccctcgtactgccgggcatttattatactacttcctgtcataaccttctaacttgtttcttgacgaccacctcatgtggccaataaatggactgggagcgttttagctgccattaacttgaacaggg

SEQ ID NO: 43956 - DNA, 718 bp, Homo sapiens
aagcactgtacgctcgattacggatcggcggcgacggcgggcgggcggggactcggcgcgggcgccctcccggccagcggcggcagcccctcctccccggcgccctcaggaccccccagagacccccggcggcggcagcctgccttgctctgccaggaaccatgagtgaggcccgcagggacagcacgagcagcctgcagcgcaagaagccaccctggctaaagctggacattccctctgcggtgcccctgacggcagaagagcccagcttcctgcaggtaggccctggcctgcagggactgtgggtgccccctgtccagtaccctcaccatgaccctgttgcccagcccctgaggcgacaggctttcctgaggagtgtgagtatgccagccgagacagcccacatctcttcaccccaccatgagctccggcggccggtgctgcaacgccagacgtccatcacacagaccatccgcaggtaccaacaccgcccagctgctccatggggtgggagctgggggctggtggggcagaggcaggtacacagaggatggaaatgagaacaagggccctcttgtttcagcttcctcctccatctcggtccccaccatccccttgccctcctcctgttctggatactgaccgctctcaccccactaccctgctccactcccttctcttcagcactcactctctccttctctgtctccaccgcccg

SEQ ID NO: 43957 - DNA, 1429 bp, Homo sapiens
acgtgacttccgtcgcatttcggggcggtaccaagatggactcctcgcgggcccggcagcagctccggcggcgattcctcctcctgccggacgccgaggcccagctggaccgcgagggtgacgccgggccggaaacctccacagctgttgagaaaaaggagaaacctcttccaagacttaatatccattctggattctggattttggcatccattgttgtgacctattatgttgacttctttaaaacccttaaagaaaacttccacactagcagctggtttctctgtggcagtgccttgttgcttgtcagtttatcaattgcattttactgcatagtctacctggaatggtattgtggaattggagaatatgatgtcaagtatccagccttgatacccattaccactgcctcctttattgcagcaggaatttgcttcaacattgctttatggcatgtgtggtcgtttttcactccattgttgttgtttacccagtttatgggggttgtcatgtttatcacactccttggatgatttccgaagagacagggtcttctatgttgcccaggctgtctttgaactcctgggatcaagtgatcctcctgcctcagccttcgaagtagttgggactacaggcccacgccaccgtgcctggctggacatgtaaatttgaagtgaatggttaaacatccagctagctgaaagcatggcagaccctaacagaaaagctacagtgtgtttttgcagctatgaagtgaatggtttcctggggaaaattgtgactttgtataactgttgttgaaaccagaataaattatatttcacttgcatatgcataaattattaaaattttcagaagtcagtgatacagaagtactattttgcaatgttaatctgtttgagtctttggagaaagtggtttcattgtaggtacatagtgcactgttaatattttaaacaagtagttcactcttccatttaagggatagcagttccttgtataaaatgactggatgtgtataaaggaattatgttgtcatgtgcctttaaccagctttagtaattactataatctcatatttatgatagttttgttaggtgacaggaccaaatgaaaatattttatgttttctcatcactttagattttatcattatgtacattactgggtttttagcatttcctaatgtgaagttttaatcacttttaagtatacatttttttctgtatcatttaaataaaatatttttataactttaaaaaaaaaaaaaaaacaagaagaaaaacaaaaaaaacacaaaaaaatcgacgacgccaaaaaaaaaatggggcgcgccaacgatcacccgtggggcgccaaaagggggcgattaaaaaaaaaacgggggaccaaaaagcggccgagcgcaggtgcactctcgccacccgct

SEQ ID NO: 43958 - DNA, 1762 bp, Homo sapiens
acgtgacttccgtcgcatttcggggcggtaccaagatggactcctcgcgggcccggcagcagctccggcggcgattcctcctcctgccggacgccgaggcccagctggaccgcgagggtgacgccgggccgggtgaggcgcgcaccaagccgccccgaggttctcagaggcgaggcgtcggaaaacggccggcctccggcagccctggcccagtctggaaggactgagtttcggctttgcaagtcgaatatttaatgtcagggaagatccttagaatcgcggagtgctgtgcatcgtcatttcagctgcgcttcagaattctctggagagctgatttgacacctatttggaaatagcgattaaaattaaaaatacccaccagttttaagtcttaaggatttaccagaaacatgcgtgtaccgcagtgtacaatgatgtgcgcagtgtttcacttcaggattgcttgtaatagcgaattactagaaatatctgccttgcccgtcagcagaaagctgtttaagtaaatttgggtatatgtatacctgacacatcaggtcgactcgtatgtaccaatggggatgattttcaaagggaagtgtggaacactatggtatgccgccatttgggtacaaaacagaaacctccacagctgttgagaaaaaggagaaacctcttccaagacttaatatccattctggattctggattttggcatccattgttgtgacctattatgttgacttctttaaaacccttaaagaaaacttccacactagcagctggtttctctgtggcagtgccttgttgcttgtcagtttatcaattgcattttactgcatagtctacctggaatggtattgtggaattggagaatatgatgtcaagtatccagccttgatacccattaccactgcctcctttattgcagcaggaatttgcttcaacattgctttatggcatgtgtggtcgtttttcactccattgttgttgtttacccagtttatgggggttgtcatgtttatcacactccttggatgatttccgaagagacagggtcttctatgttgcccaggctgtctttgaactcctgggatcaagtgatcctcctgcctcagccttcgaagtagttgggactacaggcccacgccaccgtgcctggctggacatgtaaatttgaagtgaatggttaaacatccagctagctgaaagcatggcagaccctaacagaaaagctacagtgtgtttttgcagctatgaagtgaatggtttcctggggaaaattgtgactttgtataactgttgttgaaaccagaataaattatatttcacttgcatatgcataaattattaaaattttcagaagtcagtgatacagaagtactattttgcaatgttaatctgtttgagtctttggagaaagtggtttcattgtaggtacatagtgcactgttaatattttaaacaagtagttcactcttccatttaagggatagcagttccttgtataaaatgactggatgtgtataaaggaattatgttgtcatgtgcctttaaccagctttagtaattactataatctcatatttatgatagttttgttaggtgacaggaccaaatgaaaatattttatgttttctcatcactttagattttatcattatgtacattactgggtttttagcatttcctaatgtgaagttttaatcacttttaagtatacatttttttctgtatcatttaaataaaatatttttataacttt

SEQ ID NO: 43959 - DNA, 2076 bp, Homo sapiens
acgtgacttccgtcgcatttcggggcggtaccaagatggactcctcgcgggcccggcagcagctccggcggcgattcctcctcctgccggacgccgaggcccagctggaccgcgagggtgacgccgggccggaaacctccacagctgttgagaaaaaggagaaacctcttccaagacttaatatccattctggattctggattttggcatccattgttgtgacctattatgttgacttctttaaaacccttaaagaaaacttccacactagcagctggtttctctgtggcagtgccttgttgcttgtcagtttatcaattgcattttactgcatagtctacctggaatggtattgtggaattggagaatatgatgtcaagtatccagccttgatacccattaccactgcctcctttattgcagcaggaatttgcttcaacattgctttatggcatgtgtggtcgtttttcactccattgttgttgtttacccagtttatgggggttgtcatgtttatcacactccttggatgatttccgaagatcaccccatcctgagatctgctgccttacacagtggaggctgttttctgagtgtcggataactctgttattaaataagtgtatattgagaatactcactccagatgcttaggggcatggtgagaaggacaaagatagtgcctcctgtcaggtcacttacatcagaacttgcaggaaacctgctttatacagcagttgacaggtgtggaaactgaagctcatggaaataaaagttaatacgctaaattttcaaggagttaatgaaaactgacatttctgctaaaaacagcatgttctccctgtgggattttaaaggaaggtcagtggtaactgtgtaaagaagaaatggacatactctcattgttagcagtctgaaaatagttgctagcacctccatgcccacgccaatgtctccagcctccttcaggcaccttgctgtgtcttgggaccactgggacccctcacaggaggcccttcattcctgtacacctgtggtgccacaagcggctttgggcccggaggaatcctacacatctcagaacacttcctcacctgaccctgtcacccatctccccttctcgtgttctcagccccttctttgactcttgaattttgagtttttacagatgtttgggagctcttactctgacatgaagttataattggtaatggagactcagacaatgttgtagattacagagtgaactatgctttttagtgttaaatgcaatagcttgagatacaatgttttacttggtacataaatgctggttttctttcagatttaaggacatacacttttttttttttttttttaagagacagggtcttctatgttgcccaggctgtctttgaactcctgggatcaagtgatcctcctgcctcagccttcgaagtagttgggactacaggcccacgccaccgtgcctggctggacatgtaaatttgaagtgaatggttaaacatccagctagctgaaagcatggcagaccctaacagaaaagctacagtgtgtttttgcagctatgaagtgaatggtttcctggggaaaattgtgactttgtataactgttgttgaaaccagaataaattatatttcacttgcatatgcataaattattaaaattttcagaagtcagtgatacagaagtactattttgcaatgttaatctgtttgagtctttggagaaagtggtttcattgtaggtacatagtgcactgttaatattttaaacaagtagttcactcttccatttaagggatagcagttccttgtataaaatgactggatgtgtataaaggaattatgttgtcatgtgcctttaaccagctttagtaattactataatctcatatttatgatagttttgttaggtgacaggaccaaatgaaaatattttatgttttctcatcactttagattttatcattatgtacattactgggtttttagcatttcctaatgtgaagttttaatcacttttaagtatacatttttttctgtatcatttaaataaaatatttttataacttt

SEQ ID NO: 43960 - DNA, 1611 bp, Homo sapiens
cttcctcataaaaatgtgttggatgacacaatcagctttcgtttggtgttatttatagaatttctgcctccctacagatcaccccatcctgagatctgctgccttacacagtggaggctgttttctgagtgtcggataactctgttattaaataagtgtatattgagaatactcactccagatgcttaggggcatggtgagaaggacaaagatagtgcctcctgtcaggtcacttacatcagaacttgcaggaaacctgctttatacagcagttgacaggtgtggaaactgaagctcatggaaataaaagttaatacgctaaattttcaaggagttaatgaaaactgacatttctgctaaaaacagcatgttctccctgtgggattttaaaggaaggtcagtggtaactgtgtaaagaagaaatggacatactctcattgttagcagtctgaaaatagttgctagcacctccatgcccacgccaatgtctccagcctccttcaggcaccttgctgtgtcttgggaccactgggacccctcacaggaggcccttcattcctgtacacctgtggtgccacaagcggctttgggcccggaggaatcctacacatctcagaacacttcctcacctgaccctgtcacccatctccccttctcgtgttctcagccccttctttgactcttgaattttgagtttttacagatgtttgggagctcttactctgacatgaagttataattggtaatggagactcagacaatgttgtagattacagagtgaactatgctttttagtgttaaatgcaatagcttgagatacaatgttttacttggtacataaatgctggttttctttcagatttaaggacatacacttttttttttttttttttaagagacagggtcttctatgttgcccaggctgtctttgaactcctgggatcaagtgatcctcctgcctcagccttcgaagtagttgggactacaggcccacgccaccgtgcctggctggacatgtaaatttgaagtgaatggttaaacatccagctagctgaaagcatggcagaccctaacagaaaagctacagtgtgtttttgcagctatgaagtgaatggtttcctggggaaaattgtgactttgtataactgttgttgaaaccagaataaattatatttcacttgcatatgcataaattattaaaattttcagaagtcagtgatacagaagtactattttgcaatgttaatctgtttgagtctttggagaaagtggtttcattgtaggtacatagtgcactgttaatattttaaacaagtagttcactcttccatttaagggatagcagttccttgtataaaatgactggatgtgtataaaggaattatgttgtcatgtgcctttaaccagctttagtaattactataatctcatatttatgatagttttgttaggtgacaggaccaaatgaaaatattttatgttttctcatcactttagattttatcattatgtacattactgggtttttagcatttcctaatgtgaagttttaatcacttttaagtatacatttttttctgtatcatttaaataaaatatttttataacttt

SEQ ID NO: 43961 - DNA, 1215 bp, Homo sapiens
acgtgacttccgtcgcatttcggggcggtaccaagatggactcctcgcgggcccggcagcagctccggcggcgattcctcctcctgccggaaacctccacagctgttgagaaaaaggagaaacctcttccaagacttaatatccattctggattctggattttggcatccattgttgtgacctattatgttgacttctttaaaacccttaaagaaaacttccacactagcagctggtttctctgtggcagtgccttgttgcttgtcagtttatcaattgcattttactgcatagtctacctggaatggtattgtggaattggagaatatgatgtcaagtatccagccttgatacccattaccactgcctcctttattgcagcaggaatttgcttcaacattgctttatggcatgtgtggtcgtttttcactccattgttgttgtttacccagtttatgggggttgtcatgtttatcacactccttggatgatttccgaagagacagggtcttctatgttgcccaggctgtctttgaactcctgggatcaagtgatcctcctgcctcagccttcgaagtagttgggactacaggcccacgccaccgtgcctggctggacatgtaaatttgaagtgaatggttaaacatccagctagctgaaagcatggcagaccctaacagaaaagctacagtgtgtttttgcagctatgaagtgaatggtttcctggggaaaattgtgactttgtataactgttgttgaaaccagaataaattatatttcacttgcatatgcataaattattaaaattttcagaagtcagtgatacagaagtactattttgcaatgttaatctgtttgagtctttggagaaagtggtttcattgtaggtacatagtgcactgttaatattttaaacaagtagttcactcttccatttaagggatagcagttccttgtataaaatgactggatgtgtataaaggaattatgttgtcatgtgcctttaaccagctttagtaattactataatctcatatttatgatagttttgttaggtgacaggaccaaatgaaaatattttatgttttctcatcactttagattttatcattatgtacattactgggtttttagcatttcctaatgtgaagttttaatcacttttaagtatacatttttttctgtatcatttaaataaaatatttttataacttt

SEQ ID NO: 43962 - DNA, 859 bp, Homo sapiens
acgtgacttccgtcgcatttcggggcggtaccaagatggactcctcgcgggcccggcagcagctccggcggcgattcctcctcctgccggacgccgaggcccagctggaccgcgagggtgacgccgggccggaaacctccacagctgttgagaaaaaggagaaacctcttccaagacttaatatccattctggattctggattttggcatccattgttgtgacctattatgttgacttctttaaaacccttaaagaaaacttccacactagcagctggtttctctgtggcagtgccttgttgcttgtcagtttatcaattgcattttactgcatagtctacctggaatggtattgtggaattggagaatatgatgtcaagtatccagccttgatacccattaccactgcctcctttattgcagcaggaatttgcttcaacattgctttatggcatgtgtggtcgtttttcactccattgttgttgtttacccagtttatgggggttgtcatgtttatcacactccttggatgatttccgaaggtaagatatctggagtggtttttctaaaaatgaactcgtttgaaaaatgtcttttatgacaattttcagtggatggagctgtaacagactatttgtgaattattttcagtcatgtttacaccagagttgtccacactagaattatccattcattgaactctgagatagactcctttttgttttgagacagcttctcactctgttgtccaggctggagtacggtggcatgatcacagctcactgcagccttgaccacttgggggctcaagcaatcctcccacctcagtttcccaagtagctggtattataagcatgtg

SEQ ID NO: 43963 - DNA, 1257 bp, Homo sapiens
acgtgacttccgtcgcatttcggggcggtaccaagatggactcctcgcgggcccggcagcagctccggcggcgattcctcctcctgccggacgccgaggcccagctggaccgcgagggtgacgccgggccggaaacctccacagctgttgagaaaaaggagaaacctcttccaagacttaatatccattctggattctggattttggcatccattgttgtgacctattatgttgacttctttaaaacccttaaagaaaacttccacactagcagctggtttctctgtggcagtgccttgttgcttgtcagtttatcaattgcattttactgcatagtctacctggaatggtattgtggaattggagaatatgatgtcaagtatccagccttgatacccattaccactgcctcctttattgcagcaggaatttgcttcaacattgctttatggcatgtgtggtcgtttttcactccattgttgttgtttacccagtttatgggggttgtcatgtttatcacactccttggatgatttccgaagagacagggtcttctatgttgcccaggctgtctttgaactcctgggatcaagtgatcctcctgcctcagccttcgaagtagttgggactacaggcccacgccaccgtgcctggctggacatgtaaatttgaagtgaatggttaaacatccagctagctgaaagcatggcagaccctaacagaaaagctacagtgtgtttttgcagctatgaagtgaatggtttcctggggaaaattgtgactttgtataactgttgttgaaaccagaataaattatatttcacttgcatatgcataaattattaaaattttcagaagtcagtgatacagaagtactattttgcaatgttaatctgtttgagtctttggagaaagtggtttcattgtaggtacatagtgcactgttaatattttaaacaagtagttcactcttccatttaagggatagcagttccttgtataaaatgactggatgtgtataaaggaattatgttgtcatgtgcctttaaccagctttagtaattactataatctcatatttatgatagttttgttaggtgacaggaccaaatgaaaatattttatgttttctcatcactttagattttatcattatgtacattactgggtttttagcatttcctaatgtgaagttttaatcacttttaagtatacatttttttctgtatcatttaaataaaatatttttataacttt

SEQ ID NO: 43964 - DNA, 7991 bp, Homo sapiens
tgccctctcccgatgtcagttaccaggctttgctaataaaacgtctctcccggctcttccagagagccagccgcagagtctctgccgtctccccgtgcgctcaagcacaagcccccaactaaaagccttgtctggaaaatctgcttggtgccataacagattatctggtgagccaggtaggagcacaaggagtaatttccctccctgcaggggaggcttgtgagcctgcgagccggagggaggccccactgattcagcgctgccaccgcgactggcgagttttcctctagtctcgcgactggacactggtcagtagaacctggacctgctgtaaggctgaagaagaaaaagaaaccatccaagctggcactcggttttggggagttctcttcactgctcacgccggccctcttgtgtgacctgtactgttgtgctgtgtggggctgggagccaactctcttttcgtcgcctgacacctgtgcttgcaccctgcccctggtcctttaataagacaagcagacacaggggctacagtcatgggcaatgccccaggcatcttccaagactcacacctgggatgtatcatttctaaatggaaggaatccaaatcagatggtttaaagaaaaagaaactccagcctgggaaacataggaagactccacctctacaaaaaacaggaaaaatgagccgggtgtgggggtgccttcctggggtctcagctactcagaaggctaaagtgaggatcgcttaagtccaggaggttgaggctgcagtgagttgtggtaataccatagcactccaacctgggcaatggagtgagaccctgcctcaaaatcaaattttttttttaattaaaaaaaaagaaactgattttcctctgtaatacaacctgccctagtacacattagatcaagaaaaatggccatgggcagaagtggatctcctagttttaacactatcttaccgcccgacctattctgtgaatggacagagaaatggggagagatacctagctacaagcttttatgaagttatgctaggacccagagctactggattcttgtcaggtgtgtgtggcccctatttccaggttcctcctgaaggaacctgaagaagctgacctccacagcctcaggccccgagcactccctccctaccctaagcaggcctcctggggaggggagcccctgtgctgtccccaacagcgctccaatcggactccaaacaggcaccctcttttgcttccccactggcccagggctgttttcccctcagagaaatggatggaaacgggggagtgacaaggatccaagttcctttttttggtggtggatctaggactatgtaaaaaacactttggtagattttcagaggatcctggtaagtttagagatgaatttgttaaactaaatcttgccttttcattgacgtggcaggatgttatggtcactttgcagtactgatgaaaagcaacacatatttggaaaggctaaggaatatgccaatagccaggtggtcactaaagaccaatatgcagtcatctgtttagggggagatgcggtcccaggcatagtctccacgtgagtgagactatggagaaaacctagaaaaagctagaatgagccactttgtcacctgcctgactgaaggaagaaggaaatgtatagtaaaacctgtacactatgacagggtcaagaaaattacccagagaaagaaggagatcccagtagtcttcctcaatcgagtccctgaggcccttgggaaatgcacccatgcagacccagaggcagcagaggggaagcatcgcgtgccatgcattttatccttcagtcagctccggacattagaaggaaattacagaaaatttggaggccagaccccagaccctgctgttgactttggcagaggcggcttttaaggttttcaataacggacaggacacagatggcaggtaagaagaggagactgaccaagacagcacagcttctggctgccctaattcatccaccatctcagggtgaccctaggattctcaggagaccaactaatcgaagacagccaaccttggatggagccaatgtgcctactgcaggatggagggtgtcactggaagagaggctgccctgacctccttaaaacaggacagccggcaggcaaccctggccagccgccactcctcaccaagctttcagatgagattgatacacaccgcctgacagcaccctggctctgactgcagcacactccatcgtcatcacaccacggagcctcaggtcacccttgatgtggcaggtaggaaaacagttcctcgtggacagcagagctgcctgctcggtcctgacccagcctatttgcctcctctccaattgcaattgcagggtaatgggaatagacaggtgtcctaaggtaagaaaatttactttccctcttgcttgtgaggccatgtctaggcttttttctcctcatttctgtatgccccccggaatgtcctactccattgctgggtagagacttattaagcaaaatgggagccaccatctccctggaagaggacagactgcaggtagaggcagagccagaacagggaatccacctgctagcactcttaaatggacaggaacttgagacccaaaacatacccaaagaaagcaaggatcacatcaccccttccctatcggacacttcagtcctaggacaggctaataaagttccgccagtaaagacagacctgaagcctgggatgggctatccatggaggaaatcatacctcctaaaacctgtggcactgaatggggttcagccattactccacaaattcctatagcaagggctaaaccctgccagtccccaggcaacacctcggtcctccctgttaaaaagcctaatggagaatatcagtttgtgtaggacttgaagggggttaatgaggcagtcattcccatccacccaacactggtcccaagcttgtctgtgctcagatacctggagatgctcagtttttcactctactacacttcaaggatgctttcttttgtgtagccctctccacccagaatccctgtatctttttgctttgaatggagaaatctctgatacccagaaagccacatagtacacatggactgtgcttccccagggcttctgggaaggcccccacctttttgggaatgcagggagctaagcctacagaatgggacttttattacaatatgtggatgacttgttcattgtcagccaaacatggcaggattcagattttaatatcattaaaaccttgaatttcctggctgagcggtgatacaaggtcagccccatccaaggcccagatttctttacagaagttccgatatctggggttcattctgaccccaggagcccgaacactagttgtggactggaaaaagcaatcacttcattgctggtcccacaaacaaaaaggcagccccagggtttcttgggaatggtgggcttctgtagtatttggattccaaattatggcctgacggctaaacccctatgtgagacccaaaagggggaagaaagagagcccttgtactgggagaagaaatgtcaacaatcttttgaacctctaaaaactgagctgggtcaagcccttgtccttggactccctgagaaaaaccacttaccttgtatgtttgtgagagactaggaatagctttgggagtcttaactcaaaggttaggacctgttcagaagccagtggctcatttttcgaaacagacaaatccagttgcacagaagcggcctggctgctggagggcagtggcagccactgccctgctgtttagtgaagcatctaagctgacacagggacaatatacagaagctatgactccccaccaggttcagactgggttagaagtcaagggacaccattggctcactgcagggaggctgaccaactaccaagctctcttattagacaccctggatattactttaagggtatgtcagactttgaacacagcaacctcactcccaaccacagatgatgaggactcacagcatcaatgcacagggcccacaaaacagactccagcaggcctagcttgtgagataagcctcttgagaatgcaaagacggaatgatatcctgatggcagtagctttgtggagggagacccaaaaggcaggacatgcagtagtaagcctgaaggagactacagaaactaaagcccttcctccccaaaatggcacaaaaagcagcactagaggccttaacagagcctcacaactgggagaaagggagggagtaaatttatacaccaactcaaagtataggtttctcctgctgtgtgcccatgcagccatatggaaggaaaagggaatgttaacagttaaaaattccccaggcaaacgtaaggatccaatccaacttctcctggaagcggcacaacttccctgccaggtggcagtcattcactgcaaaggccaccagagggactggtccctcatcagccaaggaaatagggccacaaaacaggcaacctggttataggaatccagcaatgtgttggccttaatgacagaccctaccaaccttcctaatcacctacaatactcacaacaagagcaagaggaagctaaggggcaggggtaccaggaaaacagtgctggatggttcacagatggtgacaagttttattccaggaactgaccagttgaaagttactaagcatctccatgatgccactcattaatggagagatgttttatggaattctgtccataaaatattcaccagaaagaaactaagaaaaagtgtaaaacaagtaacctttgtcagtgaattgtgttcccgaaataatccccacacccatccaattcccccttcttgacttaaactggttcaacacaggggaacttatctgggagaagactggcaggttgttttaacccaaatgactccaaatctagggtacaaatatctcctggtgtttgtggatacttttactggacgggtcaagggtttccctacctgtacagaaaaagcagtagaagtctgtaaaccttcactaaaggaagtaatttctcaatttggactccccaagtcccctcagagtggtaacaggctctccttcatgggtaagattactcagagcctctccacaaccttaggaatagattatgaactggcaccccaatcatcagggaaagttaagatgaaccatacacttgagacgactctagccaaactctttcaggagatgcacgagtcctgggttaagatgctcccagtcttctcagggtccgcagggccccttcgtgcagcctaagacttagttcttctcagatgatctaccagaggcctttcctcaccactgacctcctgttaggtgaagaattacataaaaaattacagtatcgatttaggacagattcaaaaggtgacttcagaatatggaaacaaaatcctgccagtccccactaaggatgggaaaacccctttacaagttaatccaggggaccaagtcctcctaaaggcttgaagggcaggctccccggaggaccaccccttgcttaaatgggagggcccttactgggtgatcctgaccactccaactgcagccaactcacaaggaatcactagctgggtacacctctcccgatcagaaatgctttctcctaaatgtttccagactcgcccagatggcccattttactcctgaaaacctgtggaagacctcaaattcaggagagccaattcatcatcggagaagtaatgtggttagagatcttgagtccaatacttttccttgtattactaattggtttactattattctgttgctttgctcagcctcctccctcaggtaaagacttcgtttgtccctgctgggtataaagatgctactctttactttgttcctactcctccccatcagggcacagggtaggctaggcctactaaaatgagaaacaaactctcttgacaacctttccggcattatagcttcaggtaataatttgtccaactgctgggtgtgctaccatcatccccaggctcagaggggctgcctcttgcactccctaaaagctcaactaccaacttcacaaaagaggtatggaaacctaaaataacctctgcacctcttatggtggacctaagtgtctccctttcctttgaatgtataaacctcattgggctgctaaatgctttggtcaccaaaaagggtggaaaaaagagaagttggactgcctactttgaaatcccaccgggttttctcttagcagtaaagaaaaaccctaatcaaacttgggctcaggaaggctatcttttcccccatgccaaaacagtcatacctctctccacagcttagctgctcacctgaactcctctcgccttgtgtaagtttgtgcacccatggggtattctgttcctttgtggacacccagactgccatctgatcaacagctacccttcagccaatttcacctttctgttacttgcactagcgtgcccttgtgtggataatgtacaacgcaataaggaatgcatgttaggtactttaagtcccagtagaataccagttcataatatcacacatgtggtgaaatctaaaaaggcaatagggctaattttggcaggagttggaatagccccttgggatggctttgcatactgtcagacagctttgagaaactttcaaacccttgaaacactggcaactagtacaggcagagccataaaaggacatcaagcctccctgcactccctagccaatgctgtcttggataacagatttgccctggaatatcttctggctgaacaagggcgggtatgcacagtaataaaccacatctgttgttcttacattaacagttcaggattggctaaactgcaagttcaaaagatttaccaagaccaggcacaatggttcatgcctgtaatcccagcactttgggaggccaaggtgggtggatcgtttgagcctaagagtttgagaccagcctgggcaacatggctaaaccccatctctacaaaattacaaaaaaagaaaaaaaaattaggtggccttggtggcatgtgcctttattcccagctactcaggaggctgaggtgggaggattgcctgagcccagaaggttgaggctgcagtaagccatgatggcaccactgcactcctacctggatgacagagtgagaccctgtctccaaaagaaaataaaagtaaagattcaccaagaggctacctggctacataatcgtaatgactctactgctcaaaccatctggggctccatcagtggatacctacaaagtatgacatggtttttacctttcttcggaccctaagtggtcatttaattgctattacttttggcgtattgtgtttttaaccttttggtaaagtttgtgtctttcaggtttcaatagctccaagtcaagctaatgatggcccaagaattccaacccataacatcccaggagcaccccagtccctacaggtctttaggacagccagtgagagatttccccaccccctaaagttaggcagggacgacatccctgttcagcaggaagtcgcttcagaagatgagatcttcagccctttctccttaagaatagagggtgaaatctctcagggggaaatagagatagaacagaaatggaatggggttgcttcttcataatacttaaccatgccttctacttaaagttctaggaactggccttaggaaatctaactatgaaaccaaggttatggagtatcccacctcaggaaggaacactgaacaactgattgacagtcttcttgccgccagccagaccaccaagtggcccattaaccaagagaaccagcgcaaccagatacgctgacccgcatctcctacctctcatgtgctttgcccagcccagcctgcataccttactcatgatgtcaattcccaagtttcgctaataaaaacatctctgcaagcctcttcagggagccaacaagacagtcaaaaaaaaatataattaataa

SEQ ID NO: 43965 - DNA, 3302 bp, Homo sapiens
cgaagacgtggatcagggaagacggtcattaatggagagatgttttatggaattctgtccataaaatattcaccagaaagaaactaagaaaaagtgtaaaacaagtaacctttgtcagtgaattgtgttcccgaaataatccccacacccatccaattcccccttcttgacttaaactggttcaacacaggggaacttatctgggagaagactggcaggttgttttaacccaaatgactccaaatctagggtacaaatatctcctggtgtttgtggatacttttactggacgggtcaagggtttccctacctgtacagaaaaagcagtagaagtctgtaaaccttcactaaaggaagtaatttctcaatttggactccccaagtcccctcagagtggtaacaggctctccttcatgggtaagattactcagagcctctccacaaccttaggaatagattatgaactggcaccccaatcatcagggaaagttaagatgaaccatacacttgagacgactctagccaaactctttcaggagatgcacgagtcctgggttaagatgctcccagtcttctcagggtccgcagggccccttcgtgcagcctaagacttagttcttctcagatgatctaccagaggcctttcctcaccactgacctcctgttaggtgaagaattacataaaaaattacagtatcgatttaggacagattcaaaaggtgacttcagaatatggaaacaaaatcctgccagtccccactaaggatgggaaaacccctttacaagttaatccaggggaccaagtcctcctaaaggcttgaagggcaggctccccggaggaccaccccttgcttaaatgggagggcccttactgggtgatcctgaccactccaactgcagccaactcacaaggaatcactagctgggtacacctctcccgatcagaaatgctttctcctaaatgtttccagactcgcccagatggcccattttactcctgaaaacctgtggaagacctcaaattcaggagagccaattcatcatcggagaagtaatgtggttagagatcttgagtccaatacttttccttgtattactaattggtttactattattctgttgctttgctcagcctcctccctcaggtaaagacttcgtttgtccctgctgggtataaagatgctactctttactttgttcctactcctccccatcagggcacagggtaggctaggcctactaaaatgagaaacaaactctcttgacaacctttccggcattatagcttcaggtaataatttgtccaactgctgggtgtgctaccatcatccccaggctcagaggggctgcctcttgcactccctaaaagctcaactaccaacttcacaaaagaggtatggaaacctaaaataacctctgcacctcttatggtggacctaagtgtctccctttcctttgaatgtataaacctcattgggctgctaaatgctttggtcaccaaaaagggtggaaaaaagagaagttggactgcctactttgaaatcccaccgggttttctcttagcagtaaagaaaaaccctaatcaaacttgggctcaggaaggctatcttttcccccatgccaaaacagtcatacctctctccacagcttagctgctcacctgaactcctctcgccttgtgtaagtttgtgcacccatggggtattctgttcctttgtggacacccagactgccatctgatcaacagctacccttcagccaatttcacctttctgttacttgcactagcgtgcccttgtgtggataatgtacaacgcaataaggaatgcatgttaggtactttaagtcccagtagaataccagttcataatatcacacatgtggtgaaatctaaaaaggcaatagggctaattttggcaggagttggaatagccccttgggatggctttgcatactgtcagacagctttgagaaactttcaaacccttgaaacactggcaactagtacaggcagagccataaaaggacatcaagcctccctgcactccctagccaatgctgtcttggataacagatttgccctggaatatcttctggctgaacaagggcgggtatgcacagtaataaaccacatctgttgttcttacattaacagttcaggattggctaaactgcaagttcaaaagatttaccaagaccaggcacaatggttcatgcctgtaatcccagcactttgggaggccaaggtgggtggatcgtttgagcctaagagtttgagaccagcctgggcaacatggctaaaccccatctctacaaaattacaaaaaaagaaaaaaaaattaggtggccttggtggcatgtgcctttattcccagctactcaggaggctgaggtgggaggattgcctgagcccagaaggttgaggctgcagtaagccatgatggcaccactgcactcctacctggatgacagagtgagaccctgtctccaaaagaaaataaaagtaaagattcaccaagaggctacctggctacataatcgtaatgactctactgctcaaaccatctggggctccatcagtggatacctacaaagtatgacatggtttttacctttcttcggaccctaagtggtcatttaattgctattacttttggcgtattgtgtttttaaccttttggtaaagtttgtgtctttcaggtttcaatagctccaagtcaagctaatgatggcccaagaattccaacccataacatcccaggagcaccccagtccctacaggtctttaggacagccagtgagagatttccccaccccctaaagttaggcagggacgacatccctgttcagcaggaagtcgcttcagaagatgagatcttcagccctttctccttaagaatagagggtgaaatctctcagggggaaatagagatagaacagaaatggaatggggttgcttcttcataatacttaaccatgccttctacttaaagttctaggaactggccttaggaaatctaactatgaaaccaaggttatggagtatcccacctcaggaaggaacactgaacaactgattgacagtcttcttgccgccagccagaccaccaagtggcccattaaccaagagaaccagcgcaaccagatacgctgacccgcatctcctacctctcatgtgctttgcccagcccagcctgcataccttactcatgatgtcaattcccaagtttcgctaataaaaacatctctgcaagcctcttcagggagccaacaagacagtcaaaaaaaaatataattaataa

SEQ ID NO: 43966 - DNA, 2602 bp, Homo sapiens
tgccctctcccgatgtcagttaccaggctttgctaataaaacgtctctcccggctcttccagagagccagccgcagagtctctgccgtctccccgtgcgctcaagcacaagcccccaactaaaagccttgtctggaaaatctgcttggtgccataacagattatctggtgagccaggtaggagcacaaggagtaatttccctccctgcaggggaggcttgtgagcctgcgagccggagggaggccccactgattcagcgctgccaccgcgactggcgagttttcctctagtctcgcgactggacactggtcagtagaacctggacctgctgtaaggctgaagaagaaaaagaaaccatccaagctggcactcggttttggggagttctcttcactgctcacgccggccctcttgtgtgacctgtactgttgtgctgtgtggggctgggagccaactctcttttcgtcgcctgacacctgtgcttgcaccctgcccctggtcctttaataagacaagcagacacaggggctacagtcatgggcaatgccccaggcatcttccaagactcacacctgggatgtatcatttctaaatggaaggaatccaaatcagatggtttaaagaaaaagaaactccagcctgggaaacataggaagactccacctctacaaaaaacaggaaaaatgagccgggtgtgggggtgccttcctggggtctcagctactcagaaggctaaagtgaggatcgcttaagtccaggaggttgaggctgcagtgagttgtggtaataccatagcactccaacctgggcaatggagtgagaccctgcctcaaaatcaaattttttttttaattaaaaaaaaagaaactgattttcctctgtaatacaacctgccctagtacacattagatcaagaaaaatggccatgggcagaagtggatctcctagttttaacactatcttaccgcccgacctattctgtgaatggacagagaaatggggagagatacctagctacaagcttttatgaagttatgctaggacccagagctactggattcttgtcaggtgtgtgtggcccctatttccaggttcctcctgaaggaacctgaagaagctgacctccacagcctcaggccccgagcactccctccctaccctaagcaggcctcctggggaggggagcccctgtgctgtccccaacagcgctccaatcggactccaaacaggcaccctcttttgcttccccactggcccagggctgttttcccctcagagaaatggatggaaacgggggagtgacaaggatccaagttcctttttttggtggtggatctaggactatgtaaaaaacactttggtagattttcagaggatcctggtaagtttagagatgaatttgttaaactaaatcttgccttttcattgacgtggcaggatgttatggtcactttgcagtactgatgaaaagcaacacatatttggaaaggctaaggaatatgccaatagccaggtggtcactaaagaccaatatgcagtcatctgtttagggggagatgcggtcccaggcatagtctccacgtgagtgagactatggagaaaacctagaaaaagctagaatgagccactttgtcacctgcctgactgaaggaagaaggaaatgtatagtaaaacctgtacactatgacagggtcaagaaaattacccagagaaagaaggagatcccagtagtcttcctcaatcgagtccctgaggcccttgggaaatgcacccatgcagacccagaggcagcagaggggaagcatcgcgtgccatgcattttatccttcagtcagctccggacattagaaggaaattacagaaaatttggaggccagaccccagaccctgctgttgactttggcagaggcggcttttaaggttttcaataacggacaggacacagatggcaggtaagaagaggagactgaccaagacagcacagcttctggctgccctaattcatccaccatctcagggtgaccctaggattctcaggagaccaactaatcgaagacagccaaccttggatggagccaatgtgcctactgcaggatggagggtgtcactggaagagaggctgccctgacctccttaaaacaggacagccggcaggcaaccctggccagccgccactcctcaccaagctttcagatgagattgatacacaccgcctgacagcaccctggctctgactgcagcacactccatcgtcatcacaccacggagcctcaggtcacccttgatgtggcagttctaggaactggccttaggaaatctaactatgaaaccaaggttatggagtatcccacctcaggaaggaacactgaacaactgattgacagtcttcttgccgccagccagaccaccaagtggcccattaaccaagagaaccagcgcaaccagatacgctgacccgcatctcctacctctcatgtgctttgcccagcccagcctgcataccttactcatgatgtcaattcccaagtttcgctaataaaaacatctctgcaagcctcttcagggagccaacaagacagtcaaaaaaaaatataattaataa

SEQ ID NO: 43967 - DNA, 603 bp, Homo sapiens
tgtggcgatctagagctccccctcggcaggttgactaggagaccaactaatcgaagacagccaaccttggatggagccaatgtgcctactgcaggatggagggtgtcactggaagagaggctgccctgacctccttaaaacaggacagccggcaggcaaccctggccagccgccactcctcaccaagctttcagatgagattgatacacaccgcctgacagcaccctggctctgactgcagcacactccatcgtcatcacaccacggagcctcaggtcacccttgatgtggcagttctaggaactggccttaggaaatctaactatgaaaccaaggttatggagtatcccacctcaggaaggaacactgaacaactgattgacagtcttcttgccgccagccagaccaccaagtggcccattaaccaagagaaccagcgcaaccagatacgctgacccgcatctcctacctctcatgtgctttgcccagcccagcctgcataccttactcatgatgtcaattcccaagtttcgctaataaaaacatctctgcaagcctcttcagggagccaacaagacagtcaaaaaaaaatataattaataa

SEQ ID NO: 43968 - DNA, 7440 bp, Homo sapiens
ggtacccacaggcaggttgtactgggatgtatcatttctaaatggaaggaatccaaatcagatggtttaaagaaaaagaaactccagcctgggaaacataggaagactccacctctacaaaaaacaggaaaaatgagccgggtgtgggggtgccttcctggggtctcagctactcagaaggctaaagtgaggatcgcttaagtccaggaggttgaggctgcagtgagttgtggtaataccatagcactccaacctgggcaatggagtgagaccctgcctcaaaatcaaattttttttttaattaaaaaaaaagaaactgattttcctctgtaatacaacctgccctagtacacattagatcaagaaaaatggccatgggcagaagtggatctcctagttttaacactatcttaccgcccgacctattctgtgaatggacagagaaatggggagagatacctagctacaagcttttatgaagttatgctaggacccagagctactggattcttgtcaggtgtgtgtggcccctatttccaggttcctcctgaaggaacctgaagaagctgacctccacagcctcaggccccgagcactccctccctaccctaagcaggcctcctggggaggggagcccctgtgctgtccccaacagcgctccaatcggactccaaacaggcaccctcttttgcttccccactggcccagggctgttttcccctcagagaaatggatggaaacgggggagtgacaaggatccaagttcctttttttggtggtggatctaggactatgtaaaaaacactttggtagattttcagaggatcctggtaagtttagagatgaatttgttaaactaaatcttgccttttcattgacgtggcaggatgttatggtcactttgcagtactgatgaaaagcaacacatatttggaaaggctaaggaatatgccaatagccaggtggtcactaaagaccaatatgcagtcatctgtttagggggagatgcggtcccaggcatagtctccacgtgagtgagactatggagaaaacctagaaaaagctagaatgagccactttgtcacctgcctgactgaaggaagaaggaaatgtatagtaaaacctgtacactatgacagggtcaagaaaattacccagagaaagaaggagatcccagtagtcttcctcaatcgagtccctgaggcccttgggaaatgcacccatgcagacccagaggcagcagaggggaagcatcgcgtgccatgcattttatccttcagtcagctccggacattagaaggaaattacagaaaatttggaggccagaccccagaccctgctgttgactttggcagaggcggcttttaaggttttcaataacggacaggacacagatggcaggtaagaagaggagactgaccaagacagcacagcttctggctgccctaattcatccaccatctcagggtgaccctaggattctcaggagaccaactaatcgaagacagccaaccttggatggagccaatgtgcctactgcaggatggagggtgtcactggaagagaggctgccctgacctccttaaaacaggacagccggcaggcaaccctggccagccgccactcctcaccaagctttcagatgagattgatacacaccgcctgacagcaccctggctctgactgcagcacactccatcgtcatcacaccacggagcctcaggtcacccttgatgtggcaggtaggaaaacagttcctcgtggacagcagagctgcctgctcggtcctgacccagcctatttgcctcctctccaattgcaattgcagggtaatgggaatagacaggtgtcctaaggtaagaaaatttactttccctcttgcttgtgaggccatgtctaggcttttttctcctcatttctgtatgccccccggaatgtcctactccattgctgggtagagacttattaagcaaaatgggagccaccatctccctggaagaggacagactgcaggtagaggcagagccagaacagggaatccacctgctagcactcttaaatggacaggaacttgagacccaaaacatacccaaagaaagcaaggatcacatcaccccttccctatcggacacttcagtcctaggacaggctaataaagttccgccagtaaagacagacctgaagcctgggatgggctatccatggaggaaatcatacctcctaaaacctgtggcactgaatggggttcagccattactccacaaattcctatagcaagggctaaaccctgccagtccccaggcaacacctcggtcctccctgttaaaaagcctaatggagaatatcagtttgtgtaggacttgaagggggttaatgaggcagtcattcccatccacccaacactggtcccaagcttgtctgtgctcagatacctggagatgctcagtttttcactctactacacttcaaggatgctttcttttgtgtagccctctccacccagaatccctgtatctttttgctttgaatggagaaatctctgatacccagaaagccacatagtacacatggactgtgcttccccagggcttctgggaaggcccccacctttttgggaatgcagggagctaagcctacagaatgggacttttattacaatatgtggatgacttgttcattgtcagccaaacatggcaggattcagattttaatatcattaaaaccttgaatttcctggctgagcggtgatacaaggtcagccccatccaaggcccagatttctttacagaagttccgatatctggggttcattctgaccccaggagcccgaacactagttgtggactggaaaaagcaatcacttcattgctggtcccacaaacaaaaaggcagccccagggtttcttgggaatggtgggcttctgtagtatttggattccaaattatggcctgacggctaaacccctatgtgagacccaaaagggggaagaaagagagcccttgtactgggagaagaaatgtcaacaatcttttgaacctctaaaaactgagctgggtcaagcccttgtccttggactccctgagaaaaaccacttaccttgtatgtttgtgagagactaggaatagctttgggagtcttaactcaaaggttaggacctgttcagaagccagtggctcatttttcgaaacagacaaatccagttgcacagaagcggcctggctgctggagggcagtggcagccactgccctgctgtttagtgaagcatctaagctgacacagggacaatatacagaagctatgactccccaccaggttcagactgggttagaagtcaagggacaccattggctcactgcagggaggctgaccaactaccaagctctcttattagacaccctggatattactttaagggtatgtcagactttgaacacagcaacctcactcccaaccacagatgatgaggactcacagcatcaatgcacagggcccacaaaacagactccagcaggcctagcttgtgagataagcctcttgagaatgcaaagacggaatgatatcctgatggcagtagctttgtggagggagacccaaaaggcaggacatgcagtagtaagcctgaaggagactacagaaactaaagcccttcctccccaaaatggcacaaaaagcagcactagaggccttaacagagcctcacaactgggagaaagggagggagtaaatttatacaccaactcaaagtataggtttctcctgctgtgtgcccatgcagccatatggaaggaaaagggaatgttaacagttaaaaattccccaggcaaacgtaaggatccaatccaacttctcctggaagcggcacaacttccctgccaggtggcagtcattcactgcaaaggccaccagagggactggtccctcatcagccaaggaaatagggccacaaaacaggcaacctggttataggaatccagcaatgtgttggccttaatgacagaccctaccaaccttcctaatcacctacaatactcacaacaagagcaagaggaagctaaggggcaggggtaccaggaaaacagtgctggatggttcacagatggtgacaagttttattccaggaactgaccagttgaaagttactaagcatctccatgatgccactcattaatggagagatgttttatggaattctgtccataaaatattcaccagaaagaaactaagaaaaagtgtaaaacaagtaacctttgtcagtgaattgtgttcccgaaataatccccacacccatccaattcccccttcttgacttaaactggttcaacacaggggaacttatctgggagaagactggcaggttgttttaacccaaatgactccaaatctagggtacaaatatctcctggtgtttgtggatacttttactggacgggtcaagggtttccctacctgtacagaaaaagcagtagaagtctgtaaaccttcactaaaggaagtaatttctcaatttggactccccaagtcccctcagagtggtaacaggctctccttcatgggtaagattactcagagcctctccacaaccttaggaatagattatgaactggcaccccaatcatcagggaaagttaagatgaaccatacacttgagacgactctagccaaactctttcaggagatgcacgagtcctgggttaagatgctcccagtcttctcagggtccgcagggccccttcgtgcagcctaagacttagttcttctcagatgatctaccagaggcctttcctcaccactgacctcctgttaggtgaagaattacataaaaaattacagtatcgatttaggacagattcaaaaggtgacttcagaatatggaaacaaaatcctgccagtccccactaaggatgggaaaacccctttacaagttaatccaggggaccaagtcctcctaaaggcttgaagggcaggctccccggaggaccaccccttgcttaaatgggagggcccttactgggtgatcctgaccactccaactgcagccaactcacaaggaatcactagctgggtacacctctcccgatcagaaatgctttctcctaaatgtttccagactcgcccagatggcccattttactcctgaaaacctgtggaagacctcaaattcaggagagccaattcatcatcggagaagtaatgtggttagagatcttgagtccaatacttttccttgtattactaattggtttactattattctgttgctttgctcagcctcctccctcaggtaaagacttcgtttgtccctgctgggtataaagatgctactctttactttgttcctactcctccccatcagggcacagggtaggctaggcctactaaaatgagaaacaaactctcttgacaacctttccggcattatagcttcaggtaataatttgtccaactgctgggtgtgctaccatcatccccaggctcagaggggctgcctcttgcactccctaaaagctcaactaccaacttcacaaaagaggtatggaaacctaaaataacctctgcacctcttatggtggacctaagtgtctccctttcctttgaatgtataaacctcattgggctgctaaatgctttggtcaccaaaaagggtggaaaaaagagaagttggactgcctactttgaaatcccaccgggttttctcttagcagtaaagaaaaaccctaatcaaacttgggctcaggaaggctatcttttcccccatgccaaaacagtcatacctctctccacagcttagctgctcacctgaactcctctcgccttgtgtaagtttgtgcacccatggggtattctgttcctttgtggacacccagactgccatctgatcaacagctacccttcagccaatttcacctttctgttacttgcactagcgtgcccttgtgtggataatgtacaacgcaataaggaatgcatgttaggtactttaagtcccagtagaataccagttcataatatcacacatgtggtgaaatctaaaaaggcaatagggctaattttggcaggagttggaatagccccttgggatggctttgcatactgtcagacagctttgagaaactttcaaacccttgaaacactggcaactagtacaggcagagccataaaaggacatcaagcctccctgcactccctagccaatgctgtcttggataacagatttgccctggaatatcttctggctgaacaagggcgggtatgcacagtaataaaccacatctgttgttcttacattaacagttcaggattggctaaactgcaagttcaaaagatttaccaagaccaggcacaatggttcatgcctgtaatcccagcactttgggaggccaaggtgggtggatcgtttgagcctaagagtttgagaccagcctgggcaacatggctaaaccccatctctacaaaattacaaaaaaagaaaaaaaaattaggtggccttggtggcatgtgcctttattcccagctactcaggaggctgaggtgggaggattgcctgagcccagaaggttgaggctgcagtaagccatgatggcaccactgcactcctacctggatgacagagtgagaccctgtctccaaaagaaaataaaagtaaagattcaccaagaggctacctggctacataatcgtaatgactctactgctcaaaccatctggggctccatcagtggatacctacaaagtatgacatggtttttacctttcttcggaccctaagtggtcatttaattgctattacttttggcgtattgtgtttttaaccttttggtaaagtttgtgtctttcaggtttcaatagctccaagtcaagctaatgatggcccaagaattccaacccataacatcccaggagcaccccagtccctacaggtctttaggacagccagtgagagatttccccaccccctaaagttaggcagggacgacatccctgttcagcaggaagtcgcttcagaagatgagatcttcagccctttctccttaagaatagagggtgaaatctctcagggggaaatagagatagaacagaaatggaatggggttgcttcttcataatacttaaccatgccttctacttaaagttctaggaactggccttaggaaatctaactatgaaaccaaggttatggagtatcccacctcaggaaggaacactgaacaactgattgacagtcttcttgccgccagccagaccaccaagtggcccattaaccaagagaaccagcgcaaccagatacgctgacccgcatctcctacctctcatgtgctttgcccagcccagcctgcataccttactcatgatgtcaattcccaagtttcgctaataaaaacatctctgcaagcctcttcagggagccaacaagacagtcaaaaaaaaatataattaataa

SEQ ID NO: 43969 - DNA, 5715 bp, Homo sapiens
tgccctctcccgatgtcagttaccaggctttgctaataaaacgtctctcccggctcttccagagagccagccgcagagtctctgccgtctccccgtgcgctcaagcacaagcccccaactaaaagccttgtctggaaaatctgcttggtgccataacagattatctggtgagccaggtaggagcacaaggagtaatttccctccctgcaggggaggcttgtgagcctgcgagccggagggaggccccactgattcagcgctgccaccgcgactggcgagttttcctctagtctcgcgactggacactggtcagtagaacctggacctgctgtaaggctgaagaagaaaaagaaaccatccaagctggcactcggttttggggagttctcttcactgctcacgccggccctcttgtgtgacctgtactgttgtgctgtgtggggctgggagccaactctcttttcgtcgcctgacacctgtgcttgcaccctgcccctggtcctttaataagacaagcagacacaggggctacagtcatgggcaatgccccaggcatcttccaagactcacacctgggatgtatcatttctaaatggaaggaatccaaatcagatggtttaaagaaaaagaaactccagcctgggaaacataggaagactccacctctacaaaaaacaggaaaaatgagccgggtgtgggggtgccttcctggggtctcagctactcagaaggctaaagtgaggatcgcttaagtccaggaggttgaggctgcagtgagttgtggtaataccatagcactccaacctgggcaatggagtgagaccctgcctcaaaatcaaattttttttttaattaaaaaaaaagaaactgattttcctctgtaatacaacctgccctagtacacattagatcaagaaaaatggccatgggcagaagtggatctcctagttttaacactatcttaccgcccgacctattctgtgaatggacagagaaatggggagagatacctagctacaagcttttatgaagttatgctaggacccagagctactggattcttgtcaggtgtgtgtggcccctatttccaggttcctcctgaaggaacctgaagaagctgacctccacagcctcaggccccgagcactccctccctaccctaagcaggcctcctggggaggggagcccctgtgctgtccccaacagcgctccaatcggactccaaacaggcaccctcttttgcttccccactggcccagggctgttttcccctcagagaaatggatggaaacgggggagtgacaaggatccaagttcctttttttggtggtggatctaggactatgtaaaaaacactttggtagattttcagaggatcctggtaagtttagagatgaatttgttaaactaaatcttgccttttcattgacgtggcaggatgttatggtcactttgcagtactgatgaaaagcaacacatatttggaaaggctaaggaatatgccaatagccaggtggtcactaaagaccaatatgcagtcatctgtttagggggagatgcggtcccaggcatagtctccacgtgagtgagactatggagaaaacctagaaaaagctagaatgagccactttgtcacctgcctgactgaaggaagaaggaaatgtatagtaaaacctgtacactatgacagggtcaagaaaattacccagagaaagaaggagatcccagtagtcttcctcaatcgagtccctgaggcccttgggaaatgcacccatgcagacccagaggcagcagaggggaagcatcgcgtgccatgcattttatccttcagtcagctccggacattagaaggaaattacagaaaatttggaggccagaccccagaccctgctgttgactttggcagaggcggcttttaaggttttcaataacggacaggacacagatggcaggtaagaagaggagactgaccaagacagcacagcttctggctgccctaattcatccaccatctcagggtgaccctaggattctcaggagaccaactaatcgaagacagccaaccttggatggagccaatgtgcctactgcaggatggagggtgtcactggaagagaggctgccctgacctccttaaaacaggacagccggcaggcaaccctggccagccgccactcctcaccaagctttcagatgagattgatacacaccgcctgacagcaccctggctctgactgcagcacactccatcgtcatcacaccacggagcctcaggtcacccttgatgtggcaggtaggaaaacagttcctcgtggacagcagagctgcctgctcggtcctgacccagcctatttgcctcctctccaattgcaattgcagggtaatgggaatagacaggtgtcctaaggtaagaaaatttactttccctcttgcttgtgaggccatgtctaggcttttttctcctcatttctgtatgccccccggaatgtcctactccattgctgggtagagacttattaagcaaaatgggagccaccatctccctggaagaggacagactgcaggtagaggcagagccagaacagggaatccacctgctagcactcttaaatggacaggaacttgagacccaaaacatacccaaagaaagcaaggatcacatcaccccttccctatcggacacttcagtcctaggacaggctaataaagttccgccagtaaagacagacctgaagcctgggatgggctatccatggaggaaatcatacctcctaaaacctgtggcactgaatggggttcagccattactccacaaattcctatagcaagggctaaaccctgccagtccccaggcaacacctcggtcctccctgttaaaaagcctaatggagaatatcagtttgtgtaggacttgaagggggttaatgaggcagtcattcccatccacccaacactggtcccaagcttgtctgtgctcagatacctggagatgctcagtttttcactctactacacttcaaggatgctttcttttgtgtagccctctccacccagaatccctgtatctttttgctttgaatggagaaatctctgatacccagaaagccacatagtacacatggactgtgcttccccagggcttctgggaaggcccccacctttttgggaatgcagggagctaagcctacagaatgggacttttattacaatatgtggatgacttgttcattgtcagccaaacatggcaggattcagattttaatatcattaaaaccttgaatttcctggctgagcggtgatacaaggtcagccccatccaaggcccagatttctttacagaagttccgatatctggggttcattctgaccccaggagcccgaacactagttgtggactggaaaaagcaatcacttcattgctggtcccacaaacaaaaaggcagccccagggtttcttgggaatggtgggcttctgtagtatttggattccaaattatggcctgacggctaaacccctatgtgagacccaaaagggggaagaaagagagcccttgtactgggagaagaaatgtcaacaatcttttgaacctctaaaaactgagctgggtcaagcccttgtccttggactccctgagaaaaaccacttaccttgtatgtttgtgagagactaggaatagctttgggagtcttaactcaaaggttaggacctgttcagaagccagtggctcatttttcgaaacagacaaatccagttgcacagaagcggcctggctgctggagggcagtggcagccactgccctgctgtttagtgaagcatctaagctgacacagggacaatatacagaagctatgactccccaccaggttcagactgggttagaagtcaagggacaccattggctcactgcagggaggctgaccaactaccaagctctcttattagacaccctggatattactttaagggtatgtcagactttgaacacagcaacctcactcccaaccacagatgatgaggactcacagcatcaatgcacagggcccacaaaacagactccagcaggcctagcttgtgagataagcctcttgagaatgcaaagacggaatgatatcctgatggcagtagctttgtggagggagacccaaaaggcaggacatgcagtagtaagcctgaaggagactacagaaactaaagcccttcctccccaaaatggcacaaaaagcagcactagaggccttaacagagcctcacaactgggagaaagggagggagtaaatttatacaccaactcaaagtataggtttctcctgctgtgtgcccatgcagccatatggaaggaaaagggaatgttaacagttaaaaattccccaggcaaacgtaaggatccaatccaacttctcctggaagcggcacaacttccctgccaggtggcagtcattcactgcaaaggccaccagagggactggtccctcatcagccaaggaaatagggccacaaaacaggcaacctggttataggaatccagcaatgtgttggccttaatgacagaccctaccaaccttcctaatcacctacaatactcacaacaagagcaagaggaagctaaggggcaggggtaccaggaaaacagtgctggatggttcacagatggtgacaagttttattccaggaactgaccagttgaaagttactaagcatctccatgatgccactcattaatggagagatgttttatggaattctgtccataaaatattcaccagaaagaaactaagaaaaagtgtaaaacaagtaacctttgtcagtgaattgtgttcccgaaataatccccacacccatccaattcccccttcttgacttaaactggttcaacacaggggaacttatctgggagaagactggcaggttgttttaacccaaatgactccaaatctagggtacaaatatctcctggtgtttgtggatacttttactggacgggtcaagggtttccctacctgtacagaaaaagcagtagaagtctgtaaaccttcactaaaggaagtaatttctcaatttggactccccaagtcccctcagagtggtaacaggctctccttcatgggtaagattactcagagcctctccacaaccttaggaatagattatgaactggcaccccaatcatcagggaaagttaagatgaaccatacacttgagacgactctagccaaactctttcaggagatgcacgagtcctgggttaagatgctcccagtcttctcagggtccgcagggccccttcgtgcagcctaagacttagttcttctcagatgatctaccagaggcctttcctcaccactgacctcctgttaggtgaagaattacataaaaaattacagtatcgatttaggacagattcaaaaggtgacttcagaatatggaaacaaaatcctgccagtccccactaaggatgggaaaacccctttacaagttaatccaggggaccaagtcctcctaaaggcttgaagggcaggctccccggaggaccaccccttgcttaaatgggagggcccttactgggtgatcctgaccactccaactgcagccaactcacaaggaatcactagctgggtacacctctcccgatcagaaatgctttctcctaaatgtttccagactcgcccagagccaggcctaagttcagagccaggcctaagttcagagcaggggg

SEQ ID NO: 43970 - DNA, 1507 bp, Homo sapiens
cacgggacgagaggatgctgacagtgcctcacagccgcacaggacgcgaggatgctgacagtgcctcacagccgcacaggacgcgaggatgctgacagtgcctcacagccgcacaggacgcgaggatgctgacagtgcctcacagccacacaggacgcaaggatgctgacggtgcctcacagctgatgagctgctgctccgagcttctggagtgcccgtgttcccctgaccaccttccctgccacacctccccacaatccaataaccagagttaactcccagcaagcagggccttctaacctaggctacaacattgacttctacctacatttcctgatgctctttaggagaatgtgatcccacacactaaatatatggttgttttgccaccttttaatttgtgcctttaagaaaagatcatttggttagttggttacaaagaggggtttccaattatattttgataatgccccacaagttatgaaggtaacttctactgaatatatatatttaaattttgcatttttctactgagcaccaacgatttattggaattgatttcaattaggaatttagggatatataagaaccaattacagttgtccatacttatctttgatgtgggacaattaagaagttacaaaaaatgggtgttggtgatattttatcatggttatttagcttaaaatacacgtgtaaaggcaggtgtcttccatttttctcctttgccttttagctgctgttttcctgcctctgacatgttggctgctcagaaactgctctctgggcagtgattggggaacagggtattcaagttcactaaaggctcaattttccattgatagaatatcagtgtccacagaattaagactgcaagcacagcaaagacacccatattgaatgttcccttaaattgcttttatttggagacaattctgaacatgaagtgttatagagggcccaggaaactaagttgagcccacctgaccctgtgatgaatcttggaacttccgtctcttgaatacattcttagtagtagcttcttggcattttcaaaaaaggaaaaaaaaaatatggcatagacagcttattactgtgattctttgagttttctcaggtgagttttttgataaaatatttgtgaagtggcctcatggtttcatttgatgattcactcttatcctttccttatcttgaataaaatcccattcattttctttttaaaacttcagcttctgtaaaggtttccagatcctgatgtggatgttaatgttcatgtgcaggaaaacaatgaaggcatagcacctctagaaacttcagaaggcagtggtacctgctgtgtcccaacagtatgctgattctcttctctgcagcattgtgggtgtacatacactaaaggacagaagctcctcatatgcctgggcacgtgcctccataaagctgctgtggggaaaggaagccactgacaataaagacaacttaagctgatgaaaatcagcacacagct

SEQ ID NO: 43971 - DNA, 360 bp, Homo sapiens
cctctcttagcttattggtcccagataattctcccaagtgcttggcttttggtttctgttttcactcttggcttaaataacaaaggttaactctaagctgcattggtgttcctcaaaaccattatgcctttgagttttagggtggactccccacttcaggtttgttctctaaagcaagctggacaaggtgggagctcccctcccctcatggttagcatgctgcttcctttggcgtaagtgcttgtgttggttggcgcattaggattggctttggctgacacctctgccaaaaccccaagttctgccaggcctgtgggaacggagggcagataaaggtaggaggcataagcttcctgctag

SEQ ID NO: 43972 - DNA, 4315 bp, Homo sapiens
  misc_feature (3824)..(3824): n is a, c, g, or t
cccttaataagatttgccacgtacactcgagccatcgcgagtgtccttgagccgcgggtgacggtggctctcgctgctcgcgccccctcctcccgcggggggagcctgatgccacgttccctatgaattatttatcgccggcctaaaaataccccgaacttcacagcccgagtgaccctccggtggacatgggtggggccctggggccggccctgttgctcacctcgctcttcggtgcctgggcagggctgggtccggggcagggcgagcagggcatgacggtggccgtggtgtttagcagctcagggccgccccaggcccagttccgtgcccgcctcaccccccagagcttcctggacctacccctggagatccagccgctcacagttggggtcaacaccaccaaccccagcagcctcctcacccagatctgcggcctcctgggtgctgcccacgtccacggcattgtctttgaggacaacgtggacaccgaggcggtggcccagatccttgacttcatctcctcccagacccatgtgcccatcctcagcatcagcggaggctctgctgtggtcctcacccccaaggagccgggctccgccttcctgcagctgggcgtgtccctggagcagcagctgcaggtgctgttcaaggtgctggaagagtacgactggagcgccttcgccgtcatcaccagcctgcacccgggccacgcgctcttcctggagggcgtgcgcgccgtcgccgacgccagccacgtgagttggcggctgctggacgtggtcacgctggagctgggcccgggagggccgcgcgcgcgcacgcagcgcctgctgcgccagctcgacgcgcccgtgtttgtggcctactgctcgcgcgaggaggccgaggtgctcttcgccgaggcggcgcaggccggtctggtggggcccggccacgtgtggctggtgcccaacctggcgctgggcagcaccgatgcgccccccgccaccttccccgtgggcctcatcagcgtcgtcaccgagagctggcgcctcagcctgcgccagaaggtgcgcgacggcgtggccattctggccctgggcgcccacagctactggcgccagcatggaaccctgccagccccggccggggactgccgtgttcaccctgggcccgtcagccctgcccgggaggccttctacaggcacctactgaatgtcacctgggagggccgagacttctccttcagccctggtgggtacctggtccagcccaccatggtggtgatcgccctcaaccggcaccgcctctgggagatggtggggcgctgggagcatggcgtcctatacatgaagtaccccgtgtggcctcgctacagtgcctctctgcagcctgtggtggacagtcggcacctgacggtggccacgctggaagagcggccctttgtcatcgtggagagccctgaccctggcacaggaggctgtgtccccaacaccgtgccctgccgcaggcagagcaaccacaccttcagcagcggggacgtggccccctacaccaagctctgctgtaagggattctgcatcgacatcctcaagaagctggccagagtggtcaaattctcctacgacctgtacctggtgaccaacggcaagcatggcaagcgggtgcgcggcgtatggaacggcatgattggggaggtgtactacaagcgggcagacatggccatcggctccctcaccatcaatgaggaacgctccgagatcgtagacttctctgtaccctttgtggagacgggcatcagtgtgatggtggctcgcagcaatggcaccgtctccccctcggccttcttggagccatatagccctgcagtgtgggtgatgatgtttgtcatgtgcctcactgtggtggccatcaccgtcttcatgttcgagtacttcagccctgtcagctacaaccagaacctcaccagaggcaagaagtccgggggcccagctttcactatcggcaagtccgtgtggctgctgtgggcgctggtcttcaacaactcagtgcccatcgagaacccgcggggcaccaccagcaagatcatggttctggtctgggccttctttgctgtcatcttcctcgccagctacacggccaacctggccgccttcatgatccaagagcaatacatcgacactgtgtcgggcctcagtgacaagaagtttcagcggcctcaagatcagtacccacctttccgcttcggcacggtgcccaacggcagcacggagcggaacatccgcagtaactaccgtgacatgcacacccacatggtcaagttcaaccagcgctcggtggaggacgcgctcaccagcctcaagatggggaagctggatgccttcatctatgatgctgctgtcctcaactacatggcaggcaaggacgagggctgcaagctggtcaccattgggtctggcaaggtctttgctaccactggctacggcatcgccatgcagaaggactcccactggaagcgggccatagacctggcgctcttgcagttcctgggggacggagagacacagaaactggagacagtgtggctctcagggatctgccagaatgagaagaacgaggtgatgagcagcaagctggacatcgacaacatggcaggcgtcttctacatgctgctggtggccatggggctggccctgctggtcttcgcctgggagcacctggtctactggaagctgcgccactcggtgcccaactcatcccagctggacttcctgctggctttcagcaggggcatctacagctgcttcagcggggtgcagagcctcgccagcccaccgcggcaggccagcccggacctcacggccagctcggcccaggccagcgtgctcaagatgctgcaggcagcccgcgacatggtgaccacggcgggcgtaagcagctccctggaccgcgccactcgcaccatcgagaattggggtggcggccgccgtgcgcccccaccgtccccctgcccgaccccgcggtctggccccagcccatgcctgcccacccccgacccgcccccagagccgagccccacgggctggggaccgccagacgggggtcgcgcggcgcttgtgcgcagggctccgcagcccccgggccgccccccgacgccggggccgcccctgtccgacgtctcccgagtgtcgcgccgcccagcctgggaggcgcggtggccggtgcggaccgggcactgcgggaggcacctctcggcctccgagcggcccctgtcgcccgcgcgctgtcactacagctcctttcctcgagccgaccgatccggccgccccttcctcccgctcttcccggagcccccggagctggaggacctgccgctgctcggtccggagcagctggcccggcgggaggccctgctgcacgcggcctgggcccggggctcgcgcccgcgtcacgcttccctgcccagctccgtggccgaggccttcgctcggcccagctcgctgcccgctgggtgcaccggccccgcctgcgcccgccccgacggccactcggcctgcaggcgcttggcgcaggcgcagtcgatgtgcttgccgatctaccgggaggcctgccaggagggcgagcaggcaggggcccccgcctggcagcacagacagcacgtctgcctgcacgcccacgcccacctgccattttgctggggggctgtctgtcctcaccttccaccctgtgccagccacggctcctggctctccggggcctgggggcctctggggcacaggggcaggactctggggctgggcacaggctacagagacagtgggggactggacgagatcagcagngtagcccgtgggacgcaaggcttcccgggaccctgcacctggagacggatctccagtctggagtcagaagtgtgagttatcagccactcaggctccgagccagctggattctctgcctgccactgtcagggttaagcggcaggcaggattgggcttttctggcttctaccatgaaatcctggccatgggaccccagtgacagatgatgtcttccatggtcatcagtgacctcagtagcctcaaatcatggtgagggctgggcttttgctgtcctcttctcacgcagagttctgccaggagggtgtgctgtgggggtcagactcctgaggctctcccttccctggggctagccagttactggtcatggctgctgtgggcatggaggctggaacttgtggttgaggcagggccatcccgatccttgctctacctggctagagtttcttctcatcagagcactgggacattaaaccaaccttttacaacacact

SEQ ID NO: 43973 - DNA, 911 bp, Homo sapiens
agcgggcgagtcccgcttcttccccttccagctctgccccatctcctttgccccagcctagctctctccttcctgcgacctgggagaatcggagtgggcttccagagtagtggcatcttgcagatgctggcccgtgcccggctcccgggcttccagagcgcaaagggaagggtaggcagagagggcactgggcgagcaagacctggcgctgggccctggctgcgcaccagccgcctgcgccggtctctgtgggcttcgcccaggatccccgacggcggggaggggaagccccgagtctcctgtttcctgcctacgcgggcagggcggggacacgcggagcaaaggcacccggcaacctgaacccccaggtgcgtcccgcgaccctgcaaggagctgctgggaccctccggtggacatgggtggggccctggggccggccctgttgctcacctcgctcttcggtgcctgggcagggctgggtccggggcagggcgagcagggcatgacggtggccgtggtgtttagcagctcagggccgccccaggcccagttccgtgcccgcctcaccccccagagcttcctggacctacccctggagatccagccgctcacagttggggtcaacaccaccaaccccagcagcctcctcacccagatctgcggcctcctgggtgctgcccacgtccacggcattgtctttgaggacaacgtggacaccgaggcggtggcccagatccttgacttcatctcctcccagacccatgtgcccatcctcagcatcagcggaggctctgctgtggtcctcacccccaaggagcgtccaaactcatgtcccctcgtgcctcaggcctggaaccaggctggggtcgggggtgctttggttctgggaagctgggattagacgggatggg

SEQ ID NO: 43974 - DNA, 4542 bp, Homo sapiens
  misc_feature (4051)..(4051): n is a, c, g, or t
agcgggcgagtcccgcttcttccccttccagctctgccccatctcctttgccccagcctagctctctccttcctgcgacctgggagaatcggagtgggcttccagagtagtggcatcttgcagatgctggcccgtgcccggctcccgggcttccagagcgcaaagggaagggtaggcagagagggcactgggcgagcaagacctggcgctgggccctggctgcgcaccagccgcctgcgccggtctctgtgggcttcgcccaggatccccgacggcggggaggggaagccccgagtctcctgtttcctgcctacgcgggcagggcggggacacgcggagcaaaggcacccggcaacctgaacccccaggtgcgtcccgcgaccctgcaaggagctgctgggaccctccggtggacatgggtggggccctggggccggccctgttgctcacctcgctcttcggtgcctgggcagggctgggtccggggcagggcgagcagggcatgacggtggccgtggtgtttagcagctcagggccgccccaggcccagttccgtgcccgcctcaccccccagagcttcctggacctacccctggagatccagccgctcacagttggggtcaacaccaccaaccccagcagcctcctcacccagatctgcggcctcctgggtgctgcccacgtccacggcattgtctttgaggacaacgtggacaccgaggcggtggcccagatccttgacttcatctcctcccagacccatgtgcccatcctcagcatcagcggaggctctgctgtggtcctcacccccaaggagccgggctccgccttcctgcagctgggcgtgtccctggagcagcagctgcaggtgctgttcaaggtgctggaagagtacgactggagcgccttcgccgtcatcaccagcctgcacccgggccacgcgctcttcctggagggcgtgcgcgccgtcgccgacgccagccacgtgagttggcggctgctggacgtggtcacgctggagctgggcccgggagggccgcgcgcgcgcacgcagcgcctgctgcgccagctcgacgcgcccgtgtttgtggcctactgctcgcgcgaggaggccgaggtgctcttcgccgaggcggcgcaggccggtctggtggggcccggccacgtgtggctggtgcccaacctggcgctgggcagcaccgatgcgccccccgccaccttccccgtgggcctcatcagcgtcgtcaccgagagctggcgcctcagcctgcgccagaaggtgcgcgacggcgtggccattctggccctgggcgcccacagctactggcgccagcatggaaccctgccagccccggccggggactgccgtgttcaccctgggcccgtcagccctgcccgggaggccttctacaggcacctactgaatgtcacctgggagggccgagacttctccttcagccctggtgggtacctggtccagcccaccatggtggtgatcgccctcaaccggcaccgcctctgggagatggtggggcgctgggagcatggcgtcctatacatgaagtaccccgtgtggcctcgctacagtgcctctctgcagcctgtggtggacagtcggcacctgacggtggccacgctggaagagcggccctttgtcatcgtggagagccctgaccctggcacaggaggctgtgtccccaacaccgtgccctgccgcaggcagagcaaccacaccttcagcagcggggacgtggccccctacaccaagctctgctgtaagggattctgcatcgacatcctcaagaagctggccagagtggtcaaattctcctacgacctgtacctggtgaccaacggcaagcatggcaagcgggtgcgcggcgtatggaacggcatgattggggaggtgtactacaagcgggcagacatggccatcggctccctcaccatcaatgaggaacgctccgagatcgtagacttctctgtaccctttgtggagacgggcatcagtgtgatggtggctcgcagcaatggcaccgtctccccctcggccttcttggagccatatagccctgcagtgtgggtgatgatgtttgtcatgtgcctcactgtggtggccatcaccgtcttcatgttcgagtacttcagccctgtcagctacaaccagaacctcaccagaggcaagaagtccgggggcccagctttcactatcggcaagtccgtgtggctgctgtgggcgctggtcttcaacaactcagtgcccatcgagaacccgcggggcaccaccagcaagatcatggttctggtctgggccttctttgctgtcatcttcctcgccagctacacggccaacctggccgccttcatgatccaagagcaatacatcgacactgtgtcgggcctcagtgacaagaagtttcagcggcctcaagatcagtacccacctttccgcttcggcacggtgcccaacggcagcacggagcggaacatccgcagtaactaccgtgacatgcacacccacatggtcaagttcaaccagcgctcggtggaggacgcgctcaccagcctcaagatggggaagctggatgccttcatctatgatgctgctgtcctcaactacatggcaggcaaggacgagggctgcaagctggtcaccattgggtctggcaaggtctttgctaccactggctacggcatcgccatgcagaaggactcccactggaagcgggccatagacctggcgctcttgcagttcctgggggacggagagacacagaaactggagacagtgtggctctcagggatctgccagaatgagaagaacgaggtgatgagcagcaagctggacatcgacaacatggcaggcgtcttctacatgctgctggtggccatggggctggccctgctggtcttcgcctgggagcacctggtctactggaagctgcgccactcggtgcccaactcatcccagctggacttcctgctggctttcagcaggggcatctacagctgcttcagcggggtgcagagcctcgccagcccaccgcggcaggccagcccggacctcacggccagctcggcccaggccagcgtgctcaagatgctgcaggcagcccgcgacatggtgaccacggcgggcgtaagcagctccctggaccgcgccactcgcaccatcgagaattggggtggcggccgccgtgcgcccccaccgtccccctgcccgaccccgcggtctggccccagcccatgcctgcccacccccgacccgcccccagagccgagccccacgggctggggaccgccagacgggggtcgcgcggcgcttgtgcgcagggctccgcagcccccgggccgccccccgacgccggggccgcccctgtccgacgtctcccgagtgtcgcgccgcccagcctgggaggcgcggtggccggtgcggaccgggcactgcgggaggcacctctcggcctccgagcggcccctgtcgcccgcgcgctgtcactacagctcctttcctcgagccgaccgatccggccgccccttcctcccgctcttcccggagcccccggagctggaggacctgccgctgctcggtccggagcagctggcccggcgggaggccctgctgcacgcggcctgggcccggggctcgcgcccgcgtcacgcttccctgcccagctccgtggccgaggccttcgctcggcccagctcgctgcccgctgggtgcaccggccccgcctgcgcccgccccgacggccactcggcctgcaggcgcttggcgcaggcgcagtcgatgtgcttgccgatctaccgggaggcctgccaggagggcgagcaggcaggggcccccgcctggcagcacagacagcacgtctgcctgcacgcccacgcccacctgccattttgctggggggctgtctgtcctcaccttccaccctgtgccagccacggctcctggctctccggggcctgggggcctctggggcacaggggcaggactctggggctgggcacaggctacagagacagtgggggactggacgagatcagcagngtagcccgtgggacgcaaggcttcccgggaccctgcacctggagacggatctccagtctggagtcagaagtgtgagttatcagccactcaggctccgagccagctggattctctgcctgccactgtcagggttaagcggcaggcaggattgggcttttctggcttctaccatgaaatcctggccatgggaccccagtgacagatgatgtcttccatggtcatcagtgacctcagtagcctcaaatcatggtgagggctgggcttttgctgtcctcttctcacgcagagttctgccaggagggtgtgctgtgggggtcagactcctgaggctctcccttccctggggctagccagttactggtcatggctgctgtgggcatggaggctggaacttgtggttgaggcagggccatcccgatccttgctctacctggctagagtttcttctcatcagagcactgggacattaaaccaaccttttacaacacact

SEQ ID NO: 43975 - DNA, 2668 bp, Homo sapiens
  misc_feature (2177)..(2177): n is a, c, g, or t
cttagaggaccctcgaagatggcggttggggagtgtactacaagcgggcagacatggccatcggctccctcaccatcaatgaggaacgctccgagatcgtagacttctctgtaccctttgtggagacgggcatcagtgtgatggtggctcgcagcaatggcaccgtctccccctcggccttcttggagccatatagccctgcagtgtgggtgatgatgtttgtcatgtgcctcactgtggtggccatcaccgtcttcatgttcgagtacttcagccctgtcagctacaaccagaacctcaccagaggcaagaagtccgggggcccagctttcactatcggcaagtccgtgtggctgctgtgggcgctggtcttcaacaactcagtgcccatcgagaacccgcggggcaccaccagcaagatcatggttctggtctgggccttctttgctgtcatcttcctcgccagctacacggccaacctggccgccttcatgatccaagagcaatacatcgacactgtgtcgggcctcagtgacaagaagtttcagcggcctcaagatcagtacccacctttccgcttcggcacggtgcccaacggcagcacggagcggaacatccgcagtaactaccgtgacatgcacacccacatggtcaagttcaaccagcgctcggtggaggacgcgctcaccagcctcaagatggggaagctggatgccttcatctatgatgctgctgtcctcaactacatggcaggcaaggacgagggctgcaagctggtcaccattgggtctggcaaggtctttgctaccactggctacggcatcgccatgcagaaggactcccactggaagcgggccatagacctggcgctcttgcagttcctgggggacggagagacacagaaactggagacagtgtggctctcagggatctgccagaatgagaagaacgaggtgatgagcagcaagctggacatcgacaacatggcaggcgtcttctacatgctgctggtggccatggggctggccctgctggtcttcgcctgggagcacctggtctactggaagctgcgccactcggtgcccaactcatcccagctggacttcctgctggctttcagcaggggcatctacagctgcttcagcggggtgcagagcctcgccagcccaccgcggcaggccagcccggacctcacggccagctcggcccaggccagcgtgctcaagatgctgcaggcagcccgcgacatggtgaccacggcgggcgtaagcagctccctggaccgcgccactcgcaccatcgagaattggggtggcggccgccgtgcgcccccaccgtccccctgcccgaccccgcggtctggccccagcccatgcctgcccacccccgacccgcccccagagccgagccccacgggctggggaccgccagacgggggtcgcgcggcgcttgtgcgcagggctccgcagcccccgggccgccccccgacgccggggccgcccctgtccgacgtctcccgagtgtcgcgccgcccagcctgggaggcgcggtggccggtgcggaccgggcactgcgggaggcacctctcggcctccgagcggcccctgtcgcccgcgcgctgtcactacagctcctttcctcgagccgaccgatccggccgccccttcctcccgctcttcccggagcccccggagctggaggacctgccgctgctcggtccggagcagctggcccggcgggaggccctgctgcacgcggcctgggcccggggctcgcgcccgcgtcacgcttccctgcccagctccgtggccgaggccttcgctcggcccagctcgctgcccgctgggtgcaccggccccgcctgcgcccgccccgacggccactcggcctgcaggcgcttggcgcaggcgcagtcgatgtgcttgccgatctaccgggaggcctgccaggagggcgagcaggcaggggcccccgcctggcagcacagacagcacgtctgcctgcacgcccacgcccacctgccattttgctggggggctgtctgtcctcaccttccaccctgtgccagccacggctcctggctctccggggcctgggggcctctggggcacaggggcaggactctggggctgggcacaggctacagagacagtgggggactggacgagatcagcagngtagcccgtgggacgcaaggcttcccgggaccctgcacctggagacggatctccagtctggagtcagaagtgtgagttatcagccactcaggctccgagccagctggattctctgcctgccactgtcagggttaagcggcaggcaggattgggcttttctggcttctaccatgaaatcctggccatgggaccccagtgacagatgatgtcttccatggtcatcagtgacctcagtagcctcaaatcatggtgagggctgggcttttgctgtcctcttctcacgcagagttctgccaggagggtgtgctgtgggggtcagactcctgaggctctcccttccctggggctagccagttactggtcatggctgctgtgggcatggaggctggaacttgtggttgaggcagggccatcccgatccttgctctacctggctagagtttcttctcatcagagcactgggacattaaaccaaccttttacaacacact

SEQ ID NO: 43976 - DNA, 1883 bp, Homo sapiens
  misc_feature (1392)..(1392): n is a, c, g, or t
ctaaaaaaaaaaaaaaaagccaacgtcctgagaagtggcatggctcaccagggtggcagggttgaagagggtcagagtcccccccacaggtgtgcccaggttggaaccttcatgtgccaggtgctagctagagtgattaggagaatgagtcaacctgggcgctcagaccactcattcatctgcaaagcacagtgcctggcgcatgggagatgcttcacagttagctacttcctgagacttatagaagactgatgatgccttgggaccaggcagggacaatcgtggcgggtccctcagcggagggcgctgcttacggcctgtcgtctccctactgcccagggcatctacagctgcttcagcggggtgcagagcctcgccagcccaccgcggcaggccagcccggacctcacggccagctcggcccaggccagcgtgctcaagatgctgcaggcagcccgcgacatggtgaccacggcgggcgtaagcagctccctggaccgcgccactcgcaccatcgagaattggggtggcggccgccgtgcgcccccaccgtccccctgcccgaccccgcggtctggccccagcccatgcctgcccacccccgacccgcccccagagccgagccccacgggctggggaccgccagacgggggtcgcgcggcgcttgtgcgcagggctccgcagcccccgggccgccccccgacgccggggccgcccctgtccgacgtctcccgagtgtcgcgccgcccagcctgggaggcgcggtggccggtgcggaccgggcactgcgggaggcacctctcggcctccgagcggcccctgtcgcccgcgcgctgtcactacagctcctttcctcgagccgaccgatccggccgccccttcctcccgctcttcccggagcccccggagctggaggacctgccgctgctcggtccggagcagctggcccggcgggaggccctgctgcacgcggcctgggcccggggctcgcgcccgcgtcacgcttccctgcccagctccgtggccgaggccttcgctcggcccagctcgctgcccgctgggtgcaccggccccgcctgcgcccgccccgacggccactcggcctgcaggcgcttggcgcaggcgcagtcgatgtgcttgccgatctaccgggaggcctgccaggagggcgagcaggcaggggcccccgcctggcagcacagacagcacgtctgcctgcacgcccacgcccacctgccattttgctggggggctgtctgtcctcaccttccaccctgtgccagccacggctcctggctctccggggcctgggggcctctggggcacaggggcaggactctggggctgggcacaggctacagagacagtgggggactggacgagatcagcagngtagcccgtgggacgcaaggcttcccgggaccctgcacctggagacggatctccagtctggagtcagaagtgtgagttatcagccactcaggctccgagccagctggattctctgcctgccactgtcagggttaagcggcaggcaggattgggcttttctggcttctaccatgaaatcctggccatgggaccccagtgacagatgatgtcttccatggtcatcagtgacctcagtagcctcaaatcatggtgagggctgggcttttgctgtcctcttctcacgcagagttctgccaggagggtgtgctgtgggggtcagactcctgaggctctcccttccctggggctagccagttactggtcatggctgctgtgggcatggaggctggaacttgtggttgaggcagggccatcccgatccttgctctacctggctagagtttcttctcatcagagcactgggacattaaaccaaccttttacaacacact

SEQ ID NO: 43977 - DNA, 620 bp, Homo sapiens
catttggaaaacacaggagtggcctggacagcctttaagaccttctgctctgactatgcaagtccacactggggctgggctctggggtgggtttggggctttggtgcctggaaggctggaggaagggttgtgactggctgctgccctccgcctgcagtttcagcggcctcaagatcagtacccacctttccgcttcggcacggtgcccaacggcagcacggagcggaacatccgcagtaactaccgtgacatgcacacccacatggtcaagttcaaccagcgctcggtggaggacgcgctcaccagcctcaagatggggtgggtccccagccctgcacccgctgtcttcatccgtgtgtctccccagtgaccagccttagctctcaatgtggggacagtgggactgggctgtcctgcaggactcctgtggggtggagggaagaggtcttggggcagagtggagcttgaggcaaaaatggaaggccaccatgtgtctcagaacacagctgtggtgccaatcaaagttcagcctcagcctgaggtggtggttgggaccttctctgagtcttaggagcacggagagggtgggcagaaagggtggtgtgtcttctgggaacaga

SEQ ID NO: 43978 - DNA, 345 bp, Homo sapiens
tcctgcaggactcctgtggggtggagggaagaggtcttggggcagagtggagcttgaggcaaaaatggaaggccaccatgtgtctcagaacacagctgtggtgccaatcaaagttcagcctcagcctgaggtggtggttgggaccttctctgagtcttaggagcacggagagggtgggcagaaagggtggtgtgtcttctgggaacagacagtcccctggccactctgcagaggagggtgggaggggtcctcaccccatccaggacccaagagaaccagacaagtctctgcccattggtccctcccgggggtgcccagcaggctcatgtggtttagacccctgtc

SEQ ID NO: 43979 - DNA, 3806 bp, Homo sapiens
  misc_feature (3315)..(3315): n is a, c, g, or t
cgaggctctgggacagacaccgcgagggaggcggcctggcgcgggctctcgtcgcgggcgcagcgccccttcccctcggagccgggctccgccttcctgcagctgggcgtgtccctggagcagcagctgcaggtgctgttcaaggtgctggaagagtacgactggagcgccttcgccgtcatcaccagcctgcacccgggccacgcgctcttcctggagggcgtgcgcgccgtcgccgacgccagccacgtgagttggcggctgctggacgtggtcacgctggagctgggcccgggagggccgcgcgcgcgcacgcagcgcctgctgcgccagctcgacgcgcccgtgtttgtggcctactgctcgcgcgaggaggccgaggtgctcttcgccgaggcggcgcaggccggtctggtggggcccggccacgtgtggctggtgcccaacctggcgctgggcagcaccgatgcgccccccgccaccttccccgtgggcctcatcagcgtcgtcaccgagagctggcgcctcagcctgcgccagaaggtgcgcgacggcgtggccattctggccctgggcgcccacagctactggcgccagcatggaaccctgccagccccggccggggactgccgtgttcaccctgggcccgtcagccctgcccgggaggccttctacaggcacctactgaatgtcacctgggagggccgagacttctccttcagccctggtgggtacctggtccagcccaccatggtggtgatcgccctcaaccggcaccgcctctgggagatggtggggcgctgggagcatggcgtcctatacatgaagtaccccgtgtggcctcgctacagtgcctctctgcagcctgtggtggacagtcggcacctgacggtggccacgctggaagagcggccctttgtcatcgtggagagccctgaccctggcacaggaggctgtgtccccaacaccgtgccctgccgcaggcagagcaaccacaccttcagcagcggggacgtggccccctacaccaagctctgctgtaagggattctgcatcgacatcctcaagaagctggccagagtggtcaaattctcctacgacctgtacctggtgaccaacggcaagcatggcaagcgggtgcgcggcgtatggaacggcatgattggggaggtgtactacaagcgggcagacatggccatcggctccctcaccatcaatgaggaacgctccgagatcgtagacttctctgtaccctttgtggagacgggcatcagtgtgatggtggctcgcagcaatggcaccgtctccccctcggccttcttggagccatatagccctgcagtgtgggtgatgatgtttgtcatgtgcctcactgtggtggccatcaccgtcttcatgttcgagtacttcagccctgtcagctacaaccagaacctcaccagaggcaagaagtccgggggcccagctttcactatcggcaagtccgtgtggctgctgtgggcgctggtcttcaacaactcagtgcccatcgagaacccgcggggcaccaccagcaagatcatggttctggtctgggccttctttgctgtcatcttcctcgccagctacacggccaacctggccgccttcatgatccaagagcaatacatcgacactgtgtcgggcctcagtgacaagaagtttcagcggcctcaagatcagtacccacctttccgcttcggcacggtgcccaacggcagcacggagcggaacatccgcagtaactaccgtgacatgcacacccacatggtcaagttcaaccagcgctcggtggaggacgcgctcaccagcctcaagatggggaagctggatgccttcatctatgatgctgctgtcctcaactacatggcaggcaaggacgagggctgcaagctggtcaccattgggtctggcaaggtctttgctaccactggctacggcatcgccatgcagaaggactcccactggaagcgggccatagacctggcgctcttgcagttcctgggggacggagagacacagaaactggagacagtgtggctctcagggatctgccagaatgagaagaacgaggtgatgagcagcaagctggacatcgacaacatggcaggcgtcttctacatgctgctggtggccatggggctggccctgctggtcttcgcctgggagcacctggtctactggaagctgcgccactcggtgcccaactcatcccagctggacttcctgctggctttcagcaggggcatctacagctgcttcagcggggtgcagagcctcgccagcccaccgcggcaggccagcccggacctcacggccagctcggcccaggccagcgtgctcaagatgctgcaggcagcccgcgacatggtgaccacggcgggcgtaagcagctccctggaccgcgccactcgcaccatcgagaattggggtggcggccgccgtgcgcccccaccgtccccctgcccgaccccgcggtctggccccagcccatgcctgcccacccccgacccgcccccagagccgagccccacgggctggggaccgccagacgggggtcgcgcggcgcttgtgcgcagggctccgcagcccccgggccgccccccgacgccggggccgcccctgtccgacgtctcccgagtgtcgcgccgcccagcctgggaggcgcggtggccggtgcggaccgggcactgcgggaggcacctctcggcctccgagcggcccctgtcgcccgcgcgctgtcactacagctcctttcctcgagccgaccgatccggccgccccttcctcccgctcttcccggagcccccggagctggaggacctgccgctgctcggtccggagcagctggcccggcgggaggccctgctgcacgcggcctgggcccggggctcgcgcccgcgtcacgcttccctgcccagctccgtggccgaggccttcgctcggcccagctcgctgcccgctgggtgcaccggccccgcctgcgcccgccccgacggccactcggcctgcaggcgcttggcgcaggcgcagtcgatgtgcttgccgatctaccgggaggcctgccaggagggcgagcaggcaggggcccccgcctggcagcacagacagcacgtctgcctgcacgcccacgcccacctgccattttgctggggggctgtctgtcctcaccttccaccctgtgccagccacggctcctggctctccggggcctgggggcctctggggcacaggggcaggactctggggctgggcacaggctacagagacagtgggggactggacgagatcagcagngtagcccgtgggacgcaaggcttcccgggaccctgcacctggagacggatctccagtctggagtcagaagtgtgagttatcagccactcaggctccgagccagctggattctctgcctgccactgtcagggttaagcggcaggcaggattgggcttttctggcttctaccatgaaatcctggccatgggaccccagtgacagatgatgtcttccatggtcatcagtgacctcagtagcctcaaatcatggtgagggctgggcttttgctgtcctcttctcacgcagagttctgccaggagggtgtgctgtgggggtcagactcctgaggctctcccttccctggggctagccagttactggtcatggctgctgtgggcatggaggctggaacttgtggttgaggcagggccatcccgatccttgctctacctggctagagtttcttctcatcagagcactgggacattaaaccaaccttttacaacacact

SEQ ID NO: 43980 - DNA, 3187 bp, Homo sapiens
  misc_feature (2696)..(2696): n is a, c, g, or t
cccttaataagatttgccacgtacactcgagccatcgcgagtgtccttgagccgcgggtgacggtggctctcgctgctcgcgccccctcctcccgcggggggagcctgatgccacgttccctatgaattatttatcgccggcctaaaaataccccgaacttcacagcccgagtgtggggcgctgggagcatggcgtcctatacatgaagtaccccgtgtggcctcgctacagtgcctctctgcagcctgtggtggacagtcggcacctgacggtggccacgctggaagagcggccctttgtcatcgtggagagccctgaccctggcacaggaggctgtgtccccaacaccgtgccctgccgcaggcagagcaaccacaccttcagcagcggggacgtggccccctacaccaagctctgctgtaagggattctgcatcgacatcctcaagaagctggccagagtggtcaaattctcctacgacctgtacctggtgaccaacggcaagcatggcaagcgggtgcgcggcgtatggaacggcatgattggggaggtgtactacaagcgggcagacatggccatcggctccctcaccatcaatgaggaacgctccgagatcgtagacttctctgtaccctttgtggagacgggcatcagtgtgatggtggctcgcagcaatggcaccgtctccccctcggccttcttggagccatatagccctgcagtgtgggtgatgatgtttgtcatgtgcctcactgtggtggccatcaccgtcttcatgttcgagtacttcagccctgtcagctacaaccagaacctcaccagaggcaagaagtccgggggcccagctttcactatcggcaagtccgtgtggctgctgtgggcgctggtcttcaacaactcagtgcccatcgagaacccgcggggcaccaccagcaagatcatggttctggtctgggccttctttgctgtcatcttcctcgccagctacacggccaacctggccgccttcatgatccaagagcaatacatcgacactgtgtcgggcctcagtgacaagaagtttcagcggcctcaagatcagtacccacctttccgcttcggcacggtgcccaacggcagcacggagcggaacatccgcagtaactaccgtgacatgcacacccacatggtcaagttcaaccagcgctcggtggaggacgcgctcaccagcctcaagatggggaagctggatgccttcatctatgatgctgctgtcctcaactacatggcaggcaaggacgagggctgcaagctggtcaccattgggtctggcaaggtctttgctaccactggctacggcatcgccatgcagaaggactcccactggaagcgggccatagacctggcgctcttgcagttcctgggggacggagagacacagaaactggagacagtgtggctctcagggatctgccagaatgagaagaacgaggtgatgagcagcaagctggacatcgacaacatggcaggcgtcttctacatgctgctggtggccatggggctggccctgctggtcttcgcctgggagcacctggtctactggaagctgcgccactcggtgcccaactcatcccagctggacttcctgctggctttcagcaggggcatctacagctgcttcagcggggtgcagagcctcgccagcccaccgcggcaggccagcccggacctcacggccagctcggcccaggccagcgtgctcaagatgctgcaggcagcccgcgacatggtgaccacggcgggcgtaagcagctccctggaccgcgccactcgcaccatcgagaattggggtggcggccgccgtgcgcccccaccgtccccctgcccgaccccgcggtctggccccagcccatgcctgcccacccccgacccgcccccagagccgagccccacgggctggggaccgccagacgggggtcgcgcggcgcttgtgcgcagggctccgcagcccccgggccgccccccgacgccggggccgcccctgtccgacgtctcccgagtgtcgcgccgcccagcctgggaggcgcggtggccggtgcggaccgggcactgcgggaggcacctctcggcctccgagcggcccctgtcgcccgcgcgctgtcactacagctcctttcctcgagccgaccgatccggccgccccttcctcccgctcttcccggagcccccggagctggaggacctgccgctgctcggtccggagcagctggcccggcgggaggccctgctgcacgcggcctgggcccggggctcgcgcccgcgtcacgcttccctgcccagctccgtggccgaggccttcgctcggcccagctcgctgcccgctgggtgcaccggccccgcctgcgcccgccccgacggccactcggcctgcaggcgcttggcgcaggcgcagtcgatgtgcttgccgatctaccgggaggcctgccaggagggcgagcaggcaggggcccccgcctggcagcacagacagcacgtctgcctgcacgcccacgcccacctgccattttgctggggggctgtctgtcctcaccttccaccctgtgccagccacggctcctggctctccggggcctgggggcctctggggcacaggggcaggactctggggctgggcacaggctacagagacagtgggggactggacgagatcagcagngtagcccgtgggacgcaaggcttcccgggaccctgcacctggagacggatctccagtctggagtcagaagtgtgagttatcagccactcaggctccgagccagctggattctctgcctgccactgtcagggttaagcggcaggcaggattgggcttttctggcttctaccatgaaatcctggccatgggaccccagtgacagatgatgtcttccatggtcatcagtgacctcagtagcctcaaatcatggtgagggctgggcttttgctgtcctcttctcacgcagagttctgccaggagggtgtgctgtgggggtcagactcctgaggctctcccttccctggggctagccagttactggtcatggctgctgtgggcatggaggctggaacttgtggttgaggcagggccatcccgatccttgctctacctggctagagtttcttctcatcagagcactgggacattaaaccaaccttttacaacacact

SEQ ID NO: 43981 - DNA, 491 bp, Homo sapiens
tgtcacatgcagactgtggttttgaaacttccaagcccttaaaagaaaccagagctgaagaaatggcttatttcaggtctggagccggaaaaatacaagatgagcacagaacatatcagacagccagaaacctctgagagagttcaggaatgatgtcaaaaggatccaggagccagcttgtaggggctctcactgtccaaagaggacagaatttaacatcccaaatatgtttaaattcattagttcaccaataccaacatcaaatccctaactggtcgcctctggaggctgataggaaaatgattcatcattgtgaaaactgatgaatttaaaaaaagaatcaggcatttatcttcagttttctccatgaactataacaccagagagtggataagaagaggtttatctttaatagttcatctactacataaagaagcaataactcagccagaacatcacactttttttttttttttttgagacggagtctc

SEQ ID NO: 43982 - DNA, 984 bp, Homo sapiens
tttaaacaagaccaatcagtgaaatattgaatgtcaatactttttgttagaaatgccctctgaaaatgttagaaaatgtaaaactttacctgtgacaaggaataaattcatgattagaagaattatactgtttttcttgtgcaaataatacttaaggcagatgttcagtctcacagtgatgttggaaagcatattttatgcagtctaaacactatttctgtattagatatttaaatgcatgaggataaattctaattgctttttgtttaaaacagaaacatagaagaagcattagccccagtttgtataaaatgtctgctgcaactgaattcatgatagttcatgaaaactgaaaatcattccaattttgtaaaactgctgctactggttttatcaataaagttttagcagatggaaaaaaaaaaaaaaaaaaaaaaaaaaaaaaaaaaaaaaaaaaaaaaaaaaaaaaaaaaaaaaaaaaaaaaaaaaaaaaaaaaaaaaaaaaaaaaaaaaaaaaaaactcaaggggcaacccaatgcccattataacaaaaagaaaaaacttttaaaagccctggcgggacccaattaaaccttactggcgggaaaaccccttttttccccctgttttaatacctggcaggccttgcaaatatcgccctttccacaatttgccaacgtgacggaccaatgcctttttccaaacggttatataccctaaaggcccactggaaaaattctttccaaaaaatgtcaggttaaaaaaccgggtaaaccgaattgtgaaacacccctctttttttcacaatattgccccaaaaatttgtgataacctcgtgtgactctttcggaaccaacggggccaacttgttaaaaacttcgtcctactacggaacaagtggcccacaattggggaaccatggctttccccttttacgggcaaaatacccctttataaggacttttggcccccttcgtgacgcg

SEQ ID NO: 43983 - DNA, 391 bp, Homo sapiens
gttgaccaggctggtctcgaactcctgatcttgtgattcactcacctcagcttcctaaagtgctgggattgttttaaaggtttaagcaagttttaaaacgttaattgtaaagaaaattctgtgtgtaaacatattagctaaagttaaaaaggtatcatccagtttttctgggacatccttgtctttcttgttcatgatttttaagggaaaatatgaggtctttaaaaataaatattacattagccaggcatggtggtgtgcacctgtaatcccagttatttgggaggctgaggcaggggaattgcttgaacccaggagacggaggttgcagtgagctgagattgtgccattgcgctccagcctggatgacagaacgagagactgtctcaaa

SEQ ID NO: 43984 - DNA, 139 bp, Homo sapiens
cactctgataaagcaagacatgcagtctgttagcattcagccatgaaaataataacttgtaagaccagcttgtaaggctatgccatccaagtttcactaaatgtgtttatcaaattctctggaataatgattaagctca

SEQ ID NO: 43985 - DNA, 416 bp, Homo sapiens
cagtagatgagctgcccaagttgctgactcacagaattgggtgctaaataaaatggttgtagtttcaagccatgaagttttgggatgaactgttatgcagcaaaaagctaactgatatgatagatattgccagttttccaaagtggctgtgccaatctaccttctcagcagcactgtgtgctagagcccattactctgcctgttctccaatacctagtattgtcagggttttttttttgtttgtttgagacagtctctgtcacccaggctggagtgcagtggcatgatcttggctcactgcaacctctgcctcccaggtttaagtgattctcctgcttcagcctcctgagtagctaggattacaggtgtccgccaccatgcctggctaatttttatatttttagtagagacagggt

SEQ ID NO: 43986 - DNA, 344 bp, Homo sapiens
ggctggacagaatcattctgctttggagggcaacctaacagcattagcagggaaagtagtggtagaatttgtttctttttttaggacagttctgccccacatttttaaccattgttcttggaagtttagcatcaacatgaactacataatattcattgtcagttttgtagtttgcaactgacaaccctgagtagtacagtgacaaataccaaaagcatagccaaagaacttctgtgccatggcacgcctgtaatcccagcattttgggaggctgaggtgggtggaatgcttgagctcaggagtttgagaccaagctgggcaacatggcaaaatcccatctctac

SEQ ID NO: 43987 - DNA, 595 bp, Homo sapiens
aacctggatcacagaggacaggtaaactatttataatgcttaaccatggtaccggtagtcattggatcagatctcttggactgagtataccactataatactgcttctatggaaaaaaaatatatatataaaggattcaatagccatcattttcatccagaatattttcaagaaacataagccagtttgctcatttgattttatcaatggttctttaagttgatccacaaacccatgagggtcctggagaacctttcagggcttgacaaagtcaaaattattttagtaatagtactcagacattatttgcctttttggctacgttgacatttgcactgatggtacaaaatcaatggtggattgacatcctagtataaattaaggcagtagatccaagtagtatgaacaatcactgttctattcactgccatcttctgtttttctttttaaaaaagctagtttgaaatactgtcctcaatgacatagtaaatttaatatttactatatcctcaatgtaatatttacatttacatgagtaattacaatattatatgacaatattaatacacattaaatttactatttaatattagtt

SEQ ID NO: 43988 - DNA, 3473 bp, Homo sapiens
atgtattgaaagggtatgtataggtgcaaatgataaaaaagaagagtttgatgtttccggaaatggaaggattgaaggccatataggtgtgcaattacaagagcattcctatcttgagaagggcatgctggcgtctgaggaactgtcacagtctggtggtagcaccaaagatgatgaattagcttcaaccactactccaaagagagggagacctaaaggtaacatctcacggacgtgttcacactgtggccttttggcctctagtattacaaacttgactgttcacattagacgaaaacacagtcaccagtatagttatttatgcaaagtgtgtaagtattacactgtaactaagggagatatggaacgtcattgtgccaccaagaaacataaaggacgggtagaaatagaagcaagtggaaaacacagttcagatatcattgttggccctgaagggggtagccttgaagctggtaaaaagaatgctggctcagcagtgaccatgtcagatgaacatgctaacaaaccagctgagtcacccacctccgttttagagaagccagatcgtggaaactcaattgaagctgaagttgaaaatgtatttcattctctagatggagaagttaacagccatcttcttgatgaaaaggagcaaatatcttcagagccagaggacttcgcccagccgggggatgtgtactcccagagagatgttacaggcacaggtgagaataagtgtttgcactgtgagtttagtgctcactcctctgcttctctagagctgcatgtaaaacggaaacatacaaaagagtttgagttttattgcatggcatgcgattactacgcggtgactcgtcgcgagatgaccaggcatgcagcaacagagaagcacaaaatgaaaaggcagtcttatctcaactctgctaatgtagaagctggttctgcagacatgtccaaaaacatcattatgcctgaagaagagcatcaacaaaattctgaggaatttcaaataatttcaggtcaaccatctgatactcttaaatctagaaatgctgcagattgctctattttaaatgagaatactaatttagatatgtctaaagtgctctgcgctgctgactctgtagaagttgagactgaagaagaatctaatttcaatgaagaccattccttttgtgagactttccaacaggctcctgtcaaggataaagttaggaaacctgaggagatgatgtcacttactatgtcctcaaactatggctccccaagcagatttcaaaatgaaaattcaggaagctctgccttaaattgtgagacagcaaagaaaaaccatgagatatcgaatgatgcaggtgagctgcgtgtccattgtgagggtgaaggaggaaacgcaggagacggtggaggtgttgtcccccacagacacctgtgccctgtgacgctcgatggggagcgctcggctgaaagccctgtgctcgttgtgacaagaataaccagagaacagggaaatctggagagcgggggtcagaacagagttgcacgtgggcatggtttggaagacttgaaaggtgtccaagaagatcccgttctggggaataaggaaattctgatgaattcacaacatgaaacagaatttattttggaggaggatggcccagcttctgatagcacagttgaaagtagtgatgtctatgaaactataattagtattgatgataaagggcaggccatgtacagttttggtcgatttgactcctccataataagaataaagaaccctgaagatggtgagttgatagaccagtctgaagagggcttgatagcaacgggagtgagaattagtgagctgcccttgaaagactgtgctcaaggtgtgaaaaagaagaaatctgagggcagttccattggtgagtctacacgaattcgctgtgatgattgtggcttcttagcagatggactgagtggactgaatgttcacatagccatgaagcatcctacaaaagagaagcacttccattgtttactctgtggaaagtcgttctataccgaaagcaaccttcaccagcatctggctagtgccggccacatgagaaatgagcaggccagtgtggaggagcttccggagggaggggccacctttaaatgtgtcaagtgcacagagccctttgattctgaacagaatttatttctacatattaaaggacagcatgaggaattgctgcgggaggtgaataagtatatagtggaagacactgagcaaatcaaccgcgagagggaggaaaaccagggaaacgtctgcaagtattgtgggaagatgtgtcgaagcagcaactcgatggccttcctggcacacattcgcactcacacaggatcaaaaccattcaagtgcaagatatgccattttgcaacagctcagcttggagatgccagaaaccatgtgaaaaggcaccttgggatgagggaatacaagtgtcatgtctgtggggttgcttttgtaatgaagaagcacttaaatactcatctactaggcaagcatggagttggcaccccaaaagaaaggaaatttacatgccacttatgtgatagaagtttcacagagaagtgggccctgaacaaccacatgaaactccacacgggagaaaagccgtttaaatgtacctggcccacgtgccattactcattcctcacagcctccgcaatgaaagaccactacaggacgcacacaggcgagaagtcgtttctgtgtgacctctgcggctttgccggcgggacccgccacgccctcaccaagcatcgcagacagcacacaggagaaaaacctttcaagtgcgatgagtgtaactttgcctccacaactcagtcccatttgactcggcataaacgtgtccacactggagaaaagccctacagatgcccctggtgtgactacaggtcaaactgtgctgaaaatatccgcaaacacattctgcatactggcaaacatgaaggagtcaagatgtacaactgtcccaagtgtgactacgggaccaacgtcccggtggagttccggaaccatttgaaggaacagcatcctgacatcgaaaacccggacctcgcttacctgcatgctggtaagggacagaaactgtgaaaacttgtttctaacaggatttcatgtgatcacagcagttataatgctatttgtacattaccatgatttattgtaatggagtagagtatgtgatagtatctgcttcaagacctatagaaaagtacattccagtttgatcccactcaactatgaaaacaggacttttcaactgtattttatcaaaaaaggaaatctgacagagtaattatttgatgactgtaaagttaataatagtaaatatttaaagcatagttgacctgaaatgagagtagttgttaaatcttcatatgttgactaattgctaaaattttaattttttttcttaaaaaatgcttgtgatttg

SEQ ID NO: 43989 - DNA, 3626 bp, Homo sapiens
atgtattgaaagggtatgtataggtgcaaatgataaaaaagaagagtttgatgtttccggaaatggaaggattgaaggccatataggtgtgcaattacaagagcattcctatcttgagaagggcatgctggcgtctgaggaactgtcacagtctggtggtagcaccaaagatgatgaattagcttcaaccactactccaaagagagggagacctaaaggtaacatctcacggacgtgttcacactgtggccttttggcctctagtattacaaacttgactgttcacattagacgaaaacacagtcaccagtatagttatttatgcaaagtgtgtaagtattacactgtaactaagggagatatggaacgtcattgtgccaccaagaaacataaaggacgggtagaaatagaagcaagtggaaaacacagttcagatatcattgttggccctgaagggggtagccttgaagctggtaaaaagaatgctggctcagcagtgaccatgtcagatgaacatgctaacaaaccagctgagtcacccacctccgttttagagaagccagatcgtggaaactcaattgaagctgaagttgaaaatgtatttcattctctagatggagaagttaacagccatcttcttgatgaaaaggagcaaatatcttcagagccagaggacttcgcccagccgggggatgtgtactcccagagagatgttacaggcacaggtgagaataagtgtttgcactgtgagtttagtgctcactcctctgcttctctagagctgcatgtaaaacggaaacatacaaaagagtttgagttttattgcatggcatgcgattactacgcggtgactcgtcgcgagatgaccaggcatgcagcaacagagaagcacaaaatgaaaaggcagtcttatctcaactctgctaatgtagaagctggttctgcagacatgtccaaaaacatcattatgcctgaagaagagcatcaacaaaattctgaggaatttcaaataatttcaggtcaaccatctgatactcttaaatctagaaatgctgcagattgctctattttaaatgagaatactaatttagatatgtctaaagtgctctgcgctgctgactctgtagaagttgagactgaagaagaatctaatttcaatgaagaccattccttttgtgagactttccaacaggctcctgtcaaggataaagttaggaaacctgaggagatgatgtcacttactatgtcctcaaactatggctccccaagcagatttcaaaatgaaaattcaggaagctctgccttaaattgtgagacagcaaagaaaaaccatgagatatcgaatgatgcaggtgagctgcgtgtccattgtgagggtgaaggaggaaacgcaggagacggtggaggtgttgtcccccacagacacctgtgccctgtgacgctcgatggggagcgctcggctgaaagccctgtgctcgttgtgacaagaataaccagagaacagggaaatctggagagcgggggtcagaacagagttgcacgtgggcatggtttggaagacttgaaaggtgtccaagaagatcccgttctggggaataaggaaattctgatgaattcacaacatgaaacagaatttattttggaggaggatggcccagcttctgatagcacagttgaaagtagtgatgtctatgaaactataattagtattgatgataaagggcaggccatgtacagttttggtcgatttgactcctccataataagaataaagaaccctgaagatggtgagttgatagaccagtctgaagagggcttgatagcaacgggagtgagaattagtgagctgcccttgaaagactgtgctcaaggtgtgaaaaagaagaaatctgagggcagttccattggtgagtctacacgaattcgctgtgatgattgtggcttcttagcagatggactgagtggactgaatgttcacatagccatgaagcatcctacaaaagagaagcacttccattgtttactctgtggaaagtcgttctataccgaaagcaaccttcaccagcatctggctagtgccggccacatgagaaatgagcaggccagtgtggaggagcttccggagggaggggccacctttaaatgtgtcaagtgcacagagccctttgattctgaacagaatttatttctacatattaaaggacagcatgaggaattgctgcgggaggtgaataagtatatagtggaagacactgagcaaatcaaccgcgagagggaggaaaaccagggaaacgtctgcaagtattgtgggaagatgtgtcgaagcagcaactcgatggccttcctggcacacattcgcactcacacaggatcaaaaccattcaagtgcaagatatgccattttgcaacagctcagcttggagatgccagaaaccatgtgaaaaggcaccttgggatgagggaatacaagtgtcatgtctgtggggttgcttttgtaatgaagaagcacttaaatactcatctactaggcaagcatggagttggcaccccaaaagaaaggaaatttacatgccacttatgtgatagaagtttcacagagaagtgggccctgaacaaccacatgaaactccacacgggagaaaagccgtttaaatgtacctggcccacgtgccattactcattcctcacagcctccgcaatgaaagaccactacaggacgcacacaggcgagaagtcgtttctgtgtgacctctgcggctttgccggcgggacccgccacgccctcaccaagcatcgcagacagcacacaggagaaaaacctttcaagtgcgatgagtgtaactttgcctccacaactcagtcccatttgactcggcataaacgtgtccacactggagaaaagccctacagatgcccctggtgtgactacagtgcctatgattgggtctgaaaggctggccttgctcccagacgtttagaaaagcagctagatgtgcacaggtttcctgcgggtgacagagaggccagcgcagcgcctgctgttcaggagcgtctcagaggcacacgagagcctgttggctgctcgcgcagagagcgcatgtggacacctggacagccgcgtgacttggaagcatgggagtttatcctctcaagggtggtggatgagaccaagaatgcgtcagtgttcatccacttctgtgctaacttacaagtttctttctcttatgaggcactgtgctgttttagaatcactttttatcgcataataaacatgaacagaaatataactgagaaatggagagaaaaattcaatgtgcatcaatttgtcctaagaactagtttcaaagaatttagatttatgaaaagcaaaaagtaatgagtaaatgatctaatggaaattatcccattcaataaatagctaccagttataataaaggaaaataaaattcataagatttagagcaaggtgatccagaaactctccaactaaaatttcctcttgctgaaaatgtccaaaggattgtattttgtgattacctcagattgctgtaaactctttttatctgaataaaatgagtacgcgccaagctctttcctccctttccccccacggtgacacacgagcg

SEQ ID NO: 43990 - DNA, 5647 bp, Homo sapiens
atgtattgaaagggtatgtataggtgcaaatgataaaaaagaagagtttgatgtttccggaaatggaaggattgaaggccatataggtgtgcaattacaagagcattcctatcttgagaagggcatgctggcgtctgaggaactgtcacagtctggtggtagcaccaaagatgatgaattagcttcaaccactactccaaagagagggagacctaaaggtaacatctcacggacgtgttcacactgtggccttttggcctctagtattacaaacttgactgttcacattagacgaaaacacagtcaccagtatagttatttatgcaaagtgtgtaagtattacactgtaactaagggagatatggaacgtcattgtgccaccaagaaacataaaggacgggtagaaatagaagcaagtggaaaacacagttcagatatcattgttggccctgaagggggtagccttgaagctggtaaaaagaatgctggctcagcagtgaccatgtcagatgaacatgctaacaaaccagctgagtcacccacctccgttttagagaagccagatcgtggaaactcaattgaagctgaagttgaaaatgtatttcattctctagatggagaagttaacagccatcttcttgatgaaaaggagcaaatatcttcagagccagaggacttcgcccagccgggggatgtgtactcccagagagatgttacaggcacaggtgagaataagtgtttgcactgtgagtttagtgctcactcctctgcttctctagagctgcatgtaaaacggaaacatacaaaagagtttgagttttattgcatggcatgcgattactacgcggtgactcgtcgcgagatgaccaggcatgcagcaacagagaagcacaaaatgaaaaggcagtcttatctcaactctgctaatgtagaagctggttctgcagacatgtccaaaaacatcattatgcctgaagaagagcatcaacaaaattctgaggaatttcaaataatttcaggtcaaccatctgatactcttaaatctagaaatgctgcagattgctctattttaaatgagaatactaatttagatatgtctaaagtgctctgcgctgctgactctgtagaagttgagactgaagaagaatctaatttcaatgaagaccattccttttgtgagactttccaacaggctcctgtcaaggataaagttaggaaacctgaggagatgatgtcacttactatgtcctcaaactatggctccccaagcagatttcaaaatgaaaattcaggaagctctgccttaaattgtgagacagcaaagaaaaaccatgagatatcgaatgatgcaggtgagctgcgtgtccattgtgagggtgaaggaggaaacgcaggagacggtggaggtgttgtcccccacagacacctgtgccctgtgacgctcgatggggagcgctcggctgaaagccctgtgctcgttgtgacaagaataaccagagaacagggaaatctggagagcgggggtcagaacagagttgcacgtgggcatggtttggaagacttgaaaggtgtccaagaagatcccgttctggggaataaggaaattctgatgaattcacaacatgaaacagaatttattttggaggaggatggcccagcttctgatagcacagttgaaagtagtgatgtctatgaaactataattagtattgatgataaagggcaggccatgtacagttttggtcgatttgactcctccataataagaataaagaaccctgaagatggtgagttgatagaccagtctgaagagggcttgatagcaacgggagtgagaattagtgagctgcccttgaaagactgtgctcaaggtgtgaaaaagaagaaatctgagggcagttccattggtgagtctacacgaattcgctgtgatgattgtggcttcttagcagatggactgagtggactgaatgttcacatagccatgaagcatcctacaaaagagaagcacttccattgtttactctgtggaaagtcgttctataccgaaagcaaccttcaccagcatctggctagtgccggccacatgagaaatgagcaggccagtgtggaggagcttccggagggaggggccacctttaaatgtgtcaagtgcacagagccctttgattctgaacagaatttatttctacatattaaaggacagcatgaggaattgctgcgggaggtgaataagtatatagtggaagacactgagcaaatcaaccgcgagagggaggaaaaccagggaaacgtctgcaagtattgtgggaagatgtgtcgaagcagcaactcgatggccttcctggcacacattcgcactcacacaggatcaaaaccattcaagtgcaagatatgccattttgcaacagctcagcttggagatgccagaaaccatgtgaaaaggcaccttgggatgagggaatacaagtgtcatgtctgtggggttgcttttgtaatgaagaagcacttaaatactcatctactaggcaagcatggagttggcaccccaaaagaaaggaaatttacatgccacttatgtgatagaagtttcacagagaagtgggccctgaacaaccacatgaaactccacacgggagaaaagccgtttaaatgtacctggcccacgtgccattactcattcctcacagcctccgcaatgaaagaccactacaggacgcacacaggcgagaagtcgtttctgtgtgacctctgcggctttgccggcgggacccgccacgccctcaccaagcatcgcagacagcacacaggagaaaaacctttcaagtgcgatgagtgtaactttgcctccacaactcagtcccatttgactcggcataaacgtgtccacactggagaaaagccctacagatgcccctggtgtgactacaggtcaaactgtgctgaaaatatccgcaaacacattctgcatactggcaaacatgaaggagtcaagatgtacaactgtcccaagtgtgactacgggaccaacgtcccggtggagttccggaaccatttgaaggaacagcatcctgacatcgaaaacccggacctcgcttacctgcatgctggcattgtttccaagtcgtacgagtgccgtctaaagggacaaggagccaccttcgtggagacagacagccccttcaccgcggcggccttggcagaagagcccctcgtcaaggagaagcccctcagaagcagcaggaggccagcgccgccccctgagcaggtgcagcaggtcatcatcttccagggctacgacggggagtttgccctggacccctcggtggaggagacggccgccgccacgctgcagacgctggccatggccggccaggtggcccgggtggtgcatatcacggaggatggccaggtcatcgccacgagtcagagcggggcacatgtaggcagcgtggtgcccggacccatcctccccgagcagctggctgatggagccacccaggtggtcgtcgtggggggctccatggaaggccacggcatggatgagtccctcagtccaggtggcgctgtgatacaacaggtgaccaagcaggagattttaaacctctcggaggctggagtcgctccccccgaggcatcctcagccctggatgcattgctctgtgcggtcactgaattaggggaggtggagggcagggctgggctcgaggagcaaggcaggcccggcgccaaagacgtgctgatccagctgcccgggcaggaggtctcccatgtggctgccgaccccgaggcccccgagatccagatgttcccacaggcccaggagagcccggccgccgtggaggtgctcacccaggtggtccatccctcagcagccatggcctctcaggagcgggcacaggtggccttcaagaagatggtccagggcgtcctccagtttgctgtgtgtgacacggccgcggccggccagttggtcaaggacggtgtcacccaggtggtggtgagcgaagagggtgccgtccacatggtcgccggggagggtgcccagatcatcatgcaggaggcgcagggcgagcacatggatctggtggagtccgacggggagatctcgcagatcatcgtgacagaggagctggtccaggccatggtgcaggagtccagtggcggcttctccgagggcaccacgcactacatcctgacagagctgcccccaggggtgcaggacgagccgggcctgtactcccacaccgtgctggagactgcggactcgcaggaactcctgcaggccggggccacgctaggcacagaggccggggccccaagcagggcagagcagctggccagcgtggtcatctacacccaggagggctcctcggccgcggcggcaattcagagccaaagagaaagcagcgaactccaggaagcatgagacgcgcggcacctttactcagcacagggcaggtgtgggaaggtccagcttcggtgggggaccgtgttccctgagcttcatctgaaaccttcaaaaccatgaggacaaggctcccgtgagctctgagcatgccctcccagcgagagtcacactggccaccagccaggcgcccacagagggtaccgtgggctgggcctcggggagcaggctgccaagtgcaggggagggccgggcgcaggccacacagggagctccggtccactgggggcccttcgatcagtggcctcccgcttcgtcctggccgctgtgctgaagagaagccaagtgttgttggtgtttttctctcccaagtgttttcccatttcagttatcagaaggtcatggccgtggggaaagtggtgaagatacccctcgtggcttggggtgcacctgcttgtgcagtcagcatgtagctgcctttccatttcattctctactgggctaaaaattgcagctacaagtgttaccatcttgaagcagtccacttccattcaattttttttttttaattttagaataacagtgtccccataccaaaggaagcctgctagctcatttcatgtataaatttcccatcttcaaacagtttaggtgtatttgttgctctggtcacattctgcataaaagaaatcctcttaagcctatggttaagaaaagccttgaagtttatattcagttaaaatatatgtcggtggagatagccagtgcttctaattttgacttagtttcatacagtaaagcctaaatgtgaaacgcacacgctggaagatattgttcctatcaatattttgctttttataacaagggtttgttcatattgatgccatttttgcaggatttcttcgtgatttctgtccatatgaaaatgctgacattaaacattaacacatggagaccgtgccctgtggccctgccgtggctgccagcatggtctgtgtttccttgtggattcacctgtggccctgctgtggccaccagcatggtctgtgtcctcgtggattcactgcagctgtcggatgcgagtttctgtcataatcatttgtttcctgatacaattgttcttattcttttccaaaactgtaaaataatctcctccctcaaatgcaaaggttgtttttgttctgtttctgttttctttgaaataaaattataacgttaaaagatcaaaatggcatgtta

SEQ ID NO: 43991 - DNA, 3222 bp, Homo sapiens
atgtattgaaagggtatgtataggtgcaaatgataaaaaagaagagtttgatgtttccggaaatggaaggattgaaggccatataggtgtgcaattacaagagcattcctatcttgagaagggcatgctggcgtctgaggaactgtcacagtctggtggtagcaccaaagatgatgaattagcttcaaccactactccaaagagagggagacctaaaggtaacatctcacggacgtgttcacactgtggccttttggcctctagtattacaaacttgactgttcacattagacgaaaacacagtcaccagtatagttatttatgcaaagtgtgtaagtattacactgtaactaagggagatatggaacgtcattgtgccaccaagaaacataaaggacgggtagaaatagaagcaagtggaaaacacagttcagatatcattgttggccctgaagggggtagccttgaagctggtaaaaagaatgctggctcagcagtgaccatgtcagatgaacatgctaacaaaccagctgagtcacccacctccgttttagagaagccagatcgtggaaactcaattgaagctgaagttgaaaatgtatttcattctctagatggagaagttaacagccatcttcttgatgaaaaggagcaaatatcttcagagccagaggacttcgcccagccgggggatgtgtactcccagagagatgttacaggcacaggtgagaataagtgtttgcactgtgagtttagtgctcactcctctgcttctctagagctgcatgtaaaacggaaacatacaaaagagtttgagttttattgcatggcatgcgattactacgcggtgactcgtcgcgagatgaccaggcatgcagcaacagagaagcacaaaatgaaaaggcagtcttatctcaactctgctaatgtagaagctggttctgcagacatgtccaaaaacatcattatgcctgaagaagagcatcaacaaaattctgaggaatttcaaataatttcaggtcaaccatctgatactcttaaatctagaaatgctgcagattgctctattttaaatgagaatactaatttagatatgtctaaagtgctctgcgctgctgactctgtagaagttgagactgaagaagaatctaatttcaatgaagaccattccttttgtgagactttccaacaggctcctgtcaaggataaagttaggaaacctgaggagatgatgtcacttactatgtcctcaaactatggctccccaagcagatttcaaaatgaaaattcaggaagctctgccttaaattgtgagacagcaaagaaaaaccatgagatatcgaatgatgcaggtgagctgcgtgtccattgtgagggtgaaggaggaaacgcaggagacggtggaggtgttgtcccccacagacacctgtgccctgtgacgctcgatggggagcgctcggctgaaagccctgtgctcgttgtgacaagaataaccagagaacagggaaatctggagagcgggggtcagaacagagttgcacgtgggcatggtttggaagacttgaaaggtgtccaagaagatcccgttctggggaataaggaaattctgatgaattcacaacatgaaacagaatttattttggaggaggatggcccagcttctgatagcacagttgaaagtagtgatgtctatgaaactataattagtattgatgataaagggcaggccatgtacagttttggtcgatttgactcctccataataagaataaagaaccctgaagatggtgagttgatagaccagtctgaagagggcttgatagcaacgggagtgagaattagtgagctgcccttgaaagactgtgctcaaggtgtgaaaaagaagaaatctgagggcagttccattggtgagtctacacgaattcgctgtgatgattgtggcttcttagcagatggactgagtggactgaatgttcacatagccatgaagcatcctacaaaagagaagcacttccattgtttactctgtggaaagtcgttctataccgaaagcaaccttcaccagcatctggctagtgccggccacatgagaaatgagcaggccagtgtggaggagcttccggagggaggggccacctttaaatgtgtcaagtgcacagagccctttgattctgaacagaatttatttctacatattaaaggacagcatgaggaattgctgcgggaggtgaataagtatatagtggaagacactgagcaaatcaaccgcgagagggaggaaaaccagggaaacgtctgcaagtattgtgggaagatgtgtcgaagcagcaactcgatggccttcctggcacacattcgcactcacacaggatcaaaaccattcaagtgcaagatatgccattttgcaacagctcagcttggagatgccagaaaccatgtgaaaaggcaccttgggatgagggaatacaagtgtcatgtctgtggggttgcttttgtaatgaagaagcacttaaatactcatctactaggcaagcatggagttggcaccccaaaagaaagagtaaaggttgcatatcgaaagatcgggacgttgccaggaatacagaacaacaggaacgcgtcgagtgcctctgaagcccaaagtctttgtgagcacttttcataactgatgggacctgcagtgggaggattggctgaggacttattttggttgaagttagacatatttcattgtctttttttttttccttttatctgtgtacttctttgcatacttgaattcatttgtgtgatgtaaatcatcacacaaatgtaggctagtctagtgattttctggaaggaactgttattttaaaaattgagtactcagttttataaaattgtcatcatcaatgagttaaaaaaaaaaaaacccttaatgattcagggtttatttaaagctgactgtccaatcaaagtttttgtaagcatgccatgtgacaaatgcctggcatattcagtaaggaacatattaattattctaattaacacatgacttcagagaagtctttcgttaatcagcacatggatcttggttatttgtacccttttgggaaaatttcacactcagatgcaaaaataccaggctaaatacattgctttgtttgtatgtggagaggatattcatcacaatggtactatacatctaagaaaacagaaagtaattaaaatgctgattactat

SEQ ID NO: 43992 - DNA, 4305 bp, Homo sapiens
atgtattgaaagggtatgtataggtgcaaatgataaaaaagaagagtttgatgtttccggaaatggaaggattgaaggccatataggtgtgcaattacaagagcattcctatcttgagaagggcatgctggcgtctgaggaactgtcacagtctggtggtagcaccaaagatgatgaattagcttcaaccactactccaaagagagggagacctaaaggtaacatctcacggacgtgttcacactgtggccttttggcctctagtattacaaacttgactgttcacattagacgaaaacacagtcaccagtatagttatttatgcaaagtgtgtaagtattacactgtaactaagggagatatggaacgtcattgtgccaccaagaaacataaaggacgggtagaaatagaagcaagtggaaaacacagttcagatatcattgttggccctgaagggggtagccttgaagctggtaaaaagaatgctggctcagcagtgaccatgtcagatgaacatgctaacaaaccagctgagtcacccacctccgttttagagaagccagatcgtggaaactcaattgaagctgaagttgaaaatgtatttcattctctagatggagaagttaacagccatcttcttgatgaaaaggagcaaatatcttcagagccagaggacttcgcccagccgggggatgtgtactcccagagagatgttacaggcacaggtgagaataagtgtttgcactgtgagtttagtgctcactcctctgcttctctagagctgcatgtaaaacggaaacatacaaaagagtttgagttttattgcatggcatgcgattactacgcggtgactcgtcgcgagatgaccaggcatgcagcaacagagaagcacaaaatgaaaaggcagtcttatctcaactctgctaatgtagaagctggttctgcagacatgtccaaaaacatcattatgcctgaagaagagcatcaacaaaattctgaggaatttcaaataatttcaggtcaaccatctgatactcttaaatctagaaatgctgcagattgctctattttaaatgagaatactaatttagatatgtctaaagtgctctgcgctgctgactctgtagaagttgagactgaagaagaatctaatttcaatgaagaccattccttttgtgagactttccaacaggctcctgtcaaggataaagttaggaaacctgaggagatgatgtcacttactatgtcctcaaactatggctccccaagcagatttcaaaatgaaaattcaggaagctctgccttaaattgtgagacagcaaagaaaaaccatgagatatcgaatgatgcaggtgagctgcgtgtccattgtgagggtgaaggaggaaacgcaggagacggtggaggtgttgtcccccacagacacctgtgccctgtgacgctcgatggggagcgctcggctgaaagccctgtgctcgttgtgacaagaataaccagagaacagggaaatctggagagcgggggtcagaacagagttgcacgtgggcatggtttggaagacttgaaaggtgtccaagaagatcccgttctggggaataaggaaattctgatgaattcacaacatgaaacagaatttattttggaggaggatggcccagcttctgatagcacagttgaaagtagtgatgtctatgaaactataattagtattgatgataaagggcaggccatgtacagttttggtcgatttgactcctccataataagaataaagaaccctgaagatggtgagttgatagaccagtctgaagagggcttgatagcaacgggagtgagaattagtgagctgcccttgaaagactgtgctcaaggtgtgaaaaagaagaaatctgagggcagttccattggtgagtctacacgaattcgctgtgatgattgtggcttcttagcagatggactgagtggactgaatgttcacatagccatgaagcatcctacaaaagagaagcacttccattgtttactctgtggaaagtcgttctataccgaaagcaaccttcaccagcatctggctagtgccggccacatgagaaatgagcaggccagtgtggaggagcttccggagggaggggccacctttaaatgtgtcaagtgcacagagccctttgattctgaacagaatttatttctacatattaaaggacagcatgaggaattgctgcgggaggtgaataagtatatagtggaagacactgagcaaatcaaccgcgagagggaggaaaaccagggaaacgtctgcaagtattgtgggaagatgtgtcgaagcagcaactcgatggccttcctggcacacattcgcactcacacaggatcaaaaccattcaagtgcaagatatgccattttgcaacagctcagcttggagatgccagaaaccatgtgaaaaggcaccttgggatgagggaatacaagtgtcatgtctgtggggttgcttttgtaatgaagaagcacttaaatactcatctactaggcaagcatggagttggcaccccaaaagaaaggaaatttacatgccacttatgtgatagaagtttcacagagaagtgggccctgaacaaccacatgaaactccacacgggagaaaagccgtttaaatgtacctggcccacgtgccattactcattcctcacagcctccgcaatgaaagaccactacaggacgcacacaggcgagaagtcgtttctgtgtgacctctgcggctttgccggcgggacccgccacgccctcaccaagcatcgcagacagcacacaggagaaaaacctttcaagtgcgatgagtgtaactttgcctccacaactcagtcccatttgactcggcataaacgtgtccacactggagaaaagccctacagatgcccctggtgtgactacaggtcaaactgtgctgaaaatatccgcaaacacattctgcatactggcaaacatgaaggagtcaagatgtacaactgtcccaagtgtgactacgggaccaacgtcccggtggagttccggaaccatttgaaggaacagcatcctgacatcgaaaacccggacctcgcttacctgcatgctggcattgtttccaagtcgtacgagtgccgtctaaagggacaaggagccaccttcgtggagacagacagccccttcaccgcggcggccttggcagaagagcccctcgtcaaggagaagcccctcagaagcagcaggaggccagcgccgccccctgagcaggtgcagcaggtcatcatcttccagggctacgacggggagtttgccctggacccctcggtggaggagacggccgccgccacgctgcagacgctggccatggccggccaggtggcccgggtggtgcatatcacggaggatggccaggtcatcgccacgagtcagagcggggcacatgtaggcagcgtggtgcccggacccatcctccccgagcagctggctgatggagccacccaggtggtcgtcgtggggggctccatggaaggccacggcatggatgagtccctcagtccaggtggcgctgtgatacaacaggtgaccaagcaggagattttaaacctctcggaggctggagtcgctccccccgaggcatcctcagccctggatgcattgctctgtgcggtcactgaattaggggaggtggagggcagggctgggctcgaggagcaaggcaggcccggcgccaaagacgtgctgatccagctgcccgggcaggaggtctcccatgtggctgccgaccccgaggcccccgagatccagatgttcccacaggcccaggagagcccggccgccgtggaggtgctcacccaggtggtccatccctcagcagccatggcctctcaggagcgggcacaggtggccttcaagaagatggtccagggcgtcctccagtttgctgtgtgtgacacggccgcggccggccagttggtcaaggacggtgtcacccaggtggtggtgagcgaagagggtgccgtccacatggtcgccggggagggtgcccagatcatcatgcaggaggcgcagggcgagcacatggatctggtggagtccgacggggagatctcgcagatcatcgtggattcactgcagctgtcggatgcgagtttctgtcataatcatttgtttcctgatacaattgttcttattcttttccaaaactgtaaaataatctcctccctcaaatgcaaaggttgtttttgttctgtttctgttttctttgaaataaaattataacgttaaaagatcaaaatggcatgtta

SEQ ID NO: 43993 - DNA, 2270 bp, Homo sapiens
caacatccataaatatactcccgcttataaagatcataaacatctagcctctgccttcagaagttacaagatgatcaattcaacctccacacagcctccagatgaatcctgctctcagaacctcctgatcactcagcagatcattcctgtgctgtactgtatggtcttcattgcaggaatcctactcaatggagtgtcaggatggatattcttttacgtgcccagctctaagagtttcatcatctatctcaagaacattgttattgctgactttgtgatgagcctgacttttcctttcaagatccttggtgactcaggccttggtccctggcagctgaacgtgtttgtgtgcagggtctctgccgtgctcttctacgtcaacatgtacgtcagcattgtgttctttgggctcatcagctttgacagatattataaaattgtaaagcctctttggacttctttcatccagtcagtgagttacagcaaacttctgtcagtgatagtatggatgctcatgctcctccttgctgttccaaatattattctcaccaaccagagtgttagggaggttacacaaataaaatgtatagaactgaaaagtgaactgggacggaagtggcacaaagcatcaaactacatcttcgtggccatcttctggattgtgtttcttttgttaatcgttttctatactgctatcacaaagaaaatctttaagtcccaccttaagtcaagtcggaattccacttcggtcaaaaagaaatctagccgcaacatattcagcatcgtgtttgtgttttttgtctgttttgtaccttaccatattgccagaatcccctacacaaagagtcagaccgaagctcattacagctgccagtcaaaagaaatcttgcggtatatgaaagaattcactctgctactatctgctgcaaatgtatgcttggaccctattatttatttctttctatgccagccgtttagggaaatcttatgtaagaaattgcacattccattaaaagctcagaatgacctagacatttccagaatcaaaagaggaaatacaacacttgaaagcacagatactttgtgagttcctaccctcttccaaagaaagaccacgtgtgcatgttgtcatcttcaattacataacagaaatcaataagatatgtgccctcatcataaatatcatctctagcactgccatccaatttagttcaataaaattcaaatataagtttccatgcttttttgtaacatcaaagaaaacatacccatcagtaatttctctaatactgacctttctattctctattaataaaaaattaatacatacaattattcaattctattatattaaaataagttaaagtttataaccactagtctggtcagttaatgtagaaatttaaatagtaaataaaacacaacataatcaaagacaactcactcaggcatcttctttctctaaataccagaatctagtatgtaattgttttcaacactgtccttaaagactaacttgaaagcaggcacagtttgatgaagggctagagagctgtttgcaataaaaagtcaggtttttttcctgatttgaagaagcaggaaaagctgacacccagacaatcacttaagaaaccccttattgatgtatttcatggcactgcaaaggaagaggaatattaattgtatacttagcaagaaaattttttttttctgatagcactttgaggatattagatacatgctaaatatgttttctacaaagacttacgtcatttaatgagcctggggttctggtgttagaatatttttaagtaggctttactgagagaaactaaatattggcatacgttatcagcaacttcccctgttcaatagtatgggaaaaataagatgactgggaaaaagacacacccacaccgtagaacatatattaatctactggcgaatgggaaaggagaccattttcttagaaagcaaataaacttgatttttttaaatctaaaatttacattaatgagtgcaaaataacacataaaatgaaaattcacacatcacatttttctggaaaacagacggattttacttctggagacatggcatacggttactgacttatgagctaccaaaactaaattctttctctgctattaactggctagaagacattcatctatttttcaaatgttctttcaaaacatttttataagtaatgtttgtatctatttcatgctttactgtctatatactaataaagaaatgttttaatactg

SEQ ID NO: 43994 - DNA, 806 bp, Homo sapiens
gggatgtggggaaaagtaggaggagaaataagaaagcaggactgtttttgcattactggaggaaaggaactagctcagaagtcagcctaacacccacagagattaaaacgtctcttccttcctctttgtttccacgtcccagtcttcaataaattctatctgacaacagcagcagagggacccactatcttgtggtttctgtcaagttcctgattttcatccgtagttgaagatgagcaagaactctgtaacagtgttaccttggagcctacaatgagaggtatttcaaaatgagtgaagcatgactctcacagatgaaggcctagacgcaggtaagaaaacagcttttccatgaaatgacttgcatgtatgtgaatggtgcatgggaacagaaaagatttctgagctgggcagcaacaaagctgaggaacactgaaccattgccactcacatttttctcagtaggttactttttgtttgacaactataattggtatattaatatatttccccatgctaatatggggatccaatactgaaatattatcatttatgatttaggatttccaatcgtggctgtcaaaatatatctgtgatgaagagatatcaaggaaaatgtttaaaaggtattcatccaggacaaacatttcaaaagctcgtaaatgtgtattaaaattgcttctcaaaactacaaaatcgattagcataatacttaggtcagtatgtctttgtttgcaattgcatatgtgtacagatatatagttgcatttacttgtacatacacttatataggtaaaagtttttat

SEQ ID NO: 43995 - DNA, 2664 bp, Homo sapiens
gggatgtggggaaaagtaggaggagaaataagaaagcaggactgtttttgcattactggaggaaaggaactagctcagaagtcagcctaacacccacagagattaaaacgtctcttccttcctctttgtttccacgtcccagtcttcaataaattctatctgacaacagcagcagagggacccactatcttgtggtttctgtcaagttcctgattttcatccgtagttgaagatgagcaagaactctgtaacagtgttaccttggagcctacaatgagaggtatttcaaaatgagtgaagcatgactctcacagatgaaggcctagacgcaggatctttaatgaaaaaacacttgggccacttcaagacgacaaacgctcactgggcaaaacaccttcactgaaaagagacctcatattatgcaaaaaaaatcttaaaaggcctctgccttcagaagttacaagatgatcaattcaacctccacacagcctccagatgaatcctgctctcagaacctcctgatcactcagcagatcattcctgtgctgtactgtatggtcttcattgcaggaatcctactcaatggagtgtcaggatggatattcttttacgtgcccagctctaagagtttcatcatctatctcaagaacattgttattgctgactttgtgatgagcctgacttttcctttcaagatccttggtgactcaggccttggtccctggcagctgaacgtgtttgtgtgcagggtctctgccgtgctcttctacgtcaacatgtacgtcagcattgtgttctttgggctcatcagctttgacagatattataaaattgtaaagcctctttggacttctttcatccagtcagtgagttacagcaaacttctgtcagtgatagtatggatgctcatgctcctccttgctgttccaaatattattctcaccaaccagagtgttagggaggttacacaaataaaatgtatagaactgaaaagtgaactgggacggaagtggcacaaagcatcaaactacatcttcgtggccatcttctggattgtgtttcttttgttaatcgttttctatactgctatcacaaagaaaatctttaagtcccaccttaagtcaagtcggaattccacttcggtcaaaaagaaatctagccgcaacatattcagcatcgtgtttgtgttttttgtctgttttgtaccttaccatattgccagaatcccctacacaaagagtcagaccgaagctcattacagctgccagtcaaaagaaatcttgcggtatatgaaagaattcactctgctactatctgctgcaaatgtatgcttggaccctattatttatttctttctatgccagccgtttagggaaatcttatgtaagaaattgcacattccattaaaagctcagaatgacctagacatttccagaatcaaaagaggaaatacaacacttgaaagcacagatactttgtgagttcctaccctcttccaaagaaagaccacgtgtgcatgttgtcatcttcaattacataacagaaatcaataagatatgtgccctcatcataaatatcatctctagcactgccatccaatttagttcaataaaattcaaatataagtttccatgcttttttgtaacatcaaagaaaacatacccatcagtaatttctctaatactgacctttctattctctattaataaaaaattaatacatacaattattcaattctattatattaaaataagttaaagtttataaccactagtctggtcagttaatgtagaaatttaaatagtaaataaaacacaacataatcaaagacaactcactcaggcatcttctttctctaaataccagaatctagtatgtaattgttttcaacactgtccttaaagactaacttgaaagcaggcacagtttgatgaagggctagagagctgtttgcaataaaaagtcaggtttttttcctgatttgaagaagcaggaaaagctgacacccagacaatcacttaagaaaccccttattgatgtatttcatggcactgcaaaggaagaggaatattaattgtatacttagcaagaaaattttttttttctgatagcactttgaggatattagatacatgctaaatatgttttctacaaagacttacgtcatttaatgagcctggggttctggtgttagaatatttttaagtaggctttactgagagaaactaaatattggcatacgttatcagcaacttcccctgttcaatagtatgggaaaaataagatgactgggaaaaagacacacccacaccgtagaacatatattaatctactggcgaatgggaaaggagaccattttcttagaaagcaaataaacttgatttttttaaatctaaaatttacattaatgagtgcaaaataacacataaaatgaaaattcacacatcacatttttctggaaaacagacggattttacttctggagacatggcatacggttactgacttatgagctaccaaaactaaattctttctctgctattaactggctagaagacattcatctatttttcaaatgttctttcaaaacatttttataagtaatgtttgtatctatttcatgctttactgtctatatactaataaagaaatgttttaatactg

SEQ ID NO: 43996 - DNA, 1041 bp, Homo sapiens
ctcccctccccccactcctctcagtgggggcccctccagtccctgagaattggtactacgaaaaggtgaactcctgggcagaatcttgcctagagcttgcggagtccagccaggcccctgctgaagggccccagaccaccggccacttctcccccgtccatctgaccagctgggcccctgcgcccacctggcctccacgttccctctcctctcacccacacccctggccatggctaactactatgaagtgctgggcgtgcaggccagcgcttccccggaggacatcaagaaagcctaccgcaagctggcccttcgttggcaccccgacaagaaccctgacaataaggaggaggcggagaagaagttcaagctggtgtctgaggcctatgaggttctgtctgactccaagaaacgctccctgtatgaccgtgctggctgtgacagctggcgggctggtggcggggccagcacgccctaccacagccccttcgacaccggctacaccttccgtaaccctgaggacatcttccgggagttttttggtggcctggaccctttctcctttgagttctgggacagcccattcaatagtgaccgtggtggccggggccatggcctgaggggggccttctcggcaggctttggagaatttccggccttcatggaggccttctcatccttcaacatgctgggctgcagcgggggcagccacaccaccttctcatccacctccttcgggggctccagttctggcagctcggggttcaagtcggtgatgtcatccaccgagatgatcaatggccacaaggtcaccaccaagcgcatcgtggagaacgggcaggagcgcgtggaggtggaggaagacgggcagctcaagtcggtgactgtgaacggcaaggagcagctcaaatggatggacagcaagtaggcgctggccaccccgccctgccttcccaccaccaccaccgtgcatggggcagcaaacacgtggggccgcagacatagcctgatggttaataaatgtgccaagtgagttcatgg

SEQ ID NO: 43997 - DNA, 461 bp, Homo sapiens
  misc_feature (1)..(1): n is a, c, g, or t
nccttgcggcaacgactctacgttattttccaccgctacagggatgtgttcccccaaggtttacctgatgagtacgcctttgtcacaaccttccggttcaggaaaacctctcggaaggaagactggtatatctggcaggtcatcgaccagtacagcatcccacagctttcagttcccatgaaggtaggacagctctccaccagcacacagtccggtgaggaaagagaaatctgaaattcaaagccatcaacaccatctgttggtttgagataaaagcaacactactatttgttctctgccaaatccaaatccccttgttctcaagtcatagacaaaccgtttctttctcctctcctagtaaaatgaactggatgaagatattactcacttttcagctgggagatactgactaaactttcactgggggctaaaataaaataaaagcatgctcaagcaaaaga

SEQ ID NO: 43998 - DNA, 1356 bp, Homo sapiens
ggtgtctttctccacacaggccatgctgctgtagaccctaacagcgtctcttcctggccaagagaagcctgtccccaagaacaggagagccatggccggcctccgagggaacgctgtggctggcctcctctggatgctgctgctgtggagtgggggcggcggctgccaggctcagcgggcaggttgcaaaagtgtccactacgatctggtcttcctcctggacacctcctccagcgtgggcaaggaggactttgagaaggtccggcagtgggtggccaacctggtggacaccttcgaggtgggccccgaccgcacccgtgtgggggtcgtgcgctacagcgaccggcccaccacggccttcgagttgggactctttggctcgcaggaggaggtcaaggcggctgcccggcgtctcgcctaccacgggggcaacaccaacacgggagacgcgctccgctacatcacggcccgcagcttctccccacacgccggcggccgccccagggaccgcgcctacaagcaggtggccatcctgctcaccgacggccgcagccaggacctggtgctggacgccgcggcggcagcccaccgcgctggcatccgcatctttgccgtgggcgtgggcgaggcactcaaggaggagctggaggagatcgcctcagagcccaagtccgcccacgtcttccacgtgtccgacttcaatgccatcgacaagatccggggcaagctgcggcgccgtctttgtgaaaatgtgctctgtcctagcgttcgtgtagaaggagatcgctttaagcacaccaatggaggaaccaaggaaatcacaggttttgacctgatggatttgttcagtgtgaaggaaatcttggggaagagagagaatggagctcagagttcctatgtacggatgggatccttccctgtggtgcaaagtactgaggatgtgttcccccaaggtttacctgatgagtacgcctttgtcacaaccttccggttcaggaaaacctctcggaaggaagactggtatatctggcaggtcatcgaccagtacagcatcccacagctttcagttcccatgaaggtaggacagctctccaccagcacacagtccggtgaggaaagagaaatctgaaattcaaagccatcaacaccatctgttggtttgagataaaagcaacactactatttgttctctgccaaatccaaatccccttgttctcaagtcatagacaaaccgtttctttctcctctcctagtaaaatgaactggatgaagatattactcacttttcagctgggagatactgactaaactttcactgggggctaaaataaaataaaagcatgctcaagcaaaaga

SEQ ID NO: 43999 - DNA, 1198 bp, Homo sapiens
ggtgtctttctccacacaggccatgctgctgtagaccctaacagcgtctcttcctggccaagagaagcctgtccccaagaacaggagagccatggccggcctccgagggaacgctgtggctggcctcctctggatgctgctgctgtggagtgggggcggcggctgccaggctcagcgggcaggttgcaaaagtgtccactacgatctggtcttcctcctggacacctcctccagcgtgggcaaggaggactttgagaaggtccggcagtgggtggccaacctggtggacaccttcgaggtgggccccgaccgcacccgtgtgggggtcgtgcgctacagcgaccggcccaccacggccttcgagttgggactctttggctcgcaggaggaggtcaaggcggctgcccggcgtctcgcctaccacgggggcaacaccaacacgggagacgcgctccgctacatcacggcccgcagcttctccccacacgccggcggccgccccagggaccgcgcctacaagcaggtggccatcctgctcaccgacggccgcagccaggacctggtgctggacgccgcggcggcagcccaccgcgctggcatccgcatctttgccgtgggcgtgggcgaggcactcaaggaggagctggaggagatcgcctcagagcccaagtccgcccacgtcttccacgtgtccgacttcaatgccatcgacaagatccggggcaagctgcggcgccgtctttgtgaaaatgtgctctgtcctagcgttcgtgtagaaggagatcgctttaagcacaccaatggaggaaccaaggaaatcacaggttttgacctgatggatttgttcagtgtgaaggaaatcttggggaagagagagaatggagctcagagttcctatgtacggatgggatccttccctgtggtgcaaagtactgaggatgtgttcccccaaggtttacctgatgagtacgcctttgtcacaaccttccggttcaggaaaacctctcggaaggaagactggtatatctggcaggtcatcgaccagtacagcatcccacaggtctccatccggctggatggtgaaaacaaggcagtcgagtacaacgctgtgggtgccatgaaagatgctgtcagggtggtcttccgaggttctcgggtcaatgacctctttgaccgggactggcacaagatggccctg

SEQ ID NO: 44000 - DNA, 465 bp, Homo sapiens
ggccctcggtgtccccgctgctactctggcacttggcttgcagcacggtatttttctagagagtttaatggttttgttttccctgcccagcctttgtggttgcccatcaatacctggtgcgagtggcatggagactccagccctgccatcttcctggagtcagagccttccctttccagggagctgagggtctttgttccaggctgccacgtggggactctgctattccaaagaggaggaggaagaaggctgataatatgcattttgcctttcactgccttttgggcaacagtcttggaatgaaaacactaaaaacagatgtaaaaactgagggtgggagatatacctaatgctagatgacacattagtgggtgcagcacaccagcatggcacatgtatacatatgtaactaacctgcacaatgtgcacatgtaccctaaaacttagagtataataaaaaaaaaa

SEQ ID NO: 44001 - DNA, 904 bp, Homo sapiens
  misc_feature (816)..(816): n is a, c, g, or t
gattcccgccctgcttttcgcccgccgttccgtggcgggaactgaggcgactgtggggacatcagtgatcgtaagtctcctgggcccgttattctcagattaggtgacggagctaagacttcgagaccatctcgtcctttttgtatcgcggaaacctgaggaacgagccggcggcggtgacctgcacgagaagccaggctaactgggtgaagtaccatgcaagcatttcttaaaggtacatccatcagtactaaacccccgctgaccaaggatcgaggagtagctgccagtgcgggaagtagcggagagaacaagaaagccaaacccgttccctgggtggaaaaatatcgcccaaaatgtgtggatgaagttgctttccaggaagaagtggttgcagtgctgaaaaaatctttagaaggagcagatcttcctaatctcttgttttacggaccacctggaactggaaaaacatccactattttggcagcagctagagaactctttgggcctgaacttttccgattaagagttcttgagttaaatgcatctgatgaacgtggaatacaagtagttcgagagaaagtgaaaaattttgctcaattaactgtgtcaggaagtcgctcagatgggaagccgtgtccgccttttaagatggtgattctggatgaagcagattctatgacctcagctgctcagggaggtttaagacgtaccatgggaaagggtcgaaaacacccgatctggcttatctgtactatgtcagtcgataattgaccctgactttaatgtcaaatcggttcagccctgagataaatnacaggggttaaatgcgaagaagcaaaggaggagaatttgtagggagagaaaaatttgctcgtcatggagggagaggacgggtgcagtt

SEQ ID NO: 44002 - DNA, 930 bp, Homo sapiens
  misc_feature (675)..(675): n is a, c, g, or t
gattcccgccctgcttttcgcccgccgttccgtggcgggaactgaggcgactgtggggacatcagtgatcggtgaagtaccatgcaagcatttcttaaaggtacatccatcagtactaaacccccgctgaccaaggatcgaggagtagctgccagtgcgggaagtagcggagagaacaagaaagccaaacccgttccctgggtggaaaaatatcgcccaaaatgtgtggatgaagttgctttccaggaagaagtggttgcagtgctgaaaaaatctttagaaggagcagatcttcctaatctcttgttttacggaccacctggaactggaaaaacatccactattttggcagcagctagagaactctttgggcctgaacttttccgattaagagttcttgagttaaatgcatctgatgaacgtggaatacaagtagttcgagagaaagtgaaaaattttgctcaattaactgtgtcaggaagtcgctcagatgggaagccgtgtccgccttttaagatggtgattctggatgaagcagattctatgacctcagctgctcaggcagctttaagacgtaccatggagaaggagtcgaaaaccacccgattctgtcttatctgtaactatgtcagtcgaataattgaacccctgacctctagatgttcaaaattccgnttcaagcctctgtcagataaaattccacagcagggattactagacattgccaagaaggaaaatgtcaaaattagtgatgagggaatagcttatctggttaaagtgtcagaaggagacttaagaaaagccattacatttcttcaaagcgctactccgattaaccagggtgggaaggggatccacgggagaaaggggattacagacattgcggggttatatacaggtgggagaaattgatggggtaattggtgcctg

SEQ ID NO: 44003 - DNA, 1016 bp, Homo sapiens
  misc_feature (761)..(761): n is a, c, g, or t
tcctttattatgtaacatctttgcacaaggctaagtgtattttcgggctgtactttctcataatggttccccaccaccacccccgctttcctatggtgctgattcgcaataaaagtttcaataaaagctttttttttctgtcttgcacctgaccagggtgaagtaccatgcaagcatttcttaaaggtacatccatcagtactaaacccccgctgaccaaggatcgaggagtagctgccagtgcgggaagtagcggagagaacaagaaagccaaacccgttccctgggtggaaaaatatcgcccaaaatgtgtggatgaagttgctttccaggaagaagtggttgcagtgctgaaaaaatctttagaaggagcagatcttcctaatctcttgttttacggaccacctggaactggaaaaacatccactattttggcagcagctagagaactctttgggcctgaacttttccgattaagagttcttgagttaaatgcatctgatgaacgtggaatacaagtagttcgagagaaagtgaaaaattttgctcaattaactgtgtcaggaagtcgctcagatgggaagccgtgtccgccttttaagatggtgattctggatgaagcagattctatgacctcagctgctcaggcagctttaagacgtaccatggagaaggagtcgaaaaccacccgattctgtcttatctgtaactatgtcagtcgaataattgaacccctgacctctagatgttcaaaattccgnttcaagcctctgtcagataaaattccacagcagggattactagacattgccaagaaggaaaatgtcaaaattagtgatgagggaatagcttatctggttaaagtgtcagaaggagacttaagaaaagccattacatttcttcaaagcgctactccgattaaccagggtgggaaggggatccacgggagaaaggggattacagacattgcggggttatatacaggtgggagaaattgatggggtaattggtgcctg

SEQ ID NO: 44004 - DNA, 783 bp, Homo sapiens
  misc_feature (675)..(675): n is a, c, g, or t
gattcccgccctgcttttcgcccgccgttccgtggcgggaactgaggcgactgtggggacatcagtgatcggtgaagtaccatgcaagcatttcttaaaggtacatccatcagtactaaacccccgctgaccaaggatcgaggagtagctgccagtgcgggaagtagcggagagaacaagaaagccaaacccgttccctgggtggaaaaatatcgcccaaaatgtgtggatgaagttgctttccaggaagaagtggttgcagtgctgaaaaaatctttagaaggagcagatcttcctaatctcttgttttacggaccacctggaactggaaaaacatccactattttggcagcagctagagaactctttgggcctgaacttttccgattaagagttcttgagttaaatgcatctgatgaacgtggaatacaagtagttcgagagaaagtgaaaaattttgctcaattaactgtgtcaggaagtcgctcagatgggaagccgtgtccgccttttaagatggtgattctggatgaagcagattctatgacctcagctgctcaggcagctttaagacgtaccatggagaaggagtcgaaaaccacccgattctgtcttatctgtaactatgtcagtcgaataattgaacccctgacctctagatgttcaaaattccgnttcaagcctctgtcagataaaattccacagcagggattactagacattgccacgccggccactgtccacttagcgagagggatcgtcctgtaagggtccggggctcag

SEQ ID NO: 44005 - DNA, 1128 bp, Homo sapiens
  misc_feature (873)..(873): n is a, c, g, or t
gattcccgccctgcttttcgcccgccgttccgtggcgggaactgaggcgactgtggggacatcagtgatcgtaagtctcctgggcccgttattctcagattaggtgacggagctaagacttcgagaccatctcgtcctttttgtatcgcggaaacctgaggaacgagccggcggcggtgacctgcacgagaagccaggctaactggtaacctgctggaggaactgcaagcccgcttcgccttccccactcctgcccttgatgccccttggtgaagtaccatgcaagcatttcttaaaggtacatccatcagtactaaacccccgctgaccaaggatcgaggagtagctgccagtgcgggaagtagcggagagaacaagaaagccaaacccgttccctgggtggaaaaatatcgcccaaaatgtgtggatgaagttgctttccaggaagaagtggttgcagtgctgaaaaaatctttagaaggagcagatcttcctaatctcttgttttacggaccacctggaactggaaaaacatccactattttggcagcagctagagaactctttgggcctgaacttttccgattaagagttcttgagttaaatgcatctgatgaacgtggaatacaagtagttcgagagaaagtgaaaaattttgctcaattaactgtgtcaggaagtcgctcagatgggaagccgtgtccgccttttaagatggtgattctggatgaagcagattctatgacctcagctgctcaggcagctttaagacgtaccatggagaaggagtcgaaaaccacccgattctgtcttatctgtaactatgtcagtcgaataattgaacccctgacctctagatgttcaaaattccgnttcaagcctctgtcagataaaattccacagcagggattactagacattgccaagaaggaaaatgtcaaaattagtgatgagggaatagcttatctggttaaagtgtcagaaggagacttaagaaaagccattacatttcttcaaagcgctactccgattaaccagggtgggaaggggatccacgggagaaaggggattacagacattgcggggttatatacaggtgggagaaattgatggggtaattggtgcctg

SEQ ID NO: 44006 - DNA, 323 bp, Homo sapiens
gtaataataaaattagtgccagtcatggtggctcatgcctgtaatcctaacactttgggatgctgaggcctggagtttgagaccagcctgggcaacatagtgatacccctatctttacaaagattaaaaaatagaaatataaaaagttagccaggcatggtggcacttgtctgtaatcccacttacttgggaggctgaggtgggaggattgtttgagctcaggaggtcaaggctgcggtaagccataattgtattccacccagggtgataaagcatgacgggagatcctgtctcaaaacaaaacaaaaccaaaaaaaggcgag

SEQ ID NO: 44007 - DNA, 565 bp, Homo sapiens
taccttgagaaggttaaagggaagtccaagaagattaaagttttgctgttgctatctagagctcttgaaagcttctgccacttgtgatccaagaacaggaatgcatgttatttgtgtttgggagcaataacacatctatttgagtctatttcaactcgaactagaggaaaacagaatccccaataatttcagtttgtgccttttacagtttttcctcatttattttatttagcgagtttgtgttacacctactcagtgttgtaaaactgccatttcaggacaaatcattttgagttaagaggttctagacttttatggaaaataaagagcactggctgcccgagacaagttccaaagtgaaaatgtaaatgtctcttgatttctccatcgcctcccaggctggattaggccccttctgtgccaagtgataactgtttcttgcctgtctctaactgcatgtttgtactttatctgccaggacaatgtgatctcctcgagggcagggtctgtctttcagatttctatatccacagattagaggttctcataataaatacatttaatg

SEQ ID NO: 44008 - DNA, 330 bp, Homo sapiens
  misc_feature (281)..(281): n is a, c, g, or t
  misc_feature (283)..(283): n is a, c, g, or t
gaggaggatttcttcaatctatatcaccttttatacagaaagctttaagtttagattagcattttccaaaatgtgttttcaagaacatttgttcaaaggtcaaataaatggaaggtaatgcagccccaggttcccccacactctcaccttagtagtcgcatgagtaattctgaccagttcctgcagtaaagaaattatagtttaagctggacatggtggcacttgcctgtagtctcagctacttgggaggtggaggtgggaggatcccttgagccccacanangtttttgagtccagcctgggcaacatagcaagactctctgtctctaa

SEQ ID NO: 44009 - DNA, 382 bp, Homo sapiens
tacttcgtagtatgtctcctcccagaagtaattatagtctggacttttgtgtaatccttgctttacttttcttcagaattgaattatctatatttatattcctaagtaatttttattttacttcatttttttagggtgtttttttgttttgtttttgtttttgaggcagagtctcgctctgtcacccaggctggagtgcagtggtgctatcacgactcaagtgacctcctgggctcaagcgacctttccatctcagcctcctaagtagctggaactacaggtgtgtgccaccatgccaggctattttttgtagtttttgtagagatggggtttcaccctgttgcccaggcttgtctcaaactcctggactcaagcaatccaa

SEQ ID NO: 44010 - DNA, 800 bp, Homo sapiens
ttctcccttgggaccagcagaggttcagcacggccaggcagagggtgtgccagggtggctgtgcccgttgcctggtaagaagtggctctaggcccaaggagcccaagggctccatctgccatccccgccctggaagaatccacagcccccatgtctgcccatgctgagctgctgcccaagtgtttgggatggcacagctggggcatgggagcggggtctccaaccttgagggcgtagagaagtgggaggacaggagggcaggccctgggctgagagagtggcctggcgcagcctcttggcactgacagtgtggggctgtgccagtttcttggcccaggaggtagtacaggggccctcccaaagttcagccctggaggagccccctggctggaggctgctcagagccttcaggccccagctctgcctccttcctcagctggactacagttctaggctctaggctggggtggtggacaatgtggccttggtagctgggcctctggtgggagggccagaaggtggggggctgcagggccacctcagatgcccatcctccacgagcttctgcctttcctgaaaatccctgtggaaggaagaactgaggccaagtctcggggccctgagcctcgggttcctcacctgtgaaatgggctggcccagcaggtacatggagaaaagggggtctgggttggggtccaacgagggtcagaggaaggggcccaaggagaagaccaggggcctcctcaggctatgccaggcagcaaggcccaggacaccctggcttcccaccctcccccagg

SEQ ID NO: 44011 - DNA, 388 bp, Homo sapiens
agctccctgtgaataacccacctcttggcacgtacctgccctacctcaccctgttaagggagctgctaagagaacacaccgaccacagccttccaaagcccggaccactcagcccagacagtccggccataataaccccaggagatcaggtactagtaaaagacctccaggcaagaggtctctccccccagtggaaaggcccctatacggtaattcttacaacaccgacggcagctaaacttataggccttccctcctggtaccatatttcccatcttaagaaggcacctacacaacatcaggccacttggactgtcacctccctttccccaaccaaactgaaactctctccatcaaataccgcatgaattctccatgtgacaggctc

SEQ ID NO: 44012 - DNA, 482 bp, Homo sapiens
tgtttttgtttcctagagtcttgtacagggctgggaatgtttgggtactcaatgatgtgtttttttaattgcaggaatatatataatataaaaattatcatttttccattttcaagtgtatagttcagtgacattaagtacattcgcattgttctgcaaccattgtcaccatccatccacagaactttttcatcttgcaaagctgaagctctatgcttattaaacagtaactccctctccccctccccctccccctctccctctccctctccgtctccctccggtctccctctccctctccccacggtctccctctgatgccgagccgaagctggactgtactgctgccatctcggctcactgcaacctccctgcctgattctcctgcctcagcctgcctagtgcctgctattgcaggcgcgcgccgccacacctgactggttttcgtatttttttggtggagtcggggtttcgctgtgttg

SEQ ID NO: 44013 - DNA, 329 bp, Homo sapiens
catgaagaaaataaagtgttcaacaaaggaataaaaaccatgaaaaagaaccaaacaaattctagtgctaaagaacacagtgaatgaactgaaaacttcaagagtgctccaattggagactcaattgagcagaggaaagaatcagagagcccaaagacaagtcatttgagattacgcagtttgaggaacaaaaagataaaataatgtagacagcctataagaattgtgggacataatcaagccaactaacatatgcattatggaagttcttcaaaaatgaaggggagataaggatgttcccaggcaaacaaaggctgtgggagttcatc

SEQ ID NO: 44014 - DNA, 322 bp, Homo sapiens
ttacaggcatgagccaccgcacttggcctggcctcttcttaaaaactctcctcctctggcttcagggatggacacatttgtccctacaccctgaacacgtttccatcaagaattacatatttcttgtgtacatcttcacatcacattaaaaaaaaaaaccctatcaaagttttctttctcatttgatcggttgataaacacgtatacacagagaacatttccacccacacttcacaagagttactgtgcgggccacaggcagagaacacaaagtgccattgagatgagccccgtagttgtgcagtctcactcataaactgac

SEQ ID NO: 44015 - DNA, 290 bp, Homo sapiens
gctgatgctatctgtaaaaaataataataataataatatagtctattttacatatcaggaaagtgaacatgtttcaatatagccatatatattgagaaggaacttaccaccccttcttccaatcgaggcatttcatttgttggttgaagcagatgagaactgtacagattgaaaatgatttgtttttttttttttttagaaaaaaacgaaaaccaattggtgcaactctccttgtaaccaaaggccctttctgccttctgtggtcatgtaggacctggcccttccttcct

SEQ ID NO: 44016 - DNA, 459 bp, Homo sapiens
gacacattcaaaccatagcatttgatgtgctaattatatatattttaatatgctgggaattaaacacataattgttaacagaagaagaaaaccactcatgtaccatctaatatcatctggtatactcccagtggtatatgtgccaggctttgggaaacactattatttttcttgctttacagttgaggaaacggagagaaaataaggttaagcgacactccctgggtggattttagctagaatccaagcactctgacaccagagccaagcataaccactccagtcttgtagcgcttttctaagcggtcaaagtttgcataaaaaaagcagactgggccgggcacggtggctcacgcctgtaatccgagcactttgggagaccgagacggatggatcacgaggtcaggagatcgagaccatcctggctaacacggtgaaaccctgtctctactaaaaata

SEQ ID NO: 44017 - DNA, 481 bp, Homo sapiens
gctatcttaaccttaattttcaagaaagttctcagtttcttattttttaaaaaatcattccattcttcctcgttggtgcagtattgtcttttgttaatgacagttgtctttttgaaattttcttacattctgtgtattgtttctcagaactgcttctcccaatcatcctcttctttcctatcccacttctctttttaaagaaagaggtgggagggagggaggcagaggagagagtggaagggaggagggtaggggaagctagatttaagtatacgctttctgagtacctgccctccctcgtcttttcaggcatatagactgagctacaaaaaccaaaatgttaattcatttaataaatatctcttttagccctattatgtgctaggcatacttctgggcactggggttaaaatcgtgaatattacaggcgcaatcactgccctctaggtatggggtaaattgcagatgattgaagaaaaaa

SEQ ID NO: 44018 - DNA, 284 bp, Homo sapiens
gagatcgtgccactgcactccagagcctgggcgacagagcgagactccatctcacaagaaaaaaaaaaaaaaggtcatgaggaggtaaagtagtacaatggttgagagttaaaacactggcatcagatagcttggttcaaatccaggcttttcttgttcctagattttcggtcttgagtttacgtcaaattctctaagcctgtttcctcatctctaaaatggggtttatgaggttagattatttcctacaatggctgtgaggaataaacgagttagttcataca

SEQ ID NO: 44019 - DNA, 1083 bp, Homo sapiens
agctcagcttagagaacaggaagtgggagccacataccccgagctggcggcttgagcctgtggtatctaggctcacctcactgcggttggtggaggtgatggaggttgcagcttggccagcatggtagaaaggtggcagggtagactctagattctagagggcaacctctgtttgctcatgctggagcgtggcaggtgcacaatgtttccttgggaatcctcagcagggcacgtctggcttttaccacccagttgcttcgagccaggagatggaggagtcatctgttgcacgctggaggctggagcctgcagatggcatggttctgtggctcacctcgctgcagttggtggcagagacagagactgcagcttgaccagagtggtggagtgagtattgtcatctgcatgagcaaatctggttcatcacatctttgcaacaggaaaaggaagggaggatcatgtgtataatgttttaaggccaagattcacaacaagaacaaagtctttattaacttttgccttcaagaacctgcagtgttgagcccttttttatttctggttggagtgcagtggcatgatcttgactcacagcaacctccacctcccgggttcaagccattctcttccctcagcctcctcagtagctggattacagatatgtatctcaagagcactccacaacaaagattctgcctgcaatcctccacttcaaggtctgttccaggaaacctgtgtaacacagttatgcatagagtggtcttaggaagctgactctaacatgaaaatttagagttggatcttttgctgacatattgaatattcataagagcatatgatacatttgtctatcataaacatgtcatttcaaaaaaccctcaaagttgccttgtagaacataattttaaaactagtgtgtaggaatatttcatatcagttattcagtcttcttaatatctgaaccgaaattaatcttccattctgcttttatttataaataatgatttattgtcagattcaataatttatattttcatttattctaaggtaggaaataccagcataaaaataaattatttgaaacaa

SEQ ID NO: 44020 - DNA, 484 bp, Homo sapiens
  misc_feature (56)..(56): n is a, c, g, or t
ccccactccctaccctccccaaaaaaaaaagcaatctcgagtaatgcctgctcaanatatgtatctcaagagcactccacaacaaagattctgcctgcaatcctccacttcaaggtctgttccaggaaacctgtgtaacacagttatgcatagagtggtcttaggaagctgactctaacatgaaaatttagagttggatcttttgctgacatattgaatattcataagagcatatgatacatttgtctatcataaacatgtcatttcaaaaaaccctcaaagttgccttgtagaacataattttaaaactagtgtgtaggaatatttcatatcagttattcagtcttcttaatatctgaaccgaaattaatcttccattctgcttttatttataaataatgatttattgtcagattcaataatttatattttcatttattctaaggtaggaaataccagcataaaaataaattatttgaaacaa

SEQ ID NO: 44021 - DNA, 1103 bp, Homo sapiens
agctcagcttagagaacaggaagtgggagccacataccccgagctggcggcttgagcctgtggtatctaggctcacctcactgcggttggtggaggtgatggaggttgcagcttggccagcatggtagaaaggtggcagggtagactctagattctagagggcaacctctgtttgctcatgctggagcgtggcaggtgcacaatgtttccttgggaatcctcagcagggcacgtctggcttttaccacccagttgcttcgagccaggagatggaggagtcatctgttgcacgctggaggctggagcctgcagatggcatggttctgtggctcacctcgctgcagttggtggcagagacagagactgcagcttgaccagagtggtggagtgagtattgtcatctgcatgagcaaatctggttcatcacatctttgcaacaggaaaaggaagggaggatcatgtgtataatgttttaaggccaagattcacaacaagaacaaagtctttattaacttttgccttcaagaacctgcagtgttgagcccttttttatttctggttggagtgcagtggcatgatcttgactcacagcaacctccacctcccgggttcaagccattctcttccctcagcctcctcagtagctggattacaggtacctcccaccacacccagatatgtatctcaagagcactccacaacaaagattctgcctgcaatcctccacttcaaggtctgttccaggaaacctgtgtaacacagttatgcatagagtggtcttaggaagctgactctaacatgaaaatttagagttggatcttttgctgacatattgaatattcataagagcatatgatacatttgtctatcataaacatgtcatttcaaaaaaccctcaaagttgccttgtagaacataattttaaaactagtgtgtaggaatatttcatatcagttattcagtcttcttaatatctgaaccgaaattaatcttccattctgcttttatttataaataatgatttattgtcagattcaataatttatattttcatttattctaaggtaggaaataccagcataaaaataaattatttgaaacaa

SEQ ID NO: 44022 - DNA, 478 bp, Homo sapiens
agctctctgcatcacgagatgattattcaattttaggatgacaaggtggttagaaagattttccttagattgagctttgatcgaccttcctttgtctttcacccactggtctgagtccagccctctggagtctcattatacaagttaatccttaataccccttctagttctgcctagaggaggacacaagaaggagggaagcaagaatgaagccacattccaagccacccaagctttcttacatcactctgtctacacataagctgcaggttgtcacatttgacaaattgttttaaaatcttctcttttcctaattcctgccaactcttcctcaccctcacccacagaaacttctctaagaatgacccaggaaggggggagagtcatagaaccccacccctgaggacttttgcagtttaaatagcaatcttgagtagttttcaagtttttattttttataattcttcagaattccttt

SEQ ID NO: 44023 - DNA, 375 bp, Homo sapiens
cccatagtccccatccccaaccactacggggaggtattgggtggcagatctgaggaagctagattatcccgggcaggcacatgggtgtggggagcagagaagaaaatggaaggattctacttctgttcaccctaccctagagtacactctaccctcaccctctagaagccccagatcacagacacccaccctctgtctcaaatcccagctacgtagactttcactccagtttaaaactttaggatctgccaccaccaccagaaagaaaaatatcaatagaaacatacattttttctgcataatttagaagcgtctatgtgtcttctgtcttcctctcaactctacttccttgccaaagagaaatatagcagccct

SEQ ID NO: 44024 - DNA, 508 bp, Homo sapiens
  misc_feature (58)..(58): n is a, c, g, or t
  misc_feature (67)..(67): n is a, c, g, or t
  misc_feature (94)..(94): n is a, c, g, or t
  misc_feature (125)..(125): n is a, c, g, or t
  misc_feature (138)..(138): n is a, c, g, or t
ctaaagaccccctaaatgccccagcctaattaaagtaaccccccggtaaactgcaggnaattgccanggggccctccttcccaagtccccccanggatccacctgtcccccaagtattccccctngccagaagccccngcccctgaccttcagaagaaggaacttcaggcccaagaaggcctggtgaagttcctggaaaccccaaggaagcagagagctcctgcatgagcccttcccctagagagaaatcagtctctgtctctcttagactgaccccctcagtcacagcatggtgctgtgattttgccaagaggcaggggtgggtctgggggaagatggacggtgcttccaaaaggctaaattttagtctcaaaggtttctgattgcggacacataggtgatatctaacttgcttttgtttagccttgaatattttcaaatataatcttcaatatttctgttacaatattgtagcttgcttctgtttataaaaataatgcagcatttg

SEQ ID NO: 44025 - DNA, 219 bp, Homo sapiens
gggtgcccgagctcaggaggtaggaatgtgcctcccagccagacagtccaacgactgccaactaggggaggcctgtgctcctgggctggagggaggccggccgaggttgcagggtccaggcctggaccgggtgaggtgtgcagtcccggcccccttctttctcctgccctagggcaaagggtaggtcctcactgacccatggacagttccggggaagag

SEQ ID NO: 44026 - DNA, 644 bp, Homo sapiens
agtttgatagaaatatctataacacttggaaaattataaattatcgtacaaatataaagattgaaaaataaagattatgacattgcagaagaaacaatgctatttttgtgggtctttttaggtttaactcacttctttctacactccattctccaaaatgattgtgtccttatggcctggtattttctatcatatctagccatttgtatagaaagcaaaataaagatggtaagccaaatgacaaattaagtctatagataaataaagatatatcctattgcaatgcttttgtttttgaaatatcaagtccagcttcattttctggtttagttaaaatgctgtgggaagcttctctggactagaggacattgacctttggaaggcgttggctgctcctgaagaaagctcctggctgtttaaaggaatggggtggagtggaaatacacacagacaggaaacctcacaggtggggagaagagggccacgcccaaaagcaagtcagttcattcaccgatcagatctttaattctaagtaggtctccaaactcaattggccctctcagaaacatgtaggttactgaccttgtgtatcagatctgggttaatgtttatgtcatgcacaaagaaataactctgagtacttt

SEQ ID NO: 44027 - DNA, 410 bp, Homo sapiens
ttggggtctctttttaaatagtgttaacatatttttcatatgtgtagttttgtatgttttacaaccatatataaatcgagtcactcacaatgtatgtacaatatgttcttcagcaatttgcctctctcactcagtatcatgtatctggtctcatctatattgctctatgtatctttagttctttcatttttatttgacattccattgatgaatataccacaatttatatatctgttctgatgatgaacatttggggttttgttttgttttcctaaaaacagtgctgttactgaacattagtaggcagaagaaaaaacaaaacaccttgatctgtgtctcacactttatgcaaaaattgcccaaaatgaaaggactagtccctagaataagtacttgcaaaactcagcagt

SEQ ID NO: 44028 - DNA, 398 bp, Homo sapiens
ccttccaccatgattgtgaggtctccccagccatgtggaactgtaagtccattaaatctctttttcttcccagtcttgggtatgtctttatcagcagcgtgaaaaatgaactaatacaagatcataattagaattacagtaaaactaacttccttgaaaaattctcattaggtagcattcaaaaacatgtcagctcaataccattgacaacttatataatgggttcataagctggttcagaagtaaaggttatgcctgttttgccaagtcaaccccaggataactttgccactgctcgctttatacttcctgaaaatacattatctaagattgttgacttctcttttgaaaacactcaagagaaaatggtaagtattaaatggatgttattctgatgc

SEQ ID NO: 44029 - DNA, 350 bp, Homo sapiens
gagcccgagggaggcccctgagactgcaggtggggagggcagcttggctcagcctggctgtgtgtgggactggggacaagcaagtcacacctatgactcgggctctgctgttccccatctgtctggccgttgcgtctgtctccaaactcccgtttgcatctctccatctgcctccttcactttgtctctgtccgtctctgtctccatgtctgaccctttgggacacacttttaacaggcacggagacaccagccccggcccccaaccctgtgatctgtgccccccgtcccacagctctgagcgctttcaccagcttcaaaaggcacattaattactctaatgaggtcagg

SEQ ID NO: 44030 - DNA, 496 bp, Homo sapiens
atctgttatatagcatggtaaaaataaatttaaaataaacattttccataatactgtttttcatctcactcgttccatctcagtatttaattgcagaactaagtttttttttttttttaacatttaacaacgctcagcaagttgtgtaacttctagaatgggttgtgcctgctctgcaaaagagaaacagccagtgcctgaaaatagcaatcgcttcttccacaagggcttagtttctagccctagctctttagcaaattacctgtgaaaccctgacaaaaaaatctttctgagttacagggtcctctcttctgtaaagtggagataataatacctgctctgcctattgtaataagtctcgatggggaggtaatgaaaaatatgtataaggcaatattgaatgctgtttgtgaaaagttatacaaatactagttgataatattcttatatgatctctaagttcagaaagagagaaccatcaacttgttaaagagac

SEQ ID NO: 44031 - DNA, 461 bp, Homo sapiens
cctgggcatgagtatggggcttgggcaggtctagaaagacagctctgtaaaaatgcctaggtattgtggtgatagcggcgtggtatgtacgtgtgtgtgtgttttaacagtaaccgcaacaaaaccccactaaagagaaaacactcaagtttggaacggtgtgtaaaaccacgctcagcttggtaagttcccatggagtagaaggaacttgaggtcagccatccagtcatcattctccacttcatgaagcgcttgtgttctccctcccctctctcttctgccaacgcctgatctcctattctctaattctcctttccttttcctcatcccctttttgtttcccataacaacataaacagcagcagccgcttactgagggtctactatctgttctatattaatgcaatccttaaaataatctctcaaggtaagtaatattacacctgggaccaggttccttg

SEQ ID NO: 44032 - DNA, 408 bp, Homo sapiens
gattattcttaatacctactacagtgaaaatgctatgtaatagttgttatactctattgtttagggaataatgacaagaaaaaagtttgtacatgttcagtacagttgcaactatcgaaatttttttccaaatacttttgacctatagttagttggttgaatccatggatatggagagctgattgtattgagagaggatactgtttgtgggaatctttataatcccatcattcagagctcagacactagaggcagttaacactgggtttatggcttggcctctactaaggatgtgacttcaaatgcctctccaaatctcagtttcagcttttgtaaaatgtggaataatcatattatttacccagatgattttgtgaggattaaatgagataatgcctagaaaatgct

SEQ ID NO: 44033 - DNA, 440 bp, Homo sapiens
tccatctggagttaccccgtcggtcagcacgtactgctagctaacggatattgggaggtatccagtaagcaagtctgacaaaggaaagtggatgtttagaggggacgagggaagcatcagtaagtcatccccaataagacttcatcccatggtaagattttagaaatacaaggtgctcccagaagttcattgtaccagcccctgctttagttggggcatggggaggtggtgattagaaagatatccccaaagaaataccatttaacagatgccttgtgaatgaatgggtgtcagcccagtggagagaggtgtcagcccaacagagctctgggtggaaagcccagcaagggcagtggcccagcacatctttgtgctcatgaatttctaaatcatttcttttcccttgggaatactggtgctaagttgggtgcaaaagagga

SEQ ID NO: 44034 - DNA, 408 bp, Homo sapiens
tacgttttggaacagtgattcattaattaatgcatttaacaaatgtgtattgcttgccaactatgcgtcaggcactcttctatgcacattattgctataattgccatgatctctatcatcttcatcatacgtctatattagactgtgaatttctcaaaggcagagatggccaggcatggtggctcacacctgtaattccagcattttaggaggccaagacgagaggaccacctgccctgacctcccaaagtgctggaatcacaggcgtgagccactgtgcccagccctgagtgtttctacattatcattatcttcatggctttctgtaatttagtaatttctcttatttttgaagcattgttgggttccctgtggtcactagcaatgcagaccctggaacaactggtc

SEQ ID NO: 44035 - DNA, 333 bp, Homo sapiens
gatggagctcggagcagaaaaacttaaataatagcagtatgggtcaaataagtgggttccaagcttgacaccagaagacagatgtcattctgcaatagcaggagtagattttcctgttggccaaactggatggttgggttgtgatatggtcacagtgtttggacatgtgcaggtggctaccttagtttttccttgcatgttaattgtgtaacagaagtgctttgttcattgtaaagtagaggatctgttccatgctacaatatttttaatgcagttgcctgttgtggaacattttaagattatagaagaacaaaatacagtcaattgagcaat

SEQ ID NO: 44036 - DNA, 282 bp, Homo sapiens
actacagcaggtcatagttggttgatttgacatttcttctgaatactgtcatgcagtattttattatgaaagcaatttctaacccatgtttgattatttacagaagacattatcattactttagaagtttatacattgaagaatgcttatgaccaaaagaaaggttgaggatgaaagtttatgaaaatttatgatttaaatgtatttttttcctttaaaattatatttgtataaatggagatcatatcgtctaaaatataataaaattgaggctaatggtgt

SEQ ID NO: 44037 - DNA, 242 bp, Homo sapiens
ccttcaggataagaaatattaccagggataaggaaacgttctataattacaaagggctaaattcattgagaagacataaaaatcctaaatgtgtatatacacatagttacagaggctcaagatgcatgaagcaaaaatgaacagaactgaaaggggaaatagacaaatccacaattatagttggatatttcaacacttctcagaaactacattatatcaatgtagaaagaaaatcagtaaga

SEQ ID NO: 44038 - DNA, 485 bp, Homo sapiens
gtcattatctttagcttccttggataatagcgaacatcatttcaataaagagtacttaaaattttctacgctttgtttatggctaagaaaactcagtatgtctaatgttgtagttaagcgctgaagtttcttaaggaaatattttttaacgatggaaacaagataagaaataaagcatctacaagtttgtctaaaagttgtagtcttcagaatgttaaacttgactttttctggttaattttagggagatgacactttgcttgttcctattcatgcctatccagtcatgaactcactagactttccttcatttataaatctgtcaaatgttctacttggtgaaaggtgagttaccaaaatgtcaacaaaatgtataggatgtgaaaaactaagagatactcatacaaaaccttagacttttgtttttcctaatggaagttcatccttccacctgaaatagactggacttgtcattgtaaaaggca

SEQ ID NO: 44039 - DNA, 962 bp, Homo sapiens
atggcgacgctccgagcgggcgccggcgctggcgccggccgaatccggcccgggaaccacctccagggacatgacctttggctctaaaaagaagactccatttttcatgataaaatggcagtggtgaaaacccccagcagaggactaaagaatgctaaagaaccctttaataatgcatcaccccatctcttgaagaacctagtggaggagccgaaaaaaagaaaagaagtacctaatcacctcctagaatcaaaggtttatgcaaaacttgtgaataataaggtcatacaggcaagacctggcataatacattttggaggctatcaagtagaaaaacaacaccaacagattctgcatctggtcaatgtttccaatgaagacacacgtgttcatattttacccccgcaaaccaaatactttgagatcaattatgtaagaaaggaacaccacctggtccctggcttgtccctcacggtcaccgttacattttctccagatgagtggcgatactattatgactgcatccgtgttcactgtaagggagatgacactttgcttgttcctattcatgcctatccagtcatgaactcactagactttccttcatttataaatctgtcaaatgttctacttggtgaaagcaaaacttatgttattcctttgcagtgcagctgccctgtagattttgagttttatatcaccttgattcagtctcatcaagcctttgctattgagccaacatcaggaataattccggctaatgggaagatgactgtgactattaagtttacaccctttcagtatgggactgcacaaataaaaatgcagttatggatttcgcagttcaactctcaaccatacgaatgtgtcttcaccggaacatgctatcccaacatggccttaccattagaagagtttgaaaggttgaataccctttctaagaaagtaaacgttcctccaga

SEQ ID NO: 44040 - DNA, 473 bp, Homo sapiens
tgtacccagaaatctgaacgttcgacggtgatctccaaaaagcctcaggcgcatgtcaccacagtaagcaattaacatgtggtaggaacctgtgtggaccattgcttgaatgggcggccactgatccatcatgcgaagcctcatcttctctaccattcctttcatttctgtaccctttttttgtatccaaagtactgcctagaagaggatgagagatgaaagcctgactgtggaggtggatcattttccaaagtgtggggtagggaaggctgaatattcagatccctgttccctctggtgtgactaaggaaagactagacagcttgactttaggaatctcctagtacagcagctcccacttacccatggtttccctttctgtggtttcaactacctgtgtggtcaactgcagtccaaaaatatcaaaagaaaaattccagaaataaacaattcataagttttaaaaaaaaagc

SEQ ID NO: 44041 - DNA, 2014 bp, Homo sapiens
cggtcatatcccagattttaagttccttatcgaaagcagacaatagaacagggatttagcagctccccgagggctgacaccgtctgatgccaggctctccttgttggagggtccaactcataacgcttggtgtcatgtgagcctggaaggtcctgaaatttcttggattcccaaggaaagtcgtggctgcttagggccttagggtccaaagtggaggatttaaggagatgctgagcaatccccagagtctgctgagctttggtttccgagttcagggttttgtcactgactgtttcatcatcttattcttttgatgcactgggggtgtttgagagcaggcacttcaggaatgtggaggctgattcgatgtccccatgtgccatggggaccctggcaatgaccgctggcctgctctgtttcaggattcctactgcagcctctgttgggtgcttggagtgaccggtgtacctcaaggtttggaaggagacgccctttcattcttgtcctggctataggggcactgctgggcctctcgctcttgctgaatggccgggacattggcatcgccctggctgacgtgaccgggaaccacaagtggggcctgctgctgaccgtgtgcggtgtggtgctgatggactttagcgccgactcggcggacaaccccagccacgcctacatgatggacgtgtgcagccccgcagaccaggaccgaggcctgaacatccacgccctcctggcaggtctcggaggaggctttggatacgtggtcggcggaatccactgggataaaacgggcttcgggagggccctggggggacagctccgagtcatttacctcttcactgcggtcaccctgagcgtcaccaccgtcctgaccctggtcagcatccctgagaggccgctgcggccgccgagtgagaagcgggcagccatgaagagccccagcctcccgctgcccccgtccccacccgtcctgccagaggaaggccctggcgacagcctcccgtcgcacacggccaccaacttctccagccccatctcgccgcccagccccctcacgcccaagtacggcagcttcatcagcagggacagctccctgacgggcatcagcgagttcgcctcatcctttggcacggccaacatagacagcgtcctcattgactgcttcacgggcggccacgacagctacctggccatccctggcagcgtccccaggccgcccatcagcgtcagcttcccccgggcccccgacggcttctaccgccaggaccgtggacttctggagggcagagagggtgccctgacctccggctgtgacggggacattctgagggtgggctccttggacacctctaagccgaggtcatcagggattctgaagagacctcagaccttggccatcccggacgcagccggaggagggggtcccgaaaccagcaggagaaggaatgtgaccttcagtcagcaggtggccaatatcctgctcaacggcgtgaagtatgagagcgagctgacgggctccagcgagcgcgcggagcagcctctgtccgtggggcgcctctgctccaccatctgcaacatgcccaaggcgctacgcaccctctgcgtcaaccacttcctgggtgagctcccggccaagcctccccggtggctctcattcgaggggatgttgctcttctacacagattctggtctccctggtcctggggcccctgacctcggccgtgggcagtgccaacggggtgatgtacttctccagcctcgtgtccttcctgggctgcctgtactcctccctgtttgtcatttatgaaattcctcccagcgacgctgcagacgaggagcaccggcccctcctgctgaacgtctgacatcgcggagcctcgactccggacacgcgcctgcacctgggggtctggagcaggccgaccagtgaggaccaaagggccttgttggacagggggacaggctgcctactggaatgtaaatatgtgataaaataataaatgacagcggc

SEQ ID NO: 44042 - DNA, 1731 bp, Homo sapiens
ctgcttttcaacggctgcattctctttggcatcgagttcagctacgccatggagacggcgtacgtgaccccggtgctcctgcagatgggcctgcccgaccagctctacagcctggtgtggttcatcagccccatcctcggattcctactgcagcctctgttgggtgcttggagtgaccggtgtacctcaaggtttggaaggagacgccctttcattcttgtcctggctataggggcactgctgggcctctcgctcttgctgaatggccgggacattggcatcgccctggctgacgtgaccgggaaccacaagtggggcctgctgctgaccgtgtgcggtgtggtgctgatggactttagcgccgactcggcggacaaccccagccacgcctacatgatggacgtgtgcagccccgcagaccaggaccgaggcctgaacatccacgccctcctggcaggtctcggaggaggctttggatacgtggtcggcggaatccactgggataaaacgggcttcgggagggccctggggggacagctccgagtcatttacctcttcactgcggtcaccctgagcgtcaccaccgtcctgaccctggtcagcatccctgagaggccgctgcggccgccgagtgagaagcgggcagccatgaagagccccagcctcccgctgcccccgtccccacccgtcctgccagaggaaggccctggcgacagcctcccgtcgcacacggccaccaacttctccagccccatctcgccgcccagccccctcacgcccaagtacggcagcttcatcagcagggacagctccctgacgggcatcagcgagttcgcctcatcctttggcacggccaacatagacagcgtcctcattgactgcttcacgggcggccacgacagctacctggccatccctggcagcgtccccaggccgcccatcagcgtcagcttcccccgggcccccgacggcttctaccgccaggaccgtggacttctggagggcagagagggtgccctgacctccggctgtgacggggacattctgagggtgggctccttggacacctctaagccgaggtcatcagggattctgaagagacctcagaccttggccatcccggacgcagccggaggagggggtcccgaaaccagcaggagaaggaatgtgaccttcagtcagcaggtggccaatatcctgctcaacggcgtgaagtatgagagcgagctgacgggctccagcgagcgcgcggagcagcctctgtccgtggggcgcctctgctccaccatctgcaacatgcccaaggcgctacgcaccctctgcgtcaaccacttcctgggtgagctcccggccaagcctccccggtggctctcattcgaggggatgttgctcttctacacagattctggtctccctggtcctggggcccctgacctcggccgtgggcagtgccaacggggtgatgtacttctccagcctcgtgtccttcctgggctgcctgtactcctccctgtttgtcatttatgaaattcctcccagcgacgctgcagacgaggagcaccggcccctcctgctgaacgtctgacatcgcggagcctcgactccggacacgcgcctgcacctgggggtctggagcaggccgaccagtgaggaccaaagggccttgttggacagggggacaggctgcctactggaatgtaaatatgtgataaaataataaatgacagcggc

SEQ ID NO: 44043 - DNA, 383 bp, Homo sapiens
cacagcaacaggtggtagacaaccacggggcctgtgtgcattcctccgtttgcaaacccctggcccctggtattctgggatttacactacctcccccaggccctgactgacaagctaatcggtgtgctgggaagcgctgagctattgattccactgtaacagaacaccaccctgtcaatgaaactgcaatgaaatgcttcagcaacgaagaaagggaggcattcgactgttgagcaactggaagaaatttgcttgtaggtagtgcggcagaaatgaaaaagctctccggagcagggccttgaaaagccaggttattaaaaaagccacaaagctggagtctggctgagtggagaaaaacagttatggttcagttaggcgtatct

SEQ ID NO: 44044 - DNA, 960 bp, Homo sapiens
tgctcctgtgttgaatcaatatctagaatatgctcttgacagctctggagcaaaaagccaagtctctgacaaaagaatcagtactaattgggaaataaatcagagtttgctatagctaaaagggaaaaactcccacacatttatctgtcattttgattcgttctttcatcctatgtagtacattttcagggtctcaaagaagctcatctgtctatgaaggtgctcatggaagcatcttgttttacatatgatgaaaatggagagagcacttcttttgacaggaaacttcacttcttgttactgaaaaccgtcacaacagttcattatgtctggctttcagaggtttcctggagttaggagaacaatagacagttaaaatggcaatgtcaagagcattctggggttttataatgagtaccaagggaaattttttctctcgagtttgtaagaaaaaagtaggaggacctatttgggaagcctggggatatgtggaaatgaaaggcaatgctctatttttttaacggagtgttccttctaacctttgtaagctgaaaaaaatattataccatggtttccatgttcttgttattgagttgccagtgaagaagagaagtttctcttcagttgtccctctctgtaggttaaatcagcccctgaaaagacacatttgcagctttctgtatttttctttgattaaacatcagttagaattcttggatccagttttttaattcttgttgtatatgtacggtgcttctggggcttatgatttctaatttagcagcaggagttacttctcttttccctctacctccaaaaaaaaaagatgactcaagcattaggaatatgtttttgggcttattgtataattcaatgtgtatttggatttgcacaatttttaatcttgatttatgtagccctaatgtgatttctaatttttaataaagtttttgaggtact

SEQ ID NO: 44045 - DNA, 575 bp, Homo sapiens
ttacaaatgttaaatgctgtaaactctatacttttatagcatttttaagtttccaatctatgctacaatttcacttttatgtgtaccactttatgtagacatttacctgaatatttaacatattaaagacattcagagggtaccctgactcacacataacctttaagtaaagcatatctgcttattcatcctgtcgttgtctcctccaaagagaggcaacatttcagaaaataagtgggtttccatggtttctgtctctgagttacattcttagctttcaaacaatattgtggagtattttgccttgtgccctgattaataccttaggaggaaatgttcccaggggaagcctatattgaacgtctccttctgaatcactttgcttaaatagagtttcaatttgcctcccaaaagagccctgcgcttactgcgaccactgaaccatttactgcctgattgtaggcacaggtgcactgatttttcagtccaaatatccatgtgcacaaatttatacctggtttagaaatcttgtcctaacactttccttgctctcctctatccaatagcccacaccc

SEQ ID NO: 44046 - DNA, 228 bp, Homo sapiens
gttgaattgcagcagcaaaggaatgacttaaaggcagaatttatcattaaaagcagagtgtaaaatattggaaaattctcagcctggtcatgtaatagagaaggaaagagcatattcaggagaggaatccaagggtcaagctggagccacaggttgctaaagagtttagggtgacaaaaagggatctaggtactaatagtcaagacagtggggaaaaggccacaaagg

SEQ ID NO: 44047 - DNA, 532 bp, Homo sapiens
gcactcattgaaattcttattccttgatgagtcatgctttgcatgctgtttgaagtaagtacaacagacatgctcctagtgagaagtcagactcttacttagacttagcgaaagactctccctcctttcctgcctgccaattttgtgttgaaatattgactttggattgcaaatactatattgcggtgaacgaactttcaggcttattgtaaaacacagttcagaattttaggcacagaacggaaaggtcctgtggaggacctgctggccatgctttctgtgacagctattttttaacctaattttataagtgaaaaaacagaatgagagaatttaaattacctttttgatgccgtctacctggcaggtggttcgatctgctatttggacctgagttctgtatttaagtcctgtgttctttctgttaacactccggggactcctgactgccttttcagaactttatgtgttgcttcattgttgttagtaaagttaactgtatttctgtttaaagaactcttacaaaaaaaaa

SEQ ID NO: 44048 - DNA, 563 bp, Homo sapiens
accaactccaaatagactcatcatacaagccaaattttcggaaccaggatcttgtgttggatattaacaaagtgaagttactgcaggatgtacggaagcttttggtaagctatgatcatcgtttggattacttgtgctcaaaacacatgatcatggaaggagggaggacagtttactttggaatgaataccactgtaagtgatgaggattctcttccctgacaggtgtttgactgtttttttcaaaatataatgccagttctggccgggcatggcggctcatgcttgtaatcctagcactttggaagaccaaggcaggaggatcacttcaggccaggagttctagaccggcctgggcagcatagcaagaccccgtctctacagggggaaaaaaaaaaagttggccgatcatggtggcatgcgcctgtggtctcagctgcttggaaggctgaagcaataggatcacttgagcccgggagttcagggctgcagtgagctaagaccataccactgcactcccaacatgggcaacagagcaagaccttgtcccccaaaaaaaaaaaa

SEQ ID NO: 44049 - DNA, 290 bp, Homo sapiens
aaagaagaataaatgggacattacacaagatcaactgcaagaacaaaccagcaatcctgagaggaaccacagaccctctgaaagaagtggactgcttctgcaggacctgggagacaccccaaatactgttcaatgaagaatgtacagccatgtaggaactacaattgggggaaacaggaataatctaatggaaatagaccgagtcgcgatacctatcaagccccgtcagctcagcttcttcttggcctctctgtgcagcatttctttctcccaggtatggaataggaacc

SEQ ID NO: 44050 - DNA, 367 bp, Homo sapiens
aaagaagaataaatgggacattacacaagatcaactgcaagaacaaaccagcaatcctgagaggaaccacagaccctctgaaagaagtggactgcttctgcaggacctgggagacaccccaaatactctaaggaggagagaggcacaaggtatatctgcagaagtaaccatggatttaaaagtagctacagcatcaatttaaaggttcaatgaagaatgtacagccatgtaggaactacaattgggggaaacaggaataatctaatggaaatagaccgagtcgcgatacctatcaagccccgtcagctcagcttcttcttggcctctctgtgcagcatttctttctcccaggtatggaataggaacc

SEQ ID NO: 44051 - DNA, 410 bp, Homo sapiens
cagttgtataaaagaggaaaactgaggtttagaaagattcaatgacttgctcaaagtcaacagctaatgagagaggaactgagattcaaacccaggtcatctgactcttagttggtgcctctcttgagaatgaggataagagatgggatgaatgagagctggacaagtgatcaaggtattctgggtctaaactcttactccctttcattcattcatttattcactacttcaatgaatgcttattgagttcctataatgtgtcaggacctatgctaggcaccagacatacattagtgcctagatcagacaaggacactgccctcatgaaacttagagtcaaacagaaaacattacaatctgttatttcagatttgtttgggtgttcagaatagagtagaggttgtaggctg

SEQ ID NO: 44052 - DNA, 728 bp, Homo sapiens
ctaatttttgtatttttaggggacacagggtctcaccatgttggccaggctggtctcgaactgctggcctcaagtgatccacccgctttggcctcccagagtgctgggattacaggcgtgagccactgcacccagcctaattactttgaaaaatgggatcacaggccgggcgcggtggctaacgcttgaaatcccagcactttgggaggccgagatgggcggatcacctgaggtcaggaattcgagaccaacgtggccaacacggcaaaacctcgactccaccaaaaataaaaaaaattagccgggcctggcagcgcgtgcctgcagtcccagctactcagcaggctgaggttgggagatcacttgagcccagaaggtggaggttgcagtgagctgagaacccaccattgtactccagcctgcgtgtcagtgagattctgtctcaaaaaaaaaaagaaaagaaaaaaaatctaggctatgctccctagtatgggaaatctagtctagtcatttgacagaatcaggctttgcaggccatattgtctctgtcgtaactaccaactctgctggttaaaagggaagtagccacaaacaatatctgaatgatggattatggctgtgttccaatctttatttgcatagaccagcttttgattgcggccgaaatttggcttacttggccattcgcctttaggggggggattctcctggccggcgttacacgtcgg

SEQ ID NO: 44053 - DNA, 615 bp, Homo sapiens
  misc_feature (45)..(45): n is a, c, g, or t
gggttgggggtagagggtaggaaaagagggcaagatggatgactnaccaacttcgaggccagcctccgactgcctgttagggcagtagaacctaagagccggtccaaggcaacacaaaagacagtgaggctaggtctttcattgcagccaacgatcaagaaagcaactccatcaaatgacactgtctttttaaaaaaaatttttttttcgagactcggtctcaaaaaataataattaacaaaaaaaaaaaaatacaaaagttagttgcacatgttgccatatgctcgtggtcccagctactcagcaggctgaggttgggagatcacttgagcccagaaggtggaggttgcagtgagctgagaacccaccattgtactccagcctgcgtgtcagtgagattctgtctcaaaaaaaaaaagaaaagaaaaaaaatctaggctatgctccctagtatgggaaatctagtctagtcatttgacagaatcaggctttgcaggccatattgtctctgtcgtaactaccaactctgctggttaaaagggaagtagccacaaacaatatctgaatgatggattatggctgtgttccaataaaactttatttgcaaaaacagga

SEQ ID NO: 44054 - DNA, 652 bp, Homo sapiens
ctaatttttgtatttttaggggacacagggtctcaccatgttggccaggctggtctcgaactgctggcctcaagtgatccacccgctttggcctcccagagtgctgggattacaggcgtgagccactgcacccagcctaattactttgaaaaatgggatcacaggccgggcgcggtggctaacgcttgaaatcccagcactttgggaggccgagatgggcggatcacctgaggtcaggaattcgagaccaacgtggccaacacggcaaaacctcgactccaccaaaaataaaaaaaattagccgggcctggcagcgcgtgcctgcagtcccagctactcagcaggctgaggttgggagatcacttgagcccagaaggtggaggttgcagtgagctgagaacccaccattgtactccagcctgcgtgtcagtgagattctgtctcaaaaaaaaaaagaaaagaaaaaaaatctaggctatgctccctagtatgggaaatctagtctagtcatttgacagaatcaggctttgcaggccatattgtctctgtcgtaactaccaactctgctggttaaaagggaagtagccacaaacaatatctgaatgatggattatggctgtgttccaataaaactttatttgcaaaaacagga

SEQ ID NO: 44055 - DNA, 2454 bp, Homo sapiens
ctggcaccattctttaagaaagaagtacaagggaatattagatttttattgtgtggtttcacatcagtgtaattagaatataggaaatttgtttaaaataataggccttttcatttgacgagatttaaaaacacagattggctgtggtatctgggcataatttgatatagataatagtattttcctccatatcgaaaattgaggtaagttttataacctctttgatgcattttcctagtagagttaaaaatgttgaagtatagccaccaaaacattcatgttggttatccttttttttttccttaatgaaaatgtactactttggtggaaaaaagttaataatttcgttagttggtaggtgaataatgagtgatagagactgttctgacaccaattgtctgacaccaactgggtatcctgcaattcatttcaattctgacactaactacccagagttaacacaaactaccaggcacacaaagtgttcatccaccaggaagctccttgaactttgagtttgcagagttttattggccacatgattaacttccttctccagctcctctttaatctctgaacatctgggggtgtggctaaaagttccaaccctctaaccatatgcttggtctgtctggcatggccagctcgtcctttcaaactatgtgagggcctaccttgagtcacccccaagtataaactcagatatagtccaaaggggcttcttatgaataacaaagacacttccattaatcaggaaattccaagcctctctaagctctgtaccaggaacaggagacaaagactagatttattcttcattatatgacagatacatttttatattttgcctctggttttagtaaagtttttgttgtgaagaacacaaatgccagatcaaatgagggggctgtaattagcaaggctgcaagggattgtgagcagtaagggagatagggattttactggaaatccaccaaaggaactggtatgtagctatgcctctcagtaaggggaactagaaagctattaggaaatcaaggcatctggagaaactatgtgtgtgtgcccaccaacatgttcatgtttgcgctgcatttttgctttgtcatcctcttgcctcaggttgttttgctctcttgtttgactttctatgcccttctctaccctagggcttctacttagagtttctgcttccacaggactccttacagcttaagttctagtttatatgtggctatgcatattgaaaacttgggttctttttttggagacagggttgtacaggctgttgcacaggctgtattgcggtggtgtgatcatagctcactgcaaccttgaactcctgggttcaagtgatcctcctgcctcagcctcctaccaccccctgctaatttttgttattgttgttgttgttagagaatggggtctggctatgttgcccaggttggtcttgacctaagggcctcaagtgatcctcccacctcagcctcctaaagcactgtgaatttcaggcatgagcttgagttcttattaactgtcagcctgactggctctttcctagctaggctagtcagctcggctgaggagtcaagggaggacaggcttattactatggaaagcacttccaaaacattaaaatgtttctctttaaagagtgtttatcaatgctcaaacctgaaccagaaaaagaaaaaagaaaaaaaatggaaaagagtgcttaaaatattaaggatattaagcatgtcaatccttttcttattcctaataccaaaagaagaattcctaagataaaagattgataagtgtcatgacatgaaatttaattgagtttaacatatttaagtaaatatttgacttttgattttgtaagatcagccgggagaaaggacaagagagcaagacccaagttcaggcaagcttttattaaacccgccggctgctttatcacagacaaaggaggcagcagcagccagcttacagaatgaggggtttatattggggagggagtttgagggagttctttggtatggccgcatcccggggttgtttgctggtttattctgccacattatcaccttgtgacgtttatggtaccggagattgtaggtaaagtttgtttatgcttcccacgacctccctctgtgcggtccggatggtttgtaattggggtttgctttatagcagcgaggcctgataggtaaagtctgctggcttcactgtggcgcctagataagggcttagaaatgtaaaaaggcttggggcagcatggagaggagttgcagagtggggaggggcaggcagcaccaagaagcttcttgaggcagtttgtccctaacagatttattttcggaaaggaattctgaactctgagaccaaatcagtatatttgtgtatattttttcatatacttccaaagtcttttaattcttaattaacctgatatttaagtgaaaa

SEQ ID NO: 44056 - DNA, 778 bp, Homo sapiens
acctgccacttgactagggtgggcctcaggaccatccaatctgcccgctttggggactggtagcatcttcctggatcgctaaactgcagggaggggcttcccgtgtggatggttggatcagctcacagtcattcttcagggtggagagaggaggctgcagtcccagtgttccagctcaggaccaatgaggttgatttggtgcttgtctcctttctagaggaggcaaggctcttaggatacacccaaaggaccttatgttccggattaggttccgcaggctcctcagcagtgatcagtggtgtggccttctagggaagaccagtgggtaggtgtggaggaacagaatttaattcctcccaggcctttcagcaggccctttaccgttaagaaggaaaaacaaaactattcctttgtgccatggtgcagtagaagttagaagcctatttcatcctgagaggagcatgatgggaatatccctgaaagcagccagaggaagtcagcctttggcaggatgcatgaaccgactctggccccagcaagggcagggaaagtgtgctatgcggtgtgtgtgttcctgggctctgtgttggctacaggatctgcctagtcctctcttgggttgtaggaaacaccatgggatgattgtttttactaattgcagtggttgtgaccccacgattcctctcctcccatgagcacgctgtcttccggagacttctgtcacttctcaccattgctggttatcctccattttgcccagtaactccgctttcctctc

SEQ ID NO: 44057 - DNA, 1083 bp, Homo sapiens
gaggacctgcccttgagtctaggttctgccatccaggaactgtgggaccctagtctagttgcctaactgcctgtctaattcaaggtttcttcatctgtaatgagaatatcttgtgaacttgttatgagaattaaaggagataagtagttaaagctttttaaatagctgtcattatatagtaggttattgtatacatgatcactgattattatttttcagctttccattgtttatataaaaataagtatatgcatttttttcttcctattcccttatctctaagctgaaaagtaaaaggagcttatcatggtaaaactaagataaaaataaacagataggagagctgaattccatttcaagtcctcatgtatatgcttacaaagttccaaattaagcttgggactggttcttacatggcaggtaatccaaaccttttctatttactgaagattttcagctctcttacagaaatacacaggctaccattaaaattgtagggataaattttaaattgaatttgaaaataagagcagtaatccagggaggaaatggctaaggagaatgaaatagaagacacaaaaacaagcaatggcaaccagaagggaatcactaattatgggtatatatatttttccagttgtaaagctttgggttcaggggttcatcagatcctcttaagatagaatcagaattgtaattgtgcctgaagaatggtagtggagtttaaaaaaataaggacttaagacagtgttacctggtgtgtagaaaggacacagttttgaaagaaattgtttttgctttgcaaatttccccccccgcttggaaaactgtattcaaggccacctatatatggcaattaaggccctgactttgtagttatttcgtgtgtttttatttgattgaaactgatgaaagaaacaagatgcccgtactttttaaacagtatttttaaaataaaacattctgaggaaattgagggatcaggagagaggagcacagactaatagaagggctatgcaaaaactagacatgtaatgatacattcttgtttgattacttctcttcgtttctgtattgtgattt

SEQ ID NO: 44058 - DNA, 996 bp, Homo sapiens
ccaggcgtcgcgtctacgcgggggattacagtaacccggttgtcagtgatgagtcagagtgcgtggtgctgatgctgctgccatttcatcacctttgcgagcgcagcatccatccctccgctctcccggcgcctgggcctacccagcttcgggctcccaggccagcgatgcgctcgcggctgagctagatcctgccgagccgcgctctctgaggcgtcggcggggcgccccctcccgccgtccccggtccgggccaaggagacctgcagagccgcggccatggaggccatctggctgtaccagttccggctcattgtcatcggggattccacagtgggcaagtcctgcctgatccgccgcttcaccgagggtcgctttgcccaggtttctgaccccaccgtgggggtggattttttctcccgcttggtggagatcgagccaggaaaacgcatcaagctccagatctgggataccgcgggtcaagagaggttcagatccatcactcgcgcctactacaggaactcagtaggtggtcttctcttatttgacattaccaaccgcaggtccttccagaatgtccatgagtggttagaagagaccaaagtacacgttcagccctaccaaattgtatttgttctggtgggtcacaagtgtgacctggatacacagaggcaagtgactcgccacgaggccgagaaactggctgctgcatacggcatgaagtacattgaaacgtcagcccgagatgccattaatgtggagaaagccttcacagacctgacaagagacatatatgagctggttaaaaggggggagattacaatccaggagggctgggaaggggtgaagagtggatttgtaccaaatgtggttcactcttcagaagaggttgtcaaatcagagaggagatgtttgtgctagtcagttcttttatttccaaaacatgctctcctacttgaactgaaaagtaagagaaataaatagaatctttgtgta

SEQ ID NO: 44059 - DNA, 310 bp, Homo sapiens
gttctggggatcagaccgtgtacatctttggggccattattctgtctgccacagaggcgaggtgaatgcaaggtgaagtgggggtggaacagaaccaacgtggaatctgtgagcctcggggtttcgccctttccagtttccatgactcctcagaacaggacctggcacatgggtgctgtctaggtagatttcagccactgttaccactctgagctcatgccatctgttttgttggcattaaaatgttcttttaggaaaagatggtaaaagtaggtggtggttattgttgcttttaatgtatatatcttgc

SEQ ID NO: 44060 - DNA, 345 bp, Homo sapiens
gtaacccaaatgttcagaaccccagcactgtgctctttcttgtaggtcagattatgcacatcagagtaccatgtgatgaccatatattgatttctgaatagtcctcatctttctctttttgtcctttgctatgctagagttgaaagatctagggctcggcacggtggcttatgcctgcaatcccagcactttgggaagctgtggtgggcggatcgcttaagatcagtagtttgagactagcctggccaacatggtgaaatgccgtctttactaaaaatataaaaactagccaggcatagtggcatatgtctgtaatctcagagacttgggaggctgtggtgggag

SEQ ID NO: 44061 - DNA, 5127 bp, Homo sapiens
  misc_feature (1227)..(1227): n is a, c, g, or t
  misc_feature (1331)..(1331): n is a, c, g, or t
  misc_feature (1555)..(1555): n is a, c, g, or t
  misc_feature (3221)..(3221): n is a, c, g, or t
  misc_feature (3325)..(3325): n is a, c, g, or t
ccgcttggcagcttgattctcaacttccagtactccaaacactcagtcagaaaagtcagtcagctgctttcctgctggcatgttagtcttggccttggcagctgcaggggtgagatgtgctaatgatggggccaagctgagctttgggggtgaagccatcagctgttcccatctccctctggcggaggcaaaatgagaacagctgggaagcaaggccaacatccactcccagaagccgctcctctgccagcagaggtgtcaacagaattccagtcatgtgagccttccaggagtgtatagtgaattcattccatacttaaacattctagtatacaaagaagattgtacaatggagtaagccaacaatggagacactcatctgtttatttttgtaaccttcagaatgaatgctatgattccatatagattgatttctccactaatttatctacaggaaaatcagacgcctgatttgccactaaaatttggacatgtcagatttagtctattcaattcactaagctttacttccagtttcttagtagggagagtctgctccttggagcataatttattcagctgcaatagatggtactcttgaaacttttttctcacatactttagtctcttttctgtttcttgtctctgctctcctttaaaaaggtgattatcatccttctttctccctcagtgctgctgaagactaagccattggttatagaggctcagtgagaaagcaatttcaaaagagggaggcagaaagggctgggataggatatggtctgtaaagctaaatcaagacaactgttttcaagcacaaagctcctagtagaagcatctgcttctcttatggacttcagtgacataaaataatgagatttcttcagcttatctcccctgatgttacttccttatggatttagtgggtcaagagtgctgtgtgttctggcgttgtagttataaaattgacaggtggcttggatcatggccagaattctggacttggagtgagaagtggctctgagttctggcttggcctctttatggctgtgtgaccttgaggaacccactaaatctttctgaacttagtttatttgtcaacaatgagcaaggatgcagcctacctccctgggttgtggtgaattccaaatgagggagaggttggggaatgtgttttgtaatttaaggtcttctcttttgatggtacagggggcacatggtatcacngttcatatgttcattcagtgctgaggtttgtcctcatgccttgaacggcacaagttctcagcatccatgagccaccgtccccttctgctcatggtagatgggtntccaagttaatcccaaagcttgacagagggggtggcagagaattgggagaggaaggcagtttctattcgtttttctcctaccttaaatctcatgtttccatctttgttgtttatcagtctaccattaggggcatctctgttaaccaggactatttgagattgtgttaataatgtgaactctttcaaatatcatttacttatagcacacaaaatggtcaccagtntccttcttctctgctatatgggactcactgtgggctaggcataagggctgtagagaatgaatggtagcagatgcccaggccaggggcatgaattttcctagccttcagcttccactggctttttgagaaagagatgtgggagggaggataagcgtagaatggcaaggcaaataaaatttaacatgcctctcagggtattgggttggcatgaataagaattgctgcagaaataggaacctcacatttgtgggtgaagcagacacataagctcttgacttatatcttaattaccagttagagcaggtgattgcagcagtaaagcccgttaagcactctacatccttgtggctctaaacagtacacatttagaacatccagaatctgacagaaatgttccactctaagaccaaatattggtggtgttttcccaatttacagcaaaacgtaagtgaatggaaagatctctcccacactactaagattgttcatctgaatctttctgaaactaagttgcagctaccattatcttctgacttgcacagcagcaaatgaattttctaaaatgtttactcagttcagtgcatgatcagacaacacccaagggctcctggtgacaggtttatctgtgtacctggaaaacaatcacatttctgagtggtaattgctctttcttcataggatagaattgaggaattccataaagggattttgcctgtgtggtttctgtgctagcactggttcagtagcttctcatacattctcaccatgccctgggaggcaggcactatgaccactctttcttccagataggaaagccaaggctaggacattcagcttgtgcagttatacagctacaaggtgacgcagctgagattatgcacatgaattactgcacaaatagggaatatactagaaatgggacttacacgaataactaatagtgatgacaccggcatttaacaaaacattcagcagactctcgactaatccctttacatgaattatgtggttaaaatatccctatggcccttagaggtatgggccattattatttccattttacagatgaagaaactaaggcatagagaactcatgatttgccttagcccttgcatcttataagaggctgagccaggattgaactaggcagttgattttcagggcccacatgctaaaccactgggctgccaagggaggacctatgatgtccaggaactcttccatactccagaccctttgcagctatctcagcttgtgtttatcttgggacattgggatttgaggagagaacctaggaagacactgagatagaacaatacttgagtctttagctgtgtgaatcccaggaacttgtcctgtgggctctgacctgcaaggactggcaggaaaaacaggactggagacccatttgcagggcctggtatctctgacctttcattttcgcatcaaaggaacatgtggacttaccagctaaaatttattcttcctgaaggagaaacttactgtttaataattaagtatactatcttctgtttcctctcacaaataaaatgcaggactcaacctaataactgctacctatgatggctgtagaaaatacttgtaaacatgataaatgcacatgcatgagtgcatttgttatttattgctgtatgacaaattgccncaacttagtggcttactatcacacctgtgtacaatctcacagcttttgtgggttacgaatctaggcacaacttatctgggtcctctaattcagcttctttcacnggtttcagtcaagatgttagccaggactggatctcattcaaaggctcaactgggaaggatctgctttcaagctcacagaaacatggcagaattcagtcccttgagttgttgaactgaaggtttcagttcctagctggttcccattttcctaatcagtattctctccaatatagaagcttgcttcatcaaggcctgcagactgagaaggcaatataatctgcaaataagacagaatcacaagttgtataatccaatcatggtctgtgaatattgctatagtctactggttaaaaacaagtcactaagtctcttaacctagtgacttgcttaattctaaccctaccagggttacatatgagagtgaataccaggaggcgggggcactgggaaccatctcaacagtctagcacagtgagttaattagataatcagcattgtaaataccaggaatggctttgacaggtgaaagcgtctgttttcagaggtgtccactcactatgtacaggtcctggagctggcagcagcatctgattggtaaggtggctctgtttctgcatttttgttgcttagctgtttcatgtccttttactgcagtgtcttcattgcctttgcctgacagttcttttcccactctcactccaacacttggctgaactcctccttggcttagacttcacttcctcacaggcagccggttcttggtccttcccacccaaccccagtcaaggaaaggtccccctgctaaatgctctcaaaatgctatgtctctgtcagagcacttatcacattctaatcaactgtttgtcttctaggttagaatttaagctctgtggtgacagagaccacatccatcttattctctgttgggtcccccgtgcctagcacatcacagctgctcaataaatattggcatgatgagtaaatagtcccacttggtgtgctgctttttcatttcaacaaatgtgattcactaaagctctactcttaaattttttgtgtttgtacaacctttcatgtaaatgaattttcacatttggaaagtctttttgaaaaaaaataccatgtatccaaatatttgatatggaaaaggtagttagtatatattagtgatacgaaaggaacatcttaaaggaacatcttttggaaatactatgatgctgtaatggatgctaattttcatattgggtagaaaatgtgagctgatagtctaataaaaatcgcaagaggtctctattaattttagcttgttcttatctccctgagaaatgtacagatgcgaggatgggcatgaagaactctatgcatttgcttgggtttggatattctatagctagcatttagtgatctggtgatgataaacttaactatatgtttactttttttcctttttatttcctctaccctcattttaaacttttgaagtgattttagcctaaatgagtaaaaattcaattggggaatgaaatgactccttctaaaacagagctcaccttctgcaactacaaaggcaaaaaaaaacaacaacaacaacaaacttacatcaggctgatttgcaaatcacaagttttactttgttttatgctgctttcttacattgaacttggttattttatttacatccacaatggatagtttcagtggtttgatgaaaatcatttttatgtacaaaaattggaagacttaacatgaaaggttattattgataaactcatagtaattttaaaagtacattccttaaagttgtaccctatttgttgttacaatacatttttcttttggtggtttgacttcagtcctttgta

SEQ ID NO: 44062 - DNA, 320 bp, Homo sapiens
tcaggtaccggcacgagcgccacaagtccatctcaacagtctagcacagtgagttaattagataatcagcattgtaaataccaggaatggctttgacaggtgaaagcgtctgttttcagaggtgtccactcactatgtacaggtcctggagctggcagcagcatctgattggtaaggtggctctgtttctgcatttttgttgcttagctgtttcatgtctcaagttaatggtttacctttttagaaaactccaaatacactttcattgttatttgacttttgagttatgtaatgtctaagagtcttgtctctcgctcgtg

SEQ ID NO: 44063 - DNA, 228 bp, Homo sapiens
tagaatacattggaaagaaaaatctgaaagaagagatcaggttagtagcttttgtctaaatctcagtgtgagataattccccagattttgggcggtggcattggaaatggagaggaaccttttgaccttactccattaagaaagaattggtaaatttattgacaaagtagttatttaatataacatttatttctgatgaccaaagttcactgtatgttttatgtcttt

SEQ ID NO: 44064 - DNA, 1021 bp, Homo sapiens
caaccactaaatgactaaaaataaaagctgaagctatgataggaatgtcttattctaattttggtaatattcattatattttaagtagacagatgtaaataatgggcaaataatgcttttaattattttctttaacccgtcttagagccaagaagcttctttcaaggcagtggtacatggtggaggctatcagagtttctagaataattatctaggctgaaagtcatatctgggctttttggtgatctttctatgtgagcacgtacagctaatttgactaattctcttcaaatatttcttgaagatgtatgttacaacaaggcttaggttataatattagaataggccttctcttttgagtggagtaatatgattattctaataaagatcctttcttcactgaggctactgtttgggagttgaagtaactgggaaatttgaacctacccttctcctttcacattatatcaccagtataagagcagaattgtcagatattccgttaaatattggatacgaaatgttttttaattgataaataatttgtgtgtggcagtatttctgcattcttgtcctataaactaatatcagagttctttggttgctgtgacatgcctcctcagattaatagtgagatttcttcctgtaggtaaccctaatttcttttaaagcaatgatttatggtattatgatctaaatgccttttttttttaagagatgggatctcaccatgttgcccaggctgagctcaagctatcctcccacctcaccttggcttcccaaagtgctgggattacaggcatgagccaccatacccggccctcgatgcatttttaatgttacattagttgctaaaaaataaaacataaaaaagaggccgggcacagtggatcacgcctgtaatcccagctacctgagaggctgaggcagggaaattgcttgaacctgggaggcagaggttgtggtgagccgagatcacgctattgcactcccctgggcaacaagagcaaaacttcatttc

SEQ ID NO: 44065 - DNA, 768 bp, Homo sapiens
aattctcaagatcacatcatgtctgtctgcaaggctgtctgatcttggagagatggtttcatccctgggaaattaaacactatgtgctgagcccctggtaaagacaaataggacctcgtggggctgaatttggtctcgtggtctaagattgcctcacttggtcacagtaatggtaaatacaggtagccacgattccagctgtattgtgcgttcttgggagggttggttccatgggttgttatattgataggtacactggcctcctgcgtttgtggctttctagctctatcagtaaaaaaaagacaaaaatgagcatgacctcctaatggatgttcatttacaaatagtctatttgttttgtgtgttgtaaatcacttcaaaaggattgggttagaaagatgatgttgatgttcttctaatgctccagtgacccacttctgtactcccagaaaggggacgtccccttcctcatggaccctgcgctagatgcttgtgaagatctgcagggagacacgatgcggctggagttgacagacctagggaacaaattttcccagatgcccaaagaaaagagaaagcacagaccatttaggatacagatagtggtttagtactgtcaagatgtggtgtgagggaggagagagggtcaggaccttggatttgatcctgtagactggagccagagatgaattttcaccaggagaatgactcactcaggtttgagtgttcaattgctctggagacagaggttggaggaagcaggctaga

SEQ ID NO: 44066 - DNA, 432 bp, Homo sapiens
tacctcctggtatgcactcccttgtgtagtccccttctatgttgaatcagggcttgcctttgtgactgatagaatatggtagaaatgataaagtgtgacttccaaggctagttcataaaggcattgcagcttctgccttgctctttcttgctaacttgctctgggataagccagctgccatgtcatgaagacattcagtcagggttgtgcagacaccttcttggagaggaagcaaccagccagcaccaacttaccaacatgtgaatgaccttggaagatcttccagccccagtcatgccatcagatgactagagccctctcacagctgactgcaacctcattaaagacttaaagccagaacacccaacagagctgctcttgaattcctgattcatagacacttcgagagataataaattattgttgctttca

SEQ ID NO: 44067 - DNA, 356 bp, Homo sapiens
cttgtgagatggggtcttgctttgctgcccagacttgagtgcagtggcgcgatctcagctcactgcaacctctgcctcctgggttcaagcaattctcctgcctcagtttcccaagtcgctgggactacaggcacgcaccaccacgcccagctaatttttgtatttttagtagagacggggttttgccatattggccaggctggtctcaaactcttgacctcaggtgatccacccacctcagcctcccaaagtgctgggattacaggcgtgagccaccacgcccagcctagatttttctttgaagctttgaattattttgcaaatcaagataagaaactcaggagagttccagaatg

SEQ ID NO: 44068 - DNA, 208 bp, Homo sapiens
gtagagagagaaacaaaaatattttcttagaaatactgactaaaaactccccagatttgatgaaaatcattaatctgaaaattaggaatctcaatgaactccaagtagaatcattaccaaagactaccactcttagacacattatatatgtatatgtagtcacattatatatacacaccttatatatacacccacacacccacacaca

SEQ ID NO: 44069 - DNA, 482 bp, Homo sapiens
tttacctgcaggcttgtttggaataaaaaatgcctccaaattcctaggcaggacaaacttgccccaaagctttgttgttctacattatctctgtgattgtacaggaatctctcttccctcctagattatcagtgtcttggatataattggagctcaaatgcttagggaattgatttaatgttgcttaaaacgtatttgtaggccaggtgtggtggctcacgcctataatgccagcactttaagaggctggggcaggcagatcacttgaggccaggagttcgagaccagccctggcctcaagttggccaacatggcaaaaccccatctttactaataataacaaaaattagtcgggcgtggtggcacatgcctgtaatcctagctactcaagtggctgaacccaggaggtggaggttgcagtgacctgaagtcaccccatcgtactgcagcctgggtaacagagcaagattctgtctttttaa

SEQ ID NO: 44070 - DNA, 459 bp, Homo sapiens
tttgtgttccccacaaattcatatgttgcaattcttacctccagtgtgatggtattaagaggtgggacctttgggaggtgattagggcatgagggtgaagcaatcatgaaggggaagagtaccctctaagaattcctagagagcttatttgtctcttataccaagtgaagatgcagcaagaaggcaccatctgtgaaccgggaaaaaatccttcaccagacatcaaatctgctggagccttgatcttagatttcacagcctccagaactgcaagaaataaatttctgttgcttataagccacctggtttatggtagtttgttatagcaacccaagagtactaagacatgatataacctatactcattttctgctgttatttaacatcttacattagtatggtgtatttgttataattattgaactaatactgatacacaatcattaactaaagtctgtt

SEQ ID NO: 44071 - DNA, 941 bp, Homo sapiens
ggcaaaagaaagaaagaggcagggaaactgaggctcagtgactagacagacgttgcccagagtcatggtcatggaggaagcttgtgctagaatggtggagaggaaaccagagcccagctcctaatgcaaggctctttcattcctttagccaccctcgcccccgccaaaacaaacagacaaaaaactgtcattctcatatgaccacggactctgcgccccggccgcaggcggaggacagggaggagcgcacacgagaaagctcccacgcgcccgcgcctcgcctccgacgggaaggcgcctcttccgaccgtcctggatgcaaattaaatacttccctccgcagaagacttatctcggggtagggccgcagccggatttccaaatcgcgggtttgattttcgctgcgtcctctccgcgacgcgcgcagggagcgcgcccggccacctgcagcctctggctgcggccatctttccgcctggggccacctggcctgcgccctttgtgcccggcccgctccgtgactgttcttcttgccgctacttacagaactcagccgccttagcgtcttagagaagaggacggcatgcatgcggaccccgtccaccacacctggagagcagggagcccttagtccctggacacttaccagggccgccacccctggtccacgcacgtgatgacatctcaccaggggcagcacaccgcccgagtccgcgacactgataacacctcctgcgggcaggagggcgccacagccacccctggtcccctagattgtgtgaggctagcatttctgcccgcctcttggcgtggacagcacgctggaccgagatggaaccacagctttctcttcccaatccctggcctcaccgttttgtttcatacctcaccgtttgtttcaaacctcgtggtgttgaaatgattaaatgagattaaggggt

SEQ ID NO: 44072 - DNA, 203 bp, Homo sapiens
aagcaaggacgtaaaagccaggacaggctgcgctgagggtcactacactaacagacccagacgacacgatggaacgtgaatactgaagccaacaatcttctggaactctcttttccaaaactcatatgctgttttttctaattgggaaatcagggacagggaaacattcgcataattacccaccaacatgttcttcttaacag

SEQ ID NO: 44073 - DNA, 251 bp, Homo sapiens
tttcatttaacttcacaattcagctgcttgtgctgcactttttccccctcggtaaattgtgacagataaattatcgttttactacatttatttctgtgattacaattgttagtcatatctgtcaatacaatttcaaagcttttaaaaaatgctttaggggggaaaactgaattttaactgttaatcatttttttccctttatagcttattgggtcttaaataatatttttgtgaaggccttccaaattgtg

SEQ ID NO: 44074 - DNA, 381 bp, Homo sapiens
aagtcctctcctcatagcttggctctgtctgataatttaaaaaagatgttttccatctaataggtttatccaccctctaagatctttcatatgttcatcccttctggaaagtaagaagaaaaaggactagtcatcctgtctgatgacaaggagaaatggaggcagatgggtttagagggtcatataccatttaaacatagggcagtaattcttccattttgaaaacctgatgaaaatgcacacatacaaaattcttcatacggtttcagggtttcatggacttcctgacactcttccatggaaccctaggagttcaagaacctcaggcaaagaacacctgcccacatggatctggcagcccaagccctctaagcccccaga

SEQ ID NO: 44075 - DNA, 440 bp, Homo sapiens
gtactagatctgaaactgtgtggcggggccctgcaatttgcaacaaacctgattctgacacatgctagtttgaaaaccattgatctagatgttgtgggacatctataccttacatctttcctcacctctccaaagggtcatggccaacactcctataacaaaaagacgggttaagaccaggtatggtggcttatgcctgtagtcccagcactttgggaggattgcttgagcccaggagtttgagaccagcctgggcaacatggtgagaccttatctctacaaaactaaataaattagctgggagcggtggtgtgtgtgcctgttatcccagctactctctgaggactgaggttgcgaagatcatttgagcctgggaggtcaaggctgcagtgagctctggtggtgccacggaactccagcctggttgacagagcaagacc

SEQ ID NO: 44076 - DNA, 1710 bp, Homo sapiens
tgacacaatcacttataaaggatctaaagaacctttacctgaacaaggcagtgaatttcagcgatcaccttctgagcagtgctgccgagggtgatggggggctgtgcggcagcaggtccagctgggtgagtgactacagccagagtacctcagatactattgaaaaaatcaaaaggataaagaatttcaagaccaaaacttttcaagaaaagaaggagcagcttatacctgaaaacagactcctgctgaaggaagtcggacccacgggggaaggaagagtctctgtgattgaacagctgctggatgagggagcagaccccaactgctgtgatgaagacaatcgacccgtcataaccgtggctgttatgaataagcaccatgaagcgattccagttctcgtgcagagaggagcagacatcgaccagcagtgggggccgctcagaaatacagctcttcatgaagcaactctgcttggccttgcaggaagagagagcaccgccactttactgggatgcaatgcaagcatccaaaagaagaatgcaggaggccagacagcatacgacctggctctgaacactggagatgaccttgtcacctcactctttgctgccaagtttggccaagggcttgaggaccaactcgctcaaactaggagcctcagcctggatgactgttagccctgaggcctccacgggacttcatttaagaatacgtgcatggctggcacagtggcttacgcctgtaatcccagcactttgggaggctgaggctggcgtatcacctgaggtcgggagttcaagaccagcctgaccaacatggagaaaccccgtctctactaaaaatacaaaattagtcgggcgtagtggtgcatgcctgtaatcccagttactcgagaggctgaggcaggaaaatcgcttgaacccgggaggcagaggttacagtgagccaagatcgcgccatcgcactccagcctgggcaacaagagcaaaactccatctcaaaaaaaaaaaagaatatgtgcagctctggctattctttaatcatgtctttctgaaatgtgtatttgagattagaaattgaggttgagaggaactcaggagattttttttttaaatcatatgacagtataagccatcagtactaaatggacagctcccagtatactgtggactgtgataaactgaatgtatgttttttaatggtttattgctgcaggttttttgtgtatttgatttttagtttttaacttatttttcaataggtaataattgcacatggttcaaagctaaaaggtatgaagtattatgtagggatacgtccctcccattctgtcccacagccaccacctctctcctcagccagcaatgacatcagcgtcgacttgcctttcccggggttgtgcagagttagatatgcacatacatgtggtataagcacatgtacagaggagtacacatagcatataaacatgtctgtagcacatatatattctttcccctcttttaaaacaaatggtagcaaaccaaccacacactgttctgtatcttgctctgtttgcttgatacatcttgtaagtggctcctaattactatgtaaagattgaccttatttaaatttttttatgttgaaatcatcaatattcccatcattatggtgtgttctttgattgacaaatcagctctcaataaaccacttataagaatgtgtaat

SEQ ID NO: 44077 - DNA, 2706 bp, Homo sapiens
ttcaaagggagacagactttctcaagtgtgcccactgccttgccccccggccatcagatccctttgctcgcttctgtcaagaatgtggctctcctgtcccacccatatttggctgtcgtctcccacccccagaaggagctcagatgggcttgtgtgcagaatgcagaagcttggtacccatgaacactcccatctgcgtggtgtgtgaggcccctcttgctctacagctgcagccacaggcaagcctccacttgaaggagaaggtaatttgccgggcctgtggtacaggaaatcctgctcacctgagatactgtgtcacctgtgagggggccctgccttcatcacaagagtcgatgtgcagtggggataaagcccctcctccgcccactcagaaaggggggaccatttcctgctacagatgtggtcgctggaatctctgggaggcgtccttctgcggctggtgtggagccatgctcggcattcctgctggctgttctgtttgccctaaatgtggggccagcaatcacctgtctgcccgattctgtggctcctgtggtatttgtgtgaagtccctagtgaaacttagcttggacagaagcctggctctagctgctgaggaacctcgccctttttctgagccccgatgtgcctggcagtccctgaatattcctttgcccagatctgatgttgggactaagagggacataggaacacagactgttggcctcttctacccatctggcaagctgctagcaaaaaaggaacaggaactagcctctcaaaagcagaggcaggagaaaatgagtgaccataaacccctcctgacagccatcagcccaggaagagggtactggagaagacagctggatcacatctctgctcacctcaggtgttatgctcagaacaaccctgaattccgggccttgattgcagaacccaggatgggaaagcttatctctgctactgtccacgaagatggttgtgaagttagcatcagactgaattatagtcaagtctcaaacaagaacctttacctgaacaaggcagtgaatttcagcgatcaccttctgagcagtgctgccgagggtgatggggggctgtgcggcagcaggtccagctgggtgagtgactacagccagagtacctcagatactattgaaaaaatcaaaaggataaagaatttcaagaccaaaacttttcaagaaaagaaggagcagcttatacctgaaaacagactcctgctgaaggaagtcggacccacgggggaaggaagagtctctgtgattgaacagctgctggatgagggagcagaccccaactgctgtgatgaagacaatcgacccgtcataaccgtggctgttatgaataagcaccatgaagcgattccagttctcgtgcagagaggagcagacatcgaccagcagtgggggccgctcagaaatacagctcttcatgaagcaactctgcttggccttgcaggaagagagagcaccgccactttactgggatgcaatgcaagcatccaaaagaagaatgcaggaggccagacagcatacgacctggctctgaacactggagatgaccttgtcacctcactctttgctgccaagtttggccaagggcttgaggaccaactcgctcaaactaggagcctcagcctggatgactgttagccctgaggcctccacgggacttcatttaagaatacgtgcatggctggcacagtggcttacgcctgtaatcccagcactttgggaggctgaggctggcgtatcacctgaggtcgggagttcaagaccagcctgaccaacatggagaaaccccgtctctactaaaaatacaaaattagtcgggcgtagtggtgcatgcctgtaatcccagttactcgagaggctgaggcaggaaaatcgcttgaacccgggaggcagaggttacagtgagccaagatcgcgccatcgcactccagcctgggcaacaagagcaaaactccatctcaaaaaaaaaaaagaatatgtgcagctctggctattctttaatcatgtctttctgaaatgtgtatttgagattagaaattgaggttgagaggaactcaggagattttttttttaaatcatatgacagtataagccatcagtactaaatggacagctcccagtatactgtggactgtgataaactgaatgtatgttttttaatggtttattgctgcaggttttttgtgtatttgatttttagtttttaacttatttttcaataggtaataattgcacatggttcaaagctaaaaggtatgaagtattatgtagggatacgtccctcccattctgtcccacagccaccacctctctcctcagccagcaatgacatcagcgtcgacttgcctttcccggggttgtgcagagttagatatgcacatacatgtggtataagcacatgtacagaggagtacacatagcatataaacatgtctgtagcacatatatattctttcccctcttttaaaacaaatggtagcaaaccaaccacacactgttctgtatcttgctctgtttgcttgatacatcttgtaagtggctcctaattactatgtaaagattgaccttatttaaatttttttatgttgaaatcatcaatattcccatcattatggtgtgttctttgattgacaaatcagctctcaataaaccacttataagaatgtgtaat

SEQ ID NO: 44078 - DNA, 2688 bp, Homo sapiens
ttcaaagggagacagactttctcaagtgtgcccactgccttgccccccggccatcagatccctttgctcgcttctgtcaagaatgtggctctcctgtcccacccatatttggctgtcgtctcccacccccagaaggagctcagatgggcttgtgtgcagaatgcagaagcttggtacccatgaacactcccatctgcgtggtgtgtgaggcccctcttgctctacagctgcagccacaggcaagcctccacttgaaggagaaggtaatttgccgggcctgtggtacaggaaatcctgctcacctgagatactgtgtcacctgtgagggggccctgccttcatcacaagagtcgatgtgcagtggggataaagcccctcctccgcccactcagaaaggggggaccatttcctgctacagatgtggtcgctggaatctctgggaggcgtccttctgcggctggtgtggagccatgctcggcattcctgctggctgttctgtttgccctaaatgtggggccagcaatcacctgtctgcccgattctgtggctcctgtggtatttgtgtgaagtccctagtgaaacttagcttggacagaagcctggctctagctgctgaggaacctcgccctttttctgagtccctgaatattcctttgcccagatctgatgttgggactaagagggacataggaacacagactgttggcctcttctacccatctggcaagctgctagcaaaaaaggaacaggaactagcctctcaaaagcagaggcaggagaaaatgagtgaccataaacccctcctgacagccatcagcccaggaagagggtactggagaagacagctggatcacatctctgctcacctcaggtgttatgctcagaacaaccctgaattccgggccttgattgcagaacccaggatgggaaagcttatctctgctactgtccacgaagatggttgtgaagttagcatcagactgaattatagtcaagtctcaaacaagaacctttacctgaacaaggcagtgaatttcagcgatcaccttctgagcagtgctgccgagggtgatggggggctgtgcggcagcaggtccagctgggtgagtgactacagccagagtacctcagatactattgaaaaaatcaaaaggataaagaatttcaagaccaaaacttttcaagaaaagaaggagcagcttatacctgaaaacagactcctgctgaaggaagtcggacccacgggggaaggaagagtctctgtgattgaacagctgctggatgagggagcagaccccaactgctgtgatgaagacaatcgacccgtcataaccgtggctgttatgaataagcaccatgaagcgattccagttctcgtgcagagaggagcagacatcgaccagcagtgggggccgctcagaaatacagctcttcatgaagcaactctgcttggccttgcaggaagagagagcaccgccactttactgggatgcaatgcaagcatccaaaagaagaatgcaggaggccagacagcatacgacctggctctgaacactggagatgaccttgtcacctcactctttgctgccaagtttggccaagggcttgaggaccaactcgctcaaactaggagcctcagcctggatgactgttagccctgaggcctccacgggacttcatttaagaatacgtgcatggctggcacagtggcttacgcctgtaatcccagcactttgggaggctgaggctggcgtatcacctgaggtcgggagttcaagaccagcctgaccaacatggagaaaccccgtctctactaaaaatacaaaattagtcgggcgtagtggtgcatgcctgtaatcccagttactcgagaggctgaggcaggaaaatcgcttgaacccgggaggcagaggttacagtgagccaagatcgcgccatcgcactccagcctgggcaacaagagcaaaactccatctcaaaaaaaaaaaagaatatgtgcagctctggctattctttaatcatgtctttctgaaatgtgtatttgagattagaaattgaggttgagaggaactcaggagattttttttttaaatcatatgacagtataagccatcagtactaaatggacagctcccagtatactgtggactgtgataaactgaatgtatgttttttaatggtttattgctgcaggttttttgtgtatttgatttttagtttttaacttatttttcaataggtaataattgcacatggttcaaagctaaaaggtatgaagtattatgtagggatacgtccctcccattctgtcccacagccaccacctctctcctcagccagcaatgacatcagcgtcgacttgcctttcccggggttgtgcagagttagatatgcacatacatgtggtataagcacatgtacagaggagtacacatagcatataaacatgtctgtagcacatatatattctttcccctcttttaaaacaaatggtagcaaaccaaccacacactgttctgtatcttgctctgtttgcttgatacatcttgtaagtggctcctaattactatgtaaagattgaccttatttaaatttttttatgttgaaatcatcaatattcccatcattatggtgtgttctttgattgacaaatcagctctcaataaaccacttataagaatgtgtaat

SEQ ID NO: 44079 - DNA, 1134 bp, Homo sapiens
ttcaaagggagacagactttctcaagtgtgcccactgccttgccccccggccatcagatccctttgctcgcttctgtcaagaatgtggctctcctgtcccacccatatttggctgtcgtctcccacccccagaaggagctcagatgggcttgtgtgcagaatgcagaagcttggtacccatgaacactcccatctgcgtggtgtgtgaggcccctcttgctctacagctgcagccacaggcaagcctccacttgaaggagaaggtaatttgccgggcctgtggtacaggaaatcctgctcacctgagatactgtgtcacctgtgagggggccctgccttcatcacaagagtcgatgtgcagtggggataaagcccctcctccgcccactcagaaaggggggaccatttcctgctacagatgtggtcgctggaatctctgggaggcgtccttctgcggctggtgtggagccatgctcggcattcctgctggctgttctgtttgccctaaatgtggggccagcaatcacctgtctgcccgattctgtggctcctgtggtatttgtgtgaagtccctagtgaaacttagcttggacagaagcctggctctagctgctgaggaacctcgccctttttctgagccccgatgtgcctggcagtccctgaatattcctttgcccagatctgatgttgggactaagagggacataggaacacagactgttggcctcttctacccatctggcaagctgctagcaaaaaaggaacaggaactagcctctcaaaagcagaggcaggagaaaatgagtgaccataaacccctcctgacagccatcagcccaggaagagggtactggagaagacagctggatcacatctctgctcacctcaggtgttatgctcagaacaaccctgaattccgggccttgattgcagaacccaggatgggaaaggtgggtgagatgaaatttccactccacaagtgtccacgggatcaggctgaaggaaccctccatggactttgcctgaaactgcatcttgcctggctcctttccctttcctgctctgctttctacactttcttactcttctgccttgtgagctctgctctaataaatcacttgcacatgaatattg

SEQ ID NO: 44080 - DNA, 714 bp, Homo sapiens
tccatctatccctggcccccagcccatgtggttttggcagcaataaggtgtgtggggtaatgactcctgaaattaaaatggtgtgtgtatgtgaaggaaaggcgggcaaagctgtggggagcggtggagtggaaggaacaaaggaggtcagtactgggaacgctgaaggtgggaggccatttcataacattacttgttgatgaaattgccatggataccttctttgcccatcagcaggcctagcgtcttggcagtcatggtgacaatgacgttgaaggtgggggctccaccgatgctcttcatacaaagatccgtggtcaattccccatcctgcagcagtgagtccaggaccacagtatatttctggccccccagtgtcagcccattcatgacaaagcttgaccagtctttgccaaccaggacaccaacctcagctggcgtgatgttgaggaaggttttccctgggacggtggcacagatggaaggtgggtccttgttgcccacaatggccgtgtcctaacaggtcccgtccgccacgaggctgtagatggaggtgtccacctggcctttgcgttgctgcaggggctcctctggtcgctgctgctggggccgcctgggctggcgggtgggggaggcggagagctcgatgcaggtgctgtcctcctcgccacgactctgctagctgtgcagtagccctcgctccgccacttaaaa

SEQ ID NO: 44081 - DNA, 414 bp, Homo sapiens
aagggctgggtcaagttcaagaagggaaaggggggcaacccggggaaaggaagggaaatgtactctcaatttcccatatatcttggattgttagagcaggaaggagcctctcattttacagctgagaaaacggcagccctgagaggttgatctatttggtcaacctctgctggtgaagtaaggcagagctgagattggttttgggtctcctggatctctgagatacactcatttccctgggactgtgtgtgtaggtgctcacagagccacagtatactgttgtgtaggttggtcactgcacaaggactcctcaccaaggggctgagtaggggctgaaatctagccatgtcttgtgcactagggcagagtggctgctacccagaggatgtgctcggaggcaccatctggaactgt

SEQ ID NO: 44082 - DNA, 1981 bp, Homo sapiens
aggaaggcaatcgacacagttattagcacatttcagaaaatgaacacccttgtgatagaattaccagctgtatgaaacaaattgtcccatgcaaattaccctataactaggaaagagacactataacccaaatgccataccccctttttcctttgaccatgcctggggtttcaatgccttggcacctgcaatctggaagtaaacagtctgcttgcttcttcaggcacgtgacagtgacaacacagtgactgcctctgaaaagagccctgaggcaaacactctctcctgctgaacaggaggcactgtaacccttacaaacagcttacagttacttgggctacttatttgatcatcataacaggcctacgaggtttttgccccattttacagaatagtaaactaagagccatgaaaatcacttgggccagggtcaaggactcgtgactcctagctcttttcactgcatcatactgctgtcagatgaataaatgattatgaatttgtttacttgggaagagatatgactataaataaatgttctctacatgttaggatatgttttccttattgattacaactcagctataatcctgagggaacatgggaaggaatcaaaggtaaagcccattcaggcattattgacaagagggctttaaacaagtgaataattgcacaactaaaaagacattagaactgtgtgggctataagtgttcttatcactgagacacagtggatttttattgaaaggaaccacgtacagcaatgcggagtgggatagggataaaatacccaccccaaaatgaccttggccacctgtctgccatatacgtacactgagttcctgtctacccaagagagtcagcccttaattctcaggtgaacaaacagctaactgcatcagcaaattggaatggctggcttgaagtttccattattttcttgaagagaggtgatgctttaaattactttttggattgtagccagttcagctaggcaaaagccatacttttcacaattaaaaaaaaaaactattctgactagagtcaggtttctcatatccatcgtgataggaaggcctaagaatggcaaatcgctttgagatataatattgaacttcagtatgaatgtgaccgaatctgaaactttgggaatttgctttagccagaataaagaaaccaaatcatgaaaattatggaagactattctgccacctgtgccccaagttggatgagcaaaccactttggatcagttcacagcattaactacaagtgaactgatcatcttctctatattcatttcacaagagctggcttaggtggggtaattaaattgccaccttcgtggttgtaaaagacaaacaaaacatggcaaatttcattaacacaaaatttcatcaactgctatactgaattatgtttagaagattctgaaagcaagattatccagtgggtaaatgagagtcgactggattctgtcagttcaaaaaaggaaagaaacaaaacttccctacaattttcttcactaaaatttattatatgtacagtattcccactcctggcattttctggcaggtttaaaaatattcagcataaatccagcagaggtggctgagcttaattgcttaaataagttctagaaaatttaaaaatcattttagtagaattcagtaccattgtcactgcaataagtgggttttagaaaataagtgtgaaaagaatcaggtgttaatataatactaaggataaagctttagaagctattttactacataggtaaagaaaagataaactaacttgtaacaaagaccacaactgcatgttggattagattgtctcatatttcagaataaaatgtactgtatacttttcctcactttgttgtgcactgtaatgaaatgtgaaaaatgctttatttagctgtatgtgaatgaaaatatgcttgtatttagtaaaatgattgattatgtgacaaaaaaaatc

SEQ ID NO: 44083 - DNA, 1010 bp, Homo sapiens
  misc_feature (969)..(970): n is a, c, g, or t
  misc_feature (992)..(992): n is a, c, g, or t
aggaaggcaatcgacacagttattagcacatttcagaaaatgaacacccttgtgatagaattaccagctgtatgaaacaaattgtcccatgcaaattaccctataactaggaaagagacactataacccaaatgccataccccctttttcctttgaccatgcctggggtttcaatgccttggcacctgcaatctggaagtaaacagtctgcttgcttcttcaggcacgtgacagtgacaacacagtgactgcctctgaaaagagccctgaggcaaacactctctcctgctgaacaggaggcactgtaacccttacaaacagcttacagttacttgggctacttatttgatcatcataacaggcctacgaggtttttgccccattttacagaatagtaaactaagagccatgaaaatcacttgggccagggtcaaggactcgtgactcctagctcttttcactgcatcatactgctgtcagatgaataaatgattatgaatttgtttacttgggaagagatatgactataaataaatgttctctacatgttaggatatgttttccttattgattacaactcagctataatcctgagggaacatgggaaggaatcaaaggtaaagcccattcaggcattattgacaagagggctttaaacaagtgaataattgcacaactaaaaagacattagaactgtgtgggctataagtgttcttatcactgagacacagtggatttttattgaaaggaaccacgtacagcaatgcggagtgggatagggataaaatacccaccccaaaatgaccttggccacctgtctgccatatacgtacactgagttcctgtctacccaagagagtcagcccttaattctcaggtgaacaaacagctaactgcatcagcaaattggaatggctggcttgaagtttccattattttcttgaagagaggtgatgctttaaattactnnaacctgcagcccgggggatccnctaggtctagatcggcca

SEQ ID NO: 44084 - DNA, 297 bp, Homo sapiens
tgaataggtaattcaaagtaaaaatggcaaataacatatcaaagatgataaagttactgatgctcaattaaatagaaataatgccaataaattattgctataaaaacctcaaatagaagagtcagcataacatggtggttaagagctggcactctgaattcaggtcaccttgattcaaatctctgagaaatcactaaataatggtgtgggttggacaaggtatttaaactttatttgcttcagctttctcaccaatgaaatggcaatgttggtcacagtattatctacctcaggggt

SEQ ID NO: 44085 - DNA, 446 bp, Homo sapiens
agacacttgaatatagaaaatgggcacaaaatgataaactctaatggtaggcatgtctatacaactatataacataagagtattataaatattacatatagattgtatattataatacataaaaatgtatatacatctttatatacattgaaatgtgttcatattggctgggtgtggtggctcacatctgtaatcccagcactttgggaggcctaggcgggcggatcacttgaggtcaggagttcaagaccagcctggccaacatggtgaaaccccgtctctactaaaaatacaaaaattagccgggtgtggtgacccatgcctctaatcccagctacgagggaggctgaggcaggagaatggcttgaacccaggaggtggaggttgcagtgagctgagatcgtgccactacactctagcctgggcgatagagcgagaccccctca

SEQ ID NO: 44086 - DNA, 674 bp, Homo sapiens
gggctgcaggattcggcacgaggaaacccagaggtacttttgaaaaactcctgacgagcatttaaaatagaaattgccaatctttttcaaagttgtttatgtttataatcaggggataaagcaccaattgtagaaaacctgaaaaataacagtgataaaaatgacagacttgtataacatgtatcactaacatacacgtttttatatacttttatttctgtgcattttacatttttaagaatagttttatattgtttatacaatcattactctaacatttttactaataaagaactttttacaccaaaataaaactaatagaaaaaaatggacaagtatgaatgatggttcttaggctaccagtggtctctaaacatgatatggaaaagttcagctctactgttagcccaagaagtgcattattattttggcattattattgataatgaaaggcattaccattttctcacataaaatttgcagatattgaaaaatattccttagctgtatgggagtggggttagttgtggtctttatgaaaagttgattttatgttaccaggaactttagcaactgtatactctttgacccagaaataatttagaaagttattttttggtattctgtggacactgatttgattaaataatttcaccagaattatttatggtggt

SEQ ID NO: 44087 - DNA, 386 bp, Homo sapiens
tggagacactcttgtctaaatgtcacttgcagtgtataagatgtttctttgtcccactttgatttattatccgtgacaacttatattagaaacccagaggtacttttgaaaaactcctgacgagcatttaaaatagaaattgccaatctttttcaaagttgtttatgtttataatcaggggataaagcaccaattgtagaaaacctgaaaaataacagtgataaaaatgacagacttgtataacatgtatcactaacatacacgtttttatatacttttatttctgtgcattttacatttttaagaatagttttatattgtttatacaatcattactctaacatttttactaataaagaactttttacaccaaaataaaactaata

SEQ ID NO: 44088 - DNA, 387 bp, Homo sapiens
ggtgcaatctaaaaattaatgagtatttcatctgtgataaaatctacgtcagacttaagaactgtgcggttaacaatgactcaaaaatacaggatctgccaggtgcagtggctcacacttgtaattccagcactttgggaggtagaggcaggcagatcacttgagtccagaagtttgagaccagcctagatgacatggtgaaaccctgcctctacaaaaaatacagaaattatccaggagtagtggcatgcacctggtgtcccagctacttgggaggctgaggtggaaggatcgtttgaacctgggaggtggaggttgcagtgagccgagatcatgccactgcactccagcctaggcgacagagcgagactctgtctcagaaaaaaa

SEQ ID NO: 44089 - DNA, 561 bp, Homo sapiens
  misc_feature (278)..(278): n is a, c, g, or t
tttttttttcctttagacagagtcttgctctgtctcccaggctggagtgcagtggaataatctcaggtcactgcaacctccgcctcccgggttgttcaagtgattctcctgcctcagcctcctgggtagctgggattacaggtgtccgccaccatgccaggctaattttgtatttttagtagagatggggtttcactatgttggccaggctgatctcgaactcctgacctcaggtgatcacctgcctcagcctcccaaagtgctgggattacaggcgngagccactgcgcctggccgatcttttgagtttctgttcattcattcatcttaacaccatagtgttagggcattctttattttaaacagattatagactggagctaagcttaaattagaagtcacagcatagcccagagataaatagatcaggtacccagataacaggcaaccaaaataaattcacatggttgagccattattttctctaatctcctcagatgaaaccatacttgagatactcagaacatactacactatactcaactggggacatcaagcaat

SEQ ID NO: 44090 - DNA, 848 bp, Homo sapiens
tccacactcctgcaatgcgccaaaaatcacacaggcatctctaccagtcaatcacacccaggcctgtttcaaaagctaacaggtcccgggtgctctcttggaaagtttgctttccaataggatgttcaatagcaagaagtctctggggcctagagacaaaaggacagcaacagattcatgtcatcatctatggactgcagacccctgctagtgcccgcctgcggccccccagtctgccggtgcaccagcctgtcgctcccgtggggcggggggttagtaccagccgcctgctggaaactagcttcctgcttaggcaggaggccaaggactgtgtccccagcacgagcacctggctacctcccccaggcaagagccacggatctctttggcatcatgcgccacctggcacctgcaggggaagctgtcatcagcccccagaacccttgtttctaagggggaaatgggcctactcttcggaaagaaaattccacagggaatatgcctggcaattttccctaggccttcttggttcccccactccactgcctctaacctctgccttatctacagcctgctgaagttcagcaccccttggaaggtgacccaatacctgtccccagaggccccagcgttgaggtggattaagcatatctcagcttggccaagttggcacaatcccaaagccccacactctcctaaattctactgtgagaccaagcacacaggctgggccggaagaaaagctggtgattgttaactctcgtccctgcaagggggggggggggggggccatgacccctggggcatctggtccattctagggcctggtcaagtggctagatctggag

SEQ ID NO: 44091 - DNA, 311 bp, Homo sapiens
gctttgtggcttgttaatctcacttaatgtatctttctacatcagcatgtatggatttacctcatcctttcaatacagtaatccattgaatgagtgtgacataattgatttagccattttcctggacacttgaggattttttttccccctcagtctttgaccattagcagcagtgtgctgtgtagaacattctcaaatatttatatctctgggcactcaaatgggaaggtttcaataaaaagggttttaaggtaatttcacaaactgtcctttctttgcatcatctcccgaaaggaaatactgcctatacc

SEQ ID NO: 44092 - DNA, 490 bp, Homo sapiens
cttaatgaaagaaagtaacgatttatgggataaaaatattccagtggtttgtatttgcttcatacttcaaaagtgttagtccatttattgtttaaagttatattgaaactgatattttcactgctgccaaagcagtacctgacagtagataggtatccacagtcttatgttccttagagttatagaactatgcctctgaaaggggttttaatactttaataaacctggcctaaactgttttatttctaagttgaagaaactgattgtcaagtactttgacttgtccaatctcatacaactaactatggtacatctagagttagatctcagtatcaggggtcccagttgtattctgcttcaccattccacaattttcgatattgattaaaacttttcacactaacttttggaactgtggttattattaatttagttggattcatgtccccttatttatctccttactcctccactgctggccttcataact

SEQ ID NO: 44093 - DNA, 513 bp, Homo sapiens
  misc_feature (20)..(20): n is a, c, g, or t
agctaacagccaccaggatntgaactagaactggggatacaaaggtgagaaactgtgtccttgagaagctcgccactcaggcatgtacaatgcctggtggctgttagctccttccccacttattagattaaacaggacaaatctctccccgtgcatatagcaaatactcctgggacaggaagttcatgaatcaactgtgtacgctgcttcttctttcccttaaccttcactgcattttgctttattaaaacattcctagaatgttcattcctattcaaggtatacataatcaatgacaataaaaactgttaccaattgtataggggtttacgttctgatttagactaaggaagacaaaatattaaaggacggagggagagacatcttacaattagaaggaagaacctggccagcagggaggttttttgttggagttgctgaaagcatacctcgtgtatacgcaggtactgctgggtacaagattaagtcgtttcagaaagaaaccatagtaca

SEQ ID NO: 44094 - DNA, 432 bp, Homo sapiens
accttaacctcccaaatagctgagattacaggcacctgccatcatgcctggctaatttttgtagagatggggttttgccatgttggccaggctggtctcgaactcctgacctcaggtgatcctcccaccttggcctcctgaagtgctgggattacaggcgtgagccaccacgcctggcccatagctcgcttttaaagccttccctcctttcttgcacctcaatgactttcctgccctgtacatttattttgaattaaatgagctggagggtagtagtgttggcggggagtggcccttgcaaatggaactaatgacctgcgtgctggggaaggttgttctgccccgccctgccttctctgctgcaaagcacctctgctgtctcatgatttcctgtggagttctcatcaacgcctctttaagactcaaatggac

SEQ ID NO: 44095 - DNA, 370 bp, Homo sapiens
gtgaattgctcctctcccaaaatgcatttgtatcatgtctttgcagcaagaagtgactatatctctgtgaatgctacatacattaccatattgtaatttaacaccaaaggcattagctgcaccaactttttatttattgtgatcttgaaaaacacatggtcttcacattttttgatgagggtcattaaaaaatatttatggaatatgcatgtcaatcccagatatattgaaatgagtaaaccttcatattatgctgttggctacataacagagcaatagctgggaactactttgccttgggactcttaaaacagggaaaggttttatatacttcattgtccaaagagttatctagataccaagtgatgtg

SEQ ID NO: 44096 - DNA, 414 bp, Homo sapiens
acaggcaatcatttctttgtctttgctgcaggggcatctttggaatcatgtcatccctggtcatcattggctggtgtagtctctcagcttccaagatcttcattgcagccttgcacatggaaggacagcagcttcttgttgcctacccttgtgccatactttatggactttttgccctcctaacaattttctaaagaatgtttgagatggcatttcaagactctgtttgctgtccagattattttggaaatatattaacattcaaatttggtgatatgatttctgttttattgcttttgagagagtaataagcagagagacaaagcagcacttaagggtggtgctctaatagcctgttggtttgaatgatgttttgcttttgagtttggtgcattaaaacatttcaaaatactt

SEQ ID NO: 44097 - DNA, 363 bp, Homo sapiens
gtgtagtatactgtccaaatcttattcctcagggtagagccgtacaataaatgagcctagttttcttccttcttctttaccacaccacttcccttgatcccactgccccatgttctcagaaatcttcagatgccagttttcccctccttcagcttcatcttcacctctcctctctgtgattatacatgtcatcctactaaatccttcctttcattccacctggccctctacccaatgattaccttcaccttttcatatttaccaaatttttccaaagaatactactcattgttcttacttgcatctcaattcctcctaagctgactgcaatcccatgttcttgaaacatctagctgtctttca

SEQ ID NO: 44098 - DNA, 288 bp, Homo sapiens
gctgaggcctcgggtgcagatgagatggtgtctcaggctggcttccccagaaagtaggctctgaaatggatattagcaagcagggaatttacgtagggagagaggatgcagggaatttatgcggggagagacaaaggaaaccaggctgccacgcagccagtgaaggcctcagctgaccccacaaggactccggagccagcagggtccttcggagacatcctcaactaaggcaacggggaagatctttgtgtctcagcactgggctgctgccaaggaaggggcccagcc

SEQ ID NO: 44099 - DNA, 626 bp, Homo sapiens
ttcaggcatgattgcatttgttacctctggataaatgctcatggattgaagcacctgtttaaatcgcaccctacttctagccctgcctccagactcgcctctttgcattcagggagcacagaaatgtggaaccccatctaatgggttcactggcacacagacctcagacaagggggagctgaggactggactctgaccactgttcttggttctaaatttcttcccgaggcccaagaggaggtcacgtccaccagctaaacctagcattcttttctgctggctacaaaatttttagacaaggctttgctccttaaacaattgcaagtttaaaaatctttgaatccagccatctatgacctgtgggcccccacttggagatgttccacgtttttaggtcaagccaatgtacagcctccacctattgatttatgactttgcctgtgacctctgcctccctccctttaaaaactcctacctgtaagccattgaggccagggtctaaatcatgagctgccctgcaatcggtgcctcaatttctctcgccgcaaccctgaggtcagccttggctttgctctgctgcactggtggacccaagctctgttcactgttgtcagcctagggtcctg

SEQ ID NO: 44100 - DNA, 651 bp, Homo sapiens
tcgttagtagagacggggttttaccatgttggtcaggctggtctcaaatgcctgacctcaggtgatctgcccaccttggcctcccaaagtgctgggattaccggtgtgaaacactgtgcccgaccattatatttctttatcaacattttgaaatgattaaatttctgattctcttcatgtatattctggtaacagcactgctgcatagtaaaatgggcaaaaggtagaaagaagaagagagtaacaaaaggtttaaaatacgttcacttattgaaccccatattatctaagttagaccattaaaatggatgctctccagcttgctcaaacaacaaagtatttgtgaactttgcagccatttgcatctttctcggaggcaagcactttataaagaaacacatactttatagtaaaatttgcagccttataggagtaagcgttagattaatgcaataaatacttaatgcagatgacggctaaatcttgggagtgggtgcaagcggcctgctttcctggtagctgatgccttgcatcgcatttgtactctggaacaagttactctgcttgctcttcctgcagttagggaatggttaagtgtctacaacaagttatgactgctttttctggattcaagttttattttatttttat

SEQ ID NO: 44101 - DNA, 191 bp, Homo sapiens
attgatatggattcactaagcagagattctgcatttaatattacagttggaggagttagaaaaggcttagacagtttgattgctttactgaaacatggaccaacaggtggcccacaataaatatgttaaaatgctgaacctggcttgatttatcatagaggaaaggatttagaggattagagagattggga

SEQ ID NO: 44102 - DNA, 344 bp, Homo sapiens
tttttgaggtggagtcttgctgtgtcgcccaggctggagtgcagtggtgcaatctcagctcactgcaagctccgccccccgggttcacaccattctcctgactcagccttccgagcagctgggactactggcacccgccaccaggcccagccaattttttgcatttttagtagacacagggtttcaccgtgttagcgaggatggtctcgatctcctgacctcatgatccgcctgccttggcctcccaaagtgctgggattacaggcgtgagccaccatgcccagcctaaaaactctaatttttaacagagatttgcacatttggaaaacatatctgatgattcg

SEQ ID NO: 44103 - DNA, 387 bp, Homo sapiens
ggccctctagggagcagaatggccaagatgttcactaaaacctacaaaagattactgtgggaaattaaagaatattgaaatcgacataccatgttcatgggtcagaagacctattaatgttactaaatctcctcaatgtgttttattttatttttcgagactccatctcaaaaaaacaaacaaacaaaaaacaaatgttgagggaagagtccagcacttaatatctgaaacataaagctgagtgtattggtagtttaagcaagaagagctgtgcttataagacttagtctctctgagcaaagcagagaactactgtcttttgtagagtggttattaaagtttggtcaagtgtattttggttgcctgttgcactgtgttggcatctgc

SEQ ID NO: 44104 - DNA, 371 bp, Homo sapiens
attaaggcgcaaaaagttaaggaattggcctaaaaagtcacactgcagctagagaatatcaattcaggatttttgaccccagggaaagagtgagcttctaattacagcagggagaggttggggtttggggagatcctatggacggaccagaggtaaagtttgaactaaagacccttaaagctcttgccaccctaagttttataaggatctcaagggccattattttgcttggctatgcctcctggtcttgcgggcaggtggcaggcactgctgaatagtgggaagggcaggatcctggaatcacaggaggccctgcacagttctggaattccataaagagagtacagccttatgatgccccggggttgtag

SEQ ID NO: 44105 - DNA, 405 bp, Homo sapiens
caaaacaataaggggatcctgaatgtaagcacatgtgtgcctgagcatgcaccatacacacaaaacaccctgcaatgtgctagaatcccacagtcatggaattaactgacagttgtgcagctgtgttcagccaataagtcacctttgcctactggccagtgccagtcaagtctccttgggctgagcagtaagggcccaaagtctgatccctgtccttagctgtccaggcaggcactgccaagctcccagaccatgtaccacagaattccatttggcactccacgctcttgtccccagtcctcccactctgctatcagtgctctactctgaagcccaggtatttccaaattcaaatgtcatggtgattcacattaccctataccttcattccatgggttctttctc

SEQ ID NO: 44106 - DNA, 103 bp, Homo sapiens
tttgagggtgaatgttcattattttgattgtggtaatggttttatggctatatctacaggttaaagcttctcaaattgtacatttatatatgtacagcttatt

SEQ ID NO: 44107 - DNA, 856 bp, Homo sapiens
  misc_feature (856)..(856): n is a, c, g, or t
cacacaccataatggcactagcagcaagtccatctacggggagaaatttgatgatgagaacttcatcctaaagcatacaggtcctggcatcttgtccatggcaaatgctggacccaacacaaacagttcccagtttttcatctgcactgccaagactgagtggttggatggcaagcatgtggtctttggcaaggcgaaagaaggcatgaatattgtggaggccatagagcactttgggtccaggaatggcaagaccagcaagaagatcaccactgctgactgtggacaactcttaataagtttgacttgtgttttatcttagccaccagaccattccttctgtaggtcaggagagcacccctccaccccatttgctcgcagtatccttgaatctttgtgctcttgctgcagttccctttgggctccatgttttctctgttttcttccatgactagctggattgcagagttaagtttatgattatgaaataaacactaaataacaaaaataaataaaaaaaaaaagaaaccaacaccaaccacaacgaacaaacaaacaggcaagcccacgccccagccctgccagccacggtgaacgaaacataaacaacaacacacgacaagcgggggagggggccggtacctaactaagtgagcagaggagaaaccacaccgcgcaatagtatgctgacgacgatcgagcaagtatgatatctgcgcacgaggcacgtccctcgcgcgcgtggcatcaccccgtgtggtgaacgcagcccactggggggtagagagctgcgaccactgaggctccggaacaacatggctgtatgaaatcaaacgcgggagggagtggataaacn

SEQ ID NO: 44108 - DNA, 387 bp, Homo sapiens
tatttctgttctcaaggacacatagtgatttttttactctgatcctgtcagaaaatggaattttaaataatattttgctttatgtctaattagagttttaagaactggaatggccccttataaagttatgttagattttattggaagtcactcttatcattagaagtgtttcaatattattgtgtttttttttaaaatcccactgtattctgtcccagtattgatcaccgtgttgattattaatgtttttagaaatgaaaataattttttaaattcacaggcatcccattttacatatgcacaataaaaacaattagtcttaaaagttaaagctggaaactaaagtctaagggattactaactttagcattaacatactgaactaat

SEQ ID NO: 44109 - DNA, 579 bp, Homo sapiens
tatctccttgtatgacaatctcttaactgtttcgagatgatttacttgcttcttaggcttccattaaaaataagcacatgcttatatgggggaaaatgcaaatagtaatataatagcatataaagttaaaaagtggacatctccttctttattgtctccctccctttgaaactctgcccatacccacattctgtgtcttcataggaataaccctgttcatccctactgatgccctgtattgtgatcaagatggttaattgttttagggtataataaattggggatatagtcagagacagtacattttgggagaaccctccattcccagtggcatcaagcagcttgatcaaagaaaagaaaaaggtgtacaccaagatgagatgaggcatacttagtaagcaataataaaacgtcaagatgtcttcatgcatataatcatgacaatgttggatgtgatatctcatccctgtacatctgcatatatatcttatatagcatgttattctttctgcatttcccccttcaatagagctttattgtaaccatttccatctctgtaaaattaagggagggagggga

SEQ ID NO: 44110 - DNA, 2438 bp, Homo sapiens
cgcaagaatgcatacaaactccagggctgctctctcctggagagggagggaggggatttaaaaacctgcagcaacatgggggaggaggctgtttgtccttctctctctggggaagtaactcgctcaaactgccttccttgctgagctgcttcgcgtagctttgaggaaggtctagtgaaattggtctttccattacatctggatgtactaccagagagttctgctgctgttgttttttttagcttttctttctttgagtctttaaagggcaattgtcgacactctgcaaacataccgatttgttgtctgcccactttggagtcttcaatctgggcagtaactatttaccctttttcctgctagcctgtccccctctctggattgaagtcacctgctaagacaatggactaccgaccagactcccggaaatcatgttggtaggatcccagtctttttcgcctggagggcccaatgggatcattagaagccagtcctttgcgggtttcagcggcctccaggaaaggcgatccaggtgtaactccttcattgaaaattcctccgctctcaagaagcctcaggccaaactgaagaaaatgcacaatttaggccacaaaaacaacaatccccccaaagagcctcagcctaaaagggtggaagaagtctacagggccttgaaaaatggacttgatgaatatctggaggttcaccagacggagctggacaagttgacagctcagttaaaagatatgaaaagaaactctcgcctgggtgtactgtatgacctagacaagcaaattaaaacaattgaaagatacatgagacgcctggagtttcatataagtaaggtagatgaactctatgaagcttattgtatccagcgacgcctccaggatggtgccagcaaaatgaagcaagccttcgcaacatcccctgccagcaaagctgcccgggagagtctgacagagatcaatcggagcttcaaggagtacacagagaatatgtgcaccattgaagtggagctagagaatctgctgggagaattctccatcaagatgaaaggtctggctggctttgcacgcctctgtcctggagatcaatatgaaattttcatgaagtatggccggcagcggtggaaactgaaaggcaaaatagaagtaaatggcaagcagagctgggatggagaagaaacagtttttctgcccctgatagttgggttcatctccatcaaggtcacggagctcaaagggctagcaactcacatcctggtaggtagcgtgacctgtgagaccaaagagctgtttgcagcccgacctcaggtagtggctgtcgacatcaatgaccttggtaccatcaaactgaacctggaaatcacctggtatccatttgacgtggaggacatgaccgcatcctcaggcgctgggaacaaggcagcagcccttcagaggagaatgtccatgtacagccagggtaccccggaaacgcccaccttcaaagaccactccttcttttcaaatctacctgatgacatctttgaaaatggaaaggcagccgaggagaaaatgccactgtcgctcagcttcagtgacctgcccaacggggactgcgccctcacctcccactcaacaggctccccttccaactcaacaaatccagaaattaccatcacccctgcggagtttaacctcagcagcttggcctcccagaatgagggtatggatgacaccagctcagcatcttccaggaactccctgggagaaggccaagagccaaagtcacacctgaaggaggaagacccagaggagcccagaaaacctgcctcggccccatctgaggcttgccgccgacagtcctcaggtgctggggctgagcacctgttccttgagaatgatgttgcagaagcacttctgcaagagtctgaggaggcctctgagctcaagcctgtggaactggacacttcggaaggaaacatcacaaagcagctggtcaagaggctcacatctgcagaggtgccaatggccacagacaggctgctctctgagggttctgttggtggagaatctgaaggctgcagatcctttctagatggaagcttagaggatgcttttaatgggcttttacttgcattagaaccacataaagagcagtataaagagtttcaggatctgaaccaagaagtcatgaatttggatgatattctaaaaaagtagagaagatcctctaatggatcccagtgtgcccatccctcaacctcctcagtgatcaactcatggccaatcttgtttcctattcttcaacctgctgacttccctctggattcttctgcaaccagtcccagatattgtgccattttatccatggttgtacttcttttttggatataaagatttttaaatgcattttttaaatgctaacaaaaaataaaaacttgaaacaaaaaa

SEQ ID NO: 44111 - DNA, 461 bp, Homo sapiens
ttttgtaaaacaccgaagacattgccacttggaattagagattggtcagtattcagcattgactcactgacttaaaatttgtctgcttgtggtattttattttggggtgagcactaggcagagggatatagcagttctgtttcccaaggctttgtggttgacatggttttgttttttgttttttttgttttttttcaactttttgttataaaaatttcaaacagaagtagagaagatcctctaatggatcccagtgtgcccatccctcaacctcctcagtgatcaactcatggccaatcttgtttcctattcttcaacctgctgacttccctctggattcttctgcaaccagtcccagatattgtgccattttatccatggttgtacttcttttttggatataaagatttttaaatgcattttttaaatgctaacaaaaaataaaaacttgaaacaaaaaa

SEQ ID NO: 44112 - DNA, 467 bp, Homo sapiens
tgtttaaaattcagttgattttggaagatattttaaaagagaaaaggtattagttgagacaaattaaagtgactctttcaagtaccagaaggacagagaaaagttggagagcaagaaaaagaactagtaaatggtcctagaaagtgaaaatggaaagaagaaaatgaaactagaaatgcaagtgctaatgagacagtaaactctcttgtacttcctcatcattcagtatggtccaggctgtgccaggtgctagtttctgggaccctgaaatgaggatgtgcttggctgactatgagggtgatgattccataacatctgcacaccctaggctgaagagggacgtgtcaagagcctgaactgttggattcttgttgacagacaaatcagatcatgtaagctaaaaaccatctttactttgtgctgtgtagccagagcatatcttatcatttagaatattccttccaaaa

SEQ ID NO: 44113 - DNA, 3054 bp, Homo sapiens
cgcaagaatgcatacaaactccagggctgctctctcctggagagggagggaggggatttaaaaacctgcagcaacatgggggaggaggctgtttgtccttctctctctggggaagtaactcgctcaaactgccttccttgctgagctgcttcgcgtagctttgaggaaggtctagtgaaattggtctttccattacatctggatgtactaccagagagttctgctgctgttgttttttttagcttttctttctttgagtctttaaagggcaattgtcgacactctgcaaacataccgatttgttgtctgcccactttggagtcttcaatctgggcagtaactatttaccctttttcctgctagcctgtccccctctctggattgaagtcacctgctaagacaatggtatgtgctttgactcctcctgatctaaaaggaatagaattacctaacagttgcagggtcatcctttgggggaactagccctgggcttctgctcagctgaagttgtgttttgacaatgcttcttggtctgttgtggtaagtccttacaaaagccaagcaaaagactgaaatacaagttgtgcgctttctgctgtattttcctcttaccttccccccgaccgcccttgtgttcttatctaacctagattatcacatcttttgtgagcactccctttacccttcttattttgcactgtcacagtagtggcacaatcttagctttcagaatattcttaaagatagaaagggagaactagttcaagtaagttcatctctaaagtaacctagtgttttagctttatgacccctaggtgtagaattccgccttaagacttgactgtgttttcagtttgacgcatgacttatctgaagctttgacttggcctatttgtgtgtttttattgttgttgaatggagataaatgttacaacagttttcatgtttttgagggtgtggttgaaccttgttttaaaaaaaaaaattcttgaaggaaacctaaagtgatggacaattttgtgactaccgaccagactcccggaaatcatgttggtaggatcccagtctttttcgcctggagggcccaatgggatcattagaagccagtcctttgcgggtttcagcggcctccaggaaaggcgatccaggtgtaactccttcattgaaaattcctccgctctcaagaagcctcaggccaaactgaagaaaatgcacaatttaggccacaaaaacaacaatccccccaaagagcctcagcctaaaagggtggaagaagtctacagggccttgaaaaatggacttgatgaatatctggaggttcaccagacggagctggacaagttgacagctcagttaaaagatatgaaaagaaactctcgcctgggtgtactgtatgacctagacaagcaaattaaaacaattgaaagatacatgagacgcctggagtttcatataagtaaggtagatgaactctatgaagcttattgtatccagcgacgcctccaggatggtgccagcaaaatgaagcaagccttcgcaacatcccctgccagcaaagctgcccgggagagtctgacagagatcaatcggagcttcaaggagtacacagagaatatgtgcaccattgaagtggagctagagaatctgctgggagaattctccatcaagatgaaaggtctggctggctttgcacgcctctgtcctggagatcaatatgaaattttcatgaagtatggccggcagcggtggaaactgaaaggcaaaatagaagtaaatggcaagcagagctgggatggagaagaaacagtttttctgcccctgatagttgggttcatctccatcaaggtcacggagctcaaagggctagcaactcacatcctggtaggtagcgtgacctgtgagaccaaagagctgtttgcagcccgacctcaggtagtggctgtcgacatcaatgaccttggtaccatcaaactgaacctggaaatcacctggtatccatttgacgtggaggacatgaccgcatcctcaggcgctgggaacaaggcagcagcccttcagaggagaatgtccatgtacagccagggtaccccggaaacgcccaccttcaaagaccactccttcttttcaaatctacctgatgacatctttgaaaatggaaaggcagccgaggagaaaatgccactgtcgctcagcttcagtgacctgcccaacggggactgcgccctcacctcccactcaacaggctccccttccaactcaacaaatccagaaattaccatcacccctgcggagtttaacctcagcagcttggcctcccagaatgagggtatggatgacaccagctcagcatcttccaggaactccctgggagaaggccaagagccaaagtcacacctgaaggaggaagacccagaggagcccagaaaacctgcctcggccccatctgaggcttgccgccgacagtcctcaggtgctggggctgagcacctgttccttgagaatgatgttgcagaagcacttctgcaagagtctgaggaggcctctgagctcaagcctgtggaactggacacttcggaaggaaacatcacaaagcagctggtcaagaggctcacatctgcagaggtgccaatggccacagacaggctgctctctgagggttctgttggtggagaatctgaaggctgcagatcctttctagatggaagcttagaggatgcttttaatgggcttttacttgcattagaaccacataaagagcagtataaagagtttcaggatctgaaccaagaagtcatgaatttggatgatattctaaaaaagtagagaagatcctctaatggatcccagtgtgcccatccctcaacctcctcagtgatcaactcatggccaatcttgtttcctattcttcaacctgctgacttccctctggattcttctgcaaccagtcccagatattgtgccattttatccatggttgtacttcttttttggatataaagatttttaaatgcattttttaaatgctaacaaaaaataaaaacttgaaacaaaaaa

SEQ ID NO: 44114 - DNA, 5276 bp, Homo sapiens
  misc_feature (2574)..(2574): n is a, c, g, or t
  misc_feature (3185)..(3185): n is a, c, g, or t
gcagtgtgactgctgagactgccggggctgctgcctgctgcttctcgcgcctgtcctctccaagatgcagttttttgatgctgaggagctcctggtcgatgaagaggatgatgtttttggtgaaggactaccgaccagactcccggaaatcatgttggtaggatcccagtctttttcgcctggagggcccaatgggatcattagaagccagtcctttgcgggtttcagcggcctccaggaaaggcgatccaggtgtaactccttcattgaaaattcctccgctctcaagaagcctcaggccaaactgaagaaaatgcacaatttaggccacaaaaacaacaatccccccaaagagcctcagcctaaaagggtggaagaagtctacagggccttgaaaaatggacttgatgaatatctggaggttcaccagacggagctggacaagttgacagctcagttaaaagatatgaaaagaaactctcgcctgggtgtactgtatgacctagacaagcaaattaaaacaattgaaagatacatgagacgcctggagtttcatataagtaaggtagatgaactctatgaagcttattgtatccagcgacgcctccaggatggtgccagcaaaatgaagcaagccttcgcaacatcccctgccagcaaagctgcccgggagagtctgacagagatcaatcggagcttcaaggagtacacagagaatatgtgcaccattgaagtggagctagagaatctgctgggagaattctccatcaagatgaaaggtctggctggctttgcacgcctctgtcctggagatcaatatgaaattttcatgaagtatggccggcagcggtggaaactgaaaggcaaaatagaagtaaatggcaagcagagctgggatggagaagaaacagtttttctgcccctgatagttgggttcatctccatcaaggtcacggagctcaaagggctagcaactcacatcctggtaggtagcgtgacctgtgagaccaaagagctgtttgcagcccgacctcaggtagtggctgtcgacatcaatgaccttggtaccatcaaactgaacctggaaatcacctggtatccatttgacgtggaggacatgaccgcatcctcaggcgctgggaacaaggcagcagcccttcagaggagaatgtccatgtacagccagggtaccccggaaacgcccaccttcaaagaccactccttcttttcaaatctacctgatgacatctttgaaaatggaaaggcagccgaggagaaaatgccactgtcgctcagcttcagtgacctgcccaacggggactgcgccctcacctcccactcaacaggctccccttccaactcaacaaatccagaaattaccatcacccctgcggagtttaacctcagcagcttggcctcccagaatgagggtatggatgacaccagctcagcatcttccaggaactccctgggagaaggccaagagccaaagtcacacctgaaggaggaagacccagaggagcccagaaaacctgcctcggccccatctgaggcttgccgccgacagtcctcaggtgctggggctgagcacctgttccttgagaatgatgttgcagaagcacttctgcaagagtctgaggaggcctctgagctcaagcctgtggaactggacacttcggaaggaaacatcacaaagcagctggtcaagaggctcacatctgcagaggtgccaatggccacagacaggctgctctctgagggttctgttggtggagaatctgaaggctgcagatcctttctagatggaagcttagaggatgcttttaatgggcttttacttgcattagaaccacataaagagcagtataaagagtttcaggatctgaaccaagaagtcatgaatttggatgatattctaaaatgcaagccagcagtaagccgcagcaggtcttccagtttaagtctcacagttgaaagtgctttagaaagctttgatttcctgaacacctctgattttgacgaggaggaggatggtgatgaggtttgtaatgttggcggaggtgctgactcagtattttcagacactgagactgagaaacacagttacaggtcggttcacccagaagccagggggcatctcagtgaagcgctcactgaagacacaggagttgggaccagtgtggcaggaagtcctctcccactgaccacaggcaacgagagcctggacatcaccatcgtcaggcacctccagtactgcacccaactcgtgcagcaaattgttttctcaagcaaaaccccatttgtggcaagaagtctcttagagaaactcgcagctgtcagtgatgagaacataggaaatatcagttctgttgtggaagccataccagaatttcacaaaaagctgtctttgctgtcattctggaccaagtgctgcagccctgttggtgtctaccacagcccagcggacagagtgatgaagcagctggaggccagctttgccagaactgtcaacaaagaatatccaggacttgcagacccagtgtttcgaaccctggtgtcccaaattctggaccnggctgagcctctgctttcctccagcctgtcctcggaagtcgtcactgttttccagtattacagttacttcaccagccacggcgtcagtgacctggagagttacctgagccagctggccaggcaagtttccatggttcagactctgcaatcactaagagatgaaaaactgctacaaaccatgagtgaccttgctcccagcaacctcctggcccagcaggaagtactcaggactctggctctgctattaaccagagaggacaacgaagttagcgaggctgtgacgctttacttggcagcagcctccaaaaatcagcatttcagggaaaaggccttgctctattactgtgaagcactaacaaagacaaacctccagctccagaaagcagcttgcctggctctgaaaatccttgaggctactgaaagcattaaaatgctggtgacattgtgtcaatctgatactgaagaaatcagaaatgtggcctcagaaaccctcttgtctctgggagaagatgggcggctggcatatgaacaattggacaaatttcctcgagactgtgttaaagtcggaggtcgtcatggaactgaagttgccacagccttttaattacagnttaactgcctaacagctgtcttaatatctggcccttttcatcaggatggtgctgtggtttgggctggaaattgtttagagcctgagagacacgacaactgaaataaaaatgtaggccaggtgcagtggctcatgcctgtaatcccagtactttgggaggccaacgcaggagaattgcttaagcccaggaggttcaagaccaacctgggcaacatagcaaggccctgtctctacaaaaaaaatagtttaattagtcgggcgtggtggcatgcacctgtagtcccagctacttgggaggctaaggtgggaggattgcttgagcccagaagattcaggctgcagtgagccataattgccccactgcactccagactgggtgacagagcaaaaccctgtctcaaaaaacaaaacaacaacaacaactaaaaaaacatgttatagaaagaattcagagtctcgtttcacagtacctatctacttttcctttggccaatatagaatagggctatggtataattcaaatagattacatcgtcgattgtgtctgataatactcagtgaaagagtccatcttatcttaatatgtatgaaatttaaaaatagccatctttgtacttttttgcaagtttctctataagcttgaaatagtcatgtgatacttcgacaaacatcatatgccttgcagtttttctcggtcgtgttctcagggttgagtagtccccttagctacctaactttactttcaatacaaagcacaaaaaagaatacttcaaataaaagtttgcctgcagaacctggcaaaatgacccattatgagagtttagatgttttaattttatgtgctcccagctactctggagtctgaggtgggaggatcacttgaggcagaggttgcagtaagctgagattacactactgcactccagcccatgtgacagaggaatgagagccagtctcaaaaaaaaaacacaaaaaactcccataatttattttgtttcttttccccatcctgaaaattcccaaatcatgtttccattatggaaaaatgataagtaaatgactaagaactacattaagattatgcctatacacttaaacaaaaaactcaaagcttatgctttttttttttaattaatgagagctattttttatgatattcttaccataggggtgttttgctgctaagacaaatcaaaaccaaaagctgtagattcacaaacctgtgatgctctttgaggtggaggaacctagaagtcagagaaatcctaatggagtaggagtggaggaacatttaaagtggtccctccttctgtaaaaatgaccgtgggattagaaagaaggacatcctgaggggtggttactgcccccagggaaatcactcactggtaggattccctggccaaatagttcaaacatcaggtcccattattgcttcagtatcagagatgcaagttcattaagcaaagtacaagaccattcagtagctcttattaaaatatcttttcttcctctaaagagtgtacaaggtggggtatgccaaggtatcaaaacaatatatgtgagtgtaatttaaactgtggaatatcaactgtactatggacgtgtttgtatcatttagatgtcattttaaatatttacattttagcaagacttttaaaaaggactcatttcatttcaaagtgcaaattgtttgccaggcttctggcaaatggttctttcaactgtgaacttatcgtgtacatatctgtatatttataaatattatatatattcatacatccttcactttaaaggtacattgtacagtctgtagttaggaggtatagcctatagcttatgttaaatggttgaaatggttctttttatagaaagtcaaacacagatgttacaggattttgtgtttggtttgtcattttttttattttttattttgactattgcatgagtaattaattccagatcttttgtattcacttctgtattttatgtttggttgaggggtgcttttagttgtgtggcatttgtattcattgatctttcagtcatgtaagttaaaataaaaattatttttgaattactagcaaaaaaaaaa

SEQ ID NO: 44115 - DNA, 5533 bp, Homo sapiens
  misc_feature (2831)..(2831): n is a, c, g, or t
  misc_feature (3442)..(3442): n is a, c, g, or t
tttttttaagaaaagaacaaaaaggggggggttaagttttctttttcatttttatacgtctggacttaacttccaggatagctgcaagacccttttgttcctttgccatgagcaggttttaggccgctctgttgggaccatggtgttaccttcgcgattacactggatcagaaacaggccatggagggacaggatccggaggcgccagctcaaccgttgcttagagtccccagaaagctggcccaacctacctatttcacgaaacctgaccctaaagatgtcctgaaaagccctgagacccttcacgtgcagaggctgagagggcaatctaatgactctactgctgaatttgcaaggatacgggtttataaccgttggtaaggactaccgaccagactcccggaaatcatgttggtaggatcccagtctttttcgcctggagggcccaatgggatcattagaagccagtcctttgcgggtttcagcggcctccaggaaaggcgatccaggtgtaactccttcattgaaaattcctccgctctcaagaagcctcaggccaaactgaagaaaatgcacaatttaggccacaaaaacaacaatccccccaaagagcctcagcctaaaagggtggaagaagtctacagggccttgaaaaatggacttgatgaatatctggaggttcaccagacggagctggacaagttgacagctcagttaaaagatatgaaaagaaactctcgcctgggtgtactgtatgacctagacaagcaaattaaaacaattgaaagatacatgagacgcctggagtttcatataagtaaggtagatgaactctatgaagcttattgtatccagcgacgcctccaggatggtgccagcaaaatgaagcaagccttcgcaacatcccctgccagcaaagctgcccgggagagtctgacagagatcaatcggagcttcaaggagtacacagagaatatgtgcaccattgaagtggagctagagaatctgctgggagaattctccatcaagatgaaaggtctggctggctttgcacgcctctgtcctggagatcaatatgaaattttcatgaagtatggccggcagcggtggaaactgaaaggcaaaatagaagtaaatggcaagcagagctgggatggagaagaaacagtttttctgcccctgatagttgggttcatctccatcaaggtcacggagctcaaagggctagcaactcacatcctggtaggtagcgtgacctgtgagaccaaagagctgtttgcagcccgacctcaggtagtggctgtcgacatcaatgaccttggtaccatcaaactgaacctggaaatcacctggtatccatttgacgtggaggacatgaccgcatcctcaggcgctgggaacaaggcagcagcccttcagaggagaatgtccatgtacagccagggtaccccggaaacgcccaccttcaaagaccactccttcttttcaaatctacctgatgacatctttgaaaatggaaaggcagccgaggagaaaatgccactgtcgctcagcttcagtgacctgcccaacggggactgcgccctcacctcccactcaacaggctccccttccaactcaacaaatccagaaattaccatcacccctgcggagtttaacctcagcagcttggcctcccagaatgagggtatggatgacaccagctcagcatcttccaggaactccctgggagaaggccaagagccaaagtcacacctgaaggaggaagacccagaggagcccagaaaacctgcctcggccccatctgaggcttgccgccgacagtcctcaggtgctggggctgagcacctgttccttgagaatgatgttgcagaagcacttctgcaagagtctgaggaggcctctgagctcaagcctgtggaactggacacttcggaaggaaacatcacaaagcagctggtcaagaggctcacatctgcagaggtgccaatggccacagacaggctgctctctgagggttctgttggtggagaatctgaaggctgcagatcctttctagatggaagcttagaggatgcttttaatgggcttttacttgcattagaaccacataaagagcagtataaagagtttcaggatctgaaccaagaagtcatgaatttggatgatattctaaaatgcaagccagcagtaagccgcagcaggtcttccagtttaagtctcacagttgaaagtgctttagaaagctttgatttcctgaacacctctgattttgacgaggaggaggatggtgatgaggtttgtaatgttggcggaggtgctgactcagtattttcagacactgagactgagaaacacagttacaggtcggttcacccagaagccagggggcatctcagtgaagcgctcactgaagacacaggagttgggaccagtgtggcaggaagtcctctcccactgaccacaggcaacgagagcctggacatcaccatcgtcaggcacctccagtactgcacccaactcgtgcagcaaattgttttctcaagcaaaaccccatttgtggcaagaagtctcttagagaaactcgcagctgtcagtgatgagaacataggaaatatcagttctgttgtggaagccataccagaatttcacaaaaagctgtctttgctgtcattctggaccaagtgctgcagccctgttggtgtctaccacagcccagcggacagagtgatgaagcagctggaggccagctttgccagaactgtcaacaaagaatatccaggacttgcagacccagtgtttcgaaccctggtgtcccaaattctggaccnggctgagcctctgctttcctccagcctgtcctcggaagtcgtcactgttttccagtattacagttacttcaccagccacggcgtcagtgacctggagagttacctgagccagctggccaggcaagtttccatggttcagactctgcaatcactaagagatgaaaaactgctacaaaccatgagtgaccttgctcccagcaacctcctggcccagcaggaagtactcaggactctggctctgctattaaccagagaggacaacgaagttagcgaggctgtgacgctttacttggcagcagcctccaaaaatcagcatttcagggaaaaggccttgctctattactgtgaagcactaacaaagacaaacctccagctccagaaagcagcttgcctggctctgaaaatccttgaggctactgaaagcattaaaatgctggtgacattgtgtcaatctgatactgaagaaatcagaaatgtggcctcagaaaccctcttgtctctgggagaagatgggcggctggcatatgaacaattggacaaatttcctcgagactgtgttaaagtcggaggtcgtcatggaactgaagttgccacagccttttaattacagnttaactgcctaacagctgtcttaatatctggcccttttcatcaggatggtgctgtggtttgggctggaaattgtttagagcctgagagacacgacaactgaaataaaaatgtaggccaggtgcagtggctcatgcctgtaatcccagtactttgggaggccaacgcaggagaattgcttaagcccaggaggttcaagaccaacctgggcaacatagcaaggccctgtctctacaaaaaaaatagtttaattagtcgggcgtggtggcatgcacctgtagtcccagctacttgggaggctaaggtgggaggattgcttgagcccagaagattcaggctgcagtgagccataattgccccactgcactccagactgggtgacagagcaaaaccctgtctcaaaaaacaaaacaacaacaacaactaaaaaaacatgttatagaaagaattcagagtctcgtttcacagtacctatctacttttcctttggccaatatagaatagggctatggtataattcaaatagattacatcgtcgattgtgtctgataatactcagtgaaagagtccatcttatcttaatatgtatgaaatttaaaaatagccatctttgtacttttttgcaagtttctctataagcttgaaatagtcatgtgatacttcgacaaacatcatatgccttgcagtttttctcggtcgtgttctcagggttgagtagtccccttagctacctaactttactttcaatacaaagcacaaaaaagaatacttcaaataaaagtttgcctgcagaacctggcaaaatgacccattatgagagtttagatgttttaattttatgtgctcccagctactctggagtctgaggtgggaggatcacttgaggcagaggttgcagtaagctgagattacactactgcactccagcccatgtgacagaggaatgagagccagtctcaaaaaaaaaacacaaaaaactcccataatttattttgtttcttttccccatcctgaaaattcccaaatcatgtttccattatggaaaaatgataagtaaatgactaagaactacattaagattatgcctatacacttaaacaaaaaactcaaagcttatgctttttttttttaattaatgagagctattttttatgatattcttaccataggggtgttttgctgctaagacaaatcaaaaccaaaagctgtagattcacaaacctgtgatgctctttgaggtggaggaacctagaagtcagagaaatcctaatggagtaggagtggaggaacatttaaagtggtccctccttctgtaaaaatgaccgtgggattagaaagaaggacatcctgaggggtggttactgcccccagggaaatcactcactggtaggattccctggccaaatagttcaaacatcaggtcccattattgcttcagtatcagagatgcaagttcattaagcaaagtacaagaccattcagtagctcttattaaaatatcttttcttcctctaaagagtgtacaaggtggggtatgccaaggtatcaaaacaatatatgtgagtgtaatttaaactgtggaatatcaactgtactatggacgtgtttgtatcatttagatgtcattttaaatatttacattttagcaagacttttaaaaaggactcatttcatttcaaagtgcaaattgtttgccaggcttctggcaaatggttctttcaactgtgaacttatcgtgtacatatctgtatatttataaatattatatatattcatacatccttcactttaaaggtacattgtacagtctgtagttaggaggtatagcctatagcttatgttaaatggttgaaatggttctttttatagaaagtcaaacacagatgttacaggattttgtgtttggtttgtcattttttttattttttattttgactattgcatgagtaattaattccagatcttttgtattcacttctgtattttatgtttggttgaggggtgcttttagttgtgtggcatttgtattcattgatctttcagtcatgtaagttaaaataaaaattatttttgaattactagcaaaaaaaaaa

SEQ ID NO: 44116 - DNA, 3192 bp, Homo sapiens
gcagtgtgactgctgagactgccggggctgctgcctgctgcttctcgcgcctgtcctctccaagatgcagttttttgatgctgaggagctcctggtcgatgaagaggatgatgtttttggtgaaggactaccgaccagactcccggaaatcatgttggtaggatcccagtctttttcgcctggagggcccaatgggatcattagaagccagtcctttgcgggtttcagcggcctccaggaaaggcgatccaggtgtaactccttcattgaaaattcctccgctctcaagaagcctcaggccaaactgaagaaaatgcacaatttaggccacaaaaacaacaatccccccaaagagcctcagcctaaaagggtggaagaagtctacagggccttgaaaaatggacttgatgaatatctggaggttcaccagacggagctggacaagttgacagctcagttaaaagatatgaaaagaaactctcgcctgggtgtactgtatgacctagacaagcaaattaaaacaattgaaagatacatgagacgcctggagtttcatataagtaaggtagatgaactctatgaagcttattgtatccagcgacgcctccaggatggtgccagcaaaatgaagcaagccttcgcaacatcccctgccagcaaagctgcccgggagagtctgacagagatcaatcggagcttcaaggagtacacagagaatatgtgcaccattgaagtggagctagagaatctgctgggagaattctccatcaagatgaaaggtctggctggctttgcacgcctctgtcctggagatcaatatgaaattttcatgaagtatggccggcagcggtggaaactgaaaggcaaaatagaagtaaatggcaagcagagctgggatggagaagaaacagtttttctgcccctgatagttgggttcatctccatcaaggtcacggagctcaaagggctagcaactcacatcctggtaggtagcgtgacctgtgagaccaaagagctgtttgcagcccgacctcaggtagtggctgtcgacatcaatgaccttggtaccatcaaactgaacctggaaatcacctggtatccatttgacgtggaggacatgaccgcatcctcaggcgctgggaacaaggcagcagcccttcagaggagaatgtccatgtacagccagggtaccccggaaacgcccaccttcaaagaccactccttcttttcaaatctacctgatgacatctttgaaaatggaaaggcagccgaggagaaaatgccactgtcgctcagcttcagtgacctgcccaacggggactgcgccctcacctcccactcaacaggctccccttccaactcaacaaatccagaaattaccatcacccctgcggagtttaacctcagcagcttggcctcccagaatgagggtatggatgacaccagctcagcatcttccaggaactccctgggagaaggccaagagccaaagtcacacctgaaggaggaagacccagaggagcccagaaaacctgcctcggccccatctgaggcttgccgccgacagtcctcaggtgctggggctgagcacctgttccttgagaatgatgttgcagaagcacttctgcaagagtctgaggaggcctctgagctcaagcctgtggaactggacacttcggaaggaaacatcacaaagcagctggtcaagaggctcacatctgcagaggtgccaatggccacagacaggctgctctctgagggttctgttggtggagaatctgaaggctgcagatcctttctagatggaagcttagaggatgcttttaatgggcttttacttgcattagaaccacataaagagcagtataaagagtttcaggatctgaaccaagaagtcatgaatttggatgatattctaaaagatgctaaacaccttgacgatcagaaactaaatggtgctgcctcttggacggagatcactgagggtgaatgagacaactgtgatttaaaagaccgaaagacgttttcccatgtgcttttgtgccatcttgagtgtcagagacagatccctgcaaggcccttcctaccttgcgctaagaaatcagcaaggagtgtcacctaactggatggaggacatttagtgcttctaacttgcagaatttgtcccattcgacccaccccagcatcctcttgaatatttggaaatacttctctccaactctgtgcccatagcaactggcattgttttgcttgtaatgtttctgcatgtggccagcattatagaatgctccaggccagagaatgggattgctcccatgatgccagggcctggtcagggaagtggtgggacttgttccctttgaggcagagctccagaggaagcagggctgcttcttgtcatgcccaaggcattcattctttcctcagtcctcagaggaaaaattatatgctgtgagcaggtgcggtggctcatgcctgtaatcccaacactttgggaagcccaggattgctggagcccaagagttcaagaccggtatggtcaacatagggagaccctgtctctgcaataaaagaaaaaaattagcctggtgtggtggcacatgcctgtggtctcagctacctgggaggctaaggtgagaggattgcttaagcccgggagattgaggctgcagtgagctgtgatcacaccactgcactccagcctgagtgacagagcaagaccttgtctcaaaaaaaaaaaaaaaaaaaaaaattggggggttttttccctggggacctggggctagggggatttggacccctttccggtccgggaaaattggtctgcggaaagccccttaaaaagccaaatgcccttaagaatagcatagccgccctgttgggtaaaaaccccgcgaaaagaacttttgccccttggaatttagcacaattggcgccagtatttcacggcattggaccctccgttgacctttcaacatttgtgctccgcctgtggggggcaattctacactgcggggggtggaccccatacgggcagaagcggcaatactacgccagttctggtgttcccccaaggctttggtgtgtatgcaccctgtgcttcgggtatatctggggttcaggcgggaatataccacacctttgtggttatacaacattttcaccgtaatgttaggaaaatcctctgagggc

SEQ ID NO: 44117 - DNA, 663 bp, Homo sapiens
tttttttaagaaaagaacaaaaaggggggggttaagttttctttttcatttttatacgtctggacttaacttccaggatagctgcaagacccttttgttcctttgccatgagcaggttttaggccgctctgttgggaccatggtgttaccttcgcgattacactggatcagaaacaggccatggagggacaggatccggaggcgccagctcaaccgttgcttagagtccccagaaagctggcccaacctacctatttcacgaaacctgaccctaaagatgtcctgaaaagccctgagacccttcacgtgcagaggctgagagggcaatctaatgactctactgctgaatttgcaaggatacgggtttataaccgttggtaaggtgagaagtctctaaaatctgctgtaaaaacaccttttaaaggcttcaacctcgtgatactttcatgaggtttgagttctgggttttgcttcttgttttttggagagctggcggctttctgctcccctccctcttgaaactatggtgtttctatcttcttgctttctcctcctctggcccccagcattttccttggtctacacccttgtttgtaagtcttggttcactgccttcagcgctgtttgtggtctcagagaggatgggtggcgcttttcaaattg

SEQ ID NO: 44118 - DNA, 775 bp, Homo sapiens
tttcttgctctgaaggtagtgcaaaatgtgtaggttatatgctatagtttatctcagagagtaagaatgaggtatacctcttaaactacgaacaaaccaaaatgccttcatgaggtccctccttctctttcaggccttgctctattactgtgaagcactaacaaagacaaacctccagctccagaaagcagcttgcctggctctgaaaatccttgaggtaaagcccagccttggagctcccctggcagctcagcttggagccaggctaagctgagtgtatataacagcttttctttcatgtttgaaagtacttttttagcagtatttcttgtcttctttgcaccgtatgttagttttagtatttttctcccttaaacagtaattacatgtgactttgttttgttaaagtcaataagtggcagaaagcaatcatgttttgcactagcccaagggaaccagtttgcctttaggtcagtattagaaaagtacatcttattagccggcacagtggctcatgcctgtaatcccagcattttgggaggccgaggccggtggatcacctgaggtcaggagtttgagatcaacctggccaacatggtgaaacctcatctctacaaaaatacaaaaactagctgggcatgatggcaggtgcctgtaatcccagctactcaggaggctgaggagggagaattgcttgaacccaggaagttgcagtgagccaagattgtgccattgtactccagcctgggtggcagagccagactctgtctcaaaa

SEQ ID NO: 44119 - DNA, 5576 bp, Homo sapiens
  misc_feature (2874)..(2874): n is a, c, g, or t
  misc_feature (3485)..(3485): n is a, c, g, or t
agccccgcaacttcaccccgcgcgccgcagctgctgcgagcggacgcggcagggcagccggcgctggggacagctcgcgtccacccgacttcctcccggggtccccttcacccaagtgagccagctcaggctgtctgcaaagccggaggtgcgggcagctccgggcattgcattggtgcggaggcttttatatgccagagaaccctgagtgtgcccctgacatgacaaggagccgtcgtcgttaggactaccgaccagactcccggaaatcatgttggtaggatcccagtctttttcgcctggagggcccaatgggatcattagaagccagtcctttgcgggtttcagcggcctccaggaaaggcgatccaggtgtaactccttcattgaaaattcctccgctctcaagaagcctcaggccaaactgaagaaaatgcacaatttaggccacaaaaacaacaatccccccaaagagcctcagcctaaaagggtggaagaagtctacagggccttgaaaaatggacttgatgaatatctggaggttcaccagacggagctggacaagttgacagctcagttaaaagatatgaaaagaaactctcgcctgggtgtactgtatgacctagacaagcaaattaaaacaattgaaagatacatgagacgcctggagtttcatataagtaaggtagatgaactctatgaagcttattgtatccagcgacgcctccaggatggtgccagcaaaatgaagcaagccttcgcaacatcccctgccagcaaagctgcccgggagagtctgacagagatcaatcggagcttcaaggagtacacagagaatatgtgcaccattgaagtggagctagagaatctgctgggagaattctccatcaagatgaaaggtctggctggctttgcacgcctctgtcctggagatcaatatgaaattttcatgaagtatggccggcagcggtggaaactgaaaggcaaaatagaagtaaatggcaagcagagctgggatggagaagaaacagtttttctgcccctgatagttgggttcatctccatcaaggtcacggagctcaaagggctagcaactcacatcctggtaggtagcgtgacctgtgagaccaaagagctgtttgcagcccgacctcaggtagtggctgtcgacatcaatgaccttggtaccatcaaactgaacctggaaatcacctggtatccatttgacgtggaggacatgaccgcatcctcaggcgctgggaacaaggcagcagcccttcagaggagaatgtccatgtacagccagggtaccccggaaacgcccaccttcaaagaccactccttctttaggtggctgcatccttccccagacaagcccaggcggctgtctgtcttgagtgccttgcaagacactttctttgccaagctgcaccgcagccgctccttcagtgacctgccctccctcaggccgagtcccaaggccgtgctagagctctattcaaatctacctgatgacatctttgaaaatggaaaggcagccgaggagaaaatgccactgtcgctcagcttcagtgacctgcccaacggggactgcgccctcacctcccactcaacaggctccccttccaactcaacaaatccagaaattaccatcacccctgcggagtttaacctcagcagcttggcctcccagaatgagggtatggatgacaccagctcagcatcttccaggaactccctgggagaaggccaagagccaaagtcacacctgaaggaggaagacccagaggagcccagaaaacctgcctcggccccatctgaggcttgccgccgacagtcctcaggtgctggggctgagcacctgttccttgagaatgatgttgcagaagcacttctgcaagagtctgaggaggcctctgagctcaagcctgtggaactggacacttcggaaggaaacatcacaaagcagctggtcaagaggctcacatctgcagaggtgccaatggccacagacaggctgctctctgagggttctgttggtggagaatctgaaggctgcagatcctttctagatggaagcttagaggatgcttttaatgggcttttacttgcattagaaccacataaagagcagtataaagagtttcaggatctgaaccaagaagtcatgaatttggatgatattctaaaatgcaagccagcagtaagccgcagcaggtcttccagtttaagtctcacagttgaaagtgctttagaaagctttgatttcctgaacacctctgattttgacgaggaggaggatggtgatgaggtttgtaatgttggcggaggtgctgactcagtattttcagacactgagactgagaaacacagttacaggtcggttcacccagaagccagggggcatctcagtgaagcgctcactgaagacacaggagttgggaccagtgtggcaggaagtcctctcccactgaccacaggcaacgagagcctggacatcaccatcgtcaggcacctccagtactgcacccaactcgtgcagcaaattgttttctcaagcaaaaccccatttgtggcaagaagtctcttagagaagctttctaggcagatccaagtgatggagaaactcgcagctgtcagtgatgagaacataggaaatatcagttctgttgtggaagccataccagaatttcacaaaaagctgtctttgctgtcattctggaccaagtgctgcagccctgttggtgtctaccacagcccagcggacagagtgatgaagcagctggaggccagctttgccagaactgtcaacaaagaatatccaggacttgcagacccagtgtttcgaaccctggtgtcccaaattctggaccnggctgagcctctgctttcctccagcctgtcctcggaagtcgtcactgttttccagtattacagttacttcaccagccacggcgtcagtgacctggagagttacctgagccagctggccaggcaagtttccatggttcagactctgcaatcactaagagatgaaaaactgctacaaaccatgagtgaccttgctcccagcaacctcctggcccagcaggaagtactcaggactctggctctgctattaaccagagaggacaacgaagttagcgaggctgtgacgctttacttggcagcagcctccaaaaatcagcatttcagggaaaaggccttgctctattactgtgaagcactaacaaagacaaacctccagctccagaaagcagcttgcctggctctgaaaatccttgaggctactgaaagcattaaaatgctggtgacattgtgtcaatctgatactgaagaaatcagaaatgtggcctcagaaaccctcttgtctctgggagaagatgggcggctggcatatgaacaattggacaaatttcctcgagactgtgttaaagtcggaggtcgtcatggaactgaagttgccacagccttttaattacagnttaactgcctaacagctgtcttaatatctggcccttttcatcaggatggtgctgtggtttgggctggaaattgtttagagcctgagagacacgacaactgaaataaaaatgtaggccaggtgcagtggctcatgcctgtaatcccagtactttgggaggccaacgcaggagaattgcttaagcccaggaggttcaagaccaacctgggcaacatagcaaggccctgtctctacaaaaaaaatagtttaattagtcgggcgtggtggcatgcacctgtagtcccagctacttgggaggctaaggtgggaggattgcttgagcccagaagattcaggctgcagtgagccataattgccccactgcactccagactgggtgacagagcaaaaccctgtctcaaaaaacaaaacaacaacaacaactaaaaaaacatgttatagaaagaattcagagtctcgtttcacagtacctatctacttttcctttggccaatatagaatagggctatggtataattcaaatagattacatcgtcgattgtgtctgataatactcagtgaaagagtccatcttatcttaatatgtatgaaatttaaaaatagccatctttgtacttttttgcaagtttctctataagcttgaaatagtcatgtgatacttcgacaaacatcatatgccttgcagtttttctcggtcgtgttctcagggttgagtagtccccttagctacctaactttactttcaatacaaagcacaaaaaagaatacttcaaataaaagtttgcctgcagaacctggcaaaatgacccattatgagagtttagatgttttaattttatgtgctcccagctactctggagtctgaggtgggaggatcacttgaggcagaggttgcagtaagctgagattacactactgcactccagcccatgtgacagaggaatgagagccagtctcaaaaaaaaaacacaaaaaactcccataatttattttgtttcttttccccatcctgaaaattcccaaatcatgtttccattatggaaaaatgataagtaaatgactaagaactacattaagattatgcctatacacttaaacaaaaaactcaaagcttatgctttttttttttaattaatgagagctattttttatgatattcttaccataggggtgttttgctgctaagacaaatcaaaaccaaaagctgtagattcacaaacctgtgatgctctttgaggtggaggaacctagaagtcagagaaatcctaatggagtaggagtggaggaacatttaaagtggtccctccttctgtaaaaatgaccgtgggattagaaagaaggacatcctgaggggtggttactgcccccagggaaatcactcactggtaggattccctggccaaatagttcaaacatcaggtcccattattgcttcagtatcagagatgcaagttcattaagcaaagtacaagaccattcagtagctcttattaaaatatcttttcttcctctaaagagtgtacaaggtggggtatgccaaggtatcaaaacaatatatgtgagtgtaatttaaactgtggaatatcaactgtactatggacgtgtttgtatcatttagatgtcattttaaatatttacattttagcaagacttttaaaaaggactcatttcatttcaaagtgcaaattgtttgccaggcttctggcaaatggttctttcaactgtgaacttatcgtgtacatatctgtatatttataaatattatatatattcatacatccttcactttaaaggtacattgtacagtctgtagttaggaggtatagcctatagcttatgttaaatggttgaaatggttctttttatagaaagtcaaacacagatgttacaggattttgtgtttggtttgtcattttttttattttttattttgactattgcatgagtaattaattccagatcttttgtattcacttctgtattttatgtttggttgaggggtgcttttagttgtgtggcatttgtattcattgatctttcagtcatgtaagttaaaataaaaattatttttgaattactagcaaaaaaaaaa

SEQ ID NO: 44120 - DNA, 899 bp, Homo sapiens
atgcacagtgtaggttcctatcctgctttcaagaacagaacagaattcacgtgtgggagcaaacggctcaccaggtggtggactaccgaccagactcccggaaatcatgttggtaggatcccagtctttttcgcctggagggcccaatgggatcattagaagccagtcctttgcgggtttcagcggcctccaggaaaggcgatccaggtgtaactccttcattgaaaattcctccgctctcaagaagcctcaggccaaactgaagaaaatgcacaatttaggccacaaaaacaacaatccccccaaagagcctcagcctaaaagggtggaagaagtctacagggccttgaaaaatggacttgatgaatatctggaggttcaccagacggagctggacaagttgacagctcagttaaaagatatgaaaagaaactctcgcctgggtgtactgtatgacctagacaagcaaattaaaacaattgaaagatacatgagacgcctggagtttcatataagtaaggtagatgaactctatgaagcttattgtatccagcgacgcctccaggatggtgccagcaaaatgaagcaagccttcgcaacatcccctgccagcaaagctgcccgggagagtctgacagagatcaatcggagcttcaaggagtacacagagaatatgtgcaccattgaaagtggaggctagaagagatcttgctggggaaaaattcctccatcaacgatgaacaggtctggcctggctttgcaccgcctctgttcctggacgatcactatgacaattttcatgaaagtatgggcgggcaagccggtggaacctggaaggcaactagaacttacatggcagccaaaactgggatggggaaaaacaaggttttggccctgat

SEQ ID NO: 44121 - DNA, 5543 bp, Homo sapiens
  misc_feature (2841)..(2841): n is a, c, g, or t
  misc_feature (3452)..(3452): n is a, c, g, or t
tgtttaaaattcagttgattttggaagatattttaaaagagaaaaggtattagttgagacaaattaaagtgactctttcaagtaccagaaggacagagaaaagttggagagcaagaaaaagaactagtaaatggtcctagaaagtgaaaatggaaagaagaaaatgaaactagaaatgcaagtgctaatgagacagtaaactctcttgtacttcctcatcattcagtatggtccaggctgtgccaggtgctagtttctgggaccctgaaatgaggatgtgcttggctgactatgagggtgatgattccataacatctgcacaccctaggctgaagagggacgtgtcaagagcctgaactgttggattcttgttgacagacaaatcagatcatgactaccgaccagactcccggaaatcatgttggtaggatcccagtctttttcgcctggagggcccaatgggatcattagaagccagtcctttgcgggtttcagcggcctccaggaaaggcgatccaggtgtaactccttcattgaaaattcctccgctctcaagaagcctcaggccaaactgaagaaaatgcacaatttaggccacaaaaacaacaatccccccaaagagcctcagcctaaaagggtggaagaagtctacagggccttgaaaaatggacttgatgaatatctggaggttcaccagacggagctggacaagttgacagctcagttaaaagatatgaaaagaaactctcgcctgggtgtactgtatgacctagacaagcaaattaaaacaattgaaagatacatgagacgcctggagtttcatataagtaaggtagatgaactctatgaagcttattgtatccagcgacgcctccaggatggtgccagcaaaatgaagcaagccttcgcaacatcccctgccagcaaagctgcccgggagagtctgacagagatcaatcggagcttcaaggagtacacagagaatatgtgcaccattgaagtggagctagagaatctgctgggagaattctccatcaagatgaaaggtctggctggctttgcacgcctctgtcctggagatcaatatgaaattttcatgaagtatggccggcagcggtggaaactgaaaggcaaaatagaagtaaatggcaagcagagctgggatggagaagaaacagtttttctgcccctgatagttgggttcatctccatcaaggtcacggagctcaaagggctagcaactcacatcctggtaggtagcgtgacctgtgagaccaaagagctgtttgcagcccgacctcaggtagtggctgtcgacatcaatgaccttggtaccatcaaactgaacctggaaatcacctggtatccatttgacgtggaggacatgaccgcatcctcaggcgctgggaacaaggcagcagcccttcagaggagaatgtccatgtacagccagggtaccccggaaacgcccaccttcaaagaccactccttcttttcaaatctacctgatgacatctttgaaaatggaaaggcagccgaggagaaaatgccactgtcgctcagcttcagtgacctgcccaacggggactgcgccctcacctcccactcaacaggctccccttccaactcaacaaatccagaaattaccatcacccctgcggagtttaacctcagcagcttggcctcccagaatgagggtatggatgacaccagctcagcatcttccaggaactccctgggagaaggccaagagccaaagtcacacctgaaggaggaagacccagaggagcccagaaaacctgcctcggccccatctgaggcttgccgccgacagtcctcaggtgctggggctgagcacctgttccttgagaatgatgttgcagaagcacttctgcaagagtctgaggaggcctctgagctcaagcctgtggaactggacacttcggaaggaaacatcacaaagcagctggtcaagaggctcacatctgcagaggtgccaatggccacagacaggctgctctctgagggttctgttggtggagaatctgaaggctgcagatcctttctagatggaagcttagaggatgcttttaatgggcttttacttgcattagaaccacataaagagcagtataaagagtttcaggatctgaaccaagaagtcatgaatttggatgatattctaaaatgcaagccagcagtaagccgcagcaggtcttccagtttaagtctcacagttgaaagtgctttagaaagctttgatttcctgaacacctctgattttgacgaggaggaggatggtgatgaggtttgtaatgttggcggaggtgctgactcagtattttcagacactgagactgagaaacacagttacaggtcggttcacccagaagccagggggcatctcagtgaagcgctcactgaagacacaggagttgggaccagtgtggcaggaagtcctctcccactgaccacaggcaacgagagcctggacatcaccatcgtcaggcacctccagtactgcacccaactcgtgcagcaaattgttttctcaagcaaaaccccatttgtggcaagaagtctcttagagaaactcgcagctgtcagtgatgagaacataggaaatatcagttctgttgtggaagccataccagaatttcacaaaaagctgtctttgctgtcattctggaccaagtgctgcagccctgttggtgtctaccacagcccagcggacagagtgatgaagcagctggaggccagctttgccagaactgtcaacaaagaatatccaggacttgcagacccagtgtttcgaaccctggtgtcccaaattctggaccnggctgagcctctgctttcctccagcctgtcctcggaagtcgtcactgttttccagtattacagttacttcaccagccacggcgtcagtgacctggagagttacctgagccagctggccaggcaagtttccatggttcagactctgcaatcactaagagatgaaaaactgctacaaaccatgagtgaccttgctcccagcaacctcctggcccagcaggaagtactcaggactctggctctgctattaaccagagaggacaacgaagttagcgaggctgtgacgctttacttggcagcagcctccaaaaatcagcatttcagggaaaaggccttgctctattactgtgaagcactaacaaagacaaacctccagctccagaaagcagcttgcctggctctgaaaatccttgaggctactgaaagcattaaaatgctggtgacattgtgtcaatctgatactgaagaaatcagaaatgtggcctcagaaaccctcttgtctctgggagaagatgggcggctggcatatgaacaattggacaaatttcctcgagactgtgttaaagtcggaggtcgtcatggaactgaagttgccacagccttttaattacagnttaactgcctaacagctgtcttaatatctggcccttttcatcaggatggtgctgtggtttgggctggaaattgtttagagcctgagagacacgacaactgaaataaaaatgtaggccaggtgcagtggctcatgcctgtaatcccagtactttgggaggccaacgcaggagaattgcttaagcccaggaggttcaagaccaacctgggcaacatagcaaggccctgtctctacaaaaaaaatagtttaattagtcgggcgtggtggcatgcacctgtagtcccagctacttgggaggctaaggtgggaggattgcttgagcccagaagattcaggctgcagtgagccataattgccccactgcactccagactgggtgacagagcaaaaccctgtctcaaaaaacaaaacaacaacaacaactaaaaaaacatgttatagaaagaattcagagtctcgtttcacagtacctatctacttttcctttggccaatatagaatagggctatggtataattcaaatagattacatcgtcgattgtgtctgataatactcagtgaaagagtccatcttatcttaatatgtatgaaatttaaaaatagccatctttgtacttttttgcaagtttctctataagcttgaaatagtcatgtgatacttcgacaaacatcatatgccttgcagtttttctcggtcgtgttctcagggttgagtagtccccttagctacctaactttactttcaatacaaagcacaaaaaagaatacttcaaataaaagtttgcctgcagaacctggcaaaatgacccattatgagagtttagatgttttaattttatgtgctcccagctactctggagtctgaggtgggaggatcacttgaggcagaggttgcagtaagctgagattacactactgcactccagcccatgtgacagaggaatgagagccagtctcaaaaaaaaaacacaaaaaactcccataatttattttgtttcttttccccatcctgaaaattcccaaatcatgtttccattatggaaaaatgataagtaaatgactaagaactacattaagattatgcctatacacttaaacaaaaaactcaaagcttatgctttttttttttaattaatgagagctattttttatgatattcttaccataggggtgttttgctgctaagacaaatcaaaaccaaaagctgtagattcacaaacctgtgatgctctttgaggtggaggaacctagaagtcagagaaatcctaatggagtaggagtggaggaacatttaaagtggtccctccttctgtaaaaatgaccgtgggattagaaagaaggacatcctgaggggtggttactgcccccagggaaatcactcactggtaggattccctggccaaatagttcaaacatcaggtcccattattgcttcagtatcagagatgcaagttcattaagcaaagtacaagaccattcagtagctcttattaaaatatcttttcttcctctaaagagtgtacaaggtggggtatgccaaggtatcaaaacaatatatgtgagtgtaatttaaactgtggaatatcaactgtactatggacgtgtttgtatcatttagatgtcattttaaatatttacattttagcaagacttttaaaaaggactcatttcatttcaaagtgcaaattgtttgccaggcttctggcaaatggttctttcaactgtgaacttatcgtgtacatatctgtatatttataaatattatatatattcatacatccttcactttaaaggtacattgtacagtctgtagttaggaggtatagcctatagcttatgttaaatggttgaaatggttctttttatagaaagtcaaacacagatgttacaggattttgtgtttggtttgtcattttttttattttttattttgactattgcatgagtaattaattccagatcttttgtattcacttctgtattttatgtttggttgaggggtgcttttagttgtgtggcatttgtattcattgatctttcagtcatgtaagttaaaataaaaattatttttgaattactagcaaaaaaaaaa

SEQ ID NO: 44122 - DNA, 3382 bp, Homo sapiens
  misc_feature (680)..(680): n is a, c, g, or t
  misc_feature (1291)..(1291): n is a, c, g, or t
ggcaatttggtgaccaggctgaattaagtaattttttaaaggtgtctctatttttcaagataggcaagtgaaagactgttttcagtgggtgctgttggggcccgatgcaaaccatgtggacttgacctgtggtttgtgcacagaaaaagaatagctaatgttttgcccaccttcaatagttacaggtcggttcacccagaagccagggggcatctcagtgaagcgctcactgaagacacaggagttgggaccagtgtggcaggaagtcctctcccactgaccacaggcaacgagagcctggacatcaccatcgtcaggcacctccagtactgcacccaactcgtgcagcaaattgttttctcaagcaaaaccccatttgtggcaagaagtctcttagagaagctttctaggcagatccaagtgatggagaaactcgcagctgtcagtgatgagaacataggaaatatcagttctgttgtggaagccataccagaatttcacaaaaagctgtctttgctgtcattctggaccaagtgctgcagccctgttggtgtctaccacagcccagcggacagagtgatgaagcagctggaggccagctttgccagaactgtcaacaaagaatatccaggacttgcagacccagtgtttcgaaccctggtgtcccaaattctggaccnggctgagcctctgctttcctccagcctgtcctcggaagtcgtcactgttttccagtattacagttacttcaccagccacggcgtcagtgacctggagagttacctgagccagctggccaggcaagtttccatggttcagactctgcaatcactaagagatgaaaaactgctacaaaccatgagtgaccttgctcccagcaacctcctggcccagcaggaagtactcaggactctggctctgctattaaccagagaggacaacgaagttagcgaggctgtgacgctttacttggcagcagcctccaaaaatcagcatttcagggaaaaggccttgctctattactgtgaagcactaacaaagacaaacctccagctccagaaagcagcttgcctggctctgaaaatccttgaggctactgaaagcattaaaatgctggtgacattgtgtcaatctgatactgaagaaatcagaaatgtggcctcagaaaccctcttgtctctgggagaagatgggcggctggcatatgaacaattggacaaatttcctcgagactgtgttaaagtcggaggtcgtcatggaactgaagttgccacagccttttaattacagnttaactgcctaacagctgtcttaatatctggcccttttcatcaggatggtgctgtggtttgggctggaaattgtttagagcctgagagacacgacaactgaaataaaaatgtaggccaggtgcagtggctcatgcctgtaatcccagtactttgggaggccaacgcaggagaattgcttaagcccaggaggttcaagaccaacctgggcaacatagcaaggccctgtctctacaaaaaaaatagtttaattagtcgggcgtggtggcatgcacctgtagtcccagctacttgggaggctaaggtgggaggattgcttgagcccagaagattcaggctgcagtgagccataattgccccactgcactccagactgggtgacagagcaaaaccctgtctcaaaaaacaaaacaacaacaacaactaaaaaaacatgttatagaaagaattcagagtctcgtttcacagtacctatctacttttcctttggccaatatagaatagggctatggtataattcaaatagattacatcgtcgattgtgtctgataatactcagtgaaagagtccatcttatcttaatatgtatgaaatttaaaaatagccatctttgtacttttttgcaagtttctctataagcttgaaatagtcatgtgatacttcgacaaacatcatatgccttgcagtttttctcggtcgtgttctcagggttgagtagtccccttagctacctaactttactttcaatacaaagcacaaaaaagaatacttcaaataaaagtttgcctgcagaacctggcaaaatgacccattatgagagtttagatgttttaattttatgtgctcccagctactctggagtctgaggtgggaggatcacttgaggcagaggttgcagtaagctgagattacactactgcactccagcccatgtgacagaggaatgagagccagtctcaaaaaaaaaacacaaaaaactcccataatttattttgtttcttttccccatcctgaaaattcccaaatcatgtttccattatggaaaaatgataagtaaatgactaagaactacattaagattatgcctatacacttaaacaaaaaactcaaagcttatgctttttttttttaattaatgagagctattttttatgatattcttaccataggggtgttttgctgctaagacaaatcaaaaccaaaagctgtagattcacaaacctgtgatgctctttgaggtggaggaacctagaagtcagagaaatcctaatggagtaggagtggaggaacatttaaagtggtccctccttctgtaaaaatgaccgtgggattagaaagaaggacatcctgaggggtggttactgcccccagggaaatcactcactggtaggattccctggccaaatagttcaaacatcaggtcccattattgcttcagtatcagagatgcaagttcattaagcaaagtacaagaccattcagtagctcttattaaaatatcttttcttcctctaaagagtgtacaaggtggggtatgccaaggtatcaaaacaatatatgtgagtgtaatttaaactgtggaatatcaactgtactatggacgtgtttgtatcatttagatgtcattttaaatatttacattttagcaagacttttaaaaaggactcatttcatttcaaagtgcaaattgtttgccaggcttctggcaaatggttctttcaactgtgaacttatcgtgtacatatctgtatatttataaatattatatatattcatacatccttcactttaaaggtacattgtacagtctgtagttaggaggtatagcctatagcttatgttaaatggttgaaatggttctttttatagaaagtcaaacacagatgttacaggattttgtgtttggtttgtcattttttttattttttattttgactattgcatgagtaattaattccagatcttttgtattcacttctgtattttatgtttggttgaggggtgcttttagttgtgtggcatttgtattcattgatctttcagtcatgtaagttaaaataaaaattatttttgaattactagcaaaaaaaaaa

SEQ ID NO: 44123 - DNA, 1434 bp, Homo sapiens
gcagtgtgactgctgagactgccggggctgctgcctgctgcttctcgcgcctgtcctctccaagatgcagttttttgatgctgaggagctcctggtcgatgaagaggatgatgtttttggtgaaggactaccgaccagactcccggaaatcatgttggtaggatcccagtctttttcgcctggagggcccaatgggatcattagaagccagtcctttgcgggtttcagcggcctccaggaaaggcgatccaggtgtaactccttcattgaaaattcctccgctctcaagaagcctcaggccaaactgaagaaaatgcacaatttaggccacaaaaacaacaatccccccaaagagcctcagcctaaaagggtggaagaagtctacagggccttgaaaaatggacttgatgaatatctggaggttcaccagacggagctggacaagttgacagctcagttaaaagatatgaaaagaaactctcgcctgggtgtactgtatgacctagacaagcaaattaaaacaattgaaagatacatgagacgcctggagtttcatataagtaaggtagatgaactctatgaagcttattgtatccagcgacgcctccaggatggtgccagcaaaatgaagcaagccttcgcaacatcccctgccagcaaagctgcccgggagagtctgacagagatcaatcggagcttcaaggagtacacagagaatatgtgcaccattgaagtggagctagagaatctgctgggagaattctccatcaagatgaaaggtctggctggctttgcacgcctctgtcctggagatcaatatgaaattttcatgaagtatggccggcagcggtggaaactgaaaggcaaaatagaagtaaatggcaagcagagctgggatggagaagaaacagtttttctgcccctgatagttgggttcatctccatcaaggtacagtattgtcattgcctgttgtctttcctggtgccacggctggatgatccattggtggggcccttacccgtgacccctgcctgttgcccctccatcccacagacttctctgcacaagtctattacaaagacagctgccctctcatcagagtaagtaaagtcaatctaagatacacttttgaaatatccacctctggccaggcgtagtgtagtggctcacgcctgtaatcccagcactttgggaggctgaggtgggtggatcacttgagcccaggaggtcgagaccagcctggccaacatggcaaaacgccgtctctacaaaagtacaaaaattagccagacgtggtccgtgtgcctgtagtcccagctacttgggagtctgaggtgggaggatcacttgagcccaggaggtcaaggctgcaattagccatgatcacactactgcactatagcctgggtgacagagagagaccctgtctccaa

SEQ ID NO: 44124 - DNA, 342 bp, Homo sapiens
gcaaggatagataattacattcagacttaaataaaaggagtcaaggatcacttgggtctatgttagaggcagcctatcatagtacggatcaataactagttggatggatggatggatggatggatggatggatggatggatgtggagggatggtcagtcaggcagacagatgatgggcaaatagattaatgctataccacaatataatttaatttatgttgcatacccaacttaatcctgaaaaacttgagactatttaggaaagattgaccaggatggtgagaggtataactattttccttctatatataaaagttaaaatattctataaccctttgcctt

SEQ ID NO: 44125 - DNA, 1034 bp, Homo sapiens
ccctggcgtgttggggtttaaaaagaataaacttcaagttaatctcttcccaaagtataagtataccttttgatgtcatgatagcaggaccatgtgaagagtacatattttgaaatttgcttgcacttttgccctttcactctattggatttcaaaattcaacagctgtcagcatttgtagctgtgtaatcctgtataattatcatcttttatccaaatttgtataaaacttacaagttttcctaatttttttggagtattagagatcttgcctgtctttccagcatggatattttattttaattttcttaatgttccttcaaattacgtagtttgaaatgtttgtacatctttatttccttgctagatgggttgtttatatgattagataattcttcatttacagagggttaaagtaactttttttaaatgaagtactgaatagaggttaggaaagttgttggaacctgataaatttgtaaaatttacaaaatttctcattttaaaagctacagttttaaaatttcatgctttttaagcatccattgtaagagtaggagtgtccaaaagcaataagaacaagaaatctttgtaagattggtagtttcagtgtttagccaaaccattatcagaattagaatgactaatgttatgtaggtttggttttcaactccattctttttttgtttcattttttaaaaaattccaaatctctaacctggccttggcgctctgagtcttctgatctctgcccacctcatcactcactttgttctccccattttgtttatttcaattgctgaactggctgagcttttactctccccaccttaggttgttccactcttcatctgtcaagctcctactcatcctgtggactcaaccactgggttagatgaaagaaaagtttgacgtgtccactctttaaaaacattaagtgttttttgttgtttgtttgagactgtcgtccaggctgtagtgcagtggcgcaatcttgggctcacggcagcctcgacctcctggggctaaatgat

SEQ ID NO: 44126 - DNA, 497 bp, Homo sapiens
gaggatttgaatagtgttatttaataatgttgacttgagagtatattgtaaattgcaccatatttgggttttaccaaatacacagtatattacctttctaaaatctgaaaaattctgaattctgaaaaagaactgtcccgaggggtccttataaccctataaggattgtggaccttttatctccttgccattcgttctacaacagccacacacacacacatatatattctataaatattagtacttgctttaaatgtttcaacatgacatatggagaaccagagccagtatttgttgaatacttgctgtgttctgaacaatgggctgtgtactttgcatatgttatttaattcagtcttaatcaccactttgaaatggaatctgaggctcaaaatatttaagaatctttagtgcccaacatcgctcacctggtaggtagccaagttggaatattaatctagatttgtctattattacattgcctcctatgattgtgc

SEQ ID NO: 44127 - DNA, 3248 bp, Homo sapiens
acgtccccgccgggcccgcgcgcctcgtgcctcgcgcctcgcgcctccagccacgtccccgccccggctccggcgcgccgcggagttggctgctgggaggtgcgggactgggtgtggccggcggctctggtctcggctgtgagctgcgctctccacgccggctccgcgctccaggggctgctgagcgcccagcggacaccggcagcgcgcggtcgacgcgggcctgagctccctccagctgttttcactcattagctcctgaggtaaacaaattgaaaaaatgagcgaactggaacagttgaggcaagaagcagaacaactgcggaatcagattcaggatgctcggaaagcatgtaatgatgcaacgcttgttcagattacatcaaatatggactccgtgggtcgaatacaaatgcgaacaagacgtacactgaggggccacctagctaaaatctatgctatgcattggggatacgattccaggctgctagtcagtgcttctcaagatggaaaattaattatttgggatagctatacaacaaataagatgcatgctattcctttgaggtcctcctgggtgatgacctgtgcttatgctccctctggtaattatgttgcctgtggaggcttggacaacatctgctctatatataacttaaagaccagagagggaaatgtgagagtaagccgagagttgccaggtcacacagggtacttgtcctgctgtcgttttttagatgacagccaaattgttacaagttcaggagatacaacttgtgctttatgggacatcgaaactgcccagcagaccaccacattcactgggcattctggagatgtgatgagtctttctttgagtcctgacatgaggacttttgtttctggtgcttgtgatgcctcttccaaattatgggatattcgagatggaatgtgtagacagtctttcacgggacatgtctcagatatcaatgctgtcagttttttcccaaatggatatgccttcgccactggctctgatgatgccacttgccggctctttgaccttcgtgcagatcaagagttattattgtattctcatgacaatatcatctgtggaatcacttctgtagccttctcaaaaagtgggcgtctcttgttggctggttacgatgactttaattgtaatgtatgggacacgctaaaaggagatcgtgcaggtgtccttgctggtcatgacaaccgtgtgagctgcttaggtgtaactgatgatggcatggctgtggcaacaggctcttgggacagttttcttagaatctggaattaacagtgtcatacatatttgttctccattgatatatctggagaaatcaatgctacagcctatagctgtgaaaaaattctaccttatatttgcaggtgaagatttttctattagattatctacaaaaacaagctttcagtaaactaccaaaaaaaaagtgggggtggaggaattgggttattttaaccttggtgaattgttgtgtgtactcagagtgtattttctttgtgtagaacagaatgtacacattatagcagctcgccattgtgtttgcattttttaagaagtacatttttaactttgtatacacaagaaatgtcatatttttgagttttgtaatggaagaaccaggcacagaaacagacagaaatgatactgtatgtgtgtgtatttatgtctgaagaaagtccccttgaattctgatatctctttgaatctaagagatcctgatagcttcatgtttaagagcattgacaggtggggcacctctgaggggagttcattgtttctcatgcatcatttgccatatactattaatcaaagtgcttgctttcagtcctttgaggggacagataatctgaaggccagagattagagatttcactgatattttggacatacataagaaacatcattataattaataaaaagtaggtaatagcatataaatggttcttgacattttaaaagcctggttatgatcagttgacactttgagtacccccctaaatagctggactttccttttcatttcatatttggaactaagtttgtagcgtatactcatctttcagaagtttggtaaacattgggattgtccctgcatctgaacatctttcccagtgctatcagtatacatctagagaggaaatgcaatgtgacagtgttacatttggagagaagtgtgaaatctaaccaatcgctagcacatatttgttgtaatacggtggtttatttcatgtttgcatactataaaatctgaattgatgtgaaatatctgtgcctttaaatttcttaaacctttaagctttttgttctgttttgcaacattttgtagtatttcttcccttccttagcacaaaatactggtttctaagtggttttgcttcaaaggatgtctagatgtaagtgattccacttaaagccaaaataaaaattcctaaagcagttcttaaaggagttagagagctatattaaacagtttttctgtggtataataatgtgtctcttactagaagtcccccacgaccaagttaaagatacttttcctgttggattctcttttacaaataagtctaaatgactgataatagaagattgttagtcttgcttgatggtaaagtcttggattattctgatatatagacgtgcattgttttgtaacttagttacttttcagataggtctgtgttaacttttgaacatgtgtaacttaacctaaatactcccaaactttacctctaaatttttgtttttatgttgtgaatgtgctaatatgtgcatcaactgtaaagatgtatcagttttattaaaatcagttgacaattagaataataaagtggataaaggcaaattaagatataggaccaaaacagaatattgtagatggcagttatgaatgtatatttatattttgattaagatttctattaactttttggctgggcagagtggcttacacctataatcccagcaatttgggaggccaaggtgggcagatcacttgaggtcaggagttcgcgaccagcctacccaacatggtgaaaccccatctcttctaaaaatacaaacattagccgggcgtggtggcacattcctgtaatcccagctactcgggaggctgaggcaggagattcgcctgaacccgggaggcagaggttgcagtgagccgagattgtgccactgcactccagcctaggcgacagagtgagactccatctcaaattgg

SEQ ID NO: 44128 - DNA, 1671 bp, Homo sapiens
acgtccccgccgggcccgcgcgcctcgtgcctcgcgcctcgcgcctccagccacgtccccgccccggctccggcgcgccgcggagttggctgctgggaggtgcgggactgggtgtggccggcggctctggtctcggctgtgagctgcgctctccacgccggctccgcgctccaggggctgctgagcgcccagcggacaccggcagcgcgcggtcgacgcgggcctgagctccctccagctgttttcactcattagctcctgaggtaaacaaattgaaaaaatgagcgaactggaacagttgaggcaagaagcagaacaactgcggaatcagattcaggatgctcggaaagcatgtaatgatgcaacgcttgttcagattacatcaaatatggactccgtgggtcgaatacaaatgcgaacaagacgtacactgaggggccacctagctaaaatctatgctatgcattggggatacgattccaggctgctagtcagtgcttctcaagatggaaaattaattatttgggatagctatacaacaaataagatgcatgctattcctttgaggtcctcctgggtgatgacctgtgcttatgctccctctggtaattatgttgcctgtggaggcttggacaacatctgctctatatataacttaaagaccagagagggaaatgtgagagtaagccgagagttgccaggtcacacagggtacttgtcctgctgtcgttttttagatgacagccaaattgttacaagttcaggagatacaacttgtgctttatgggacatcgaaactgcccagcagaccaccacattcactgggcattctggagatgtgatgagtctttctttgagtcctgacatgaggacttttgtttctggtgcttgtgatgcctcttccaaattatgggatattcgagatggaatgtgtagacagtctttcacgggacatgtctcagatatcaatgctgtcagtgtaagtgaatagcatttctagagaaaatttattatgcatttaaagtgttgagctctatggcatgattttaacaacaaattgccttcaaggattcttacaagtaatgtgctcttataactttgaatctccaagtcataagggtttttgattttttaaaaaagaaagcttcaattcatagtcctagatcttttttgttattgttggatttttttttgttgttatttttttgtttttttgagacagtcttgctctgtcgtccaggctggagtgcagcggtgcagtcacggctcactgcagcctcgacctcctgggctcaagcgatcctcccacctcagtctcctggtagctaggattacaggtacacaccaccatgcatggccaattttgtattttttatagagatggggttttgccatgttgtccaggctggtctcgaactcctgagctgaagcaatcttcctgcctcggcctcccaaagtgttgggattacaggcatgagccactgttcctggcaacctaggtttttaattgctggtgaatatcactttttttttttttttccaaagtggagggattatcatgagtaaacaagcagatcgtggatgttctaccagtgaattcagatgagaaaaaagtctcgtctttctccccagtagcctgttcccttgctgtctttcatcctgagtcccgct

SEQ ID NO: 44129 - DNA, 510 bp, Homo sapiens
atcaccactttgaaatggaatctgaggctcaaaatatttaagaatctttagtgcccaacatcgctcacctggtaggtagccaagttggaatattaatctagatttgtctattattacattgcctcctatgattgtgcatacatctgtagaataaatgtttgttactttcctgtctagtttttcccaaatggatatgccttcgccactggctctgatgatgccacttgccggctctttgaccttcgtgcagatcaagagttattattgtattctcatgacaatatcatctgtggaatcacttctgtagccttctcaaaaagtgggcgtctcttgttggctggttacgatgactttaattgtaatgtatgggacacgctaaaaggagatcgtgcaggttagtaaataagtccacattaggttctgattttcaggaagcgtgaagaggttcccatcagttgtgttctaggcctccatggacatcttggagttgtggaaagtggtaacccgatg

SEQ ID NO: 44130 - DNA, 3302 bp, Homo sapiens
acgtccccgccgggcccgcgcgcctcgtgcctcgcgcctcgcgcctccagccacgtccccgccccggctccggcgcgccgcggagttggctgctgggaggtgcgggactgggtgtggccggcggctctggtctcggctgtgagctgcgctctccacgccggctccgcgctccaggggctgctgagcgcccagcggacaccggcagcgcgcggtcgacgcgggcctgagctccctccagctgttttcactcattagctcctgaggtaaacaaattgaaaaaatgagcgaactggaacagttgaggcaagaagcagaacaactgcggaatcagattcaggatgctcggaaagcatgtaatgatgcaacgcttgttcagattacatcaaatatggactccgtgggtcgaatacaaatgcgaacaagacgtacactgaggggccacctagctaaaatctatgctatgcattggggatacgattccaggctgctagtcagtgcttctcaagatggaaaattaattatttgggatagctatacaacaaataagatgcatgctattcctttgaggtcctcctgggtgatgacctgtgcttatgctccctctggtaattatgttgcctgtggaggcttggacaacatctgctctatatataacttaaagaccagagagggaaatgtgagagtaagccgagagttgccaggtcacacagggtacttgtcctgctgtcgttttttagatgacagccaaattgttacaagttcaggagatacaacttgtgctttatgggacatcgaaactgcccagcagaccaccacattcactgggcattctggagatgtgatgagtctttctttgagtcctgacatgaggacttttgtttctggtgcttgtgatgcctcttccaaattatgggatattcgagatggaatgtgtagacagtctttcacgggacatgtctcagatatcaatgctgtcagttttttcccaaatggatatgccttcgccactggctctgatgatgccacttgccggctctttgaccttcgtgcagatcaagagttattattgtattctcatgacaatatcatctgtggaatcacttctgtagccttctcaaaaagtgggcgtctcttgttggctggttacgatgactttaattgtaatgtatgggacacgctaaaaggagatcgtgcaggtgtccttgctggtcatgacaaccgtgtgagctgcttaggtgtaactgatgatggcatggctgtggcaacaggctcttgggacagttttcttagaatctggaattaacagtgtcatacatatttgttctccattgatatatctggagaaatcaatgctacagcctatagctgtgaaaaaattctaccttatatttgcaggtgaagatttttctattagattatctacaaaaacaagctttcagtaaactaccaaaaaaaaagtgggggtggaggaaaaaaggcaaaggcgccttctgagatcaaaaggaccagtgtattaatttgaggggttgggttattttaaccttggtgaattgttgtgtgtactcagagtgtattttctttgtgtagaacagaatgtacacattatagcagctcgccattgtgtttgcattttttaagaagtacatttttaactttgtatacacaagaaatgtcatatttttgagttttgtaatggaagaaccaggcacagaaacagacagaaatgatactgtatgtgtgtgtatttatgtctgaagaaagtccccttgaattctgatatctctttgaatctaagagatcctgatagcttcatgtttaagagcattgacaggtggggcacctctgaggggagttcattgtttctcatgcatcatttgccatatactattaatcaaagtgcttgctttcagtcctttgaggggacagataatctgaaggccagagattagagatttcactgatattttggacatacataagaaacatcattataattaataaaaagtaggtaatagcatataaatggttcttgacattttaaaagcctggttatgatcagttgacactttgagtacccccctaaatagctggactttccttttcatttcatatttggaactaagtttgtagcgtatactcatctttcagaagtttggtaaacattgggattgtccctgcatctgaacatctttcccagtgctatcagtatacatctagagaggaaatgcaatgtgacagtgttacatttggagagaagtgtgaaatctaaccaatcgctagcacatatttgttgtaatacggtggtttatttcatgtttgcatactataaaatctgaattgatgtgaaatatctgtgcctttaaatttcttaaacctttaagctttttgttctgttttgcaacattttgtagtatttcttcccttccttagcacaaaatactggtttctaagtggttttgcttcaaaggatgtctagatgtaagtgattccacttaaagccaaaataaaaattcctaaagcagttcttaaaggagttagagagctatattaaacagtttttctgtggtataataatgtgtctcttactagaagtcccccacgaccaagttaaagatacttttcctgttggattctcttttacaaataagtctaaatgactgataatagaagattgttagtcttgcttgatggtaaagtcttggattattctgatatatagacgtgcattgttttgtaacttagttacttttcagataggtctgtgttaacttttgaacatgtgtaacttaacctaaatactcccaaactttacctctaaatttttgtttttatgttgtgaatgtgctaatatgtgcatcaactgtaaagatgtatcagttttattaaaatcagttgacaattagaataataaagtggataaaggcaaattaagatataggaccaaaacagaatattgtagatggcagttatgaatgtatatttatattttgattaagatttctattaactttttggctgggcagagtggcttacacctataatcccagcaatttgggaggccaaggtgggcagatcacttgaggtcaggagttcgcgaccagcctacccaacatggtgaaaccccatctcttctaaaaatacaaacattagccgggcgtggtggcacattcctgtaatcccagctactcgggaggctgaggcaggagattcgcctgaacccgggaggcagaggttgcagtgagccgagattgtgccactgcactccagcctaggcgacagagtgagactccatctcaaattgg

SEQ ID NO: 44131 - DNA, 3127 bp, Homo sapiens
acgtccccgccgggcccgcgcgcctcgtgcctcgcgcctcgcgcctccagccacgtccccgccccggctccggcgcgccgcggagttggctgctgggaggtgcgggactgggtgtggccggcggctctggtctcggctgtgagctgcgctctccacgccggctccgcgctccaggggctgctgagcgcccagcggacaccggcagcgcgcggtcgacgcgggcctgagctccctccagctgttttcactcattagctcctgaggtaaacaaattgaaaaaatgagcgaactggaacagttgaggcaagaagcagaacaactgcggaatcagattcaggatgctcggaaagcatgtaatgatgcaacgcttgttcagattacatcaaatatggactccgtgggtcgaatacaaatgcgaacaagacgtacactgaggggccacctagctaaaatctatgctatgcattggggatacgattccaggctgctagtcagtgcttctcaagatggaaaattaattatttgggatagctatacaacaaataagatgcatgctattcctttgaggtcctcctgggtgatgacctgtgcttatgctccctctggtaattatgttgcctgtggaggcttggacaacatctgctctatatataacttaaagaccagagagggaaatgtgagagtaagccgagagttgccaggtcacacagggtacttgtcctgctgtcgttttttagatgacagccaaattgttacaagttcaggagatacaacttgtgctttatgggacatcgaaactgcccagcagaccaccacattcactgggcattctggagatgtgatgagtctttctttgagtcctgacatgaggacttttgtttctggtgcttgtgatgcctcttccaaattatgggatattcgagatggaatgtgtagacagtctttcacgggacatgtctcagatatcaatgctgtcagttttttcccaaatggatatgccttcgccactggctctgatgatgccacttgccggctctttgaccttcgtgcagatcaagagttattattgtattctcatgacaatatcatctgtggaatcacttctgtagccttctcaaaaagtgggcgtctcttgttggctggttacgatgactttaattgtaatgtatgggacacgctaaaaggagatcgtgcaggtgtccttgctggtcatgacaaccgtgtgagctgcttaggtgtaactgatgatggcatggctgtggcaacaggctcttgggacagttttcttagaatctggaattaacagtgtcatacatatttgttctccattgatatatctggagaaatcaatgctacagcctatagctgtgaaaaaattctaccttatatttgcaggtgaagatttttctattagattatctacaaaaacaagctttcagtaaactaccaaaaaaaaagtgggggtggaggaaaaaaggcaaaggcgccttctgagatcaaaaggaccagtgtattaatttgaggggttgggttattttaaccttggtgaattgttgtgtgtactcagagtgtattttctttgtgtagaacagaatgtacacattatagcagctcgccattgtgtttgcattttttaagaagtacatttttaactttgtatacacaagaaatgtcatatttttgagttttgtaatggaagaaccaggcacagaaacagacagaaatgatactgtatgtgtgtgtatttatgtctgaagaaagtccccttgaattctgatatctctttgaatctaagagatcctgatagcttcatgtttaagagcattgacaggtggggcacctctgaggggagttcattgtttctcatgcatcatttgccatatactattaatcaaagtgcttgctttcagtcctttgaggggacagataatctgaaggccagagattagagatttcactgatattttggacatacataagaaacatcattataattaataaaaagtaggtaatagcatataaatggttcttgacattttaaaagcctggttatgatcagttgacactttgagtacccccctaaatagctggactttccttttcatttcatatttggaactaagtttgtagcgtatactcatctttcagaagtttggtaaacattgggattgtccctgcatctgaacatctttcccagtgctatcagtatacatctagagaggaaatgcaatgtgacagtgttacatttggagagaagtgtgaaatctaaccaatcgctagcacatatttgttgtaatacggtggtttatttcatgtttgcatactataaaatctgaattgatgtgaaatatctgtgcctttaaatttcttaaacctttaagctttttgttctgttttgcaacattttgtagtatttcttcccttccttagcacaaaatactggtttctaagtggttttgcttcaaaggatgtctagatgtaagtgattccacttaaagccaaaataaaaattcctaaagcagttcttaaaggagttagagagctatattaaacagtttttctgtggtataataatgtgtctcttactagaagtcccccacgaccaatgataatgaaaaaaccatcggttggtatttcaactacaagaacaccaagaaaaaaaaaaaaaaaataacaaaacaacaaacacaaaacagaaaaaagccaagcacaaaaacacagccaacaagcaacacaaaaacaaacaaaagggggggggggcgcggcacaaaaaaccccggggggggcccactatagccaacccgcctttaatagaaaggaggcccccaaggggggaataaaataaagcggagcgcgcgcgataaaaacaccgcaggagaggaaaacacgccacgagtcattcatgagaggaaagacacccaactgtctggcgagaacatagatgagcccacccaaaaccaaaggataaggcgccggcgacaaaaaacacgcggttgtgtaaggaccgcacattcgcgcggaaacattgtcttcgttcttcttcaataccccgtccaccacatcaaccgaagcagagcagcaagcagagaagagacagcgacacgtgaaaggacgcacaccacacaca

SEQ ID NO: 44132 - DNA, 2488 bp, Homo sapiens
acgtccccgccgggcccgcgcgcctcgtgcctcgcgcctcgcgcctccagccacgtccccgccccggctccggcgcgccgcggagttggctgctgggaggtgcgggactgggtgtggccggcggctctggtctcggctgtgagctgcgctctccacgccggctccgcgctccaggggctgctgagcgcccagcggacaccggcagcgcgcggtcgacgcgggcctgagctccctccagctgttttcactcattagctcctgaggtaaacaaattgaaaaaatgagcgaactggaacagttgaggcaagaagcagaacaactgcggaatcagattcaggatgctcggaaagcatgtaatgatgcaacgcttgttcagattacatcaaatatggactccgtgggtcgaatacaaatgcgaacaagacgtacactgaggggccacctagctaaaatctatgctatgcattggggatacgattccaggctgctagtcagtgcttctcaagatggaaaattaattatttgggatagctatacaacaaataagatgcatgctattcctttgaggtcctcctgggtgatgacctgtgcttatgctccctctggtaattatgttgcctgtggaggcttggacaacatctgctctatatataacttaaagaccagagagggaaatgtgagagtaagccgagagttgccaggtcacacagggtacttgtcctgctgtcgttttttagatgacagccaaattgttacaagttcaggagatacaacttgtgctttatgggacatcgaaactgcccagcagaccaccacattcactgggcattctggagatgtgatgagtctttctttgagtcctgacatgaggacttttgtttctggtgcttgtgatgcctcttccaaattatgggatattcgagatggaatgtgtagacagtctttcacgggacatgtctcagatatcaatgctgtcagtgtaagtgaatagcatttctagagaaaatttattatgcatttaaagtgttgagctctatggcatgattttaacaacaaattgccttcaaggattcttacaagtaatgtgctcttataactttgaatctccaagtcataagggtttttgattttttaaaaaagaaagcttcaattcatagtcctagatcttttttgttattgttggatttttttttgttgttatttttttgtttttttgagacagtcttgctctgtcgtccaggctggagtgcagcggtgcagtcacggctcactgcagcctcgacctcctgggctcaagcgatcctcccacctcagtctcctggtagctaggattacaggtacacaccaccatgcatggccaattttgtattttttatagagatggggttttgccatgttgtccaggctggtctcgaactcctgagctgaagcaatcttcctgcctcggcctcccaaagtgttgggattacaggcatgagccactgttcctggcaacctaggtttttaattgctggtgaatatcactttttttttttttttccaaagtggagggattatcatgagtaaacaagcagatcgtggatgttctaccagtgaattcagatgagaaaaaagtctcgtctttctgggaccaaagtgaacaacccaaagagagaacaataaggatgaaaaaagcagctgattagtgtggagtatagcttttgaagtcagtgcaacccgggacctaatcttagttctgctgccattaagcacctgtgtgaaactagtcatgctgcttcatcttcgtgaacctcagattcttcagtttttaaaatagggataataccacctacatcagagaatggtgtggagactaaatgaaactaggtattagatgctcagtaaatggtataaattattattattattatttagagacagggtctcattccgttgcccaggctggagtacaatggcatgatcatagctcacagcagccttgaactcctgggctcaagtgatcttcctgcctcagcctcaggagtactgtgactacaggcatacaccaccacacctggctagtgtttgtttgttttttttaatctttggtagaggcagagtctcactatgttgcccaggctgctcttgaactcctgggctcagcgatcctcccacctcagtcttccaaagtgctgggattacaaggagtgagctaccatgccttgctgtatcagttatttataagctacttcgtatttaaaaaaactacctaaacagaaaaccataaatagattaagccaggtaaaaagtactcagtatataggaggataagctagtcatagatatctgtaaattagggtaaagtgaaaataacattttgaatgacaatcaaaatgattatcaaatggtcagaattgagggggaggggtgttaaaagaaggtaggatactgcttgagttaggttacctaagcagatcagatgccaaacagtacagatatgactagaatg

SEQ ID NO: 44133 - DNA, 402 bp, Homo sapiens
aaaacccagcagaagaataggcaggtgttaatttttacattatataaattttacattttataaaggaaaaaaggcaataacttgaatgtccattaataatggcttagataaatcgtgctttatccatttgctggataactgtgctatgactaacatgaatgaaggaatgaagatctgtatgtattgatacagaaagacggacaaatacataattacaaaacacgttgattcagtcaacattagctgagggtcggccttgtccaagctccatctgaatgagtttctccaaggcagacttctgcctactcgtggcagaaccaccaaggagcttattaaaatgctgaatccagaccccattccaaccagcacagcttccggagagccctctctttccttgacttc

SEQ ID NO: 44134 - DNA, 407 bp, Homo sapiens
cccacgaccgctcagtggcttgttggctaccccgggtcggatgtgtggaggaggagtcctccaggccaagagagaattaagagctgacagggggtcagctccagactgggggacacagtgcaagagaagaggacagagggaagggactgagtgtggccctttgaggaaggaggatgcagcgggaggtggagagagctgcagtggaagcggcgtgagggcagggccagtgctggagtgggcttggtcgccagtgggacgtgtacgtttccttctaagtgttacggggttggttggatctgacttgaaggttcactctggctgtggggtggggagcagatggtaggggctgaggtggagtcaggagggcgaggccctggacatgggacgcttgggggatggtggatggg

SEQ ID NO: 44135 - DNA, 980 bp, Homo sapiens
aaaggtgaggcgcgtgacaaacccaaagtgctgagaaaagtgaggcacgtgacaaacccaaactgttgacaagggtgaggcgcgtgacaaacccgaactgctgagaaaagtgaggcgcttgataaacccaaactgccgagaaaggtgaggtgtgtgacaaacccaaactgttgagaaaggtgaggcgcgtgaaaaacacaagctgccgagaagggtgaggtgcatgaaaaacccaaggcctcattcagtgctttccaagaaagctggtgtcctgcactggagggaagagaagcacttctgtggggcctggggaaaagcaactcagagccacctcttcatattatcagattatgatgagaaaaagtattagggacagtattcctgacagtggacgagacttccaggcacacggcgcttcaatgtttagaactgtaaggcacgaggatctgacggagcacttgttagctctccacatcagtggggatctctgctcgtccccacagctgggctgctgaacttagcagtagagtgacttaaatataatttggtaccaacacaaatttgtgccttctgatctttgtataatcaaatgtctttactcatctcccaaactatctgtccctcctcaagatcctcaaatcctatctgcctgtcttctctagagactttggtcagtattcatggaaactgaaaaagcaggttagaaatcttgattaaatggtatttttttcaaagatattaggatgctttatccaaatagttgcttctacaaagaaagtagtcaaggttaaaaaggtagagaggaatctaaaaacatctgtcaaccctgtaataagctgtcacagtatggtcaaattactacctccaatagtaaaaggaaattgcagaagataaccatttttatctatttctagtctacataaaaagcaggccatcaattaattcacacagtaaataaagcaattgatcttttccaaaat

SEQ ID NO: 44136 - DNA, 2771 bp, Homo sapiens
ttttttgtatgaaacttggaggcttacaggtatagacagctttcagctacagcacattctaattttttattttgtttagttcttttgtattcacttctggtctctttaagactgttttaaaagaaatcaatttagggaaccccagttatataatataaactttgtaatctgagagaaaaaatgtatagtaaatctaagtcttgatttttaactttctattgtaaaaaataataatatacagagtttaatagaaggtgatgttttggttttgttttcccagaggctgccatatggtctttgagtacggggatgtcccaaactggcccaccaatgagcatggcggctccggccaggaatgccagagttagcctcccaggcttgcgggtggacatgcctgctccctgccagcctccagtggcctggccaggccctcccgagcctgtctgccctccccaggggtggaggagtctctgggccccaggaggattccctcccggagactcgcacggtgctccctgctcacgcgttgtcacagttagtccggaaatgactgaaaccaggcattctcccggacctcagcgtgggggagcctccaggcagacgctgggtatggagctgtggtgtggtctgtcctgtatggtggccagtgctttctgccagcatttctggatggatatagggactatcattagtatcctaatacacggtgattttaaaacaaccataaaattgattcagagtccactgacccttacagatgtaggtatacccttactggagagggaactctgatgaggagatgctggtaaattatcattttttaaattgctggtgagtctgacacttggtgagttttcagccagtttgttaaacttttaattaagttttgtttataataaaaatataaatggatttgaaagtttccattttttaaagttaccctcgttttcaaaggtattttctaaacagatctttaatggactatttaaaccgaatttaaggaattcacacacgacagttgacaggtcttcacgcaggctggttggtaacgtgctgccagcacagggctgggtgatacgtacaccctaagccgggggtgcctggggctggggggcgctccttgcaatgcccctccagccacagggcagtgaggtgctgcctgtgtgagccgtcgggggagcggccggctgtgggggcagcgcagcaggagcatcgtggggcctttccttctcggctggttctctgtgacggtggcgtcggctcgcctctgctcctttcatctagaaagaagccactgaccctgacagcccacggcgggtacactgagcagctgcattggtgctgtcacttttttaaggctttctgtccagacttcaacactggtttcttttcagagtttcgaaggattaatgacttcctcagcgcccttgctggcgggctgagggtgacagtcacgtccgtttcttctgtattagaaggctgcggtgattcaattagattgtcccactgctgagacctgtagggcagcttctaacatgcttttttcaaggggagaggagtagtgacaagtcgtgtgtcggaattggatttgagaacactctgaatgacccctggaggccgagggggcaggcttcgggcgtgaactgaactccagacccctctttgtgttgggcagtgtcatcttgcttacaaactgtaagacacatttttttgtgtgtttgtttttgttgttgttcttttgcagcactcacgcctctgacagtcttttgggaaagagtaacacccacatacagaatttgtcacatccagagtagcactgttccttaatactggcataatgcttccaggaagtttttcttttttatatttaaaatgttacttttctgtatgatgtgcatgcaagtttaccgtaacttttcttaaactttttagtgccgtttctagtatattcctgtaaatgtcagttactgaaaatgagtccaatgtaagtagtttagcttgtttattgcaatgctggcctcaacacaacagaataaaaatggtagaaagtactctttgatgtttctggtaatcatggacccttctcctggggcatttgttttgttttcataataaaaagcaaaaaaaaaaaaaagactgttttttttttttgcattttcctgtgctttctgtgggggctcccagcctctctcctggagcctggaaatgtctggaagcacctggtctggaacagccttcactggtccacagcaagggtgctgagctccccacacttgacatcctgtaactcttggcaaaaacacccagagcatccaaaaggggccccaaaaaaccatttaaaggcaggatgcagtggctcgtgcctgtgatcacagcactttgggaggctgaggcaggaggatggcctgaggcaggagtttgaggctgcagtaagccatgattgcatcactgcactccagcctggacaacatctcttaaaaaataataataatcaaaccattaagtagctcttgtcctgagccctggcaggatgaagggagcatcatttcttgcctcactaggaagccacaatcccctttactgacagttcattggttccctggaacaagctgccctcttcgagacagccaggttctgtgctcttctagtcaacctggccgcttgtcccctccctctgcacctcagtctatcctgaagtggcttgtgatgcgctcagtctaatggaaatgcaaataaaatcccaaaagcagattttcatagtgaggtttaac

SEQ ID NO: 44137 - DNA, 2737 bp, Homo sapiens
ttttttgtatgaaacttggaggcttacaggtatagacagctttcagctacagcacattctaattttttattttgtttagttcttttgtattcacttctggtctctttaagactgttttaaaagaaatcaatttagggaaccccagttatataatataaactttgtaatctgagagaaaaaatgtatagtaaatctaagtcttgatttttaactttctattgtaaaaaataataatatacagagtttaatagaaggtgatgttttggttttgttttcccagaggctgccatatggtctttgagtacggggatgtcccaaactggcccaccaatgagcatggcggctccggccaggaatgccagagttagcctcccaggcttgcgggtggacatgcctgctccctgccagcctccagtggcctggccaggccctcccgagcctgtctgccctccccaggggtggaggagtctctgggccccaggaggattccctcccggagactcgcacggtgctccctgctcacgcgttgtcacagttagtccggaaatgactgaaaccaggcattctcccggacctcagcgtgggggagcctccaggcagacgctgggtatggagctgtggtgtggtctgtcctgtatggtggccagtgctttctgccagcatttctggatggatatagggactatcattagtatcctaatacacggtgattttaaaacaaccataaaattgattcagagtccactgacccttacagatgtaggtatacccttactggagagggaactctgatgaggagatgctggtaaattatcattttttaaattgctggtgagtctgacacttggtgagttttcagccagtttgttaaacttttaattaagttttgtttataataaaaatataaatggatttgaaagtttccattttttaaagttaccctcgttttcaaaggtattttctaaacagatctttaatggactatttaaaccgaatttaaggaattcacacacgacagttgacaggtcttcacgcaggctggttggtaacgtgctgccagcacagggctgggtgatacgtacaccctaagccgggggtgcctggggctggggggcgctccttgcaatgcccctccagccacagggcagtgaggtgctgcctgtgtgagccgtcgggggagcggccggctgtgggggcagcgcagcaggagcatcgtggggcctttccttctcggctggttctctgtgacggtggcgtcggctcgcctctgctcctttcatctagaaagaagccactgaccctgacagcccacggcgggtacactgagcagctgcattggtgctgtcacttttttaaggctttctgtccagacttcaacactggtttcttttcagagtttcgaaggattaatgacttcctcagcgcccttgctggcgggctgagggtgacagtcacgtccgtttcttctgtattagaaggctgcggtgattcaattagattgtcccactgctgagacctgtagggcagcttctaacatgcttttttcaaggggagaggagtagtgacaagtcgtgtgtcggaattggatttgagaacactctgaatgacccctggaggccgagggggcaggcttcgggcgtgaactgaactccagacccctctttgtgttgggcagtgtcatcttgcttacaaactgtaagacacatttttttgtgtgtttgtttttgttgttgttcttttgcagcactcacgcctctgacagtcttttgggaaagagtaacacccacatacagaatttgtcacatccagagtagcactgttccttaatactggcataatgcttccaggaagtttttcttttttatatttaaaatgttacttttctgtatgatgtgcatgcaagtttaccgtaacttttcttaaactttttagtgccgtttctagtatattcctgtaaatgtcagttactgaaaatgagtccaatgtaagtagtttagcttgtttattgcaatgctggcctcaacacaacagaataaaaatggtagaaagtaaaaaaaaaaaaaaaaaaaaaaaaaaaaaaaaagaaaaaaaaaaaaaaaaaaaaacaagaaagacgacaaaacaaagaaagaacaaaaaaaacaaaggaacaaaagaggaccgtaaaacagacgcggacaaaacacactaacacagaggaacgcaacattaaacaacagtccatatccggtaacccgcgcactgagaaccctgacacaagacacacaaaacacagcggcgcgagcacaccacacaggaaccacaaccaacctagcagtaggataacacaccaaaggcaagcgacacacacaccagcgccaacgcggcgaacacacacacgaacaccccacccgacgcacaaccagcgcccaccgagaacacaatcaccgaacacactcaacacgcagccggacacaagagcaggacgaacaggactgactagtaggatggactgaagggaacagcacacaacagcagaagaccccgtgacagcgaggtcgacaaacacaaactaagtaccgaacgaccacaccgaccacagcacgaccacctgggaacgaagcaaataacaagagaaagcggaacaaggatcgagggagaacgcgcacgggagaggctagatgagcgagagacgaaccaaagcaagagagatagaggaaaggaggcagagcgaaagcaggacagatacgaacggaca

SEQ ID NO: 44138 - DNA, 2002 bp, Homo sapiens
ttttttgtatgaaacttggaggcttacaggtatagacagctttcagctacagcacattctaattttttattttgtttagttcttttgtattcacttctggtctctttaagactgttttaaaagaaatcaatttagggaaccccagttatataatataaactttgtaatctgagagaaaaaatgtatagtaaatctaagtcttgatttttaactttctattgtaaaaaataataatatacagagtttaatagaaggtgatgttttggttttgttttcccagaggctgccatatggtctttgagtacggggatgtcccaaactggcccaccaatgagcatggcggctccggccaggaatgccagagttagcctcccaggcttgcgggtggacatgcctgctccctgccagcctccagtggcctggccaggccctcccgagcctgtctgccctccccaggggtggaggagtctctgggccccaggaggattccctcccggagactcgcacggtgctccctgctcacgcgttgtcacagttagtccggaaatgactgaaaccaggcattctcccggacctcagcgtgggggagcctccaggcagacgctgggtatggagctgtggtgtggtctgtcctgtatggtggccagtgctttctgccagcatttctggatggatatagggactatcattagtatcctaatacacggtgattttaaaacaaccataaaattgattcagagtccactgacccttacagatgtaggtatacccttactggagagggaactctgatgaggagatgctggtaaattatcattttttaaattgctggtgagtctgacacttggtgagttttcagccagtttgttaaacttttaattaagttttgtttataataaaaatataaatggatttgaaagtttccattttttaaagttaccctcgttttcaaaggtattttctaaacagatctttaatggactatttaaaccgaatttaaggaattcacacacgacagttgacaggtcttcacgcaggctggttggtaacgtgctgccagcacagggctgggtgatacgtacaccctaagccgggggtgcctggggctggggggcgctccttgcaatgcccctccagccacagggcagtgaggtgctgcctgtgtgagccgtcgggggagcggccggctgtgggggcagcgcagcaggagcatcgtggggcctttccttctcggctggttctctgtgacggtggcgtcggctcgcctctgctcctttcatctagaaagaagccactgaccctgacagcccacggcgggtacactgagcagctgcattggtgctgtcacttttttaaggctttctgtccagacttcaacactggtttcttttcagagtttcgaaggattaatgacttcctcagcgcccttgctggcgggctgagggtgacagtcacgtccgtttcttctgtattagaaggctgcggtgattcaattagattgtcccactgctgagacctgtagggcagcttctaacatgcttttttcaaggggagaggagtagtgacaagtcgtgtgtcggaattggatttgagaacactctgaatgacccctggaggccgagggggcaggcttcgggcgtgaactgaactccagacccctctttgtgttgggcagtgtcatcttgcttacaaactgtaagacacatttttttgtgtgtttgtttttgttgttgttcttttgcagcactcacgcctctgacagtcttttgggaaagagtaacacccacatacagaatttgtcacatccagagtagcactgttccttaatactggcataatgcttccaggaagtttttcttttttatatttaaaatgttacttttctgtatgatgtgcatgcaagtttaccgtaacttttcttaaactttttagtgccgtttctagtatattcctgtaaatgtcagtcgactcggccgttaatttagtagtagtaggcggccgc

SEQ ID NO: 44139 - DNA, 1421 bp, Homo sapiens
gacctagaggatccccgtcattttcaacactggtttcttttcagagtttcgaaggattaatgacttcctcagcgcccttgctggcgggctgagggtgacagtcacgtccgtttcttctgtattagaaggctgcggtgattcaattagattgtcccactgctgagacctgtagggcagcttctaacatgcttttttcaaggggagaggagtagtgacaagtcgtgtgtcggaattggatttgagaacactctgaatgacccctggaggccgagggggcaggcttcgggcgtgaactgaactccagacccctctttgtgttgggcagtgtcatcttgcttacaaactgtaagacacatttttttgtgtgtttgtttttgttgttgttcttttgcagcactcacgcctctgacagtcttttgggaaagagtaacacccacatacagaatttgtcacatccagagtagcactgttccttaatactggcataatgcttccaggaagtttttcttttttatatttaaaatgttacttttctgtatgatgtgcatgcaagtttaccgtaacttttcttaaactttttagtgccgtttctagtatattcctgtaaatgtcagttactgaaaatgagtccaatgtaagtagtttagcttgtttattgcaatgctggcctcaacacaacagaataaaaatggtagaaagtactctttgatgtttctggtaatcatggacccttctcctggggcatttgttttgttttcataataaaaagcaaaaaaaaaaaaaagactgttttttttttttgcattttcctgtgctttctgtgggggctcccagcctctctcctggagcctggaaatgtctggaagcacctggtctggaacagccttcactggtccacagcaagggtgctgagctccccacacttgacatcctgtaactcttggcaaaaacacccagagcatccaaaaggggccccaaaaaaccatttaaaggcaggatgcagtggctcgtgcctgtgatcacagcactttgggaggctgaggcaggaggatggcctgaggcaggagtttgaggctgcagtaagccatgattgcatcactgcactccagcctggacaacatctcttaaaaaataataataatcaaaccattaagtagctcttgtcctgagccctggcaggatgaagggagcatcatttcttgcctcactaggaagccacaatcccctttactgacagttcattggttccctggaacaagctgccctcttcgagacagccaggttctgtgctcttctagtcaacctggccgcttgtcccctccctctgcacctcagtctatcctgaagtggcttgtgatgcgctcagtctaatggaaatgcaaataaaatcccaaaagcagattttcatagtgaggtttaac

SEQ ID NO: 44140 - DNA, 1812 bp, Homo sapiens
ttttttgtatgaaacttggaggcttacaggtatagacagctttcagctacagcacattctaattttttattttgtttagttcttttgtattcacttctggtctctttaagactgttttaaaagaaatcaatttagggaaccccagttatataatataaactttgtaatctgagagaaaaaatgtatagtaaatctaagtcttgatttttaactttctattgtaaaaaataataatatacagagtttaatagaaggtgatgttttggttttgttttcccagaggctgccatatggtctttgagtacggggatgtcccaaactggcccaccaatgagcatggcggctccggccaggaatgccagagttagcctcccaggcttgcgggtggacatgcctgctccctgccagcctccagtggcctggccaggccctcccgagcctgtctgccctccccaggggtggaggagtctctgggccccaggaggattccctcccggagactcgcacggtgctccctgctcacgcgttgtcacagttagtccggaaatgactgaaaccaggcattctcccggacctcagcgtgggggagcctccaggcagacgctgggtatggagctgtggtgtggtctgtcctgtatggtggccagtgctttctgccagcatttctggatggatatagggactatcattagtatcctaatacacggtgattttaaaacaaccataaaattgattcagagtccactgacccttacagatgtaggtatacccttactggagagggaactctgatgaggagatgctggtaaattatcattttttaaattgctggtgagtctgacacttggtgagttttcagccagtttgttaaacttttaattaagttttgtttataataaaaatataaatggatttgaaagtttccattttttaaagttaccctcgttttcaaaggtattttctaaacagatctttaatggactatttaaaccgaatttaaggaattcacacacgacagttgacaggtcttcacgcaggctggttggtaacgtgctgccagcacagggctgggtgatacgtacaccctaagccgggggtgcctggggctggggggcgctccttgcaatgcccctccagccacagggcagtgaggtgctgcctgtgtgagccgtcgggggagcggccggctgtgggggcagcgcagcaggagcatcgtggggcctttccttctcggctggttctctgtgacggtggcgtcggctcgcctctgctcctttcatctagaaagaagccactgaccctgacagcccacggcgggtacactgagcagctgcattggtgctgtcacttttttaaggctttctgtccagacttcaacactggtttcttttcagagtttcgaaggattaatgacttcctcagcgcccttgctggcgggctgagggtgacagtcacgtccgtttcttctgtattagaaggctgcggtgattcaattagattgtcccactgctgagacctgtagggcagcttctaacatgcttttttcaaggggagaggagtagtgacaagtcgtgtgtcggaattggatttgagaacactctgaatgacccctggaggccgagggggcaggcttcgggcgtgaactgaactccagaccgatgttatcgccccacacgttatcgtagtggtggtggtgatgagtaccgtggttggggtctgtgtgccggtgggtgtcggggttggggtcaccgtggtgttggtggtgatggtgtcgtgttggggtctgtgtgccggtggtgttgggattctgcg

SEQ ID NO: 44141 - DNA, 1998 bp, Homo sapiens
ctgtcgcctggttgggcccggaaatgggacgtcgcgctttctcagggagcttagaagcagccagggcctctccaagccgctgctgtgacagaaagtgagtgagctgccggaggatgtccaccgccacgacagtcgcccccgcggggatcccggcgaccccgggccctgtgaacccaccccccccggaggtctccaaccccagcaagcccggccgcaagaccaaccagctgcagtacatgcagaatgtggtggtgaagacgctctggaaacaccagttcgcctggcccttctaccagcccgtggacgcaatcaaattgaacctgccggattatcataaaataattaaaaacccaatggatatggggactattaagaagagactagaaaataattattattggagtgcaagcgaatgtatgcaggacttcaacaccatgtttacaaattgttacatttataacaagcccacagatgacatagtgctaatggcccaagctttagagaaaatttttctacaaaaagtggcccagatgccccaagaggaagttgaattattaccccctgctccaaagggcaaaggtcggaagccggctgcgggagcccagagcgcaggtacacagcaagtggcggccgtgtcctctgtctccccagcgaccccctttcagagcgtgccccccaccgtctcccagacgcccgtcatcgctgccacccctgtaccaaccatcactgcaaacgtcacgtcggtcccagtccccccagctgccgccccacctcctcctgccacacccatcgtccccgtggtccctcctacgccgcctgtcgtcaagaaaaagggcgtgaagcggaaagcagacacaaccactcccacgacgtcggccatcactgccagccggagtgagtcgcccccgccgttgtcagaccccaagcaggccaaagtggtggcccggcgggagagtggtggccgccccatcaagcctcccaagaaggacctggaggacggcgaggtgccccagcacgcaggcaagaagggcaagctgtcggagcacctgcgctactgcgacagcatcctcagggagatgctatccaagaagcacgcggcctacgcctggcccttctacaagccagtggatgccgaggccctggagctgcacgactaccacgacatcatcaagcacccgatggacctcagcaccgtgaaaaggaagatggatggccgagagtacccagacgcacagggctttgctgctgatgtccggctgatgttctcgaattgctacaaatacaatcccccagaccacgaggttgtggccatggcccggaagctccaggacgtgtttgagatgaggtttgccaagatgccagatgagcccgtggaggcaccggcgctgcctgcccccgcggcccccatggtgagcaagggcgctgagagcagccgtagcagtgaggagagctcttcggactcaggcagctcggactcggaggaggagcgggccaccaggctggcggagctgcaggagcagctgaaggccgtgcacgagcagctggccgccctgtctcaggccccagtaaacaaaccaaagaagaagaaggagaaagaaggagaaggagaagaagaagaaggacaaggagaaggagaaggagaagcacaaagtgaaggccgatggaagagaagaaggccaaggtggctccgcctgccaagcaggctcagcagaagaaggctcctgccaagaaggccaacagcacgaccacggccggcagacagctgaagaaaggcggcaagcaggcatctgcctcctacgactcagaggaagaggaggagggcctgcccatgagctacgatgaaaagcgccagcttagcctggacatcaaccggctgcccggggagaagctgggccgggtagtgcacatcatccaatctcgggagccctcgctcagggactccaaccccgatgagatagaaattgactttgagactctgaaacccaccactttgcggga

SEQ ID NO: 44142 - DNA, 1766 bp, Homo sapiens
ctgtcgcctggttgggcccggaaatgggacgtcgcgctttctcagggagcttagaagcagccagggcctctccaagccgctgctgtgacagaaagtgagtgagctgccggaggatgtccaccgccacgacagtcgcccccgcggggatcccggcgaccccgggccctgtgaacccaccccccccggaggtctccaaccccagcaagcccggccgcaagaccaaccagctgcagtacatgcagaatgtggtggtgaagacgctctggaaacaccagttcgcctggcccttctaccagcccgtggacgcaatcaaattgaacctgccggattatcataaaataattaaaaacccaatggatatggggactattaagaagagactagaaaataattattattggagtgcaagcgaatgtatgcaggacttcaacaccatgtttacaaattgttacatttataacaagcccacagatgacatagtgctaatggcccaagctttagagaaaatttttctacaaaaagtggcccagatgccccaagaggaagttgaattattaccccctgctccaaagggcaaaggtcggaagccggctgcgggagcccagagcgcaggtacacagcaagtggcggccgtgtcctctgtctccccagcgaccccctttcagagcgtgccccccaccgtctcccagacgcccgtcatcgctgccacccctgtaccaaccatcactgcaaacgtcacgtcggtcccagtccccccagctgccgccccacctcctcctgccacacccatcgtccccgtggtccctcctacgccgcctgtcgtcaagaaaaagggcgtgaagcggaaagcagacacaaccactcccacgacgtcggccatcactgccagccggagtgagtcgcccccgccgttgtcagaccccaagcaggccaaagtggtggcccggcgggagagtggtggccgccccatcaagcctcccaagaaggacctggaggacggcgaggtgccccagcacgcaggcaagaagggcaagctgtcggagcacctgcgctactgcgacagcatcctcagggagatgctatccaagaagcacgcggcctacgcctggcccttctacaagccagtggatgccgaggccctggagctgcacgactaccacgacatcatcaagcacccgatggacctcagcaccgtgaaaaggaagatggatggccgagagtacccagacgcacagggctttgctgctgatgtccggctgatgttctcgaattgctacaaatacaatcccccagaccacgaggttgtggccatggcccggaagctccaggacgtgtttgagatgaggtttgccaagatgccagatgagcccgtggaggcaccggcgctgcctgcccccgcggcccccatggtgagcaagggcgctgagagcagccgtagcagtgaggagagctcttcggactcaggcagctcggactcggaggaggagcgggccaccaggctggcggagctgcaggagcagctgaaggccgtgcacgagcagctggccgccctgtctcaggccccagtaaacaaaccaaagaagaagaaggagaaagaaggagaaacattcccattataaaacatgcatgcaaatcattaatcataatataaatttataattgaactttgaaatttcaagttttacctgaaataacttctctattagtagtttctacttcattggagaatttttttaagtgattattacctactagtttatcctgag

SEQ ID NO: 44143 - DNA, 1358 bp, Homo sapiens
ctgtcgcctggttgggcccggaaatgggacgtcgcgctttctcagggagcttagaagcagccagggcctctccaagccgctgctgtgacagaaagtgagtgagctgccggaggatgtccaccgccacgacagtcgcccccgcggggatcccggcgaccccgggccctgtgaacccaccccccccggaggtctccaaccccagcaagcccggccgcaagaccaaccagctgcagtacatgcagaatgtggtggtgaagacgctctggaaacaccagttcgcctggcccttctaccagcccgtggacgcaatcaaattgaacctgccggattatcataaaataattaaaaacccaatggatatggggactattaagaagagactagaaaataattattattggagtgcaagcgaatgtatgcaggacttcaacaccatgtttacaaattgttacatttataacaagcccacagatgacatagtgctaatggcccaagctttagagaaaatttttctacaaaaagtggcccagatgccccaagaggaagttgaattattaccccctgctccaaagggcaaaggtcggaagccggctgcgggagcccagagcgcaggtacacagcaagtggcggccgtgtcctctgtctccccagcgaccccctttcagagcgtgccccccaccgtctcccagacgcccgtcatcgctgccacccctgtaccaaccatcactgcaaacgtcacgtcggtcccagtccccccagctgccgccccacctcctcctgccacacccatcgtccccgtggtccctcctacgccgcctgtcgtcaagaaaaagggcgtgaagcggaaagcagacacaaccactcccacgacgtcggccatcactgccagccggagtgagtcgcccccgccctgtctcaggccccagtaaacaaaccaaagaagaagaaggagaaagaaggagaaggagaagaagaagaaggacaaggagaaggagaaggagaagcacaaagtgaaggccgatggaagagaagaaggccaaggtggctccgcctgccaagcaggctcagcagaagaaggctcctgccaagaaggccaacagcacgaccacggccggcagacagctgaagaaaggcggcaagcaggcatctgcctcctacgactcagaggaagaggaggagggcctgcccatgagctacgatgaaaagcgccagcttagcctggacatcaaccggctgcccggggagaagctgggccgggtagtgcacatcatccaatctcgggagccctcgctcagggactccaaccccgatgagatagaaattgactttgagactctgaaacccaccactttgcggga

SEQ ID NO: 44144 - DNA, 1033 bp, Homo sapiens
ttattattttctagtctcttcctaagtagttacatatccattgggtatttaattatttaatgataacccggccgcaagaccaaccagctgcagtacatgcagaatgtggtggtgaagacgctctggaaacaccagttcgcctggcccttctacaagccagtggatgccgaggccctggagctgcacgactaccacgacatcatcaagcacccgatggacctcagcaccgtgaaaaggaagatggatggccgagagtacccagacgcacagggctttgctgctgatgtccggctgatgttctcgaattgctacaaatacaatcccccagaccacgaggttgtggccatggcccggaagctccaggacgtgtttgagatgaggtttgccaagatgccagatgagcccgtggaggcaccggcgctgcctgcccccgcggcccccatggtgagcaagggcgctgagagcagccgtagcagtgaggagagctcttcggactcaggcagctcggactcggaggaggagcgggccaccaggctggcggagctgcaggagcagctgaaggccgtgcacgagcagctggccgccctgtctcaggccccagtaaacaaaccaaagaagaagaaggagaaagaaggagaaggagaagaagaagaaggacaaggagaaggagaaggagaagcacaaagtgaaggccgatggaagagaagaaggccaaggtggctccgcctgccaagcaggctcagcagaagaaggctcctgccaagaaggccaacagcacgaccacggccggcagacagctgaagaaaggcggcaagcaggcatctgcctcctacgactcagaggaagaggaggagggcctgcccatgagctacgatgaaaagcgccagcttagcctggacatcaaccggctgcccggggagaagctgggccgggtagtgcacatcatccaatctcgggagccctcgctcagggactccaaccccgatgagatagaaattgactttgagactctgaaacccaccactttgcggga

SEQ ID NO: 44145 - DNA, 436 bp, Homo sapiens
ctaccgtggcacatgtatacctatgtaacaaacctgcacattctgcacatgtatccccgaacttaaagtataatacattttttttaaaaagttagctgccctcaccgagtccctgttgtgccacccgcgcagtgctgagcctgtggccaggcagctcttccccactgcaggcgaagaagccgaggcggagagggctcatgactcactgggggtcacgggagtgaggggcagagcagggcccaggtgctcctggttcacctcctcacccagctgaggcagctccgacatcgccccaagccccctccaatcccagggcgccacgcagccccagtggtgtgggccgtgcccagcacctgctcagccgcccgctcttttccagctgaaggccgtgcacgagcagctggccgccctgtctcaggccccagtaaacaaacca

SEQ ID NO: 44146 - DNA, 711 bp, Homo sapiens
agttgggaatctatagcctgctaccatttattgtgtagcctgcaaatggtttttacatttttaatacattggaaaaaaaattaaagaagattattatttcgtgatgtgaaaattatacatgttgaaaggaaaactttagagtttaattgagtaaagaatgatctgtgaattaggcagcccccagaaccagagtagggttggttacagctgagcatttgccttatttgaacctggtttgaagagttggctgcctgtggttggctgaagttcagctgctgtgattggctgagactcactacttgttacaagagtaggttacatatcaagttttacatatcaagttgaaatatagttttttatgtactgggaaacctttagggtaaacttaaaatatgtaaggaggcagctttaggccacaatgaatttaacaattcctccttttggtcaacctgtcaattttgagaggatgattaattttgaggttgcccaaaactttaggcattgacatcactttttatcatcataaatagagttatttggtctctaatcccattggaaaatagcagaacactggattttgtaaggtgggaacaaggaaacagtatagaaaaaaaaaactgattggttaacatcagattacttttttatttttttgtcacccaggatggagtgcagtggcacaatcttggctcactgcaacgtcaccttttg

SEQ ID NO: 44147 - DNA, 275 bp, Homo sapiens
gaaataccacatgcaataagtgaaattaagtttgagcatttatacttatcacacgaacaatatctttctaaacataatctttgagaatattccctcttaaagcatcagagataaggtgcaatttatattgatacttttccatctcattagaatcttttgtgagcaatctatagcctggagcatctgtttctgcttctagtggtgtggttagaaagcagatttaactattttggctttggagtttgctttaaagctaatataggcaaaagtcacgt

SEQ ID NO: 44148 - DNA, 450 bp, Homo sapiens
tcacataaacaacacttatacttcctgtaaacccaattaaaaccacatttcaggtttgctcttatgatttagaagtaaatttagaatcagtttcatgaatcttgcagtatttttcaaattaatgtctttaggcatttggacaatgggctgtgtgaatgcaaactgcgttttcttcaattgctatcaattagagacagttaagaactcaactgatgaagaaatagccacctgaaagtgagcccacaggcaagtcacaggcccctcttcctcctgaaggtgcacgggagacttcgttaaaaaaaaaaaagctgtagtaaaatacgtataagataaaaatttaccattttaagtttcttttttttgaagacgaagccttgctctgtcacccaggctggagtgcagtggtgtgatcacaattcactgcagcctcaccctctccggctcaagcga

SEQ ID NO: 44149 - DNA, 344 bp, Homo sapiens
acctttagaatggttaaaaatatttctccggtagccatatgattattattcatccattagataatatagtcaaatgggccatgttatttactgttcatagaagaggggctttttgcaacttgggctacaaaggagatatgtaaggaatttaaggaatggttacatggaactagatttaattgaatctagtggtttaattgattcactaggatatatgctactgaaaggggaatctgcttaaagtgctttctgatatttattattactaaaacttagaatttattaaaaatactgactgtgaaaattacttgggtcgtttgcctttttaaaaggatttttggcat

SEQ ID NO: 44150 - DNA, 8570 bp, Homo sapiens
gattacaggcgtgagccaccacacctggcccagttaagagagtcttaactctcttaactctcttgtcacaaggaaaagagaccttgtgacactgaaatgactcggggtggtgggggaacaagccagccctttccctgaaggaggcctctaacctctcctctcaggtcctcagctattaactggaggaaacagctgctttttcagtgcttctcagctactctgtttagctgagagatgaagtaggaagatttggacttctcttattgaaaggcctagagaaggttttggtgtccttttaagatgtcacagaaaatttttgtttcaggattgtagggagcagattcctactgttcttaaaggacagtaatgccttttgagtctggtctgaagaacataacaggtctgtgatcagaagtaggttgcatctctctcaactttaatttccttagctatacctgtagggatgacttaagcctaggggagctcctatatttgggaagcttgtgcacagggaagccttaaatgatggtgcctgcagattggatctagtagaaattaggtccttgggcatggatgcttggggaacctctcagtgacctcaggtgaacttgttgctcgtagagccaagaggcgaagttaattcaggccttccttttgaccactgccccctcttcctaggccttggcccctccaccagaggaaggtgctgccacgtgtctgctccttctgaacctccaggtttctgctacgttgccccatggaggacacacccccctcactcagctgctccgactgtcagcgccactttcccagcctcccagagctctctcggcaccgagaactgctccatccatctcccaaccaggacagtgaggaggctgacagcatccctcggccctaccgttgtcagcagtgtgggcggggctaccgtcaccccgggagcctggttaaccatcgtcggacccacgagactggccttttcccctgtaccacctgtggcaaggacttctccaatcccatggctctcaagagccatatgaggacacatgctcctgagggccgccgcaggcacaggcccccacgccccaaggaagccactccacacctccagggtgagacggtgtccactgactcctggggccaaaggcttggctctagtgaaggctgggaaaaccagacaaaacatacagaagagacacctgactgtgaatctgtacctgaccccagggcagcttcgggtacgtgggaagatctgcccaccagacaaagagaaggcttggcaagccacccaggtcctgaggatggtgcagacggctggggaccctccactaactctgccagagcccctcctctccccatcccagccagcagccttcttagcaacttggaacagtatctggctgaatcagtagtgaacttcacagggggccaggagcccacccagtcccctcctgctgaggaggagcggcggtacaaatgtagtcagtgtggcaagacctacaagcacgccgggagcctcaccaaccaccgccagagccacacgctgggcatctacccctgtgccatctgtttcaaggagttctctaacctcatggctctgaagaaccactctcgactgcatgcccagtatcggccttaccactgtccccactgcccccgtgtcttccggctcccccgggagctgctggaacaccagcagtcccatgagggtgaaaggcaggagccacgctgggaggagaaagggatgcccaccaccaatgggcacacagatgagagcagccaggaccagctccccagtgcacagatgctgaatggctctgcggagctcagcacctctggggagctggaggacagtggcctggaggaataccggcctttccgctgtggggactgtggccgtacttaccgccatgctgggagcctcatcaaccatcgaaagagccaccagacaggtgtctacccctgctcactctgttctaagcagctgttcaatgcggctgccctcaaaaaccatgtgcgggctcatcacaggcccaggcaaggagttggggaaaatgggcagccatcagtcccaccagctcccctgctgctggctgagaccacccacaaagaggaagaggaccccaccaccaccctggaccatcggccctataagtgcagtgagtgtggtcgtgcttaccgccaccgggggagcctggtgaaccatcgccacagccatcggactggagagtaccagtgctcactctgtccccgcaagtaccccaatctcatggccctgcgcaaccacgtgcgggtacattgcaaggctgctcgccgaagtgcagacatcggggctgagggtgcccccagccacctcaaggtagaactcccgcctgacccagtggaggcagaggcagccccgcacacagatcaggaccatgtgtgcaaacatgaagaagaggccacggacatcaccccagcagcagacaagacagcagcacatatctgtagcatctgtgggctgctctttgaagacgctgagagccttgaacgtcatggcctgactcatggggcaggggaaaaggaaaatagcagaacagagaccacaatgtcacctcctagggcctttgcctgccgagactgtggaaagagctatcgccactcaggcagccttatcaaccacaggcagacccaccagacaggagacttcagttgtggggcctgtgccaagcacttccacaccatggctgccatgaagaaccacttgcgccggcacagtcggcggcggagcaggcggcatcggaagcgggctggcggtgccagcggtgggagagaagccaaactcctggcagcggagagctggacccgggagctagaagacaatgaaggcctggagtctccccaagacccttcaggggaaagtcctcatggggctgaaggcaacctggaaagtgatggggactgtttgcaggctgaatctgaaggggacaaatgtgggcttgagagggatgagacccatttccagggtgataaagagagcggaggcactggggaaggactggaaaggaaggatgccagtttacttgacaacttggacatcccaggtgaggaaggtggtggcactcacttctgcgatagcctcactggggtggatgaagaccagaagccagccactggccaacccaactcctcttcccactctgccaatgctgtcactggctggcaggctggggccgctcacacatgctctgactgtgggcattctttcccccatgccactggcctgctgagccacaggccctgccacccaccaggcatctatcagtgctccctctgcccgaaggagtttgactctctgcctgccctccgcagccacttccagaaccataggcctggggaggcgacctcagcacagcctttcctctgctgcctctgtggcatgatcttccctgggcgggctggctacaggcttcaccggcgccaggcccacagctcctctggcatgactgagggctcagaggaggagggggaagaggaaggagtggcagaggcagcccctgcacgcagtccaccactgcagctctcggaagcagagctgctgaatcagctgcagcgggaggtggaagcgctggacagtgcagggtatgggcacatctgtggctgctgtggtcagacctacgatgacctggggagcctggagcgtcaccaccaaagtcagagttctgggactactgcagacaaggctcccagccccttgggagtggcaggtgatgccatggagatggtcgtggacagtgtcttggaggacatagtgaattctgtctctggagagggtggagatgccaagtctcaagagggagcaggcacccccttgggagacagcctctgcatccagggtggggaaagtttgttggaggctcagccccgccccttccgctgcaaccagtgtggcaagacctatcgccatgggggcagcctggtgaaccaccgcaagatccaccagactggagactttctctgccctgtctgctcccgctgctaccccaacctggctgcctaccgtaatcatctgcggaaccaccctcgctgcaaaggctctgagccccaggttgggcccatcccagaggcagcaggtagcagtgagctgcaggttgggcccatcccagaaggaggcagcaacaagccccagcacatggcagaggaggggccggggcaagcagaagtcgagaagctccaggaagaacttaaagtggagcccctggaggaagtggccagggtgaaagaagaggtgtgggaggagaccactgtgaagggggaggagatagagcccaggctggagactgccgagaagggctgccagactgaagccagctctgagcggcccttcagctgcgaggtgtgtggccgatcctacaagcacgccggcagcctcatcaaccaccggcagagccaccagaccggccactttggctgtcaggcctgctccaagggcttctcaaacctcatgtccctcaagaaccaccggcgcatccatgcagatccccgacgtttccgctgcagcgagtgtgggaaggccttccgcctgcggaaacagctggccagccaccagcgggtccacatggaacggcgtgggggtgggggcacccgaaaggcgactcgggaagatcggcccttccgctgtgggcagtgcgggcggacctatcgccacgccggcagcctcctgaaccaccggcgcagccacgagacgggccagtacagctgccccacctgccccaagacctactccaaccgcatggccctgaaggaccaccagaggctgcactcagagaatcggcggcgacgggctggacggtccaggcgcacagctgtgcgttgcgccctctgtggccgcagcttccctggccggggatctttggagcggcacctgcgggagcatgaggagacagaaagggagccagccaatggccagggaggcctggatggcacagcggccagtgaggcgaacctgactggcagccagggactagagacccaattgggtggtgctgagccagtaccccacttggaggatggagtcccaaggccaggggagcgcagtcagagccccatcagggcagcaagctcagaagccccagagccactgtcctggggtgcagggaaggcaggtgggtggccggtaggtgggggactggggaatcatagtggaggctgggttcctcagttcctaactaggtcagaggagccagaggacagtgtccacaggagtccttgccacgctggtgactgccagctcaatggacctactctgagtcacatggatagctgggacaacagagacaacagctctcagctgcagccagggagccactcctcttgcagccagtgtggcaagacttactgccagtcaggcagcctcttgaaccacaacaccaacaagacagaccgacactattgcctgctctgctccaaggagttcttaaatcctgtggccacaaagagccacagccacaaccacatagacgcccagacctttgcctgtcctgactgtggcaaagcctttgagtcccaccaggaactggccagccacctgcaggctcatgcccggggccacagccaggtgccagcccagatggaggaggccagagatcccaaagccgggactggggaggaccaggtggttctccctggtcaagggaaagcccaggaggccccatcagaaacccccagaggcccaggagagagtgtggagagagccaggggaggacaagcggtgacgtccatggcggctgaggacaaggagcggcccttccgctgcacccagtgcgggcgctcctaccgccatgctggcagcctgctgaaccaccagaaggcccacaccacagggttgtacccgtgctccctctgtcccaaacttctccctaacctgctgtctcttaagaaccacagcaggacccacacggaccccaagcgccactgctgcagcatctgtggcaaggcctttcggacagctgcccggctggagggccacgggcgggtccatgcaccccgggaggggcctttcacctgcccccattgtccccgccacttccgccgccgaatcagcttcgtgcagcaccagcagcagcaccaggaggagtggacggtggccggctccggtagggggcatgaagggtcccaggaggaggtgggcacacagtggagggggaagtccagccccaaagtcggtgggggagcaaggagtgagaggagagagccccggggattctaagaggtgggtgggggcttggctatggggtgagagaagtagcttgaggatgtgctgagctgagcacccgcaagtcaggtataacaaatagcagggtgggttgggcagcacgtgggggcgtggtcaggccgaggctgctacctgggctcctccattacactgtagccagaatggaatggtctttctgttcaggggaaggtcactgggtaccccctggctgctgtgtctggaaaccctcctgagtcagccagtaaagtaatgacttccagagaaaaagaggaagccattggtttggtctaggttccattctttcctggagcaggccgggtgccagggaacaagggatggggcatgggctccacggcttccctgctgacttggccacggaaactggttcactggttggcaccctactccctgtccctctttccctgcgccttgtctctgctgctcctctccttggaaactagacctctggtccttccctgtcagtgttgctcccatctcttctctaacctttattcagccccttttccctctgctgccaacggcctttttaggatccaaccaaaccaccctttctacctgcgcaccctgccaccctctgcacacctttaactggaggactgagtcacagataattgtttccttgaagtccaggcccagctgcagcaacaacagtcattagcccgtgtcacatccctgatcagagggcatctccgtggggaatcgcctccacccagcactgctggaagccgcggctgccagggagtggggcggccggttccctcagcaggacctgggctggcctctccacctcccctagtagaggcggacccattccatctagtggccaccgagggtgggtggccctgagatggtgggcccttgacaggccttgtcagagcagagggcaggtgggagtcacctgaaagctgaaggaatggctttaaggatagaagatttctcatgacctcaagggatatgagggaggagccagtttgccagggctgggaaaataattaggaggcctagaatccctgttctcatctgggcctccggggccaggggcaggggaatggcctgcagggctgggagggggtacacgctgtgcggggtctgcccctcagttggtgacctcctctctctctccccccaggagccccagtggcaccagtgacgggcagaggggacttgccattgccccctccacccacccccacgaccccactcctggatccttcaccccagtggcctgcagacctcagcttctccctctgaacttcaagtctccaaagatcagaatctgggggagggagcgcgtgcagggaggggcttgatctccacattttctcaggagtagttcgggcatccccatatcttctcctctccccttgtgaagaggacccagatctggcttctttcccaaggagggggtggggtgttcctcgcgtccctgtccttgaaggacctccttcccccagcctcatcaccgtgctcttctcagcgccaccctcagcagccagattgcaacaccagggagaggcggatgcagagccccaccggtgggaaagttgcctgtggaagggagccttttgctacaatttgtaacttattttctaaagtctattttgtaacaatttatttaagtttaaaaaaaggaaaactgctgccccccaaaaaaagaaattttcaaaacaacgtggctggcgtgattgtatctgaaagggtaaaggaggaggaaagctgagacgcctgcttggtagcagagttgggtgtgggagtgtccacagacacccctgtcctgcagggtggggagtgggcacctgtggccccaggcaggttccttcccacagctgctgggcttctgggcctgccctggtgcctggaatcacacatgacagggtggggaggacaggggcagtaatgccatttgcctgcctgcattctcttgtcctgagaatggccaggtcccctgtcagcagctggttggttggcctgtggggaaggaaggagggtggagttgtcctcatcctcacggctttggtccctccctccctccccattcctcgaaggaacagggtctgtcttggccgccatgacagatgagaatactgaggctcaaagcggttgagcagcctgctccaagtcacacgatgacaaagaaccagaatctgaatcaaatgggtctgcctgttgctccaccctacccaaggcagctggagtgggttagaacggcacgttctcactggagagagaagggtcctggagaggcagggtttggcaggaggccccggggccacatacttatgttggccaggcagct

SEQ ID NO: 44151 - DNA, 6153 bp, Homo sapiens
gacctagcgttaccgaatcatagaggcacgcagagcacgtagcagcagacaagacagcagcacatatctgtagcatctgtgggctgctctttgaagacgctgagagccttgaacgtcatggcctgactcatggggcaggggaaaaggaaaatagcagaacagagaccacaatgtcacctcctagggcctttgcctgccgagactgtggaaagagctatcgccactcaggcagccttatcaaccacaggcagacccaccagacaggagacttcagttgtggggcctgtgccaagcacttccacaccatggctgccatgaagaaccacttgcgccggcacagtcggcggcggagcaggcggcatcggaagcgggctggcggtgccagcggtgggagagaagccaaactcctggcagcggagagctggacccgggagctagaagacaatgaaggcctggagtctccccaagacccttcaggggaaagtcctcatggggctgaaggcaacctggaaagtgatggggactgtttgcaggctgaatctgaaggggacaaatgtgggcttgagagggatgagacccatttccagggtgataaagagagcggaggcactggggaaggactggaaaggaaggatgccagtttacttgacaacttggacatcccaggtgaggaaggtggtggcactcacttctgcgatagcctcactggggtggatgaagaccagaagccagccactggccaacccaactcctcttcccactctgccaatgctgtcactggctggcaggctggggccgctcacacatgctctgactgtgggcattctttcccccatgccactggcctgctgagccacaggccctgccacccaccaggcatctatcagtgctccctctgcccgaaggagtttgactctctgcctgccctccgcagccacttccagaaccataggcctggggaggcgacctcagcacagcctttcctctgctgcctctgtggcatgatcttccctgggcgggctggctacaggcttcaccggcgccaggcccacagctcctctggcatgactgagggctcagaggaggagggggaagaggaaggagtggcagaggcagcccctgcacgcagtccaccactgcagctctcggaagcagagctgctgaatcagctgcagcgggaggtggaagcgctggacagtgcagggtatgggcacatctgtggctgctgtggtcagacctacgatgacctggggagcctggagcgtcaccaccaaagtcagagttctgggactactgcagacaaggctcccagccccttgggagtggcaggtgatgccatggagatggtcgtggacagtgtcttggaggacatagtgaattctgtctctggagagggtggagatgccaagtctcaagagggagcaggcacccccttgggagacagcctctgcatccagggtggggaaagtttgttggaggctcagccccgccccttccgctgcaaccagtgtggcaagacctatcgccatgggggcagcctggtgaaccaccgcaagatccaccagactggagactttctctgccctgtctgctcccgctgctaccccaacctggctgcctaccgtaatcatctgcggaaccaccctcgctgcaaaggctctgagccccaggttgggcccatcccagaggcagcaggtagcagtgagctgcaggttgggcccatcccagaaggaggcagcaacaagccccagcacatggcagaggaggggccggggcaagcagaagtcgagaagctccaggaagaacttaaagtggagcccctggaggaagtggccagggtgaaagaagaggtgtgggaggagaccactgtgaagggggaggagatagagcccaggctggagactgccgagaagggctgccagactgaagccagctctgagcggcccttcagctgcgaggtgtgtggccgatcctacaagcacgccggcagcctcatcaaccaccggcagagccaccagaccggccactttggctgtcaggcctgctccaagggcttctcaaacctcatgtccctcaagaaccaccggcgcatccatgcagatccccgacgtttccgctgcagcgagtgtgggaaggccttccgcctgcggaaacagctggccagccaccagcgggtccacatggaacggcgtgggggtgggggcacccgaaaggcgactcgggaagatcggcccttccgctgtgggcagtgcgggcggacctatcgccacgccggcagcctcctgaaccaccggcgcagccacgagacgggccagtacagctgccccacctgccccaagacctactccaaccgcatggccctgaaggaccaccagaggctgcactcagagaatcggcggcgacgggctggacggtccaggcgcacagctgtgcgttgcgccctctgtggccgcagcttccctggccggggatctttggagcggcacctgcgggagcatgaggagacagaaagggagccagccaatggccagggaggcctggatggcacagcggccagtgaggcgaacctgactggcagccagggactagagacccaattgggtggtgctgagccagtaccccacttggaggatggagtcccaaggccaggggagcgcagtcagagccccatcagggcagcaagctcagaagccccagagccactgtcctggggtgcagggaaggcaggtgggtggccggtaggtgggggactggggaatcatagtggaggctgggttcctcagttcctaactaggtcagaggagccagaggacagtgtccacaggagtccttgccacgctggtgactgccagctcaatggacctactctgagtcacatggatagctgggacaacagagacaacagctctcagctgcagccagggagccactcctcttgcagccagtgtggcaagacttactgccagtcaggcagcctcttgaaccacaacaccaacaagacagaccgacactattgcctgctctgctccaaggagttcttaaatcctgtggccacaaagagccacagccacaaccacatagacgcccagacctttgcctgtcctgactgtggcaaagcctttgagtcccaccaggaactggccagccacctgcaggctcatgcccggggccacagccaggtgccagcccagatggaggaggccagagatcccaaagccgggactggggaggaccaggtggttctccctggtcaagggaaagcccaggaggccccatcagaaacccccagaggcccaggagagagtgtggagagagccaggggaggacaagcggtgacgtccatggcggctgaggacaaggagcggcccttccgctgcacccagtgcgggcgctcctaccgccatgctggcagcctgctgaaccaccagaaggcccacaccacagggttgtacccgtgctccctctgtcccaaacttctccctaacctgctgtctcttaagaaccacagcaggacccacacggaccccaagcgccactgctgcagcatctgtggcaaggcctttcggacagctgcccggctggagggccacgggcgggtccatgcaccccgggaggggcctttcacctgcccccattgtccccgccacttccgccgccgaatcagcttcgtgcagcaccagcagcagcaccaggaggagtggacggtggccggctccggtagggggcatgaagggtcccaggaggaggtgggcacacagtggagggggaagtccagccccaaagtcggtgggggagcaaggagtgagaggagagagccccggggattctaagaggtgggtgggggcttggctatggggtgagagaagtagcttgaggatgtgctgagctgagcacccgcaagtcaggtataacaaatagcagggtgggttgggcagcacgtgggggcgtggtcaggccgaggctgctacctgggctcctccattacactgtagccagaatggaatggtctttctgttcaggggaaggtcactgggtaccccctggctgctgtgtctggaaaccctcctgagtcagccagtaaagtaatgacttccagagaaaaagaggaagccattggtttggtctaggttccattctttcctggagcaggccgggtgccagggaacaagggatggggcatgggctccacggcttccctgctgacttggccacggaaactggttcactggttggcaccctactccctgtccctctttccctgcgccttgtctctgctgctcctctccttggaaactagacctctggtccttccctgtcagtgttgctcccatctcttctctaacctttattcagccccttttccctctgctgccaacggcctttttaggatccaaccaaaccaccctttctacctgcgcaccctgccaccctctgcacacctttaactggaggactgagtcacagataattgtttccttgaagtccaggcccagctgcagcaacaacagtcattagcccgtgtcacatccctgatcagagggcatctccgtggggaatcgcctccacccagcactgctggaagccgcggctgccagggagtggggcggccggttccctcagcaggacctgggctggcctctccacctcccctagtagaggcggacccattccatctagtggccaccgagggtgggtggccctgagatggtgggcccttgacaggccttgtcagagcagagggcaggtgggagtcacctgaaagctgaaggaatggctttaaggatagaagatttctcatgacctcaagggatatgagggaggagccagtttgccagggctgggaaaataattaggaggcctagaatccctgttctcatctgggcctccggggccaggggcaggggaatggcctgcagggctgggagggggtacacgctgtgcggggtctgcccctcagttggtgacctcctctctctctccccccaggagccccagtggcaccagtgacgggcagaggggacttgccattgccccctccacccacccccacgaccccactcctggatccttcaccccagtggcctgcagacctcagcttctccctctgaacttcaagtctccaaagatcagaatctgggggagggagcgcgtgcagggaggggcttgatctccacattttctcaggagtagttcgggcatccccatatcttctcctctccccttgtgaagaggacccagatctggcttctttcccaaggagggggtggggtgttcctcgcgtccctgtccttgaaggacctccttcccccagcctcatcaccgtgctcttctcagcgccaccctcagcagccagattgcaacaccagggagaggcggatgcagagccccaccggtgggaaagttgcctgtggaagggagccttttgctacaatttgtaacttattttctaaagtctattttgtaacaatttatttaagtttaaaaaaaggaaaactgctgccccccaaaaaaagaaattttcaaaacaacgtggctggcgtgattgtatctgaaagggtaaaggaggaggaaagctgagacgcctgcttggtagcagagttgggtgtgggagtgtccacagacacccctgtcctgcagggtggggagtgggcacctgtggccccaggcaggttccttcccacagctgctgggcttctgggcctgccctggtgcctggaatcacacatgacagggtggggaggacaggggcagtaatgccatttgcctgcctgcattctcttgtcctgagaatggccaggtcccctgtcagcagctggttggttggcctgtggggaaggaaggagggtggagttgtcctcatcctcacggctttggtccctccctccctccccattcctcgaaggaacagggtctgtcttggccgccatgacagatgagaatactgaggctcaaagcggttgagcagcctgctccaagtcacacgatgacaaagaaccagaatctgaatcaaatgggtctgcctgttgctccaccctacccaaggcagctggagtgggttagaacggcacgttctcactggagagagaagggtcctggagaggcagggtttggcaggaggccccggggccacatacttatgttggccaggcagct

SEQ ID NO: 44152 - DNA, 8148 bp, Homo sapiens
gattacaggcgtgagccaccacacctggcccagttaagagagtcttaactctcttaactctcttgtcacaaggaaaagagaccttgtgacactgaaatgactcggggtggtgggggaacaagccagccctttccctgaaggaggcctctaacctctcctctcaggtcctcagctattaactggaggaaacagctgctttttcagtgcttctcagctactctgtttagctgagagatgaagtaggaagatttggacttctcttattgaaaggcctagagaaggttttggtgtccttttaagatgtcacagaaaatttttgtttcaggattgtagggagcagattcctactgttcttaaaggacagtaatgccttttgagtctggtctgaagaacataacaggtctgtgatcagaagtaggttgcatctctctcaactttaatttccttagctatacctgtagggatgacttaagcctaggggagctcctatatttgggaagcttgtgcacagggaagccttaaatgatggtgcctgcagattggatctagtagaaattaggtccttgggcatggatgcttggggaacctctcagtgacctcaggtgaacttgttgctcgtagagccaagaggcgaagttaattcaggccttccttttgaccactgccccctcttcctaggccttggcccctccaccagaggaaggtgctgccacgtgtctgctccttctgaacctccaggtttctgctacgttgccccatggaggacacacccccctcactcagctgctccgactgtcagcgccactttcccagcctcccagagctctctcggcaccgagaactgctccatccatctcccaaccaggacagtgaggaggctgacagcatccctcggccctaccgttgtcagcagtgtgggcggggctaccgtcaccccgggagcctggttaaccatcgtcggacccacgagactggccttttcccctgtaccacctgtggcaaggacttctccaatcccatggctctcaagagccatatgaggacacatgctcctgagggccgccgcaggcacaggcccccacgccccaaggaagccactccacacctccagggtgagacggtgtccactgactcctggggccaaaggcttggctctagtgaaggctgggaaaaccagacaaaacatacagaagagacacctgactgtgaatctgtacctgaccccagggcagcttcgggtacgtgggaagatctgcccaccagacaaagagaaggcttggcaagccacccaggtcctgaggatggtgcagacggctggggaccctccactaactctgccagagcccctcctctccccatcccagccagcagccttcttagcaacttggaacagtatctggctgaatcagtagtgaacttcacagggggccaggagcccacccagtcccctcctgctgaggaggagcggcggtacaaatgtagtcagtgtggcaagacctacaagcacgccgggagcctcaccaaccaccgccagagccacacgctgggcatctacccctgtgccatctgtttcaaggagttctctaacctcatggctctgaagaaccactctcgactgcatgcccagtatcggccttaccactgtccccactgcccccgtgtcttccggctcccccgggagctgctggaacaccagcagtcccatgagggtgaaaggcaggagccacgctgggaggagaaagggatgcccaccaccaatgggcacacagatgagagcagccaggaccagctccccagtgcacagatgctgaatggctctgcggagctcagcacctctggggagctggaggacagtggcctggaggaataccggcctttccgctgtggggactgtggccgtacttaccgccatgctgggagcctcatcaaccatcgaaagagccaccagacaggtgtctacccctgctcactctgttctaagcagctgttcaatgcggctgccctcaaaaaccatgtgcgggctcatcacaggcccaggcaaggagttggggaaaatgggcagccatcagtcccaccagctcccctgctgctggctgagaccacccacaaagaggaagaggaccccaccaccaccctggaccatcggccctataagtgcagtgagtgtggtcgtgcttaccgccaccgggggagcctggtgaaccatcgccacagccatcggactggagagtaccagtgctcactctgtccccgcaagtaccccaatctcatggccctgcgcaaccacgtgcgggtacattgcaaggctgctcgccgaagtgcagacatcggggctgagggtgcccccagccacctcaaggtagaactcccgcctgacccagtggaggcagaggcagccccgcacacagatcaggaccatgtgtgcaaacatgaagaagaggccacggacatcaccccagcagcagacaagacagcagcacatatctgtagcatctgtgggctgctctttgaagacgctgagagccttgaacgtcatggcctgactcatggggcaggggaaaaggaaaatagcagaacagagaccacaatgtcacctcctagggcctttgcctgccgagactgtggaaagagctatcgccactcaggcagccttatcaaccacaggcagacccaccagacaggagacttcagttgtggggcctgtgccaagcacttccacaccatggctgccatgaagaaccacttgcgccggcacagtcggcggcggagcaggcggcatcggaagcgggctggcggtgccagcggtgggagagaagccaaactcctggcagcggagagctggacccgggagctagaagacaatgaaggcctggagtctccccaagacccttcaggggaaagtcctcatggggctgaaggcaacctggaaagtgatggggactgtttgcaggctgaatctgaaggggacaaatgtgggcttgagagggatgagacccatttccagggtgataaagagagcggaggcactggggaaggactggaaaggaaggatgccagtttacttgacaacttggacatcccaggtgaggaaggtggtggcactcacttctgcgatagcctcactggggtggatgaagaccagaagccagccactggccaacccaactcctcttcccactctgccaatgctgtcactggctggcaggctggggccgctcacacatgctctgactgtgggcattctttcccccatgccactggcctgctgagccacaggccctgccacccaccaggcatctatcagtgctccctctgcccgaaggagtttgactctctgcctgccctccgcagccacttccagaaccataggcctggggaggcgacctcagcacagcctttcctctgctgcctctgtggcatgatcttccctgggcgggctggctacaggcttcaccggcgccaggcccacagctcctctggcatgactgagggctcagaggaggagggggaagaggaaggagtggcagaggcagcccctgcacgcagtccaccactgcagctctcggaagcagagctgctgaatcagctgcagcgggaggtggaagcgctggacagtgcagggtatgggcacatctgtggctgctgtggtcagacctacgatgacctggggagcctggagcgtcaccaccaaagtcagagttctgggactactgcagacaaggctcccagccccttgggagtggcaggtgatgccatggagatggtcgtggacagtgtcttggaggacatagtgaattctgtctctggagagggtggagatgccaagtctcaagagggagcaggcacccccttgggagacagcctctgcatccagggtggggaaagtttgttggaggctcagccccgccccttccgctgcaaccagtgtggcaagacctatcgccatgggggcagcctggtgaaccaccgcaagatccaccagactggagactttctctgccctgtctgctcccgctgctaccccaacctggctgcctaccgtaatcatctgcggaaccaccctcgctgcaaaggctctgagccccaggttgggcccatcccagaggcagcaggtagcagtgagctgcaggttgggcccatcccagaaggaggcagcaacaagccccagcacatggcagaggaggggccggggcaagcagaagtcgagaagctccaggaagaacttaaagtggagcccctggaggaagtggccagggtgaaagaagaggtgtgggaggagaccactgtgaagggggaggagatagagcccaggctggagactgccgagaagggctgccagactgaagccagctctgagcggcccttcagctgcgaggtgtgtggccgatcctacaagcacgccggcagcctcatcaaccaccggcagagccaccagaccggccactttggctgtcaggcctgctccaagggcttctcaaacctcatgtccctcaagaaccaccggcgcatccatgcagatccccgacgtttccgctgcagcgagtgtgggaaggccttccgcctgcggaaacagctggccagccaccagcgggtccacatggaacggcgtgggggtgggggcacccgaaaggcgactcgggaagatcggcccttccgctgtgggcagtgcgggcggacctatcgccacgccggcagcctcctgaaccaccggcgcagccacgagacgggccagtacagctgccccacctgccccaagacctactccaaccgcatggccctgaaggaccaccagaggctgcactcagagaatcggcggcgacgggctggacggtccaggcgcacagctgtgcgttgcgccctctgtggccgcagcttccctggccggggatctttggagcggcacctgcgggagcatgaggagacagaaagggagccagccaatggccagggaggcctggatggcacagcggccagtgaggcgaacctgactggcagccagggactagagacccaattgggtggtgctgagccagtaccccacttggaggatggagtcccaaggccaggggagcgcagtcagagccccatcagggcagcaagctcagaagccccagagccactgtcctggggtgcagggaaggcaggtgggtggccggtaggtgggggactggggaatcatagtggaggctgggttcctcagttcctaactaggtcagaggagccagaggacagtgtccacaggagtccttgccacgctggtgactgccagctcaatggacctactctgagtcacatggatagctgggacaacagagacaacagctctcagctgcagccagggagccactcctcttgcagccagtgtggcaagacttactgccagtcaggcagcctcttgaaccacaacaccaacaagacagaccgacactattgcctgctctgctccaaggagttcttaaatcctgtggccacaaagagccacagccacaaccacatagacgcccagacctttgcctgtcctgactgtggcaaagcctttgagtcccaccaggaactggccagccacctgcaggctcatgcccggggccacagccaggtgccagcccagatggaggaggccagagatcccaaagccgggactggggaggaccaggtggttctccctggtcaagggaaagcccaggaggccccatcagaaacccccagaggcccaggagagagtgtggagagagccaggggaggacaagcggtgacgtccatggcggctgaggacaaggagcggcccttccgctgcacccagtgcgggcgctcctaccgccatgctggcagcctgctgaaccaccagaaggcccacaccacagggttgtacccgtgctccctctgtcccaaacttctccctaacctgctgtctcttaagaaccacagcaggacccacacggaccccaagcgccactgctgcagcatctgtggcaaggcctttcggacagctgcccggctggagggccacgggcgggtccatgcaccccgggaggggcctttcacctgcccccattgtccccgccacttccgccgccgaatcagcttcgtgcagcaccagcagcagcaccaggaggagtggacggtggccggctccggtagggggcatgaagggtcccaggaggaggtgggcacacagtggagggggaagtccagccccaaagtcggtgggggagcaaggagtgagaggagagagccccggggattctaagaggtgggtgggggcttggctatggggtgagagaagtagcttgaggatgtgctgagctgagcacccgcaagtcaggtataacaaatagcagggtgggttgggcagcacgtgggggcgtggtcaggccgaggctgctacctgggctcctccattacactgtagccagaatggaatggtctttctgttcaggggaaggtcactgggtaccccctggctgctgtgtctggaaaccctcctgagtcagccagtaaagtaatgacttccagagaaaaagaggaagccattggtttggtctaggttccattctttcctggagcaggccgggtgccagggaacaagggatggggcatgggctccacggcttccctgctgacttggccacggaaactggttcactggttggcaccctactccctgtccctctttccctgcgccttgtctctgctgctcctctccttggaaactagacctctggtccttccctgtcagtgttgctcccatctcttctctaacctttattcagccccttttccctctgctgccaacggcctttttaggatccaaccaaaccaccctttctacctgcgcaccctgccaccctctgcacacctttaactggaggactgagtcacagataattgtttccttgaagtccaggcccagctgcagcaacaacagtcattagcccgtgtcacatccctgatcagagggcatctccgtggggaatcgcctccacccagcactgctggaagccgcggctgccagggagtggggcggccggttccctcagcaggacctgggctggcctctccacctcccctagtagaggcggacccattccatctagtggccaccgagggtgggtggccctgagatggtgggcccttgacaggccttgtcagagcagagggcaggtgggagtcacctgaaagctgaaggaatggctttaaggatagaagatttctccccttgtgaagaggacccagatctggcttctttcccaaggagggggtggggtgttcctcgcgtccctgtccttgaaggacctccttcccccagcctcatcaccgtgctcttctcagcgccaccctcagcagccagattgcaacaccagggagaggcggatgcagagccccaccggtgggaaagttgcctgtggaagggagccttttgctacaatttgtaacttattttctaaagtctattttgtaacaatttatttaagtttaaaaaaaggaaaactgctgccccccaaaaaaagaaattttcaaaacaacgtggctggcgtgattgtatctgaaagggtaaaggaggaggaaagctgagacgcctgcttggtagcagagttgggtgtgggagtgtccacagacacccctgtcctgcagggtggggagtgggcacctgtggccccaggcaggttccttcccacagctgctgggcttctgggcctgccctggtgcctggaatcacacatgacagggtggggaggacaggggcagtaatgccatttgcctgcctgcattctcttgtcctgagaatggccaggtcccctgtcagcagctggttggttggcctgtggggaaggaaggagggtggagttgtcctcatcctcacggctttggtccctccctccctccccattcctcgaaggaacagggtctgtcttggccgccatgacagatgagaatactgaggctcaaagcggttgagcagcctgctccaagtcacacgatgacaaagaaccagaatctgaatcaaatgggtctgcctgttgctccaccctacccaaggcagctggagtgggttagaacggcacgttctcactggagagagaagggtcctggagaggcagggtttggcaggaggccccggggccacatacttatgttggccaggcagct

SEQ ID NO: 44153 - DNA, 1175 bp, Homo sapiens
aacagcacaacggtacactccttgtctaacccagttttgtcaatagtactatagcatcttgtggaaaatcttagaagggaacattgtctcccccaccctctctcttccctgttaagaccatccctatatgctttcaagtctccaaagatcagaatctgggggagggagcgcgtgcagggaggggcttgatctccacattttctcaggagtagttcgggcatccccatatcttctcctctccccttgtgaagaggacccagatctggcttctttcccaaggagggggtggggtgttcctcgcgtccctgtccttgaaggacctccttcccccagcctcatcaccgtgctcttctcagcgccaccctcagcagccagattgcaacaccagggagaggcggatgcagagccccaccggtgggaaagttgcctgtggaagggagccttttgctacaatttgtaacttattttctaaagtctattttgtaacaatttatttaagtttaaaaaaaggaaaactgctgccccccaaaaaaagaaattttcaaaacaacgtggctggcgtgattgtatctgaaagggtaaaggaggaggaaagctgagacgcctgcttggtagcagagttgggtgtgggagtgtccacagacacccctgtcctgcagggtggggagtgggcacctgtggccccaggcaggttccttcccacagctgctgggcttctgggcctgccctggtgcctggaatcacacatgacagggtggggaggacaggggcagtaatgccatttgcctgcctgcattctcttgtcctgagaatggccaggtcccctgtcagcagctggttggttggcctgtggggaaggaaggagggtggagttgtcctcatcctcacggctttggtccctccctccctccccattcctcgaaggaacagggtctgtcttggccgccatgacagatgagaatactgaggctcaaagcggttgagcagcctgctccaagtcacacgatgacaaagaaccagaatctgaatcaaatgggtctgcctgttgctccaccctacccaaggcagctggagtgggttagaacggcacgttctcactggagagagaagggtcctggagaggcagggtttggcaggaggccccggggccacatacttatgttggccaggcagct

SEQ ID NO: 44154 - DNA, 8516 bp, Homo sapiens
gattacaggcgtgagccaccacacctggcccagttaagagagtcttaactctcttaactctcttgtcacaaggaaaagagaccttgtgacactgaaatgactcggggtggtgggggaacaagccagccctttccctgaaggaggcctctaacctctcctctcaggtcctcagctattaactggaggaaacagctgctttttcagtgcttctcagctactctgtttagctgagagatgaagtaggaagatttggacttctcttattgaaaggcctagagaaggttttggtgtccttttaagatgtcacagaaaatttttgtttcaggattgtagggagcagattcctactgttcttaaaggacagtaatgccttttgagtctggtctgaagaacataacaggtctgtgatcagaagtaggttgcatctctctcaactttaatttccttagctatacctgtagggatgacttaagcctaggggagctcctatatttgggaagcttgtgcacagggaagccttaaatgatggtgcctgcagattggatctagtagaaattaggtccttgggcatggatgcttggggaacctctcagtgacctcaggtgaacttgttgctcgtagagccaagaggcgaagttaattcaggccttccttttgaccactgccccctcttcctaggccttggcccctccaccagaggaaggtgctgccacgtgtctgctccttctgaacctccaggtttctgctacgttgccccatggaggacacacccccctcactcagctgctccgactgtcagcgccactttcccagcctcccagagctctctcggcaccgagaactgctccatccatctcccaaccaggacagtgaggaggctgacagcatccctcggccctaccgttgtcagcagtgtgggcggggctaccgtcaccccgggagcctggttaaccatcgtcggacccacgagactggccttttcccctgtaccacctgtggcaaggacttctccaatcccatggctctcaagagccatatgaggacacatgctcctgagggccgccgcaggcacaggcccccacgccccaaggaagccactccacacctccagggtgagacggtgtccactgactcctggggccaaaggcttggctctagtgaaggctgggaaaaccagacaaaacatacagaagagacacctgactgtgaatctgtacctgaccccagggcagcttcgggtacgtgggaagatctgcccaccagacaaagagaaggcttggcaagccacccaggtcctgaggatggtgcagacggctggggaccctccactaactctgccagagcccctcctctccccatcccagccagcagccttcttagcaacttggaacagtatctggctgaatcagtagtgaacttcacagggggccaggagcccacccagtcccctcctgctgaggaggagcggcggtacaaatgtagtcagtgtggcaagacctacaagcacgccgggagcctcaccaaccaccgccagagccacacgctgggcatctacccctgtgccatctgtttcaaggagttctctaacctcatggctctgaagaaccactctcgactgcatgcccagtatcggccttaccactgtccccactgcccccgtgtcttccggctcccccgggagctgctggaacaccagcagtcccatgagggtgaaaggcaggagccacgctgggaggagaaagggatgcccaccaccaatgggcacacagatgagagcagccaggaccagctccccagtgcacagatgctgaatggctctgcggagctcagcacctctggggagctggaggacagtggcctggaggaataccggcctttccgctgtggggactgtggccgtacttaccgccatgctgggagcctcatcaaccatcgaaagagccaccagacaggtgtctacccctgctcactctgttctaagcagctgttcaatgcggctgccctcaaaaaccatgtgcgggctcatcacaggcccaggcaaggagttggggaaaatgggcagccatcagtcccaccagctcccctgctgctggctgagaccacccacaaagaggaagaggaccccaccaccaccctggaccatcggccctataagtgcagtgagtgtggtcgtgcttaccgccaccgggggagcctggtgaaccatcgccacagccatcggactggagagtaccagtgctcactctgtccccgcaagtaccccaatctcatggccctgcgcaaccacgtgcgggtacattgcaaggctgctcgccgaagtgcagacatcggggctgagggtgcccccagccacctcaaggtagaactcccgcctgacccagtggaggcagaggcagccccgcacacagatcaggaccatgtgtgcaaacatgaagaagaggccacggacatcaccccagcagcagacaagacagcagcacatatctgtagcatctgtgggctgctctttgaagacgctgagagccttgaacgtcatggcctgactcatggggcaggggaaaaggaaaatagcagaacagagaccacaatgtcacctcctagggcctttgcctgccgagactgtggaaagagctatcgccactcaggcagccttatcaaccacaggcagacccaccagacaggagacttcagttgtggggcctgtgccaagcacttccacaccatggctgccatgaagaaccacttgcgccggcacagtcggcggcggagcaggcggcatcggaagcgggctggcggtgccagcggtgggagagaagccaaactcctggcagcggagagctggacccgggagctagaagacaatgaaggcctggagtctccccaagacccttcaggggaaagtcctcatggggctgaaggcaacctggaaagtgatggggactgtttgcaggctgaatctgaaggggacaaatgtgggcttgagagggatgagacccatttccagggtgataaagagagcggaggcactggggaaggactggaaaggaaggatgccagtttacttgacaacttggacatcccaggtgaggaaggtggtggcactcacttctgcgatagcctcactggggtggatgaagaccagaagccagccactggccaacccaactcctcttcccactctgccaatgctgtcactggctggcaggctggggccgctcacacatgctctgactgtgggcattctttcccccatgccactggcctgctgagccacaggccctgccacccaccaggcatctatcagtgctccctctgcccgaaggagtttgactctctgcctgccctccgcagccacttccagaaccataggcctggggaggcgacctcagcacagcctttcctctgctgcctctgtggcatgatcttccctgggcgggctggctacaggcttcaccggcgccaggcccacagctcctctggcatgactgagggctcagaggaggagggggaagaggaaggagtggcagaggcagcccctgcacgcagtccaccactgcagctctcggaagcagagctgctgaatcagctgcagcgggaggtggaagcgctggacagtgcagggtatgggcacatctgtggctgctgtggtcagacctacgatgacctggggagcctggagcgtcaccaccaaagtcagagttctgggactactgcagacaaggctcccagccccttgggagtggcaggtgatgccatggagatggtcgtggacagtgtcttggaggacatagtgaattctgtctctggagagggtggagatgccaagtctcaagagggagcaggcacccccttgggagacagcctctgcatccagggtggggaaagtttgttggaggctcagccccgccccttccgctgcaaccagtgtggcaagacctatcgccatgggggcagcctggtgaaccaccgcaagatccaccagactggagactttctctgccctgtctgctcccgctgctaccccaacctggctgcctaccgtaatcatctgcggaaccaccctcgctgcaaaggctctgagccccaggttgggcccatcccagaggcagcaggtagcagtgagctgcaggttgggcccatcccagaaggaggcagcaacaagccccagcacatggcagaggaggggccggggcaagcagaagtcgagaagctccaggaagaacttaaagtggagcccctggaggaagtggccagggtgaaagaagaggtgtgggaggagaccactgtgaagggggaggagatagagcccaggctggagactgccgagaagggctgccagactgaagccagctctgagcggcccttcagctgcgaggtgtgtggccgatcctacaagcacgccggcagcctcatcaaccaccggcagagccaccagaccggccactttggctgtcaggcctgctccaagggcttctcaaacctcatgtccctcaagaaccaccggcgcatccatgcagatccccgacgtttccgctgcagcgagtgtgggaaggccttccgcctgcggaaacagctggccagccaccagcgggtccacatggaacggcgtgggggtgggggcacccgaaaggcgactcgggaagatcggcccttccgctgtgggcagtgcgggcggacctatcgccacgccggcagcctcctgaaccaccggcgcagccacgagacgggccagtacagctgccccacctgccccaagacctactccaaccgcatggccctgaaggaccaccagaggctgcactcagagaatcggcggcgacgggctggacggtccaggcgcacagctgtgcgttgcgccctctgtggccgcagcttccctggccggggatctttggagcggcacctgcgggagcatgaggagacagaaagggagccagccaatggccagggaggcctggatggcacagcggccagtgaggcgaacctgactggcagccagggactagagacccaattgggtggtgctgagccagtaccccacttggaggatggagtcccaaggccaggggagcgcagtcagagccccatcagggcagcaagctcagaagccccagagccactgtcctggggtgcagggaaggcaggtgggtggccggtaggtgggggactggggaatcatagtggaggctgggttcctcagttcctaactaggtcagaggagccagaggacagtgtccacaggagtccttgccacgctggtgactgccagctcaatggacctactctgagtcacatggatagctgggacaacagagacaacagctctcagctgcagccagggagccactcctcttgcagccagtgtggcaagacttactgccagtcaggcagcctcttgaaccacaacaccaacaagacagaccgacactattgcctgctctgctccaaggagttcttaaatcctgtggccacaaagagccacagccacaaccacatagacgcccagacctttgcctgtcctgactgtggcaaagcctttgagtcccaccaggaactggccagccacctgcaggctcatgcccggggccacagccaggtgccagcccagatggaggaggccagagatcccaaagccgggactggggaggaccaggtggttctccctggtcaagggaaagcccaggaggccccatcagaaacccccagaggcccaggagagagtgtggagagagccaggggaggacaagcggtgacgtccatggcggctgaggacaaggagcggcccttccgctgcacccagtgcgggcgctcctaccgccatgctggcagcctgctgaaccaccagaaggcccacaccacagggttgtacccgtgctccctctgtcccaaacttctccctaacctgctgtctcttaagaaccacagcaggacccacacggaccccaagcgccactgctgcagcatctgtggcaaggcctttcggacagctgcccggctggagggccacgggcgggtccatgcaccccgggaggggcctttcacctgcccccattgtccccgccacttccgccgccgaatcagcttcgtgcagcaccagcagcagcaccaggaggagtggacggtggccggctccggtagggggcatgaagggtcccaggaggaggtgggcacacagtggagggggaagtccagccccaaagtcggtgggggagcaaggagtgagaggagagagccccggggattctaagaggtgggtgggggcttggctatggggtgagagaagtagcttgaggatgtgctgagctgagcacccgcaagtcaggtataacaaatagcagggtgggttgggcagcacgtgggggcgtggtcaggccgaggctgctacctgggctcctccattacactgtagccagaatggaatggtctttctgttcaggggaaggtcactgggtaccccctggctgctgtgtctggaaaccctcctgagtcagccagtaaagtaatgacttccagagaaaaagaggaagccattggtttggtctaggttccattctttcctggagcaggccgggtgccagggaacaagggatggggcatgggctccacggcttccctgctgacttggccacggaaactggttcactggttggcaccctactccctgtccctctttccctgcgccttgtctctgctgctcctctccttggaaactagacctctggtccttccctgtcagtgttgctcccatctcttctctaacctttattcagccccttttccctctgctgccaacggcctttttaggatccaaccaaaccaccctttctacctgcgcaccctgccaccctctgcacacctttaactggaggactgagtcacagataattgtttccttgaagtccaggcccagctgcagcaacaacagtcattagcccgtgtcacatccctgatcagagggcatctccgtggggaatcgcctccacccagcactgctggaagccgcggctgccagggagtggggcggccggttccctcagcaggacctgggctggcctctccacctcccctagtagaggcggacccattccatctagtggccaccgagggtgggtggccctgagatggtgggcccttgacaggccttgtcagagcagagggcaggtgggagtcacctgaaagctgaaggaatggctttaaggatagaagatttctcatgacctcaagggatatgagggaggagccagtttgccagggctgggaaaataattaggaggcctagaatccctgttctcatctgggcctccggggccaggggcaggggaatggcctgcagggctgggagggggtacacgctgtgcggggtctgcccctcagttggtgacctcctctctctctccccccaggagccccagtggcaccagtgacgggcagaggggacttgccattgccccctccacccacccccacgaccccactcctggatccttcaccccagtggcctgcagacctcagcttctccctctgaacttcaagtctccaaagatcagaatctgggggagggagcgcgtgcagggaggggcttgatctccacattttctcaggagtagttcgggcatccccatatcttctcctctccccttgtgaagaggacccagatctggctccttcccccagcctcatcaccgtgctcttctcagcgccaccctcagcagccagattgcaacaccagggagaggcggatgcagagccccaccggtgggaaagttgcctgtggaagggagccttttgctacaatttgtaacttattttctaaagtctattttgtaacaatttatttaagtttaaaaaaaggaaaactgctgccccccaaaaaaagaaattttcaaaacaacgtggctggcgtgattgtatctgaaagggtaaaggaggaggaaagctgagacgcctgcttggtagcagagttgggtgtgggagtgtccacagacacccctgtcctgcagggtggggagtgggcacctgtggccccaggcaggttccttcccacagctgctgggcttctgggcctgccctggtgcctggaatcacacatgacagggtggggaggacaggggcagtaatgccatttgcctgcctgcattctcttgtcctgagaatggccaggtcccctgtcagcagctggttggttggcctgtggggaaggaaggagggtggagttgtcctcatcctcacggctttggtccctccctccctccccattcctcgaaggaacagggtctgtcttggccgccatgacagatgagaatactgaggctcaaagcggttgagcagcctgctccaagtcacacgatgacaaagaaccagaatctgaatcaaatgggtctgcctgttgctccaccctacccaaggcagctggagtgggttagaacggcacgttctcactggagagagaagggtcctggagaggcagggtttggcaggaggccccggggccacatacttatgttggccaggcagct

SEQ ID NO: 44155 - DNA, 3437 bp, Homo sapiens
tcggctaggtacgaggctggggttgaatcggccgatggggaatcatagtggaggctgggttcctcagttcctaactaggtcagaggagccagaggacagtgtccacaggagtccttgccacgctggtgactgccagctcaatggacctactctgagtcacatggatagctgggacaacagagacaacagctctcagctgcagccagggagccactcctcttgcagccagtgtggcaagacttactgccagtcaggcagcctcttgaaccacaacaccaacaagacagaccgacactattgcctgctctgctccaaggagttcttaaatcctgtggccacaaagagccacagccacaaccacatagacgcccagacctttgcctgtcctgactgtggcaaagcctttgagtcccaccaggaactggccagccacctgcaggctcatgcccggggccacagccaggtgccagcccagatggaggaggccagagatcccaaagccgggactggggaggaccaggtggttctccctggtcaagggaaagcccaggaggccccatcagaaacccccagaggcccaggagagagtgtggagagagccaggggaggacaagcggtgacgtccatggcggctgaggacaaggagcggcccttccgctgcacccagtgcgggcgctcctaccgccatgctggcagcctgctgaaccaccagaaggcccacaccacagggttgtacccgtgctccctctgtcccaaacttctccctaacctgctgtctcttaagaaccacagcaggacccacacggaccccaagcgccactgctgcagcatctgtggcaaggcctttcggacagctgcccggctggagggccacgggcgggtccatgcaccccgggaggggcctttcacctgcccccattgtccccgccacttccgccgccgaatcagcttcgtgcagcaccagcagcagcaccaggaggagtggacggtggccggctccggtagggggcatgaagggtcccaggaggaggtgggcacacagtggagggggaagtccagccccaaagtcggtgggggagcaaggagtgagaggagagagccccggggattctaagaggtgggtgggggcttggctatggggtgagagaagtagcttgaggatgtgctgagctgagcacccgcaagtcaggtataacaaatagcagggtgggttgggcagcacgtgggggcgtggtcaggccgaggctgctacctgggctcctccattacactgtagccagaatggaatggtctttctgttcaggggaaggtcactgggtaccccctggctgctgtgtctggaaaccctcctgagtcagccagtaaagtaatgacttccagagaaaaagaggaagccattggtttggtctaggttccattctttcctggagcaggccgggtgccagggaacaagggatggggcatgggctccacggcttccctgctgacttggccacggaaactggttcactggttggcaccctactccctgtccctctttccctgcgccttgtctctgctgctcctctccttggaaactagacctctggtccttccctgtcagtgttgctcccatctcttctctaacctttattcagccccttttccctctgctgccaacggcctttttaggatccaaccaaaccaccctttctacctgcgcaccctgccaccctctgcacacctttaactggaggactgagtcacagataattgtttccttgaagtccaggcccagctgcagcaacaacagtcattagcccgtgtcacatccctgatcagagggcatctccgtggggaatcgcctccacccagcactgctggaagccgcggctgccagggagtggggcggccggttccctcagcaggacctgggctggcctctccacctcccctagtagaggcggacccattccatctagtggccaccgagggtgggtggccctgagatggtgggcccttgacaggccttgtcagagcagagggcaggtgggagtcacctgaaagctgaaggaatggctttaaggatagaagatttctcatgacctcaagggatatgagggaggagccagtttgccagggctgggaaaataattaggaggcctagaatccctgttctcatctgggcctccggggccaggggcaggggaatggcctgcagggctgggagggggtacacgctgtgcggggtctgcccctcagttggtgacctcctctctctctccccccaggagccccagtggcaccagtgacgggcagaggggacttgccattgccccctccacccacccccacgaccccactcctggatccttcaccccagtggcctgcagacctcagcttctccctctgaacttcaagtctccaaagatcagaatctgggggagggagcgcgtgcagggaggggcttgatctccacattttctcaggagtagttcgggcatccccatatcttctcctctccccttgtgaagaggacccagatctggcttctttcccaaggagggggtggggtgttcctcgcgtccctgtccttgaaggacctccttcccccagcctcatcaccgtgctcttctcagcgccaccctcagcagccagattgcaacaccagggagaggcggatgcagagccccaccggtgggaaagttgcctgtggaagggagccttttgctacaatttgtaacttattttctaaagtctattttgtaacaatttatttaagtttaaaaaaaggaaaactgctgccccccaaaaaaagaaattttcaaaacaacgtggctggcgtgattgtatctgaaagggtaaaggaggaggaaagctgagacgcctgcttggtagcagagttgggtgtgggagtgtccacagacacccctgtcctgcagggtggggagtgggcacctgtggccccaggcaggttccttcccacagctgctgggcttctgggcctgccctggtgcctggaatcacacatgacagggtggggaggacaggggcagtaatgccatttgcctgcctgcattctcttgtcctgagaatggccaggtcccctgtcagcagctggttggttggcctgtggggaaggaaggagggtggagttgtcctcatcctcacggctttggtccctccctccctccccattcctcgaaggaacagggtctgtcttggccgccatgacagatgagaatactgaggctcaaagcggttgagcagcctgctccaagtcacacgatgacaaagaaccagaatctgaatcaaatgggtctgcctgttgctccaccctacccaaggcagctggagtgggttagaacggcacgttctcactggagagagaagggtcctggagaggcagggtttggcaggaggccccggggccacatacttatgttggccaggcagct

SEQ ID NO: 44156 - DNA, 354 bp, Homo sapiens
gcctcaacctgccgggctcaagcaatcctcccacttcaaccttatgagcagctgtgactacaggcatgcatcaccaagcccagctaatttttgtattttttgcagagacagggtttcgccatgttgcccaggctggtctcaaactcctgggctcaagtgatctgcccgcctcggcctcccaaagtgctggtattacaggtgtgagccactgcgcctagccttggttgtgtatttctatggataaaaatatatacactcagcaaataaaataaaacttgtaaactcttctgcatcctctctccccctccccagaccctagaagtaacaggtattaggaatttggcacagcatttt

SEQ ID NO: 44157 - DNA, 567 bp, Homo sapiens
acttaaggtataatcgtattccaggtaattataactcattgagtccagtgctctcctctctacattggagaggagttgtgttaaagaatgttgtttccatatatagagagcatagaaagctacattgtttgctagcaacttaacactgtttcagtgttgaagttgggctgaactgttaagaatggaagggagcttaggatccatgtggtgagaactgcattttgtggatgaggaaaataaggccaagtgaagtgacgtgatttgtgaagggccaggtgtagaaagaagccaggcctgaggactttcactacaccaaactgctaaaggagaaagcccatgtcagaagaaacagtggcaaatgttacatctggaaaataaaaaggattttcaatctagatcttgcccctgcctaaggaggatgcctgtggccttccccctcttgctgagtgaccccttcatcagatgggtcttctcaactccaacttagttgtcttataaacccattcgcaatactcctgtgttctgtggtaagttttcctacaggccctgctggcaggcatcgccttg

SEQ ID NO: 44158 - DNA, 362 bp, Homo sapiens
ctccccaggcatctgggtcaggaaagggacataaaccagtggcatcccttgattgtcccccttttgatcccaactcatagttgtgaagtccataattattccacagaggggcagtcctgttttttacttccctaactacgtgctggtgcattgctctgagacgcaagaaggcaactcctagggaatgtgtaaataatgcctgtgctctgattgatggctttgtttgcagccagaggaagttgaaactggggcctctgaccctggcctggtctggcttcttccttgaagcctgcagtcatgagcaaggaaatgaaggatcacttcctggggataactggatcaggagaaagcaacaacagcca

SEQ ID NO: 44159 - DNA, 415 bp, Homo sapiens
ctaataacaccttctgcctttgaaatatcttgtctggtattagtatcacttttacttttccacatctatttttgttattgtttgcatagtatatctttttttataatttcaccttcaacctttttgtgtctttgaatctaaagtgtatctcttgtatacagcatatgtttagatcatgtttgttttttcctaatccgttctgtcagcctctgtcttttggttggagtatttaatccatttacatttaatgtaattaaagataaagtaggatttatgtcttcaattttaaaatttgtttccaatgttatgtcttgtttgtttctcaacttctccattattgcatacttttgttgggggggggatttttttttttttttaatgcagtttcggtcttgttgcccaggccagagtgcaa

SEQ ID NO: 44160 - DNA, 446 bp, Homo sapiens
tttttttttgagagggagtttcgctcttgttgcccaggctggagtgcaatggcatgatcttggctcactgcaacctccgcctcccgggttcaagcgattctcctgtctcagcctcctgagttgctgggattacaggcatgtgctaccatgcccagctaatttttgtgtttttagtagagactgggtttcaccattttggccaggctagtcttgaactcctgacttcaagtgatccacccgtctcggccttccaaagtgctgggattacagtcgtgagccacaacgcccggccaatggaacttttttctaaatatagaaacatcatagagatttgaaatatgttttgttgactttttctgaaatgtatttgagtgtgcttgtaataagcctcactctgtggtcagatatgtgattgtgtactttggagggtaacagacctttgaata

SEQ ID NO: 44161 - DNA, 1093 bp, Homo sapiens
tgaagccattgtcagaaatttgtcctttatcctgactgagcagaagaaacactgaaggattttgagcagaggcatgtcttgatttcatttcatttttagaggtatagataattcaggctgctattttgagactcgactgagaagaggtgtgtactggcacccgtttcctacagatgtgtccctccactctttgaagccgagggcaaaatcatgctgaagacctagaaatcccaccagtctgaagaccagctgcaaccacaatgggttagcccttttcaggatgcctcctcttcagcataaagcagccagaaagattgatgaccagcttccccaggattgaggaactgataagtggaaagaggggactgaaaccaccccaattgtcccgtagaattgatgtttatgatcttttggaataaacatagatattgaccctcatggtcttaaagattgaaatgtacattgcctgagttccttcctcagaaaacaaaaactcagggctctgagtatcaaggaactgaaactcaccaggtcaccacatccagacaatgagacaacagaccccttattcatcatgattacttccttccccctccgttattcccgttttcccacatgtagctccattccttcccttttatataaactcccaattttaattgattggagaggacttgagacttatctctcatctcctcagctgatatcacctgattaaagcctttctttcatggcaatactcattgtctcagtgactggctttctgtacagcaaggaacaggatctagaccaaaccccctggcattttggtaacaaggggaataagaaacctagccttactgacagtttatttcttaagttgactttattaaaaggtcaaggaaagaaaactagcccaaagaataaatgaacatacccactttatcactttgacaggtttaacaaattcctaatgaagaataatttatgtgtttgctcaggcatggtggcttatgtctgtaatcccagcattttggggggctgaagcaggaggattacctgaggccagaagtttgagagcagtctgagcaacacagtgagaccacatctctac

SEQ ID NO: 44162 - DNA, 301 bp, Homo sapiens
ctagcacacttccgtctatatagatattggaattaacgattatttatccataactttgctttctctttctgagaataactagagtcaaatatctatagtcagtcatattgaagaaaaacctcagaaatatacttcttagtaactcaacacccaagagcaaatcataatggaaattataaaatatttttaattaaaaaatgtatactacattataaaatgtgtcattttagaggaaaatgtagaaccttaaattcttattttatgaggacaacaaattaatttttaaaatgttttgaattta

SEQ ID NO: 44163 - DNA, 389 bp, Homo sapiens
tcacccatgtaacaaatctgcacatatacccccaaacctaaaataaaagttggaaggaaataaataaataaatatgtaactatttaattttaaaagatgggcctcatgctatttacctttcagtgtccttatgatgattagagatgacagatgtaaaattgccaggcacgtatgaagtagcgggagtcattattatttttaataagttatttaaattctggagcatttttcgttcttgaactgcaaaacaaggtaggttgtattctataaagttactctcttagatgctttattctgatgaattctcagtggtgttcattcctgttttcttttttaaatcagaggttttcgaccttcaatgcaaattacaattacttgggaggctttaa

SEQ ID NO: 44164 - DNA, 359 bp, Homo sapiens
gataaactgaccaatggtacagaattctaagagcctagaaaaacacgtatatatctgtgaaactttgatttttgacagaactgcctggaaaaggaaaagctggaaaaattgtttatccatgggggggaaaaaaaaagaaattggattcttagtcacaccatgccgaaaaattcactccagatggatgaagagctgaaatgtcaaaagcaaactctgagaatttgaaaaggaaatataagtgagtatctttctgagcttgaagtagggaagaatttacaaagatagaaaaaaggacaggcataaaagaaaagatccaataagtttgggctacatttaatatttaaagcctttgtccatca

SEQ ID NO: 44165 - DNA, 345 bp, Homo sapiens
gtcaccacacaaataaagagactgagcatcggagaaactaaacagcttgcctgaggtcttgtagaactgcctggaaaaggaaaagctggaaaaattgtttatccatgggggggaaaaaaaaagaaattggattcttagtcacaccatgccgaaaaattcactccagatggatgaagagctgaaatgtcaaaagcaaactctgagaatttgaaaaggaaatataagtgagtatctttctgagcttgaagtagggaagaatttacaaagatagaaaaaaggacaggcataaaagaaaagatccaataagtttgggctacatttaatatttaaagcctttgtccatca

SEQ ID NO: 44166 - DNA, 449 bp, Homo sapiens
tgtgtgcatactcctgcgtaattatcttcagtacactgataacatacttttactttgcaaattaggagtggcctcaaggggcagttaggattggtgatatataaaagttctctagtatcaagtcttcctctagatggaactcttctatctaggtaagagttctagtttcttatcttgctcagtaagatgccagccttattgtctaattggctttaagaaaaaatagtgactgcttaccaagtgctagatactgtgggtttgctcttcatatctgtgggcctctaatttgtatggatccattcttaagcaatataaaacaccagcacatcagattcttgtgagagagtagaatctagaattgtccttcctaactttttctcagaagtttgggctgaaagaagtattaattgcagaaggtcatttaaaggactggtggcaggtccattcat

SEQ ID NO: 44167 - DNA, 601 bp, Homo sapiens
ctaagtgtagaacaaggtgagcaagatgggagagggtggccgtctacttcggcgggttggggcaaacaccagagggagaaagacattaacggcctctcaaagcagtggtcctcctctgggctgtgaactctttgaagctatgcaaggtaaggatgggtccacagttttcatcattctcaagtctatgacccaaatatgttgcaagacctgggaataaatctggacaaagaggcaaatgggaaaattggactgtcttttgggggtgaggtagaagagttcctcagttagttgccctgtgttaagcccgtaccatcttgccagacacttgtcactcatttcaccatcaccacaacccaagaactttataatatttctattttatgggtgagaagcttaaggctcatgaaagtaggtttcttgcctatatcacataatgaggaagtgacgggctaagaggacgagcccaagactgtaagactcagccttttccccgtatcctgcctcacaatgtagtttatcttttaggttttgttttgaagtctcgctctgtcacccaggctggagtgcagtggcacaatcttggctcactgcaacctccacc

SEQ ID NO: 44168 - DNA, 454 bp, Homo sapiens
ctcgactacttatggcactcagtgcagcctccgccttctccaggtgggtggggacgtggtgggaccggaatgcggggtgctgaagccgcgcccagggaagagcccccagcgcattccaggatatctgcgtaccgcgcctgcgggcgtctggccggttctcccacctgatttccagcccagctcccgccaccctcgccggtcggtttgctgtttgctgttccttgaatgccccaaggtagttgtttcagctcaggactttcaccgtttcctcaacctggattcttgtggcccacaactctgtgccttgagaatcctcttctagcctcaagggacggtaagacaaaagaaaatttaaaaagggggctcagctgttcttttatgcaaaggtgaaaaaagcttcattgcctaaagaagggacagatgggatcttgcttcctacaggaaaattaatttt

SEQ ID NO: 44169 - DNA, 266 bp, Homo sapiens
actctgggactcagaggctggaagctctgccagcaggaaccaggccctggagcctctgtgactcatcctttccccaaggtcaatcgttgttttgaaggtcaactgtcctcagagctctggaagccatgcctttagtaggtcaagtttgcaagtacacctcctggttccctttccttgtctgcacccctccacggcctttatctgaacttccccctagtgtgtcctgtgcttttataaatagtcctgagatgtttcgttttaaattc

SEQ ID NO: 44170 - DNA, 425 bp, Homo sapiens
tgtatagatgcagatttccattttcttcctgcctaactttttaaaatatatcttgtggtgtgactttccccgtttaaacccttcttcagacattaggaagtgggagagcagggatcaaaagacaccctgtttctcactgctcacccccctgttccccaaggacttcttcctcttggctgaggctgccacctcctggcttggaatttcacagcacagagcggactccccgagtactgcgggtttgtctcaccccagggctgtgctccttgcaggcaggaccagcccgacccaaatcacagcctcccccacctcacactgctaggcactaatcagaactcaatgtgtgcatattttaggtaatattaggcactatattaccgggggatttaattgacactttacttccctaagtgactgtaaatcca

SEQ ID NO: 44171 - DNA, 702 bp, Homo sapiens
aggccgtctcagcgtaagaggcttctctaagcaagttgaatatggtacggaggtgcacaggtcttccttgctaaccaagcgtgtggtacttgtagagattcgtgtggttctgaacaccgtaagtaggccgactacgtagagtgtactcgggccaaacaagcacgagatggcctagtgacggtgtctgcctgcatgatgtacggggcattcgtcacacacacagcaaggtgtgcttttgtttttgttttttgagacagagtccctgcccaggctggagtaccatggcgccatcatagctcactgcaacctcaaactcccaggctcaagcagtcctcctgccacagcctcctgagtagctgggaccacaggtgtgcatctccacaccaggctaattcttaaattttttgtagagacaggttttcactgtgttgcccaagctagtctccaactctgggaagattgcctgaggctaggtgttcgagaccaacctgagcaacataaggagactccatctctagaaaaattttttaaattaactgggcatgttggtgtgcacctctagtccctactaagactagaggctaaggcaagaggatcacttgagcccaagaatttgaggttgcagtaaattctgattgtactccaatcagattgtactactgtactccagcctgggcaactgagctagactgtctaaaaaaa

SEQ ID NO: 44172 - DNA, 840 bp, Homo sapiens
aggccgtctcagcgtaagaggcttctctaagcaagttgaatatggtacggaggtgcacaggtcttccttgctaaccaagcgtgtggtacttgtagagattcgtgtggttctgaacaccgtaagtaggccgactacgtagagtgtactcgggccaaacaagcacgagatggcctagtgacggtgtctgcctgcatgatgtacggggcattcgtcacacacacagcaaggtgtgcttttgtttttgttttttgagacagagtccctgcccaggctggagtaccatggcgccatcatagctcactgcaacctcaaactcccaggctcaagcagtcctcctgccacagcctcctgagtagctgggaccacaggtgtgcatctccacaccaggctaattcttaaattttttgtagagacaggttttcactgtgttgcccaagctagtctccaactcctgggtgcaagcagtcctcccacctgggcctcccaaagttctgggatgacaggtgtgcttttttgcataaagaaaaaagccttggctaggcacagtggctcacagacctgtcattcccagcactttgggatgccaaagtgggaagattgcctgaggctaggtgttcgagaccaacctgagcaacataaggagactccatctctagaaaaattttttaaattaactgggcatgttggtgtgcacctctagtccctactaagactagaggctaaggcaagaggatcacttgagcccaagaatttgaggttgcagtaaattctgattgtactccaatcagattgtactactgtactccagcctgggcaactgagctagactgtctaaaaaaa

SEQ ID NO: 44173 - DNA, 397 bp, Homo sapiens
atcgtgcgtttctgggcatctaatctttacttacctgtgtctcttcatcctgctcacctttcttttaccttgatttagagggaaaaaaaattgtctgtgtgtagatacatatgtatgtatacatgtatttattttgctttattccattttgtaatttcaaagctgcctcgaatggtctttgcaaggaagtgatgtagggtgtgaatttcataggaaaattggggtttcaacaggccttttttctatgttgccccggctggagtgcagtggctattcacaggtgcaattatggcatgctgcagcctcaaactgctgggctcaagtaattctcctgccttagcctcctgagtatagtagctgggactataggcacatgctactggctcagcaacaacag

SEQ ID NO: 44174 - DNA, 512 bp, Homo sapiens
actgtaagctatttcaagggatccaggaagaaagcattcttgagaaactgctatggattagaagggtattctcagcaatcatttgaagtaaatgctattaccattttgcatatgagttaactgaagctgaaaggtgaaattacttgcctggactcacacagcttagtaagtggaagaactgagattcaaactcagatacattttctccaaatttcttttttttttttttttacagtatagcattcctgcataaaacagagttgggtttattctcctgaaatgtttgagcaatgaatgctgagtaaatttcgatttgtagtcattttgtagagtctcttggtgtatctgcagatcttccagtgcagactgtgtaaatgaagatgtgagtccccggtttgcccattataccctttctagagccccagcagttctaagctcataggagatggcgagtttctacagagagaaacatttggagtttaaactgaaggatccagcttaacaaaaaaaaa

SEQ ID NO: 44175 - DNA, 678 bp, Homo sapiens
gggatgtggtctttgctgaatgaataagcaggggatgtgtgatacaagaatttgtaccagaacctttggccaacatttccccaaggcccagcatccaatggtagagatcctgggtgactctctgtagatggtggtccttcacttctcatataggccattccaatctgaatgcagcttgttttgtgtgtgggaaggaattacgttttagggtattaaatatcctttctgggccatttagttacttgtctcctctcaaaacactaaaagcaattacatggtaattaagataaattacttgaccaattttcatagcaaactgattggtttcacttatccccccactgaactgttaagacctggcgagatcctttttatagttctttaaacttccaggactttctgcttatcttcaggaaggacagtggaccttcaggggagaggagaaggaggaaatttgcatatttaaaatgtgtgatctgagccaaacgctcttcagctaacttgatctcgcatcattttcccagcttcctttgagaattcagaatcaaaattcaggcatcaccatctagtgaccacagggtcctgcaccccagcccaaacctggggaccccttagggataatgccctttctcatttgtctttgagtgccctgctctttccactgaagaccccacctaa

SEQ ID NO: 44176 - DNA, 379 bp, Homo sapiens
gaagtcagtaaaagtctgaggttaaaatgttctgagatcattatattacccatgagaaaggtaaaggagtttattcactgtataatttggtaagttaaatacgtgtattgtaagtctcggacaatattaacaaatagagacagacgtataatttctttctttctttttttttttttgagatggagttttgttcttgttgcccaggccggagtgcaatggcatgatctccgctcactgcaacctccgcctcccaggttcaagcacttctccagcctcagcctcccgagtagctgggattacagatgcctaccaccatgcccggctaatttttttttgtatttttagtagagacggggtttcaccatgttggccaggctgc

SEQ ID NO: 44177 - DNA, 321 bp, Homo sapiens
cttatattgctctcaaataaaattctaatggaaagttctgagagctatgacaagtctttggtgatggtagaaaatgaaaaatgactgcaatcaactaaggaattggcttacttcattccaaaaccaaagaacaagtattcaccaaaaaagggacctgggagaatctaggtaattttttttcctacagactgtattttttaaattaaatctaaacaaccttttattttattcatttgttttcaatgaatgaccagtaggtttagctgagcgagacacaaatttgtaaggctcttcaaaggaacttacatcagtttctttatg

SEQ ID NO: 44178 - DNA, 273 bp, Homo sapiens
acccaggctaaagtgcagtggcccaatctcggctcactacaacctctgcctactgggttcaagccattctcatgtctcagccttctgagtagctggaattataggcacacatcaccatgcctagctaatttttgtgtttttttttttgtagagaccaagttctgccacattgccctggctggtctcgaactcctggcttcaggcaatccacccgccacccaaagcgctgggattacaggcatgagccaccataccaggacgcaaagttattat

SEQ ID NO: 44179 - DNA, 268 bp, Homo sapiens
ctaaaatctaacaaacaatcatttctttccaaagattaaatccgtttttctgtgctataatttcatgtgaaagaagaactaggttgctttgctcatatgtacagttcttaaaataagttgtaggtaattaatataaaagttgtaggtaattaatgataaaaattggtttcttgtggcttgctgtattcagtccaccacagtatgaacttcgcatgctaaatatagaaagataataagtatctcatgtaatgacaactaactttatatt

SEQ ID NO: 44180 - DNA, 359 bp, Homo sapiens
acccattgtttgtgagctcctgggactcgcaactagccaggataacgggcagcccgagggggcctgggccaagtctccacagggcacttcacataaggacagagccacgggccaaagaggcaaaacaaatgcaagggaaatcttgccagcaatgcctggggcgcagggcagctggcctcccacccgcaggacagcaggcagcacctggcactggggctcagcttggcaccgtgcaacctcaagcttcccactccatgctcaccccccaccccagaagcaagtgttgtgcgcccagcagtggccctggatgcttggcagggctacccacagggaccacgggggaccaccagggcagccac

SEQ ID NO: 44181 - DNA, 472 bp, Homo sapiens
  misc_feature (13)..(13): n is a, c, g, or t
  misc_feature (51)..(51): n is a, c, g, or t
  misc_feature (67)..(67): n is a, c, g, or t
cctttgggaaggnatggggccccctggggaagggaaccctttttacaagtnaatttaaaggattaanccccttacttttaaggcccagtcattgtgactcacgccctgtaatcccccatagtgctgggattattggcataagccacggctccaggccgaattcttattgtttgaaataatgttagtagctcaggcctgcccagtgtgagggagaacaatctgtaaatatcatctagaagcaagtgtattacaggcttagattacatgacatggttgggtacaatgaaagtatttaaatatttaactttcagaatttaagtccatataagcagcagtatgggcagtggttaagggcacaatctcaaccaggtgtagtggctcatgcctgtaatcccagaactttgggaggccaaggcagcaggaccactttaggctagatggtcaacatggtgagactccatctctacaaaag

SEQ ID NO: 44182 - DNA, 420 bp, Homo sapiens
atctcccccacccttaagaaggttctttgtaattctccccacccttgagaatgtgctttgtgagatccacccgctgccagcaaaacattgctcctaacttcaatgcctatcccaaaacctaaaagaactaatgataatcccaccaccctttgctgactccttttttggactcagcccgcctgcacccaggtgaaataaacggccttgttgctcacacaaagcctgtttggtggtctcttcacacagacacgtgagacagaaacaagaagctccctctatgtgccctgtagggacatttttcttggagaatcgtaactctaaattcttacctcgcagagagggacccgatgggacctgtttagtaaatattactgagttctgccacttgtcgacaatcttccagggagataactcctaatt

SEQ ID NO: 44183 - DNA, 420 bp, Homo sapiens
gaagatgaattgtgctgttcactgagagcagaaggggactaagaacccaagccttttccaaaagcaaggcactgtctggggcccatgacttgcaatgtgctggcttcattgctctgacaacatgaaggatgtttggttttgttcccagcgctgttatcatttatcttcctcttgtaagagctggcaccctccgcctgttccctcttccttctcactctctcccaactcccacattcaatccaatctccctattttcctgatccccctgccactgagaggagccctcttgtgtgtaccccagaggaaactctcccctattggttcccagaagcccaagggatacccctgttgaactcaactcttaaacatttgctgagcagttcatctgggcaaagtactgtgcttgaggctttgggtggt

SEQ ID NO: 44184 - DNA, 408 bp, Homo sapiens
tcttcttgcattggttttcttaaaaagggtttcgaaaattataaaaatgaagttgtaaagcctccctcaaatgtggttttagacctgtgcaaatacaggatatgacctacttcgtgcaaagaaacgtgtatatgtttttggtgaaaatggttattttgaacgacttatcacaacagcattaaaatactgttggaggttttagtgaaatgagagtctgaacctcattttcagcctttaacgtaggaaaggagtcaatgaagataaattatgatgatacctacccttttactcaaagatttaactaattattgagtttaaaatccaaattaacaaatagatgtgaagctcttttttcaataggtggaccttggaaagagaaaacatgtagatgatcaatatttaataata

SEQ ID NO: 44185 - DNA, 371 bp, Homo sapiens
ctctactttaattcaagagtaaattttgttttcgaatgaatgaataagtgaattgtagctggtactatgatccacccacctgtacttctttttgactctgatagtgaatagaagtttacaaaagtttaccctcctagtttggccttaaaaacatagaaccttggtttcagggctatttgactgctgctttagctaaacaatagcaataattaaccattactatgtcccatgtcataggtaccatgcctggcacatcatttgctgtatctcattcagtgtttgcaatagccctttgagttaggtattgttatttttccgttttacaaagagagaagtaggattcagcaaaactcgataacgatcaaatgcta

SEQ ID NO: 44186 - DNA, 464 bp, Homo sapiens
gtaactttatgtagataggaaaaaagtgctttctttttaaattggaaaaaccaaatgccctttttctgtaattataagagatcatggcaattctacattgtttggagaatttgctatagcttcagtttttcttcttgtatgtcagagtactttgccagctataattgggtagtttatattttttgcatactctattgtttctgtgagtttcacacaggagaaatgaagttgtggacatgaggtgggagcaagaagtaaaactctgaagtctgtgttatggatatgtttgttaataattatttatttatttattttttagagttagggtctcactctgtcatccaggctggaaggcagtggcacgatcatgtctgactataacctcaaactcctggcctcaaaccatctgcccacttcagcctcctaagtagctgggcctacaggtgcctgccactatgcctaga

SEQ ID NO: 44187 - DNA, 408 bp, Homo sapiens
agagagagggaggagatgccaggctttttttaacaactagctcttgagggcaccgaatagagtgaaaactcacttaccccacatggagagcattaatctattcatgagagatctgcccccatgacccaaacacctcccactaggccccacctccaacatgggggatcaaatttcaacatgaggtttggaggagaccaacatcccaaccacagaagccactttctaggatcactttggagattctgaatcagtaagttttggcagaatgttaaaatctacgtattcaaaaagttcctcaggattacagcagtaacaaagtaagaagtatcacacctacccactatagtcaactataaaactggacaaaaatatatgaagtaaatgttttcatgtattttacaacataca

SEQ ID NO: 44188 - DNA, 475 bp, Homo sapiens
gagagatttaaaacatttagcatataatagcagttgaaaattaaagaaaatttttagagttttttgtggtttggaaaactttcagtaatacttttatgttacatggcattttaatatatcaatttagctataactttggaaactaaaattttaagtttttgctctggaaggagcagtatcgtttctttccagaaattctggtgggtaacttgataatttgacactagaaataatgggacaagaaaaacagcctggtttgacagagaggcccattttaacttttgttggtattcactagggtttctcacataagtacatgtgataacttttaaaatgtccaatactggaaaaagcagttttgagagctttaaagtgttagctctcacttaaatatcctgaaatatcctcctgagatggcttgctaattcctagagtagttccctgcctcacactctgtcaatttgggaaattaaaa

SEQ ID NO: 44189 - DNA, 463 bp, Homo sapiens
aatgaatgaatgaataaaaatcataataactaacatttattgagcacttagtgtatgccagccattacactaagcacgttacacatattaactcatttaatattcattatcacaggggcaacgatgcctcatgtcattccgtgtttaacaccagtctcccctcgtagaagggaggccccatgggggcagggaccatggctgatttgctaagagctctcttttctgtgcctagatgctctgagatgggcatgagggggagacagagagagaaaactggcctcccagatgtctgacttgccccaaataactcacagactctgggactcccaggagatctgaaaccactgctgcccaccggccatcaagttttgactgtgaggttgctggtggttggatccagccaccatggtccttcttggaggatgatggaagcccacaatttgatgttgcaggtacaaaaaga

SEQ ID NO: 44190 - DNA, 440 bp, Homo sapiens
atttttagggagtgataacttcttgagaatttgatatttcaagtgtcatatatgtcatgaatgtcaaggattagttaatgtggagtgggtttatctcttctaagcacatttttaatgtattctactgatttttaaaaaaatgaatttgctttctgtagtgggagagaaagggtggagtgaaaagttgagaacaggaaatgaaaaattatgcctgggaatgtttccactggtatctatgcatctatcgtgtttccagaagttaaaaccatgttcaagggaggtcttgctcatttgcttaggaagtattagcactctagagtggcttaggtatctgcaatgtgaagtcatgtatgaaactgacattcaacttagctggatgacaaatccataaaaaataaatgcacatttgtgttatatcatcttggtagcaatttgcataa

SEQ ID NO: 44191 - DNA, 2002 bp, Homo sapiens
ccaccaccaccgcctcctccaccccctgccctgccaggcccaggcccggtctcagtcccagagttgaagccggaatcttcccagaccccagtggtctctacccgcaaaggcaagtgccggggcgtgcggcgcatggtggtgaagatggccaagatccccgtatcgctggggcggcggaacaagaccacatacaaagtgtcttccttgagcagcagcctgagcgtggagggcaaggagctgggcctgcgcgtgtcggctgagcccaccccgctgctgaagatgaagaacaatgggcggaacgtggtagtggtcttcccacccggtgagatgcccattattctcaaacgtaagcgcggccgccctcctaagaacctgctgctgggtcccggcaagcccaaggagccagctgtggtggcggccgaggcagccactgtggcagcggccaccatggccatgccagaggtaaaaaaacgacggcggcggaagcagaagctggcatctccccagccatcctatgcagcagacgccaacgacagcaaggccgagtactcagacgtcctggccaagctggccttcctgaaccgccagagccagtgcgctggacggtgctcaccgccccgctgctggacacccagtgagccggagtcggtgcaccaggcccccgacacccagagcatctcccacttcctgcatcgtgtgcagggcttccggcggcgtgggggcaaagcaggcggttttggtggccggggtgggggccatgcggccaagtcagcccgatgctccttcagtgacttctttgagggcatcggcaagaaaaagaaggtggtggccgtggcagccgctggggtcgggggccctggccttactgagttggggcacccacgcaaacggggccggggggaggtagacgctgtgactgggaagccaaagcgcaagagacggtcccggaagaatgggactctgttcccagagcaggtgcccagtggcccaggctttggggaggcaggtgctgagtgggccggggataagggtggtggctgggcccctcaccatgggcacccaggcggacaagctggccgaaactgtgggtttcaggggaccgaggcccgggcctttgcctccactgggctggagagtggagcctcaggccgtggcagctactacagcacgggtgcaccctcaggccagaccgagctcagccaggagcgccaaaacctcttcaccggctactttcgctcgctgctcgattcggatgactcctccgatctcttggactttgccctctcagcctctcgcccagagtcccggaaggcatcgggcacctatgcagggccacccaccagtgccctgcctgcccagcggggcctggccaccttccctagccggggagccaaggccagcccagtggcagtgggtagcagcggggctggggcggacccctcctttcagcctgtcctgtccgcgcgccagaccttcccaccaggacgagcagcaagctatgggctaactccagccacttcagactgccgggcagccgagaccttccccaagctggtgcccccgccctcagccatggcccgctcacctaccacccacccgcctgccaacacctacctgccccagtacggcggctatggggccggacaaagcgtattcgccccaactaagccctttacaggccaggactgcgctaacagcaaggactgcagcttcgcctatggcagtggcaacagcctccctgcctcacccagcagcgcccacagcgccggctatgccccaccgcctaccgggggcccctgcctgccaccaagcaaggcctccttcttcagcagctctgagggggcccccttctctggttcagcccccacgcccctgcgctgtgacagccgggccagcacagtctcgcccggtggctacatggtacccaagggcaccacagcctctgccacctctgcagcctctgccgcctcctcctcctcctcctccttccagccctcgcccg

SEQ ID NO: 44192 - DNA, 847 bp, Homo sapiens
ccaccaccaccgcctcctccaccccctgccctgccaggcccaggcccggtctcagtcccagagttgaagccggaatcttcccagaccccagtggtctctacccgcaaaggcaagtgccggggcgtgcggcgcatggtggtgaagatggccaagatccccgtatcgctggggcggcggaacaagaccacatacaaagtgtcttccttgagcagcagcctgagcgtggagggcaaggagctgggcctgcgcgtgtcggctgagcccaccccgctgctgaagatgaagaacaatgggcggaacgtggtagtggtcttcccacccggtgagatgcccattattctcaaacgtaagcgcggccgccctcctaagaacctgctgctgggtcccggcaagcccaaggagccagctgtggtggcggccgaggcagccactgtggcagcggccaccatggccatgccagaggtaaaaaaacgacggcggcggaagcagaagctggcatctccccagccatcctatgcagcagacgccaacgacagcaaggccgagtactcagacgtcctggccaagctggccttcctgaaccgccagagccagtgcgctggacggtgctcaccgccccgctgctggacacccagtgagccggagtcggtgcaccaggcccccggcccctgcttcccacccggccccctgccagcccacctgacaaggccttctccacccacgccttctccgagaacccacgcccacccccacgccgggaccccagcacccggcgcccaccagtccttgccaagggggacgacccgctgcccccacgggcagcccgtcctgtctcacaggcccgctg

SEQ ID NO: 44193 - DNA, 301 bp, Homo sapiens
tgacatccagctggcatcaggggtacagtcagaccaggtctcagggtgtcacacacctgagggcagatggggacatgaagaatcagagaacccctgggtctcagtatgtgttgggaccaggaccaaactgcaagactcccaggttcatggccagtttctgcggggtccaccaggggatttgaagtccaagaagcatggcatcttgtcacagcttctttgattccaagttgtgtggctttgagcaagtcattctacctccctgagcctcagttctcctaagtgagattaacggtacccactt

SEQ ID NO: 44194 - DNA, 182 bp, Homo sapiens
cacaaatacaaaacaacaccattcaatcagtatttttcatgccttgatcaggggtcattgccatgcaggaactttaacaaaacagtacaggctaataatagaattgttggaattaactcacacagcacacctatgagagagagttaagatagagggtcttggtggtctctaacagttgaatt

SEQ ID NO: 44195 - DNA, 656 bp, Homo sapiens
tataaatcccttatctatatcctttgtaataaccttcatgatataccagcagatgtgtttccaagttctgtgaagtgctctagcaaattaatcaaacttaaagagagggtcatgggaacctcagtttataaccttgttggtcagcacaagtaaagcaacctagggcttgcaattggcatctgaagtgggacctcatcctttaacttgtgggactgagccctcaacctgtggaattctaatgccatctccaggtagatggcatcagaattgaattggagggcacccagctggtatccacggcagaactgattgctcacttgctggggagaaatctactggtcacagaagtcttctatgctgattgttttgtggtgtgagaacagaggaaaaatagtttgagcgctttccactcaactattaaggaattgaatacataattttaaaactcccccaaaagaaatctccagacccagatggttcactggagaattctaaaaaatgtttaaaaaagaattaactcaaatttttaataatctctaccagaaaacagaataggaaaggatacttcccagttcattatataaggcagtattaccccgataccaaaaccagaaaaagtactgaaaaataaaactgcagaccaatatccctcatga

SEQ ID NO: 44196 - DNA, 767 bp, Homo sapiens
cccaggctggagtgcagtgctgtgatgtcagctcactgcaacctccgcctcctgtgttcaagccattctcctgccacagcctcccgagtagctgggattacaggcacctgccaccacacatggctaatctttgtatttttagtagagatggggtttcatcatgttggccaggctggtcttgaactcctgacctcaggtgatccacctgcctcagcctcccaaagttctgggataacaggcatgagccactgcgcccggccgcacccttcattcttgattcacctggttacaaactcgcagataaactgtttctacctgtgacaaatgagtcatccatcttccatgtggtgtcgactttgtccctgttataatattcctgtctcttgttctggtttttggcgtcccgcacattgtccctgttacagtcgtgtctcttgtttctggggtcacccctgtggtgagttgactgtgccctgttcctgaggctggtgaggatgctgtggacaccttaatcacggctgtgaacaaactggctaaagctaggcaccatggagctttgcagtggatgctaagtcgtggtacccattctttgatcagtgacggagccaggtgtcttattaagtctcggggatttgtggaagcccagagcaggcatgcaccttctacattgaaaggaatccttttgacactcaacgttggtgtcgtgaagtcctgcctctggaaatccctgatttcctaagacactaatctaacattttaaaagagtt

SEQ ID NO: 44197 - DNA, 414 bp, Homo sapiens
ctctatgtgttatagctgttttaagtccattagatatacagtctcccatcttgtaaaggtaatttgttactgaaaattccctcataggaaagttttcttaaaatgtaaatagaattactattagtttcattagccacatttctttctttaaatttctttaaaatgtaattgaccgttgcataatacagagattagggaacaacccccaccccccccgactccctcttcaaagttgaaaatttaggtataacttttgactttataaaaacttaattgttaatagcctactgttgacctgaagccttactgatgacataaagctgattaacacacattttgtgtgttatatgtgttatatactgtattcttacaataaggtaagctagaaaaaagaaaatgttattaagaaaaaaa

SEQ ID NO: 44198 - DNA, 981 bp, Homo sapiens
  misc_feature (814)..(814): n is a, c, g, or t
acccccatctctacagaaaaatactttaaaaattagccaagcatggtggcttacgcctgtagtcctagctacttggaagggtgaggtgggaggatcgtttgagactgggaggtcaaggctgcagtgagccctgatcatgccactgcacaccagcatgggtgacagagtgagacactgtctcaataaaaaacaaaaacaaaaacaaaaaaagaggcaggtggtatcaattcacaagccacatggccggaaatctttattagtaccagcagcaaaggatccaaatctgaagaacagacaatcaaacaagaagaaaccaaggagctaagtggtgaatgacaataaataacttctctgtttccttgttcaacccaggttattcaccatttactaagtacctaccatgggcctggcattgagctactgcgagaaataaaaataagaatgagacaatgaccctgcctcataaaaagctctcattctcctgagtggagtttaagggcctctcctttcattcaaaagaaaaaaaaaaaacaagcaactaataatatgcagtacctccagggaggaaattgggaggctaagagacaggggtagttatcactatgtacctatttacaccttttgaattcgaactccatgaatgtattatctatttaaaagataaagttgaatttgccaggcgcggtggctcacgcctgtaatcccagcactttgggaggccaaggtgagaggatcacttagggggccaaggtgagaggtggccaggagttcgagaccagttccgtcaacatagggagaccccatctctacaganaaatactttaaaaattagccaagcatggtggcttacgccttgagccctagctactttgaaaaggtgaagttgggaagatcggttgagactgctgagtcaaggcttgaatgaagccctggacatggcacttgccaccaaaatgggtgacgtgagaacttgctcaatac

SEQ ID NO: 44199 - DNA, 358 bp, Homo sapiens
tgagacggagtctcactctgtcacccaggctgaagggcagtggcgtgatctctgctgacttcaagctccacctccccggttcatgccattctcctgcctcagcctccaaaatagctgggactacaggcccccgccaccatacccggctaattttttgcatatttagtagagacggggtttcaccgtgttagccaggatagtctccatctcctgtgacaacactccaaattttctcacgttattttaaagtatacaatatattactgttgactatagtcaccttactgtgctatagaacaccaacctctccccatttccactccacactactctcccaagcttctggtaaccactattc

SEQ ID NO: 44200 - DNA, 377 bp, Homo sapiens
tttattgagacctgactttttgattttctcttatactagagttgaagaggttgataggaggccagttgctaaaagtgaagaggggctttgcatctttttcctgctaaaataaattgtgtgcttagctcagtgttgttcacaagcagccatcgaatacatgtttgataagctgatcagtagtgacagcttgttggaatgcaggaaagggggaggacagcaaactgaatggctagcagtggaaatgctgaatcactaagccggcagtccagcaggcatggatcctcattgtttggttctgagttagtgtctcagacttgattgtccttttcacaaggacctgtgccttgcatgcctatattcctctttgtcaggttcat

SEQ ID NO: 44201 - DNA, 493 bp, Homo sapiens
ggcagttctccaagatatgttacccaaagacctctcattctgtgatctgaactccattatcttttccctgtgactagctaaacactctttttgttgtttttcagaggaggcaagtctgatttacaaggtctttaatgtgtgcaaaaggtaacatgcattgctgatatccattcttgagcgtgagaaatgcctctatgtttattcacttcactagctctgccagagaaaaccagcactggggcataagctgagaacacagagcttggaagcatctaatttggacacagatgcttttgatgtaatgggttacctatgaaacctactgctcttttgttagtattcactggtggagaaagacaggaaatgatatacttctatcaaaggagtcaggctgcagcatgctgctggctgctgtcttgggcacgggacagccataataaccttgcatttggcagtttcctgtcaagttaaattgtagttggcagtttcctgt

SEQ ID NO: 44202 - DNA, 444 bp, Homo sapiens
aaactttagaatatgacagccacttctagggagctgctcaagggtagatgggattcccagcttctaaaggaaggttggccttttataacaaaatctatactgtaaatagtttcagggacaggctaaaaatgagtaggaagatcataaactctacaatcaggcagatttaggttcaaatcctggatctgccacataccatgatgggatcacagggtagtcctttaacttctgagtctctgtttcctctaacctcaaaatgggaaaaaaacaaaaaacataatttgtaaaaaaaaattttttaatgacaggttcattaaagtataatttccatatagtaaaattttacctcttttaggtatatagttctatgagcccctgaaaaacgtattcagttgtacaaacatcaccacaatcaagatataaaatattttcattaccccaaaa

SEQ ID NO: 44203 - DNA, 403 bp, Homo sapiens
atcaatatgcaatacttgttttaaactgtttttctcgtaattattacagaggctgaacctttcccacatgttttgtcactacgtttactaatctacaaactgcttgcatcattttaattcttgttaagcttagctatttttatggaaagttatttaataaactcaggaaatagaaatgaaagctgagtacaaactactgagcttcttcttacttggacgaaaaagagccaaatcaagcttattgaattggacagaggcagccttgcaccaaccccaagccccacaactcccaccctctcacctcttactggagaagctgcatttagccaatgatcatgtcagtcacgttcccttattatgtgcctggcatacagttggtatttagtacatagtaatggaggaa

SEQ ID NO: 44204 - DNA, 678 bp, Homo sapiens
atttagaccagtgtcttctcctagccccatccctcactctatcacttgctcctactttcgtcatatgacatgcctgctcccctttcaccttctgccatgattgtaagcttcctgaggcctccctagaagctgagcagatgccagcaccatgcttcctgtagtctgtagaaccataagccaaataaacatcttttctttataaatttataaattacccagtcgcagatatttatagaaagaacagcctaatacaggtgctaaatacatatctgacaataaatggtagttatctcttagaactgttatgaggattaaacgagttacagtgtccatcttaaaaagataattctgaaaaaaatctcataggttcactttgccttgtcaagaatatgattaccattaacttctgtagataggaaaaaaatgtgctgagctccaaaactgacagacattttgctaaaacaatatcaaatctcattaaaatgatgacagttatttcaatagttgacagtagctatcccaatacaacctaacaaggcattttctcttcagaatcactcgatcatatggccatttccctaagcttttatagctattgcccagtgtacactgaagacaacagctaacgaacaacatacgtgtgataatttatgtagttgaacctctaaggcaaaaaaa

SEQ ID NO: 44205 - DNA, 891 bp, Homo sapiens
atacaaaaaattagccgggcatggtggccggcccctgtagtcccagctactggggaggctgaggcaggagaatggcgtgaacccgggaggcagagctggcagtgagccgagaccacgccactgcactccagcctgggtgacagagcgagactccgtctcaacataaaaaaaaaaaaaaaaaagaaaatgtcactagctaggcatagagataagatacctttccacatactgtcaaatgcccttttacttgcttctttaccacgtagccaacctacctggtatccaaatgtcagtctgtaatctttcaatacctgaaataaactgagtattgatctaactagcaactatctccctcctcataaaactaaagggggtgagaagtaggaaagggggcttccatgacaaataaatctaagccaaagtcaaaaggccaaaacaaaatctccagtcaacctagatccataatgcagcaggagaaacaccccctcccacttgaagtagcatctatttcaagaatgccggaaacattttgcaaaaacctacagcaagcttcggacgggtctggaaccagagagtcagtgtctgaggtttggtcaaaggataactgttgtgtagggagctataaacagctatctgtcattacaaaacggcttcagtatgggaagaatggcactgctttttaagactcctcaaactaaggaggcaagtcgaagtaatcatttcttataaatgagtaacaaagtgtaactatcttattcttttgcaaaacttctggcaatctcaaccacccaaagtttaaacaaatcaaccaactgaccagcaaacagaagctctttcctcccaggccccattgacaccatgtacaattcttaacagctttgtcgtctcttg

SEQ ID NO: 44206 - DNA, 428 bp, Homo sapiens
tagttccctgagccatcagacttcttttactgttcacggaccttaaataacattaaattgtaattatcctaaatataaattagtgtgccttttaatatcactgtatctcccaacagcgtactttaatgttttaaaatgcaggaagaaggcttgaaggctatgtgaagtcattgtcttaaactagttaactttttttaaaatttctcttttttccagaaacatttatagtttactgaaaagaggctggggttgggtattcagaccaactggcttaggaatcatagctctattgattacaagctaacaagctgtgtgatcttggacatatttttaaccttcctcagcatcattttcccaagtttgttgcagtagagaaaaaatgcgaaatgctaatcctagcacatagaaagtgtttggacgatcatttg

SEQ ID NO: 44207 - DNA, 369 bp, Homo sapiens
cagaaaaataagaatctggaagcaatagtgacctcatagagtgcttgtgaatatcagcaataatgtaagaaagacacctagcacaatgtctggcacatagtaggtgctcaatgctaataataattagattctgcagatggtgtcttctggccagaataatttgaattaagggggtttgtgcaattgagtttccagcatcctcccttttttcctagaaaaagctggctcctggggcattttctccccctctatgaggcgaaagcccagtctggatcgtgtcctctctatgcagcccaaacatgcttttccacagccatgaccctgcatgcacaccacatggaaccagtcctgcctgagaccgcaggtctg

SEQ ID NO: 44208 - DNA, 313 bp, Homo sapiens
aaatccaagtgagtgatctttcacatttctaccataagcctttgtagcaagcaagggcaggccaaagaagaacatacagaataaagaaaaacggatctagtggcaggcctaaaattggtctaaaatcaccagcagagatagaaattctatcctaggtgcaaaaatataaagtatcttagtatcacaacacttattacaggatagcttcagggagtggagagagcaaaaagaataggcaaggtgccttttggcaactggatggtgaaggggaaaagaagcaacaggagaaattcagggtcctgcaagacaaaaa

SEQ ID NO: 44209 - DNA, 366 bp, Homo sapiens
agattgtaatcatctgagaaacgaggagtgacacttgggtttaattggaaagaatgatacacagaatggcccacctattcctatccagggatagaagcattatcatggaaattatattctgaggtcagtaagcaaaatgacaagaagatggtctgtgccaatagtttaaatgccaagaggcaccaggccaagaaggtgcacagacataaatccggcagtggcactgatgtaattatgggcttagaccaattctcaaacatgccagaagctgaaccacagtccttatgggaaaagagagagtatgaaggtagttagaagaaaaaagctgaggaaagatatgtgacttaagaaaaaaaaaaaaaaaac

SEQ ID NO: 44210 - DNA, 516 bp, Homo sapiens
tggctatgcacacagacactagagccagccagcctgcaccaaatcctgttttgccactgactgtgtgaccttgggcaagtaactccatttttctgtgcttcgtttgcttcatctgcaaaatgtggctgatacttgtctcttagagctactgcaaagattccaagaattggtgcttgtaaagcattcagagcaatgacttgcacagggaaagcacaatgtgcttgttaaaatacttaattatcccttgcaaatagccatgtaattccagagacattgatgccttatgttagcttatgctggtgggtgtttgtggtctcatcaccttgaatgcaaaagctatcacttcaattccaatggaataattaggtgttgctagactgggaagggggagggtatattacttcttatgacccattgtacctcattttattttttagttagcaagaacaaattcacaactgagtgaaaataaaacatagagagtgctttttgttaataagaatgttctaattttga

SEQ ID NO: 44211 - DNA, 603 bp, Homo sapiens
gttaatcttcttgccaaaattttctgtaacatttaagacttatccatggatcgtagttataaacactcaactatggggcttctggactgcccctgggccctggggtagcgttgatgttggggtttctctgtcagtgtcaccctgaggatacacactttcctgtgcttttagttaggcggcttctctgttcaccctaaaataagaagttggtgaaaatcttttcaaacatcacattcgtttcttcagttttgccaacatcacatagcaggactcgttcatctgtgggtggatgagacggtgaggatggttgtgctcagtctgccacgtgcaggcgctgttccacatgttgctctgaaggctccgcgaaatacactgaagttcttccactagatactttctcataagctcagagaattgatgcagtggtctgaggggcaagtcaagctttgtaaacacactaaggggcagggctgtgttgaccagaagccagtgtgagggagctggccagggaaggtggggttattccacgctaggttttagccaaaaatgatgctttgggacttgtgcaagtcacttgacctctttctctggaaaatgtgggga

SEQ ID NO: 44212 - DNA, 466 bp, Homo sapiens
aagaataataaaataaaacagatgtagtggtgacagctgtagcattgtaagctttagagtagccctcatgcttctggccatgataacactagattctcaagttccttaggccagagtggtcacactgaagtgtctgtggagactaggcaggtcatctaagcaaaggggttgttgtagactattgtacataaataatagctgcctctccctgagggtggattacacttcccagccccaatgccttcacccttgccatggaacttgctttgggcaatgaaataacagcagatacttcaggagatagtgtatttttgttaatgtaccctttcctcactccagtgatgctccagagagactgctccctgctctgctggctggggtgaagatgatgtgggagcagaaccacagtcaacccaccataggataaggcaatgttgagcaagaaataaacctttctagtaagcca

SEQ ID NO: 44213 - DNA, 932 bp, Homo sapiens
cgcgtgattgtgcgctgtgtgagtgaggtgcgcgccgcgtgatcgtgtgctgtgtgagtgaggtgcaggccacgtgatcgtgcgctgtgtgtgtgtgaggtgcgcactgcgtgaccgtgcgctgcatgtgagtgaggtgtgcgccgcgtgatttgggaagaggcttctgcaatgggcaggcttctgggtacatcacttaattcgttcaggccggctcctacctgctgtccagtgatgaagtctccacacaggaacaggttcatgctggcgatgactatgatgtggggtatcgctgggtactcagaatccttttgtgtatcaaaagctggaatgcttcaaatttttcataagtgccttgttttccttttaacattgatctggaaacagtgctgtctgcaaagctgaggcccactcctctctgctggggatcaggggtttcagaaggcaggggccatgctgggccactgtcctgtacaagcagcctggcctccttcacgctgccagggcatctggcgcagggcatgctttctcattcatagtctgctttgaaagtcttggttttaggagaggttcaggttggtcttgctggcatcttcacctaaaatagggtctggcagacaggcccatgcgctgcatcctgcccacggcctgatagatggcctgtgaatggcttttttacattttaaaagtggttgaaaacaaattaaaaatatatttcatgacatgaaaatcatgaaattcacatttcattatctgagaataaacttttatggatgcagccatgcctgtctgtccatgtcttatctgtgtctgctttgtgctacggctgcagagtggagtggctgggactgagacggaacgccctcctcacggggccgcgtctctccaccaggaccgcggggctactctgaggctctgcttcttccccagcg

SEQ ID NO: 44214 - DNA, 542 bp, Homo sapiens
attacctccatgtgggagatggtgaaattgagaggtcagatgatgtgctccaggccaaaaggttgattatgagaccctgctgggtccagaccccaggccacaatccaggtcctgcttccattcatggccccagtaatgagtttgccacatggcagtgattccccactccacccctggttcgatctttttattttagttctcttcttcagaaagctttttatagaaatataaagccaaagttcttagctttgaatccaaaggtgaccagagtctccttcataaataagcagatcccttttccactgtgttagaaataaaagctcttttggtccgagctcaaggttggatccttctcaggttgtctgtaatgtggatccatggctaagtcttggtctgaaactagacctgactcaaatcccagcaggttaataattcttcctactgacctgccctccttgctagagatgttagttttgtatgtgaagactctgagtccatagcaggcattagagcagtacctccagggctgaaatcaaagtgaa

SEQ ID NO: 44215 - DNA, 398 bp, Homo sapiens
tccacagatgtgttttgtttggcctgtggtgtttgaaaaatattgaataagttgccaacatttaaaaatcagggcatttcactgaaacgtctggagctctggcatctcttgaaaactcaaaagatctggagccacaattttatctttggacaggacataaattctccagattgttgcagccttcaccactctatgctcttgtctagccccctacctgaatcattatgtcacatgtttccagacccttcgttattctcattttcttttcctagctgtgatgcaaagtgtcagtggtcccatctttaaagaaaatttttctttttatgtttacaaaaatgatagttaacaataataataaacataatattatagaaaatttggaaattacaaaaaaagaa

SEQ ID NO: 44216 - DNA, 267 bp, Homo sapiens
tgcgtttgcttgcttttcagttccaggcctgctgctgagggaagtccaggtgtcaaatactaaggctaactgtagccctggaggtgctggcaccaggcagaaaggttttacaaagctgatgacccatatccactggccttaggaaggacaggaccagctttaggaccctgggccagagccagaaggaagcacagagactaaattggttgactctgggaaagactaagggccagaaacgttgtgggccttacttcagatctcacttgg

SEQ ID NO: 44217 - DNA, 356 bp, Homo sapiens
catgttggccaggctggtctcgaactcctgacctcaggtgatccgcccaccttggccacccaaagtgctgggattacaggcatgagccaccatgcctggccctctctgctcttttaatagcagccatcctgagggtgtgaggaggctgtttccttcctctttggacccacacaccttcgagccccgctcatagcaggcactccatggatcttcaccctgtgaactagattctctcctgagctttctggctcctaggaggcaaacaggctgtttctctccctgcaggggaccttgggccttgtggctcttggggattatttacagccagggccacctctgttctccccttgggcagg

SEQ ID NO: 44218 - DNA, 518 bp, Homo sapiens
  misc_feature (510)..(513): n is a, c, g, or t
  misc_feature (515)..(516): n is a, c, g, or t
cagtgattccatgtagacagttgtgcaactgtcagaatccctgggagttccctgaaagcttcggggatttcaggcgacttcagacgcctcaaagtcaaacaaaaccaaaaatgtccccttcaggaagtcaggccatgttctgtccttccgttttccttcttactagggaacttggggagggaggctgggcggcagcagttaaacaactcacccaatgggaaaaccagcacgctctgggaccacctctgaagtgatctcacaccctgaccacacactctaaactcactgtcataatccttccccttggtcaaaaataaaagcagcacacccactctgctgggagtgagtcacaaaccgaaaaaagtcaatgggtctgagccaagaggatctactaacaaggggaaagatctcccagtggaggtgtttcagcggatgctgcggtcttacccttgtagcctggatgaccagacagatcaaaaaaaatattaaagtccaggcatctgacactannnnannaa

SEQ ID NO: 44219 - DNA, 415 bp, Homo sapiens
agagagctagcaccatgatcaataccctgccaaatccccctctgtgagaaacacccaagaatgatcaataaaaaaaaatttaaaaaaaacaaaaaaaaaaacaaagagtattagggtctagaatcaaaccatccacataatttttggcaaactgcttaaaatatcagagcttgagtttattcatctgtaaatcagagctgctacaaaactttcataagatatttaatagagcacaaatgtaggacaaatgtccaccatatgttaagttctcaggaaaactgctgttacactacttcttactttaaatccaatcttttttccaaaaaggagagatctggcaaagtacaaagtagggtgggcttacaggactttacacttaggaccccttcttacagggcagctagggtttttatgc

SEQ ID NO: 44220 - DNA, 276 bp, Homo sapiens
agggcagccagtctaaggacaggatggatctcaaccatggccaggccaccctcctactggaaccaccgtttgctttcatggagccaccttgcttcagtatcctcacaggattgctgcaactggtcattttgggttcacttccaaactgcttcaaagatttttatttatgtttatatatttatttttttttaagacagagtctcgctctgttgcccagctggatcgtgccacttcactccagcctgggaacagagtgagactcagtctcaaaaaaaa

SEQ ID NO: 44221 - DNA, 343 bp, Homo sapiens
atgtttttttttttctcatcacattcctgttgctaaggaaaccgtctcctttgtgtagcatattcagagaggcacttgaggtagactccaactcaaagagtgtgagctccttgaattgtgtcatttttaacaatgggaaattaaaaagacaaaagcccttgacagaaggtggaaaaatactcagaaacttctatggcattgtccttgtttggggagagaagcagcaaaaccaaagtttattgtgaaatatttgttgaatgtagaagctaaagaagatacatgagagatttgaaagctttagttcccccgccccccaagtatatgcttctttattgatgaggaa

SEQ ID NO: 44222 - DNA, 105 bp, Homo sapiens
cttattggctttctaccttgcctttccctacttgcatttccaaaaatgtccattatatgtaggatgatgctagcaatctaaagtcccccactcggggacgccaac

SEQ ID NO: 44223 - DNA, 340 bp, Homo sapiens
cttccttttctcctttcttctggctccgtctccctcacctcatgtggctgtggaaaactttctagctattgagcattagccctagctgtgatgaccatgaacatccagcgaagggtttttctgcctcgctctacatcatattcatctgaggagatattattttaaggagatgctcatggcctcatctcaagagatctgaaatcaaatattctgggatgcagcccaggcattggtatttttaaaatgcttccccaagaaatgctaaagtgcagtcagtattgagaatcacagatctaaattttccctccatatcttaatttctttttctataaaatgaact

SEQ ID NO: 44224 - DNA, 498 bp, Homo sapiens
aataaaagtgaacatacaaaaaagagctcttgtcacagaaatgaaaaccttgggagcaggactgcacccacggttcccaccaacctatcctgccatcatgttttctccctactccagcttcctcccaagctcactctacgtagatggtttttcttcccttagccaacaaacgaaattctgcctataaattaagccaggacactaggatatggaggtatattatttatgtctcttttccagtgtttcctggtatataacagcaaagatggtttagcaagttaactggtcaggccagaattcttgatggttgccaagtcaggaggcagacggtgaaggaatgcattctggttatgaaaaatggcaatgacgagtaagttgcagagtaaagatgccttttagaggaaattaaggtttgcaataaatacatgctaatcctctaattttgatgaaagactaaagctcttgttttggtttgcatttcaaagagcaagagcatag

SEQ ID NO: 44225 - DNA, 358 bp, Homo sapiens
tttttttttgagacaaagtctcactctgtcacccaggctggagtgcagtggcacaatcccagcttactgcaacctctgcctcctgggttcaagcgatcctcctgcatcagcctcccgagtagctgggattacaagtgcatgccaacatgcctggctaatttttgtacttttagtagaaacggggtttcaccatgttggccaggctggcttcgaacttctgacctcaagcgatccccctgcctcagcctgccaaagtgctgagattacagatgtgaaccaccgcacccggccaagtattacttttctaaattcaaaaaggttcataggaattgctttaaaaggctacaattggtcgatt

SEQ ID NO: 44226 - DNA, 597 bp, Homo sapiens
tctaaagcagtggttctcaaagcgtgtcatgcattcatatcacctggtcatttgctagaaatgcaagttcataggccccaccccagtcccagtgaatcagaaactctggggctggggcccagcaatctaggttttgacaagccttagaatattcagatgtccaccgaagtttgacagccactgacctagagagctttggaaagggtggccatctacatttttaacaagttcttcccttagtgttatagtttcctgttgctgctataacaattttcacaaatggagtggcttaagacaacacacatgaggccgggcatggtggctcatgcctgtaatcatagcactttgggaggctgaggtggatagactgcttgagctcaggcgttcaagaccagcctgggcagcatggtgaaacctcatctctgcaaaaaaaaaaaacaaaaaaattagccaggcgtggcggtgcacgcttgtagttcagctccttgggggctgaggtaggagggtcacttgaacccaggaggttgaggctgcagtgagctgagatttcaccactgcactccagcagcctgggtgacaaagtgagactctgtttcc

SEQ ID NO: 44227 - DNA, 484 bp, Homo sapiens
aggtccggattccttgaatacagattgcccctccttccagacgtctggccagtggatgcttttggttacgaggccctggctgagagaagggctggctctctgctatccatccccctggtggagggccaggcccagaggaagtctcagaggtcttagagataggcacctctagatggcaaaaacacgactgcagaagggcagaggagcggcctcaggaaaaacccagggggatatatgatcttgaacgtacatggtgtcgaaactgcggcccttggctttcccatgtgtgaaatgcgactaagactaatgaaagtcttttatgtgtgtaggcaaaaatcttatttagcaattcctctaccaggtgcaatttttttttttttttttttgagatggagtcttgctctgtcactccagcatgggcaacaagaacgaaactccgtctcaaaaaaaccaaacaaaacaaaagaacagagccgtgattcta

SEQ ID NO: 44228 - DNA, 407 bp, Homo sapiens
ccagtggatgcttttggttacgaggccctggctgagagaagggctggctctctgctatccatccccctggtggagggccaggcccagaggaagtctcagaggtcttagagataggcacctctagatggcaaaaacacgactgcagaagggcagaggagcggcctcaggaaaaacccagggggatatatgatcttgaacgtacatggtgtcgaaactgcggcccttggctttcccatgtgtgaaatgcgactaagactaatgaaagtcttttatgtgtgtaggcaaaaatcttatttagcaattcctctaccaggtgcaatttttttttttttttttttgagatggagtcttgctctgtcactccaggctggagtgcagtggcacgatctcagctcagtgcaagctcc

SEQ ID NO: 44229 - DNA, 407 bp, Homo sapiens
cggctgcatcacatactgtcattggactccaccgggatttgtttaaatattcttctatggttgaacattaagattattacagtttttttgttactacaaataatgctgttattaatatccttatgtccaaatctttgtgccctttattatttacttagactggattcctagaagtagaggtgttgggtcaaggggtctggaagttttgaaggcccttgattcatatttccaacttactttctaggaagttcatattaaattatccccatttccaccagcagtgtatgacactgcctacttcaccacatggtacctaacagtggacattgtgttaaacaagagagagaatggtatctaatcagtgaccttgctaaaagtcaatctgattgtaaacccccagagcccac

SEQ ID NO: 44230 - DNA, 4067 bp, Homo sapiens
  misc_feature (222)..(222): n is a, c, g, or t
  misc_feature (243)..(243): n is a, c, g, or t
  misc_feature (437)..(438): n is a, c, g, or t
  misc_feature (447)..(447): n is a, c, g, or t
atgacagcctccgtgctcctccacccccgctggatcgagcccaccgtcatgtttctctacgacaacggcggcggcctggtggccgacgagctcaacaagaacatggaaggggcggcggcggctgcagcagcggctgcagcggcggcggctgccggggccgggggcgggggcttcccccacccggcggctgcggcggcagggggcaacttctcggtggcggcngcggccgcggctgcggcggcngccgcggccaaccagtgccgcaacctgatggcgcacccggcgcccttggcgccaggagccgcgtccgcctacagcagcgcccccggggaggcgcccccgtcggctgccgccgctgctgccgcggctgccgctgcagccgccgccgccgccgccgcgtcgtcctcgggaggtcccggcccggcgggcccggcggnngcagaggcngccaagcaatgcagcccctgctcggcagcggcgcagagctcgtcggggcccgcggcgctgccctatggctacttcggcagcggctactacccgtgcgcccgcatgggcccgcaccccaacgccatcaagtcgtgcgcgcagcccgcctcggccgccgccgccgccgccttcgcggacaagtacatggataccgccggcccagctgccgaggagttcagctcccgcgctaaggagttcgccttctaccaccagggctacgcagccgggccttaccaccaccatcagcccatgcctggctacctggatatgccagtggtgccgggcctcgggggccccggcgagtcgcgccacgaacccttgggtcttcccatggaaagctaccagccctgggcgctgcccaacggctggaacggccaaatgtactgccccaaagagcaggcgcagcctccccacctctggaagtccactctgcccgacgtggtctcccatccctcggatgccagctcctataggagggggagaaagaagcgcgtgccttataccaaggtgcaattaaaagaacttgaacgggaatacgccacgaataaattcattactaaggacaaacggaggcggatatcagccacgacgaatctctctgagcggcaggtcacaatctggttccagaacaggagggttaaagagaaaaaagtcatcaacaaactgaaaaccactagttaatggattaaaaatagagcaagaaggcaacttgaagaaacgcttcagaactcgttgctttgcccagataatgataataatgcttaataataattgaagaatgggaaagagaaagagacagagactggcattttcctctcccgaaggagatctctttctctttaatggaatctacaactgttttaaaactttaagaaaggtaaagactgccagttcttccgccaaccccatcagcccagcccgttaaatgtcaaacgtcaacccccaaaatacgcaatttcagataagttacgcagttactgaaatcttgtaagtatttaagtgatcgttacattttaggacactgcgttagatggtaataatctggaagttggttacaaacgcaagaggccattgtaaacatctgcttgtccttcttaggtcgccattccctttgcatgttaagcgtctgctcaggtaaatcttagtgaaattcctaccgttgttgtacgttctgcaaaacattttatgtatagatttagaggggaaacgagaaggtactgaaataatgatcttggaatatttgctgtgaagggagaaagggagagaaaactcttctgaggatcatttgtcttggtagtatagtaaaaccaaccagctgaacctttcaggctacaagagaacccgggtcggtaatgtctttttaagaataatttttaattgcttataacaagcatattttgtggcatttgaactatatttactgctccaatatccgttattttccaaaggattttgtatctttttgaaaatgtttacatcatcagatgatccacagaattcactttatgtgagatctcccgagagtttccatcccaacataatggactttggtttgaacacaattcgttttttcatttgaattggcatttcccaatatttgctaaacatttgctggagaaatcatttttcttttttcttttttagaaaactcagaatgaaaattcattcccctgaaatatttaggtgtctatattctatattttgatctattaagggattagtatttttccatgtttattgtgttatcagagtgcattagaaagattagtgattcatcttcacagcacatttttaatcaagcagttatttcaaccagcacattcgttttgttcatattcactatagaatgatatcttgtaaataaagacattcagcacactgtgaaaatgtatttgtgcacctgctttttaaatatttctactaaaaatgaaaaaaaaaaacccttagacctgtagatagtgatatcgtaatattaattgttaataaaatagtcactgccattaaaatctgcagaaaatactctttactttcctatgctaaatgtgcactgcacagaaagaaaaggagcaggtttatcttatataaaccaaggaccattctttattattattcagtacttcttttgctaccaaatttttaagaaaagggagaaatccctcataactaaaatcctaaaaaatgataagtgcttcaaggagattaaagtgtcaggtattacaaaagggagagaaaagaaaggaggaagagatagtatgaattcccaggctccctgtggaaaatgaaaaccagttgttttgtagcagcaatgcctaggctgtcgtattttaaaatctgctgttgggtctgcatgtgtctgagagggcaggttttgatatttgttgaaatgacaggactacgaaaggccttaaaccttgaccttgacgaaaaaaaagacaatttgtgaccttgacttttgacagctcatgaattggccttagctggattagtagatcaagggcgccacctcgcgttgacaagcctccttgtaattcttcaaccaagggaatcaagagctcttacctccttgactttagagattcagtactcaattatttggctccagctggagcaaatttgaatatatgtaaattatacatgtccctgtatatatgtaaatatatataatatgtgtacacatgtatacatttgcatattagtgcttgtgtgtgcttgtatatatatttgtagaatctgtacagatatcatatcattaattgctaatgacgcaagatattgtaatttaaggtgatttctagaattgaggtacaaaatgtactttacaagatgaagccttgttccttttctctaatggccaaatttgatttgtcttcacagtggcttgctctgcatcagatttctgcagatctgctttaaagctgtacatttttgttacagtctaagatgtgttcttaaatcaccattccttcctggtcctcaccctccagggtggtctcacactgtaattagagctattgaggagtctttacagcaaattaagattcagatgccttgctaagtctagagttctagagttatgtttcagaaagtctaagaaacccacctcttgagaggtcagtaaagaggacttaatatttcatatctacaaaatgaccacaggattggatacagaacgagagttatcctggataactcagagctgagtactgctccagggtggtgtgcaatcttatattgatgcttgtgaatctgccatttgatttgtaggataaataaatatgtttaatattaacaacttccatcaaaactataataataatattatatctactgttgacctctaacaacaatcaggtgctgtattcagagtcataaagaatacatatgtatgtttgtatatttaatatacacataggataatgtgtttttgtcaaatctatgctatgcgcatatgtattaaaatgttggtggaatcagtagccgtgggatgcagaattgtgagatgcaggctaattttatctttacgttagaggaaagtaatagtgaatggaagaaccagattcatcattttatggaaaataata

SEQ ID NO: 44231 - DNA, 1149 bp, Homo sapiens
  misc_feature (222)..(222): n is a, c, g, or t
  misc_feature (243)..(243): n is a, c, g, or t
  misc_feature (437)..(438): n is a, c, g, or t
  misc_feature (447)..(447): n is a, c, g, or t
atgacagcctccgtgctcctccacccccgctggatcgagcccaccgtcatgtttctctacgacaacggcggcggcctggtggccgacgagctcaacaagaacatggaaggggcggcggcggctgcagcagcggctgcagcggcggcggctgccggggccgggggcgggggcttcccccacccggcggctgcggcggcagggggcaacttctcggtggcggcngcggccgcggctgcggcggcngccgcggccaaccagtgccgcaacctgatggcgcacccggcgcccttggcgccaggagccgcgtccgcctacagcagcgcccccggggaggcgcccccgtcggctgccgccgctgctgccgcggctgccgctgcagccgccgccgccgccgccgcgtcgtcctcgggaggtcccggcccggcgggcccggcggnngcagaggcngccaagcaatgcagcccctgctcggcagcggcgcagagctcgtcggggcccgcggcgctgccctatggctacttcggcagcggctactacccgtgcgcccgcatgggcccgcaccccaacgccatcaagtcgtgcgcgcagcccgcctcggccgccgccgccgccgccttcgcggacaagtacatggataccgccggcccagctgccgaggagttcagctcccgcgctaaggagttcgccttctaccaccagggatatatagcagaaacaatgatctgtgaatgggtcccatcgcagaactgcctggaagggtgtgtaggggaggagggctggatggggtgatggctcttctcaagcctggaatgtgagccaacatgagcactgagtggaaatggagctgccctaggaagcagttggagctttgtggcgtgggggcttcctgtgagctacggctgtagagaccgagacccaaggaccagagccaaccttcgggttgggccacccccttttgtcttctttatctcagacacactctgctgggaaacctgtttgggccaaagctgcatggggaatggaaggcagacactgagaactagggcttcgcccttcaaagtctcccccaccccatttgttcccatgctataggaaaaagaagtctaataattggcaacaataaaaataaaaatagttattaaaggaagt

SEQ ID NO: 44232 - DNA, 3728 bp, Homo sapiens
  misc_feature (222)..(222): n is a, c, g, or t
  misc_feature (243)..(243): n is a, c, g, or t
  misc_feature (437)..(438): n is a, c, g, or t
  misc_feature (447)..(447): n is a, c, g, or t
  misc_feature (3588)..(3588): n is a, c, g, or t
atgacagcctccgtgctcctccacccccgctggatcgagcccaccgtcatgtttctctacgacaacggcggcggcctggtggccgacgagctcaacaagaacatggaaggggcggcggcggctgcagcagcggctgcagcggcggcggctgccggggccgggggcgggggcttcccccacccggcggctgcggcggcagggggcaacttctcggtggcggcngcggccgcggctgcggcggcngccgcggccaaccagtgccgcaacctgatggcgcacccggcgcccttggcgccaggagccgcgtccgcctacagcagcgcccccggggaggcgcccccgtcggctgccgccgctgctgccgcggctgccgctgcagccgccgccgccgccgccgcgtcgtcctcgggaggtcccggcccggcgggcccggcggnngcagaggcngccaagcaatgcagcccctgctcggcagcggcgcagagctcgtcggggcccgcggcgctgccctatggctacttcggcagcggctactacccgtgcgcccgcatgggcccgcaccccaacgccatcaagtcgtgcgcgcagcccgcctcggccgccgccgccgccgccttcgcggacaagtacatggataccgccggcccagctgccgaggagttcagctcccgcgctaaggagttcgccttctaccaccagggctacgcagccgggccttaccaccaccatcagcccatgcctggctacctggatatgccagtggtgccgggcctcgggggccccggcgagtcgcgccacgaacccttgggtcttcccatggaaagctaccagccctgggcgctgcccaacggctggaacggccaaatgtactgccccaaagagcaggcgcagcctccccacctctggaagtccactctgcccgacgtggtctcccatccctcggatgccagctcctataggagggggagaaagaagcgcgtgccttataccaaggtgcaattaaaagaacttgaacgggaatacgccacgaataaattcattactaaggacaaacggaggcggatatcagccacgacgaatctctctgagcggcaggtcacaatctggttccagaacaggagggttaaagagaaaaaagtcatcaacaaactgaaaaccactagttaatggattaaaaatagagcaagaaggcaacttgaagaaacgcttcagaactcgttgctttgcccagataatgataataatgcttaataataattgaagaatgggaaagagaaagagacagagactggcattttcctctcccgaaggagatctctttctctttaatggaatctacaactgttttaaaactttaagaaaggtaaagactgccagttcttccgccaaccccatcagcccagcccgttaaatgtcaaacgtcaacccccaaaatacgcaatttcagataagttacgcagttactgaaatcttgtaagtatttaagtgatcgttacattttaggacactgcgttagatggtaataatctggaagttggttacaaacgcaagaggccattgtaaacatctgcttgtccttcttaggtcgccattccctttgcatgttaagcgtctgctcaggtaaatcttagtgaaattcctaccgttgttgtacgttctgcaaaacattttatgtatagatttagaggggaaacgagaaggtactgaaataatgatcttggaatatttgctgtgaagggagaaagggagagaaaactcttctgaggatcatttgtcttggtagtatagtaaaaccaaccagctgaacctttcaggctacaagagaacccgggtcggtaatgtctttttaagaataatttttaattgcttataacaagcatattttgtggcatttgaactatatttactgctccaatatccgttattttccaaaggattttgtatctttttgaaaatgtttacatcatcagatgatccacagaattcactttatgtgagatctcccgagagtttccatcccaacataatggactttggtttgaacacaattcgttttttcatttgaattggcatttcccaatatttgctaaacatttgctggagaaatcatttttcttttttcttttttagaaaactcagaatgaaaattcattcccctgaaatatttaggtgtctatattctatattttgatctattaagggattagtatttttccatgtttattgtgttatcagagtgcattagaaagattagtgattcatcttcacagcacatttttaatcaagcagttatttcaaccagcacattcgttttgttcatattcactatagaatgatatcttgtaaataaagacattcagcacactgtgaaaatgtatttgtgcacctgctttttaaatatttctactaaaaatgaaaaaaaaaaacccttagacctgtagatagtgatatcgtaatattaattgttaataaaatagtcactgccattaaaatctgcagaaaatactctttactttcctatgctaaatgtgcactgcacagaaagaaaaggagcaggtttatcttatataaaccaaggaccattctttattattattcagtacttcttttgctaccaaatttttaagaaaagggagaaatccctcataactaaaatcctaaaaaatgataagtgcttcaaggagattaaagtgtcaggtattacaaaagggagagaaaagaaaggaggaagagatagtatgaattcccaggctccctgtggaaaatgaaaaccagttgttttgtagcagcaatgcctaggctgtcgtattttaaaatctgctgttgggtctgcatgtgtctgagagggcaggttttgatatttgttgaaatgacaggactacgaaaggccttaaaccttgaccttgacgaaaaaaaagacaatttgtgaccttgacttttgacagctcatgaattggccttagctggattagtagatcaagggcgccacctcgcgttgacaagcctccttgtaattcttcaaccaagggaatcaagagctcttacctccttgactttagagattcagtactcaattatttggctccagctggagcaaatttgaatatatgtaaattatacatgtccctgtatatatgtaaatatatataatatgtgtacacatgtagagaagaacagaacaagaatatacatacaaggacaacatagacatataacataataaataagagagacatatataaagcactccataacagatatgcagaaactcacctcctaggttgagaccaagaattggcaaatttgcatgagctcctggaaagagttgctgactttgtatctaagacctgccagggaataccaagagttgtttctacagactttttttggtttgggacgaacgatactgtgcgcaacccaggacggacactggaaaaaaaaggttgctttctctctacagcaaaatttattgtgaggaaagctcctccaaatcctcgaggctattataaggtcacaaaatcaagtgcctagggacaaatcccaaagggcatgacttcggggagctatctggtactacctggaaggtcnctgacacaatgatttcccattaatgacgcaggtctccaggtatataaaaccccatggtttgtcacccaattgggcactaaaggtcctccggggaatgtttacggtaaccactgaaaggtttttattaagaccctttcaac

SEQ ID NO: 44233 - DNA, 1293 bp, Homo sapiens
gagaaacctcataaatgtactgaatgtgggaagtctttcaatgagaagtcaaccctcattgtgcatcaaagaactcatacaggagagaaaccctatgaatgtgatgtgtgtggaaaaaccttcacgcaaaagtcaaaccttggtgtacatcagagaactcattcaggagagaaaccctttgaatgtaatgaatgtgagaaagccttctctcagaagtcctacctcatgctgcatcagagaggtcatacaggagagaaaccttacgagtgcaatgaatgtgaaaaagcattttcacagaaatcatatctcattatacatcaaagaactcatacagaagaaaaaccctataaatgtaatgaatgtggcaaagcttcagagaaaagtcaaagcctcattatacatcagagaattcatacaggagagaaaccttatgaatgtcctgtgtgttggaaagcttttagccagaagtcacagctcataatacatcagagaacgcacacgggagagaaaccctatgcatgcactgagtgtggcaaagccttccgagaaaagtcaacattcactgtacatcaaagaactcatactggagagaaaccctataaatgtacagaatgtgggaaagcctttacccaaaaatcaaaccttattgtacatcagcgaacccatgcaggaaagaaagcccatggaagaggccacactcggaagtcaaagttcatggcacattagagagctaatcagcagtatctattatggacactgaaagaaagttgtgtcaattttactcacattttaaaagtatattttgacttgtggtttaaatatgggagtaaattcagcctttcttcttttcatctcagtcataacccaaaagctacgggagaaaaagcagaagtgtaatctctgtatctgacaaaattaggagacagctgcaaccctaatgagagggctgccacaggcagaggaaatgaagcactggtgcaggagatttcagagtgagagtgctcaaggctgcaggtgcaagacagcactggtaaggactcttagctgaggttcgggatataccccgaggcgcggaaccatagatataacagtggtaacagtgctgtcttgcacaggcagaggaaatgaagcactggtgcaggagatttcagagtgagagtgccagaggatgattttgtaaataaggacagtctatctcagcataacctactacttgtcgatattctcatatctgtttcacggtatgcctaacaatagtaatctcgttttctgatggacgcaacgttggaccgc

SEQ ID NO: 44234 - DNA, 2053 bp, Homo sapiens
gagaaacctcataaatgtactgaatgtgggaagtctttcaatgagaagtcaaccctcattgtgcatcaaagaactcatacaggagagaaaccctatgaatgtgatgtgtgtggaaaaaccttcacgcaaaagtcaaaccttggtgtacatcagagaactcattcaggagagaaaccctttgaatgtaatgaatgtgagaaagccttctctcagaagtcctacctcatgctgcatcagagaggtcatacaggagagaaaccttacgagtgcaatgaatgtgaaaaagcattttcacagaaatcatatctcattatacatcaaagaactcatacagaagaaaaaccctataaatgtaatgaatgtggcaaagcttcagagaaaagtcaaagcctcattatacatcagagaattcatacaggagagaaaccttatgaatgtcctgtgtgttggaaagcttttagccagaagtcacagctcataatacatcagagaacgcacacgggagagaaaccctatgcatgcactgagtgtggcaaagccttccgagaaaagtcaacattcactgtacatcaaagaactcatactggagagaaaccctataaatgtacagaatgtgggaaagcctttacccaaaaatcaaaccttattgtacatcagcgaacccatgcaggaaagaaagcccatggaagaggccacactcggaagtcaaagttcatggcacattagagagctaatcagcagtatctattatggacactgaaagaaagttgtgtcaattttactcacattttaaaagtatattttgacttgtggtttaaatatgggagtaaattcagcctttcttcttttcatctcagtcataacccaaaagctacgggagaaaaagcagaagtgtaatctctgtatctgacaaaattaggagacagctgcaaccctaatgagagggctgccacaggcagaggaaatgaagcactggtgcaggagatttcagagtgagagtgctcaaggctgcaggtgcaagacagcactggtaaggactcttagctgaggttcgggatataccccgaggcgcggaaccatagatataacagtggtaacagtgcgtgggcaggtaggaggtaggatgtttcctagaccatttggggtctgaggagaaacaggctggggcctcgagaaggagtcactcagacaagccatatttttagaaagtagtctactgatgggagcaacagttatggcatgctgggggaagagaagggacttttccttgtgaagagccctacagctgcccctatttactgacttgggagaagtaaagtcagaaagaacgaacagctgtggggggaaaaaattctcagttgtcaaaaaaaaaaaaaactgatctgcttagaatgtggccctggtttcttttcccacatgaacctccagcaaatagcaagtccaggaaaaactcttctcattcaaagaggaattattcaaaagtaatcaaaaccacaaatgcatttggtttttgggccagcaattccacttctaggaatgtacatactcacacatgtacaaaatgatgaacatacagaagtattcattaatgcagcgtttgtgaaaacaaaagattggaagctgtttaaatgacaccatatcagggttctggttccctaaattgtggtatattcatacagcctactcctgggtagacaacaatgaataaataaggagaacttggaaaccatttatgtagtgatgtgggataaccttcagtttatgttattaggtaggaaaaataaggttgaggacagtgactgccatttgtatataaaaaggagaaaaatggtaagtacataattgtgaattcataagttatctctggaaagagacatgagaacctggtaaccctgattaccttgggaggggaaggggcagtggtggctggggggatggaattgagagggagacaactgtatcctttcatagcttttgaaaatgtgggtgtactatgtactatgtggatgtactaccttttcaaaaataaaacatttaaaaagctaaaatgttt

SEQ ID NO: 44235 - DNA, 2733 bp, Homo sapiens
ggcacgagggtggtgcacgcctatagtctcagctactcaggaagttgaggcaggaggatcgcttgagcccaggagtttgatgctgcagtgagctatgattgtgctaccactgtactccagactggacaaaagattcctgtgccttaagaacattagaaccttcctgtccacctgctgtgagaagttcggcctcaagcggagcgagctcttcgaagcctttgacctcttcgatgtgcaggattttggcaaggtcatctacaccctgtctgctctgtcctggaccccgatcgcccagaacagggggatcatgcccttccccaccgaggaggagagtgtaggtgatgaagacatctacagtggcctgtccgaccagatcgacgacacggtggaggaggatgaggacctgtatgactgcgtggagaatgaggaggcggaaggcgacgagatctatgaggacctcatgcgctcggagcccgtgtccatgccgcccaagatgacagagtatgacaagcgctgctgctgcctgcgggagatccagcagacggaggagaagtacactgacacgctgggctccatccagcagcatttcttgaagcccctgcaacggttcctgaaacctcaagacattgagatcatctttatcaacattgaggacctgcttcgtgttcatactcacttcctaaaggagatgaaggaagccctgggcacccctggcgcagccaatctctaccaggtcttcatcaaatacaaggagaggttcctcgtctatggccgctactgcagccaggtggagtcagccagcaaacacctggaccgtgtggccgcagcccgggaggacgtgcagatgaagctggaggaatgttctcagagagccaacaacgggaggttcaccctgcgggacctgctgatggtgcctatgcagcgagttctcaaatatcacctccttctccaggagctggtgaaacacacgcaggaggcgatggagaaggagaacctgcggctggccctggatgccatgagggacctggctcagtgcgtgaacgaggtcaagcgagacaacgagacactgcgacagatcaccaatttccagctgtccattgagaacctggaccagtctctggctcactatggccggcccaagatcgacggggaactcaagatcacctcggtggaacggcgctccaagatggacaggtatgccttcctgctcgacaaagctctactcatctgtaagcgcaggggagactcctatgacctcaaggactttgtaaacctgcacagcttccaggttcgggatgactcttcaggagaccgagacaacaagaagtggagccacatgttcctcctgatcgaggaccaaggtgcccagggctatgagctgttcttcaagacaagagaattgaagaagaagtggatggagcagtttgagatggccatctccaacatctatccggagaatgccaccgccaacgggcatgacttccagatgttctcctttgaggagaccacatcctgcaaggcctgtcagatgctgcttagaggtaccttctatcagggctaccgctgccatcggtgccgggcatctgcacacaaggagtgtctggggagggtccctccatgtggccgacatgggcaagatttcccaggaactatgaagaaggacaaactacatcgcagggctcaggacaaaaagaggaatgagctgggtctgcccaagatggaggtgtttcaggaatactacgggcttcctccaccccctggagccattggaccctttctacggctcaaccctggagacattgtggagctcacgaaggctgaggctgaacagaactggtgggagggcagaaatacatctactaatgaaattggctggtttccttgtaacagggtgaagccctatgtccatggccctcctcaggacctgtctgttcatctctggtacgcaggccccatggagcgggcaggggcagagagcatcctggccaaccgctcggacgggactttcttggtgcggcagagggtgaaggatgcagcagaatttgccatcagcattaaatataacgtcgaggtcaagcacattaaaatcatgacagcagaaggactgtaccggatcacagagaaaaaggctttccgggggcttacggagctggtggagttttaccagcagaactctctaaaggattgcttcaagtctctggacaccaccttgcagttccccttcaaggagcctgaaaagagaaccatcagcaggccagcagtgggaagcacaaagtattttggcacagccaaagcccgctatgacttctgcgcccgagaccgatcagagctgtcgctcaaggagggtgacatcatcaagatccttaacaagaagggacagcaaggctggtggcgaggggagatctatggccgggttggctggttccctgccaactacgtggaggaagattattctgaatactgctgagccctggtgccttggcagagagacgagaaactccaggctctgagcccggcgtgggcaggcagcggagccaggggctgtgacagctcccggcgggtggagactttgggatggactggaggaggccagcgtccagctggcggtgctcccgggatgtgccctgacatggttaatttataacaccccgatttcctcttgggtcccctcaagcagacggggctcaagggggttacatttaataaaaggatgaagatggatagaaaaaaagg

SEQ ID NO: 44236 - DNA, 2899 bp, Homo sapiens
actagctgtcgctccacaggcgagcagggcaggcgtgcgggcgggtgggtggtggaggctgcgagggtgcacggccggccctgggcaggcggtagccatggagctgtggcgccaatgcacccactggctcatccagtgccgggtgctgccgcccagccaccgcgtgacctgggatggggctcaggtgtgtgaactggcccaggccctccgggatggtgtccttctgtgtcagctgcttaacaacctgctaccccatgccatcaacctgcgtgaggtcaacctgcgcccccagatgtcccttcctgtgccttaagaacattagaaccttcctgtccacctgctgtgagaagttcggcctcaagcggagcgagctcttcgaagcctttgacctcttcgatgtgcaggattttggcaaggtcatctacaccctgtctgctctgtcctggaccccgatcgcccagaacagggggatcatgcccttccccaccgaggaggagagtgtaggtgatgaagacatctacagtggcctgtccgaccagatcgacgacacggtggaggaggatgaggacctgtatgactgcgtggagaatgaggaggcggaaggcgacgagatctatgaggacctcatgcgctcggagcccgtgtccatgccgcccaagatgacagagtatgacaagcgctgctgctgcctgcgggagatccagcagacggaggagaagtacactgacacgctgggctccatccagcagcatttcttgaagcccctgcaacggttcctgaaacctcaagacattgagatcatctttatcaacattgaggacctgcttcgtgttcatactcacttcctaaaggagatgaaggaagccctgggcacccctggcgcagccaatctctaccaggtcttcatcaaatacaaggagaggttcctcgtctatggccgctactgcagccaggtggagtcagccagcaaacacctggaccgtgtggccgcagcccgggaggacgtgcagatgaagctggaggaatgttctcagagagccaacaacgggaggttcaccctgcgggacctgctgatggtgcctatgcagcgagttctcaaatatcacctccttctccaggagctggtgaaacacacgcaggaggcgatggagaaggagaacctgcggctggccctggatgccatgagggacctggctcagtgcgtgaacgaggtcaagcgagacaacgagacactgcgacagatcaccaatttccagctgtccattgagaacctggaccagtctctggctcactatggccggcccaagatcgacggggaactcaagatcacctcggtggaacggcgctccaagatggacaggtatgccttcctgctcgacaaagctctactcatctgtaagcgcaggggagactcctatgacctcaaggactttgtaaacctgcacagcttccaggttcgggatgactcttcaggagaccgagacaacaagaagtggagccacatgttcctcctgatcgaggaccaaggtgcccagggctatgagctgttcttcaagacaagagaattgaagaagaagtggatggagcagtttgagatggccatctccaacatctatccggagaatgccaccgccaacgggcatgacttccagatgttctcctttgaggagaccacatcctgcaaggcctgtcagatgctgcttagaggtaccttctatcagggctaccgctgccatcggtgccgggcatctgcacacaaggagtgtctggggagggtccctccatgtggccgacatgggcaagatttcccaggaactatgaagaaggacaaactacatcgcagggctcaggacaaaaagaggaatgagctgggtctgcccaagatggaggtgtttcaggaatactacgggcttcctccaccccctggagccattggaccctttctacggctcaaccctggagacattgtggagctcacgaaggctgaggctgaacagaactggtgggagggcagaaatacatctactaatgaaattggctggtttccttgtaacagggtgaagccctatgtccatggccctcctcaggacctgtctgttcatctctggtacgcaggccccatggagcgggcaggggcagagagcatcctggccaaccgctcggacgggactttcttggtgcggcagagggtgaaggatgcagcagaatttgccatcagcattaaatataacgtcgaggtcaagcacattaaaatcatgacagcagaaggactgtaccggatcacagagaaaaaggctttccgggggcttacggagctggtggagttttaccagcagaactctctaaaggattgcttcaagtctctggacaccaccttgcagttccccttcaaggagcctgaaaagagaaccatcagcaggccagcagtgggaagcacaaagtattttggcacagccaaagcccgctatgacttctgcgcccgagaccgatcagagctgtcgctcaaggagggtgacatcatcaagatccttaacaagaagggacagcaaggctggtggcgaggggagatctatggccgggttggctggttccctgccaactacgtggaggaagattattctgaatactgctgagccctggtgccttggcagagagacgagaaactccaggctctgagcccggcgtgggcaggcagcggagccaggggctgtgacagctcccggcgggtggagactttgggatggactggaggaggccagcgtccagctggcggtgctcccgggatgtgccctgacatggttaatttataacaccccgatttcctcttgggtcccctcaagcagacggggctcaagggggttacatttaataaaaggatgaagatggatagaaaaaaagg

SEQ ID NO: 44237 - DNA, 738 bp, Homo sapiens
tgttttacttattgtcatttaccttgatgactaggttttttggctctcacttacattttgcacctgaggctcgtgactcattctccttcccctacttctgtccgggtgaccacagagatgggcacacagtgagccttcaggaaatgcctggtgaagccatcgccaaattccagacacccagccagacccaaagggctgagccatccccccgaatccatgtgtcaaaccttagtggtgacctgtagaagtggaagcccgctccccatgtctgggctccggcccctgcctccacggggcctaccttggtgctgaagggctgttagagccaggctgtcaccaacttaaaaaatcaaaggggttcagggggaaaggcaacctccatatggcaatatggggacccaggcacggggacgccctcctcaggacctgtctgttcatctctggtacgcaggccccatggagcgggcaggggcagagagcatcctggccaaccgctcggacgggactttcttggtgcggcagagggtgaaggatgcagcagaatttgccatcagcattaagtaactcctttctccctgactcatacccttttggggcctgggccctgcgggcctgggaaaaagggtatccaggttttactttatagaagtgtacggtaatagcatccaccttttactgagcccctgctggttcccacgtgcctttcaccttctttatttcttttaattgacgaccaca

SEQ ID NO: 44238 - DNA, 305 bp, Homo sapiens
cagttttgctctttacacgcccagtacttttgtttagggaagataagattgccattgtctgcccaagatggaggtgtttcaggaatactacgggcttcctccaccccctggagccattggaccctttctacggctcaaccctggagacattgtggagctcacgaaggctgaggctgaacagaactggtgggagggcagaaatacatctactaatgaaattggctggtttccttgtaacagggtgaagccctatgtccatggccctcctcaggacctgtctgttcatctctgtacgcaggccccat

SEQ ID NO: 44239 - DNA, 214 bp, Homo sapiens
gttctgccgtgggggtgtacaaggggctcactgagtggccactgccccgtcacaggtcatctacaccctgtctgctctgtcctggaccccgatcgcccagaacagggggatcatgtgagtaaccacctgggccttgggccatttagccccagtcctccccctccctgaagccccacgataaggtggcccacgcataaggtgtaacgatctctag

SEQ ID NO: 44240 - DNA, 2803 bp, Homo sapiens
actagctgtcgctccacaggcgagcagggcaggcgtgcgggcgggtgggtggtggaggctgcgagggtgcacggccggccctgggcaggcggtagccatggagctgtggcgccaatgcacccactggctcatccagtgccgggtgctgccgcccagccaccgcgtgacctgggatggggctcaggtgtgtgaactggcccaggccctccgggatggtgtccttctgtgtcagctgcttaacaacctgctaccccatgccatcaacctgcgtgaggtcaacctgcgcccccagatgtcccttcctgtgccttaagaacattagaaccttcctgtccacctgctgtgagaagttcggcctcaagcggagcgagctcttcgaagcctttgacctcttcgatgtgcaggattttggcaaggtcatctacaccctgtctgctctgtcctggaccccgatcgcccagaacagggggatcatgcccttccccaccgaggaggagagtgtaggtgatgaagacatctacagtggcctgtccgaccagatcgacgacacggtggaggaggatgaggacctgtatgactgcgtggagaatgaggaggcggaaggcgacgagatctatgaggacctcatgcgctcggagcccgtgtccatgccgcatttcttgaagcccctgcaacggttcctgaaacctcaagacattgagatcatctttatcaacattgaggacctgcttcgtgttcatactcacttcctaaaggagatgaaggaagccctgggcacccctggcgcagccaatctctaccaggtcttcatcaaatacaaggagaggttcctcgtctatggccgctactgcagccaggtggagtcagccagcaaacacctggaccgtgtggccgcagcccgggaggacgtgcagatgaagctggaggaatgttctcagagagccaacaacgggaggttcaccctgcgggacctgctgatggtgcctatgcagcgagttctcaaatatcacctccttctccaggagctggtgaaacacacgcaggaggcgatggagaaggagaacctgcggctggccctggatgccatgagggacctggctcagtgcgtgaacgaggtcaagcgagacaacgagacactgcgacagatcaccaatttccagctgtccattgagaacctggaccagtctctggctcactatggccggcccaagatcgacggggaactcaagatcacctcggtggaacggcgctccaagatggacaggtatgccttcctgctcgacaaagctctactcatctgtaagcgcaggggagactcctatgacctcaaggactttgtaaacctgcacagcttccaggttcgggatgactcttcaggagaccgagacaacaagaagtggagccacatgttcctcctgatcgaggaccaaggtgcccagggctatgagctgttcttcaagacaagagaattgaagaagaagtggatggagcagtttgagatggccatctccaacatctatccggagaatgccaccgccaacgggcatgacttccagatgttctcctttgaggagaccacatcctgcaaggcctgtcagatgctgcttagaggtaccttctatcagggctaccgctgccatcggtgccgggcatctgcacacaaggagtgtctggggagggtccctccatgtggccgacatgggcaagatttcccaggaactatgaagaaggacaaactacatcgcagggctcaggacaaaaagaggaatgagctgggtctgcccaagatggaggtgtttcaggaatactacgggcttcctccaccccctggagccattggaccctttctacggctcaaccctggagacattgtggagctcacgaaggctgaggctgaacagaactggtgggagggcagaaatacatctactaatgaaattggctggtttccttgtaacagggtgaagccctatgtccatggccctcctcaggacctgtctgttcatctctggtacgcaggccccatggagcgggcaggggcagagagcatcctggccaaccgctcggacgggactttcttggtgcggcagagggtgaaggatgcagcagaatttgccatcagcattaaatataacgtcgaggtcaagcacattaaaatcatgacagcagaaggactgtaccggatcacagagaaaaaggctttccgggggcttacggagctggtggagttttaccagcagaactctctaaaggattgcttcaagtctctggacaccaccttgcagttccccttcaaggagcctgaaaagagaaccatcagcaggccagcagtgggaagcacaaagtattttggcacagccaaagcccgctatgacttctgcgcccgagaccgatcagagctgtcgctcaaggagggtgacatcatcaagatccttaacaagaagggacagcaaggctggtggcgaggggagatctatggccgggttggctggttccctgccaactacgtggaggaagattattctgaatactgctgagccctggtgccttggcagagagacgagaaactccaggctctgagcccggcgtgggcaggcagcggagccaggggctgtgacagctcccggcgggtggagactttgggatggactggaggaggccagcgtccagctggcggtgctcccgggatgtgccctgacatggttaatttataacaccccgatttcctcttgggtcccctcaagcagacggggctcaagggggttacatttaataaaaggatgaagatggatagaaaaaaagg

SEQ ID NO: 44241 - DNA, 1350 bp, Homo sapiens
cttcgagaaacctccaaactgctttccgcagtggctgaaccaatttacagtccagcccacagtgtagaggaattcccttctctcacatgctgctgagtttgtaatttcattgttatttttggctcctgtgaatttcccttactttttttttttttgagagctcagcaatttttttctcaacatttctagtgtttttttaaataggaagagttttgtttgtttgtttctttgttttttttttttttttttttgtgatctagtttgccagatgagcaggagtggaggtcttctccaaggccccttttagtctatttccaccatgttgacagaaatgggtctttcctccctcttcctttatatcctatggttgtctatattggtggaaggggaggtctcttcgtatccattctagaacactgccttctttacaagatcttactgacttctcaacaaacctgtgagtcagggaagatgattcctcttctacgagaggaagacattaaggctttagagtagcaaaggccccagggaatgggctctgttgggacagcttgtctttggtttccagtagttactcctccctgaaggggtcaaggttgcttcctccataactggggcttggtggggaatgggcctggtccccagactcagggcccggtgaccatctggttccagatataacgtcgaggtcaagcacattaaaatcatgacagcagaaggactgtaccggatcacagagaaaaaggctttccgggggcttacggagctggtggagttttaccagcagaactctctaaaggattgcttcaagtctctggacaccaccttgcagttccccttcaaggagcctgaaaagagaaccatcagcaggccagcagtgggaagcacaaagtattttggcacagccaaagcccgctatgacttctgcgcccgagaccgatcagagctgtcgctcaaggagggtgacatcatcaagatccttaacaagaagggacagcaaggctggtggcgaggggagatctatggccgggttggctggttccctgccaactacgtggaggaagattattctgaatactgctgagccctggtgccttggcagagagacgagaaactccaggctctgagcccggcgtgggcaggcagcggagccaggggctgtgacagctcccggcgggtggagactttgggatggactggaggaggccagcgtccagctggcggtgctcccgggatgtgccctgacatggttaatttataacaccccgatttcctcttgggtcccctcaagcagacggggctcaagggggttacatttaataaaaggatgaagatggatagaaaaaaagg

SEQ ID NO: 44242 - DNA, 1672 bp, Homo sapiens
ggcacgagggtggtgcacgcctatagtctcagctactcaggaagttgaggcaggaggatcgcttgagcccaggagtttgatgctgcagtgagctatgattgtgctaccactgtactccagactggacaaaagattcctgtgccttaagaacattagaaccttcctgtccacctgctgtgagaagttcggcctcaagcggagcgagctcttcgaagcctttgacctcttcgatgtgcaggattttggcaaggtcatctacaccctgtctgctctgtcctggaccccgatcgcccagaacagggggatcatgcccttccccaccgaggaggagagtgtaggtgatgaagacatctacagtggcctgtccgaccagatcgacgacacggtggaggaggatgaggacctgtatgactgcgtggagaatgaggaggcggaaggcgacgagatctatgaggacctcatgcgctcggagcccgtgtccatgccgcccaagatgacagagtatgacaagcgctgctgctgcctgcgggagatccagcagacggaggagaagtacactgacacgctgggctccatccagcagcatttcttgaagcccctgcaacggttcctgaaacctcaagacattgagatcatctttatcaacattgaggacctgcttcgtgttcatactcacttcctaaaggagatgaaggaagccctgggcacccctggcgcagccaatctctaccaggtcttcatcaaatacaaggagaggttcctcgtctatggccgctactgcagccaggtggagtcagccagcaaacacctggaccgtgtggccgcagcccgggaggacgtgcagatgaagctggaggaatgttctcagagagccaacaacgggaggttcaccctgcgggacctgctgatggtgcctatgcagcgagttctcaaatatcacctccttctccaggagctggtgaaacacacgcaggaggcgatggagaaggagaacctgcggctggccctggatgccatgagggacctggctcagtgcgtgaacgaggtcaagcgagacaacgagacactgcgacagatcaccaatttccagctgtccattgagaacctggaccagtctctggctcactatggccggcccaagatcgacggggaactcaagatcacctcggtggaacggcgctccaagatggacaggtatgccttcctgctcgacaaagctctactcatctgtaagcgcaggggagactcctatgacctcaaggactttgtaaacctgcacagcttccaggttcgggatgactcttcaggagaccgagacaacaagaagtggagccacatgttcctcctgatcgaggaccaaggtgcccagggctatgagctgttcttcaagacaagagaattgaagaagaagtggatggagcagtttgagatggccatctccaacatctatccggagaatgccaccgccaacgggcatgacttccagatgttctcctttgaggagaccacatcctgcaaggcctgtcagatgctgcttagaggtaccttctatcagggctaccgctgccatcggtgccgggcatctgcacacaaggagtgtctggggagggtccctccatgtggccgacatgggcaagatctcccaggaacgtaataagagtcccctcgcaaa

SEQ ID NO: 44243 - DNA, 2157 bp, Homo sapiens
ggcacgagggtggtgcacgcctatagtctcagctactcaggaagttgaggcaggaggatcgcttgagcccaggagtttgatgctgcagtgagctatgattgtgctaccactgtactccagactggacaaaagattcctgtgccttaagaacattagaaccttcctgtccacctgctgtgagaagttcggcctcaagcggagcgagctcttcgaagcctttgacctcttcgatgtgcaggattttggcaaggtcatctacaccctgtctgctctgtcctggaccccgatcgcccagaacagggggatcatgcccttccccaccgaggaggagagtgtaggtgatgaagacatctacagtggcctgtccgaccagatcgacgacacggtggaggaggatgaggacctgtatgactgcgtggagaatgaggaggcggaaggcgacgagatctatgaggacctcatgcgctcggagcccgtgtccatgccgcccaagatgacagagtatgacaagcgctgctgctgcctgcgggagatccagcagacggaggagaagtacactgacacgctgggctccatccagcagcatttcttgaagcccctgcaacggttcctgaaacctcaagacattgagatcatctttatcaacattgaggacctgcttcgtgttcatactcacttcctaaaggagatgaaggaagccctgggcacccctggcgcagccaatctctaccaggtcttcatcaaatacaaggagaggttcctcgtctatggccgctactgcagccaggtggagtcagccagcaaacacctggaccgtgtggccgcagcccgggaggacgtgcagatgaagctggaggaatgttctcagagagccaacaacgggaggttcaccctgcgggacctgctgatggtgcctatgcagcgagttctcaaatatcacctccttctccaggagctggtgaaacacacgcaggaggcgatggagaaggagaacctgcggctggccctggatgccatgagggacctggctcagtgcgtgaacgaggtcaagcgagacaacgagacactgcgacagatcaccaatttccagctgtccattgagaacctggaccagtctctggctcactatggccggcccaagatcgacggggaactcaagatcacctcggtggaacggcgctccaagatggacaggtatgccttcctgctcgacaaagctctactcatctgtaagcgcaggggagactcctatgacctcaaggactttgtaaacctgcacagcttccaggttcgggatgactcttcaggagaccgagacaacaagaagtggagccacatgttcctcctgatcgaggaccaaggtgcccagggctatgagctgttcttcaagacaagagaattgaagaagaagtggatggagcagtttgagatggccatgtgagtccccgtcttcctccctctttctgtccacagaggggcaggggctgggaaggaggaacgtgatctagtccctactctgtcctgacatgccatgggaccactctgaaccacagtctcttcatttgggaaataagagggacaggcccaaggctgtcttcatccttggaatgcaggggttgtgtgcaagcttcagttaccagcccagactcttctcctttcctcctcctctttcttgttctcctctcctcttccttctcctccttctggtttccttcctcctcctcctcctctttctccttctcctttcctcctcctctttcctcctcctccccttcctcttcttcttcctcctcctctccttcctccccttcctcctcctcgccctcctcttcctcttcctcctattcctcctccacctcttcttcctcctcctccctttcctccccttcttcctcctcctcctcctcttcctcctcttctttctcttcctcctccctttcctcctcttcctcttcttccttttcctcctcctccttcttcttcccctcttcctcctcttccacttttgtcttctctttctcctttttatgtgaggcaaaattccaacaacaaaaatctaacaatttcgaagtgtatgatcgcatggcattttgtacactaacagcattgtgcaaccatcaatggccactcaataccgaggatcctcaagaacagcac

SEQ ID NO: 44244 - DNA, 1785 bp, Homo sapiens
tgcggctggccctggatgccatgagggtgagtgggtgtagggtgctggtgactcacctgctgcagacaccctcctggtaggggctgatcctctagccgggattaggtaggagcctgggtcggctgttggggggccaggttcacccctgccccctccccaggacctggctcagtgcgtgaacgaggtcaagcgagacaacgagacactgcgacagatcaccaatttccagctgtccattgagaacctggaccagtctctggctcactatggccggcccaagatcgacggggaactcaagatcacctcggtggaacggcgctccaagatggacagcttccaggttcgggatgactcttcaggagaccgagacaacaagaagtggagccacatgttcctcctgatcgaggaccaaggtgcccagggctatgagctgttcttcaagacaagagaattgaagaagaagtggatggagcagtttgagatggccatctccaacatctatccggagaatgccaccgccaacgggcatgacttccagatgttctcctttgaggagaccacatcctgcaaggcctgtcagatgctgcttagaggtaccttctatcagggctaccgctgccatcggtgccgggcatctgcacacaaggagtgtctggggagggtccctccatgtggccgacatgggcaagatttcccaggaactatgaagaaggacaaactacatcgcagggctcaggacaaaaagaggaatgagctgggtctgcccaagatggaggtgtttcaggaatactacgggcttcctccaccccctggagccattggaccctttctacggctcaaccctggagacattgtggagctcacgaaggctgaggctgaacagaactggtgggagggcagaaatacatctactaatgaaattggctggtttccttgtaacagggtgaagccctatgtccatggccctcctcaggacctgtctgttcatctctggtacgcaggccccatggagcgggcaggggcagagagcatcctggccaaccgctcggacgggactttcttggtgcggcagagggtgaaggatgcagcagaatttgccatcagcattaaatataacgtcgaggtcaagcacattaaaatcatgacagcagaaggactgtaccggatcacagagaaaaaggctttccgggggcttacggagctggtggagttttaccagcagaactctctaaaggattgcttcaagtctctggacaccaccttgcagttccccttcaaggagcctgaaaagagaaccatcagcaggccagcagtgggaagcacaaagtattttggcacagccaaagcccgctatgacttctgcgcccgagaccgatcagagctgtcgctcaaggagggtgacatcatcaagatccttaacaagaagggacagcaaggctggtggcgaggggagatctatggccgggttggctggttccctgccaactacgtggaggaagattattctgaatactgctgagccctggtgccttggcagagagacgagaaactccaggctctgagcccggcgtgggcaggcagcggagccaggggctgtgacagctcccggcgggtggagactttgggatggactggaggaggccagcgtccagctggcggtgctcccgggatgtgccctgacatggttaatttataacaccccgatttcctcttgggtcccctcaagcagacggggctcaagggggttacatttaataaaaggatgaagatggatagaaaaaaagg

SEQ ID NO: 44245 - DNA, 1235 bp, Homo sapiens
tgttttacttattgtcatttaccttgatgactaggttttttggctctcacttacattttgcacctgaggctcgtgactcattctccttcccctacttctgtccgggtgaccacagagatgggcacacagtgagccttcaggaaatgcctggtgaagccatcgccaaattccagacacccagccagacccaaagggctgagccatccccccgaatccatgtgtcaaaccttagtggtgacctgtagaagtggaagcccgctccccatgtctgggctccggcccctgcctccacggggcctaccttggtgctgaagggctgttagagccaggctgtcaccaacttaaaaaatcaaaggggttcagggggaaaggcaacctccatatggcaatatggggacccaggcacggggacgccctcctcaggacctgtctgttcatctctggtacgcaggccccatggagcgggcaggggcagagagcatcctggccaaccgctcggacgggactttcttggtgcggcagagggtgaaggatgcagcagaatttgccatcagcattaaatataacgtcgaggtcaagcacattaaaatcatgacagcagaaggactgtaccggatcacagagaaaaaggctttccgggggcttacggagctggtggagttttaccagcagaactctctaaaggattgcttcaagtctctggacaccaccttgcagttccccttcaaggagcctgaaaagagaaccatcagcaggccagcagtgggaagcacaaagtattttggcacagccaaagcccgctatgacttctgcgcccgagaccgatcagagctgtcgctcaaggagggtgacatcatcaagatccttaacaagaagggacagcaaggctggtggcgaggggagatctatggccgggttggctggttccctgccaactacgtggaggaagattattctgaatactgctgagccctggtgccttggcagagagacgagaaactccaggctctgagcccggcgtgggcaggcagcggagccaggggctgtgacagctcccggcgggtggagactttgggatggactggaggaggccagcgtccagctggcggtgctcccgggatgtgccctgacatggttaatttataacaccccgatttcctcttgggtcccctcaagcagacggggctcaagggggttacatttaataaaaggatgaagatggatagaaaaaaagg

SEQ ID NO: 44246 - DNA, 1365 bp, Homo sapiens
ggcacgagggtggtgcacgcctatagtctcagctactcaggaagttgaggcaggaggatcgcttgagcccaggagtttgatgctgcagtgagctatgattgtgctaccactgtactccagactggacaaaagattcctgtgccttaagaacattagaaccttcctgtccacctgctgtgagaagttcggcctcaagcggagcgagctcttcgaagcctttgacctcttcgatgtgcaggattttggcaaggtcatctacaccctgtctgctctgtcctggaccccgatcgcccagaacagggggatcatgcccttccccaccgaggaggagagtgtaggtgatgaagacatctacagtggcctgtccgaccagatcgacgacacggtggaggaggatgaggacctgtatgactgcgtggagaatgaggaggcggaaggcgacgagatctatgaggacctcatgcgctcggagcccgtgtccatgccgcccaagatgacagagtatgacaagcgctgctgctgcctgcgggagatccagcagacggaggagaagtacactgacacgctgggctccatccagcagcatttcttgaagcccctgcaacggttcctgaaacctcaagacattgagatcatctttatcaacattgaggacctgcttcgtgttcatactcacttcctaaaggagatgaaggaagccctgggcacccctggcgcagccaatctctaccaggtcttcatcaaatacaaggagaggttcctcgtctatggccgctactgcagccaggtggagtcagccagcaaacacctggaccgtgtggccgcagcccgggaggacgtgcagatgaagctggaggaatgttctcagagagccaacaacgggaggttcaccctgcgggacctgctgatggtgcctatgcagcgagttctcaaatatcacctccttctccaggagctggtgaaacacacgcaggaggcgatggagaaggagaacctgcggctggccctggatgccatgagggacctggctcagtgcgtgaacgaggtcaagcgagacaacgagacactgcgacagatcaccaatttccagctgtccattgagaacctggaccagtctctggctcactatggccggcccaagatcgacggggaactcaagatcacctcggtggaacggcgctccaagatggacaggtatgccttcctgctcgacaaagctctactcatctgtaagcgcaggggagactcctatgacctcaaggactttgtaaacctgcacagcttccaggttcgggatgactcttcaggagaccgagacaacaagaaggtggggctttgacgccggaactatggggtcctccacgc

SEQ ID NO: 44247 - DNA, 287 bp, Homo sapiens
atgtcagaaatgacagacatagaattcagaatatggatggccaaaaaaactcaaccagattcaagagaaaaattaaatccaacaaaaataacctagaaaaatgatccaagttttgaaagatgacatacgtttattaagaaagaactaagcagaatttctggaattgaaaaatttatgacagaaatttcaaattacagttggaagccttaacaacagaccagaccatgcagaaaaaagaatttctcagttcaaagaccattccttcaagtcaacccagtcagacaaaa

SEQ ID NO: 44248 - DNA, 416 bp, Homo sapiens
  misc_feature (328)..(328): n is a, c, g, or t
gaggcaggtggatcacctgaggtcaggagtttgagacaagcctagccaacatggcaaaaccctgtctctgctaaaaatagaaaaattagccgggtgtgatggcacgtgcctgtagtcccagctactcgggagactgaggctggagtatggcttgaacctgggaggcagaggttacagtgagccgagattgcgccattgcactccagcctgggtgacagagagagatttcatctaaaaataaaattttttttaaacaggcgtaagccactgcgcccagccaatttaatttaatttttaaaacattttttaaatctttttaaaaattaanaaaactgttcattgaaatggactttgtcttagtccgttttttgttcctgtatctgaaaacctgagactgtgtaatttataaaaaaaaa

SEQ ID NO: 44249 - DNA, 217 bp, Homo sapiens
ggggttattgttttgtcatagcaacctggcctactagaaagaataaaaaatagacccatagaaccagagttctagttcaactctcccacttagctgtgtgctttttagtaagtcccttgacgtcccaagggtccgcttttctcactgttctgtgaagtatcctatgatttttataggtggagggttgtgttaaacatgaagaggccaattacaagca

SEQ ID NO: 44250 - DNA, 499 bp, Homo sapiens
acttttgaatatttatgatggctcataaaacatttattgaggtggctgcgaggtatataataccatgttaggtgctttagacaacacaggatataacatatatattgctagattataatccattggggaactacaacaggcataaaaacttaagtatctgtgcaagaaatctcacaaagtagtgtgttattttcatgagctgtaaatacggtactagaagaattcagacatgagtgaatgcttttaaaaggcagagcagggtgaataaatatcatgtggactatgtctactatttatttgtaacaaaaactttaaagatattatttcctatacgttttaagaattattccagctgggcacagtggctgacgcctgtaatcccgatattttaagaggccaaggcagatggattgcatgagccccggagttcaaggctgcagtgagcgattatgacaccactgtactacagtctgggcaatagagtgagactctgtctctc

SEQ ID NO: 44251 - DNA, 460 bp, Homo sapiens
ttctgcaagggaggaggactccacacacttccccagttcagggctggggctgattcatggaggatgatctggggcgagtaggatgggaggaactgacattctgggcagaaccagagtcctgtttcatgagttcggaaaagcagtctgcagggctctcccaggccaccactgctgctgccgtgtggctccccatggtgggtgctctgttttccttctcggggccccactgccttcctagaaaggctgaccctggccgaggggaagcctgtggcagtagtgtgcccttctctttgccctctatgtcagccgggcagcaggagagtggggactgggaggcactttctgccccaatgctgaagtctgcgtttgttggatgtatggaacagccagcctcaccatcctgccagtgttgcccagtcctgggacttctcgggccttgatttccccttctgtgaaaggg

SEQ ID NO: 44252 - DNA, 927 bp, Homo sapiens
agtaaaaggcctagagatcttcaatgaagtgtcccttttagccaaaccaggccttgcagaaattgtcctcaaaagcaccaagggagaacaaagccaagtgcagaattacccaagggtcacacattttgtattcattttcttataatttgcccaaatgatttgaagtacagcaaaacctgaagttttgcaaagagttactgtaaactgaacttaaaaatgtcagagtgctcggtgacccacttctccagaccctgtcaacctgtgaaaatattggcctttattcagatctctcaagaagttacgcgcagagtttggaaggtctaggcaaaggttattagtcaagtgttcttacagtgtcaacgctcaattcccacaagcgtgagaaagagagacctgtcattcctgagggtgatgacatacatttactggagcttatataatttatcagataagacagcagtctccttcagggtagaaagtgtgttttctacattgatttagtacaaaacaaaaagaaaaggggatatttcaaattttataattatttttctgctaagctgattcagtgtgatttaagcatatttttcaaatcatgaatctgattccatatacatatgtgccttatattgtgataatttatttttaagtgaaatatgctatcatagcctgactttatgtatagtggtgacaacttgcaggatcgcatttctgtaaccaaacggccgacagctgaggtgtagatgcttcctatggtctgtagaataatcactgggcttgttctctagctatgtctgtatgcaatcgcgacagtgttgatcaaaacccatgatcattctctccaaaggtctttgtcactaagccactagggattctgaaaagttcgtgagctgaaacaaataaattgagttggaagattaaaaaagactg

SEQ ID NO: 44253 - DNA, 344 bp, Homo sapiens
cattgatattttgtaattggcaaatgttttgatgactgtctactctttataatttagtgttactttaaataatatgtaaatactaaaatcaataagcttcacttatatagaaagtattcagtaaaaaacataagggaaaactcttccaaaaactagagtgttggaaaaagagaccaaaaatgtaacttgacagtggagaaacctgacaaataccaccttaagccaggtgactgaggttaacatcaatagtgatgaaccatatttgatagtatgtagccttgatgtgatgtgatgataataccacacttcttctgtggtcttcctccaaaaaatattagcccagt

SEQ ID NO: 44254 - DNA, 5920 bp, Homo sapiens
cggaacgcaggcggagcgcaagtccgtcagccagtcagtccgccagtccgccagcccagtacctctctctcctcggccctcgtaagctgtccgcggtctgtttggcccgaacggcggcggaggcgctgatcatggcgacattcatctcggtgcagctgaaaaagacctcagaggtggacctggccaagccgctggtgaagttcatccagcagacttacccaagcggcggggaagagcaggcccagtactgccgcgcggcggaggagctcagcaagctgcgccgcgccgcagtcggtcgtccgctggacaagcacgagggcgcgctcgagacgctcctgagatattatgatcagatttgttctattgaacccaaattcccattttctgaaaatcagatctgcttgacatttacctggaaggatgctttcgataaaggttcactttttggaggctctgtaaaactggctcttgcaagcttaggatatgaaaagagctgtgtgttgttcaattgtgcagccttagctagccaaattgcagcagaacagaacctggataatgatgaaggattgaaaatcgctgctaaacattaccagtttgctagtggtgcctttttacatattaaagagacggttttatctgccttaagtcgagagccgaccgtggacatatctccagatactgttgggaccctcagtcttattatgctggcacaggctcaagaagtattttttttaaaagccacaagagataaaatgaaagatgccatcatagctaaattggctaatcaggctgcagattattttggtgatgctttcaaacagtgtcaatacaaagatactctccccaaggaggtgttccctgtcttggctgcaaagcactgtatcatgcaggccaatgctgagtaccatcagtctatcctggcaaaacagcagaagaaatttggagaagaaattgcaaggttacagcatgcagcagaactgattaaaacagtggcatctcgctatgatgaatatgttaatgtgaaggatttttctgacaaaatcaatcgtgcccttgctgcagcaaagaaggataatgacttcatttatcatgatcgagttccagaccttaaagatctagatcctattggcaaagccacacttgtgaaatctaccccggtcaatgtacccatcagtcagaaatttactgatctgtttgagaagatggttcccgtgtcagtacagcagtctttggctgcctataatcagaggaaagccgatttggttaacagatcaattgctcagatgagagaagccaccactttggcaaatggggtgctagcttcccttaatcttccagcagcaattgaagatgtgtctggagacactgtacctcagtctatattgactaaatccagatctgtgattgaacagggaggcatccagactgttgatcagttgattaaagaactgcctgaattactgcaacgaaatagagaaatcctagatgagtcattaaggttgttggatgaagaagaagcaaccgataatgatttaagagcaaaatttaaggaacgttggcaaaggacaccatccaatgaactgtataagcctttaagagcagagggaaccaacttcagaacagttttagataaagctgtgcaggcagatggacaagtgaaagaatgttaccagtctcatcgtgacaccatcgtgcttttgtgtaagccagagcctgagctgaatgctgccatcccttctgctaatccagcaaagaccatgcagggcagtgaggttgtaaatgtcttaaaatccttattgtcaaatcttgatgaagtaaagaaggaaagagagggtctggagaatgacttgaaatctgtgaattttgacatgacaagcaagtttttgacagccctggctcaagatggtgtgataaatgaagaagctctttctgttactgaactagatcgagtctatggaggtcttacaactaaagtccaagaatctctaaagaaacaggagggacttcttaaaaatattcaggtctcacatcaggaattttcaaaaatgaaacaatctaataatgaagctaacttaagagaagaagttttgaagaatttagctactgcatatgacaactttgttgaacttgtagctaatttgaaggaaggcacaaagttttacaatgagttgactgaaatcctggtcaggttccagaacaaatgcagtgatatagtttttgcacggaagacagaaagagatgaactcttaaaggacttgcaacaaagcattgccagagaacctagtgctccttcaattcctacacctgcgtatcagtcctcaccagcaggaggacatgcaccaactcctccaactccagcgccaagaaccatgccgcctactaagccccagcccccagccaggcctccaccacctgtgcttccagcaaatcgagctccttctgctactgctccatctccagtgggggctgggactgctgcgccagctccatcacaaacgcctggctcagctcctcctccacaggcgcagggaccaccctatcccacctatccaggatatcctgggtattgccaaatgcccatgcccatgggctataatccttatgcgtatggccagtataatatgccatatccaccagtgtatcaccagagtcctggacaggctccatacccgggaccccagcagccttcataccccttccctcagcccccacagcagtcttactatccacagcagtaatatgtctgctcagcagctcagctgattcagatcagagggaaagaaataccaaccctgcaataagtgtactaaactctacgctctggttaatgtaatgtactctcctggactgaatgcagtgtataatttctgtctacagctagaagctgtgccccagttccacatttgattacacatgtgagatttgctgctgttgcagtataaacactaggtataataggatttgaaattgcattacagttcataaaaattgaaaatgagaaattaaacctgcaagtgaaacatttgaaacgattatactttctacataagacatggttgggacatcagatacttacaaagatggtttaagtatggatactagagaaaattaagttttctttctctttggtttattgatttggtttaatttccattatgctattttgcataatcaaggcactgtaaatcttataattttaaaataaattacttaagaacagttgtcattgttatgttttgttattgattctcattactgtctaattttttttctggtattagtctcattttgtatgtatataagttaaacagatactgtttttaagtgcatgaatagtacaagttattatcaaggatgttttacagggaaatcaaaagaatattatcatactttatctttcgtatgctgattagtaaacgatttttgacatttattttagaaagtcctataatgtggaagaaacaaacagttgctaccaaagattcttcaaataaacatacaaataaatgtgtatatttaatgttttattgttagcttctccagaaaattgatgcaaattctggtaataattcttgcattttttccccataacctggttaaaataaatacgccattggcaatacttcataatgtaatggaattgtttggggaacacttactgtaccctctcatcctttttccaccttactgtgttaacttagtgacatttaatgcccaatatgtatgaatagatctaagccatttaattttttttccttaaagattggactattttataattcaaggagcatacaaaacaatggttgggaacatatgccaattatggaataggctatgtatttaatattaatctctgccattaggatatctactcactgtataaacctcagtaaaaatagtgaagacatgcatcatggaatgagaaaatgagaaaggaatgagttgtctaacatcacagtgggatctgttttttgtgaggttcatttctgaacacattaggcatatgagcagatttccagtgaatctatttatgtttattttctgagtttcaacgctgaccttttcttgcattattgtttcattttaatgatagtgttacttgtcccactgttgttttcattgagtttggatttatattttaaatgttcgaatgaaagtatgattgtaaaagggagtgaattggtttaaaaatatatgtatattttaaactttgttgtgtgtaggaaacatgaaggcatgttaattcaatataaatgacctttgatttcatggaatattaaagttggtttaaagtccaatagttaaaccttagcaaaaatagctttttactttatcagttgctaagatttaatactttggattcatcaaagtgtgacatgggcttgtttgacttctgtaagtggcatttaagttccacattcttattacttgaggtactttatactaacataagacagtgagagttagaggtattacaagttgctagtttataatgtcttactaatgcagaaacaaggaaaaaagcaaaattggcctgaatattctcttggggaaagagggcaccaaagaaaagggtaagtgcatctgagggccaaaagagatgtataagccttttagcccattccccatgctgggcctgctcacagagccacaggaagatcattcagaaactaggaaaggaggcccccacagctgatcctgccacagcacacctgactcactcggctctgttagtgtaaccttttaaatgtagcaacacaaaccctttccctcttgtcagttcactcatcctttggtttctttttaatcacctgtgtctgggcacagacaatcacaataaatgcagccctttattactgttaaggatcatactgttggtttggagttggaagggtactactctgtgattcaggtgtgttgtacccatatttataattaggctttattatcttcctaaatcaaggaaaggaaatcatccccagaccatttatgctgagctttggaatactattttaaactggattgtacttaaataatgaagctctgcatagaggaactagtcagaagtggggaaaacactgtctaatttttatcagtctggtataaagtattgatctaagagaactctccctgtgccccttggtctttattctcaattaagaaaaacagtcacatgtcacgacaaaccaatcaatctttatgagatattcctgtatccataccccagcttgtttgcaatttataaacctccccttcaaaactaaggagttgcagaaaaaaatggatttcacagagccttgtgtccctaaagttctgtcccagtcagcagtctttatagtccaaacagattataaaaaatgttttccatttgaactttacagtttgcaaaagtgcttttatacattttctaatttcagaaacaggataatataatttgttaagtgggtttcagtttgctaatagggattttttgtgttttgttttttaattttcagcatctcttgaagaatcttgctacagccaaatggcatctcactttttaaagacgtttgcaattattagttgattcacagtacagaacaaggtataaaggaaaaaaccctgctaggtagtgttataattgctagattaaaaatagactagaacaggttcattttaagatttacttggaagagcaaagaaggaaaaattatatttttaaagaaagagaatattcaggctttatttctggtatgaagtttatattttttaaaaaaatcctatattatcacaccagagattttagattcttttctggttagaaacattgctggtagttggattatatttttattgtattcatttatcttagggggaacattgtaaagaaacaaaaaggtccagatgaatgtatgctagaaataaaagttgaaagattctt

SEQ ID NO: 44255 - DNA, 5029 bp, Homo sapiens
aacggcccaggctggtaccggtcggagtgtaggatcagcagaagaaatttggagaagaaattgcaaggttacagcatgcagcagaactgattaaaacagtggcatctcgctatgatgaatatgttaatgtgaaggatttttctgacaaaatcaatcgtgcccttgctgcagcaaagaaggataatgacttcatttatcatgatcgagttccagaccttaaagatctagatcctattggcaaagccacacttgtgaaatctaccccggtcaatgtacccatcagtcagaaatttactgatctgtttgagaagatggttcccgtgtcagtacagcagtctttggctgcctataatcagaggaaagccgatttggttaacagatcaattgctcagatgagagaagccaccactttggcaaatggggtgctagcttcccttaatcttccagcagcaattgaagatgtgtctggagacactgtacctcagtctatattgactaaatccagatctgtgattgaacagggaggcatccagactgttgatcagttgattaaagaactgcctgaattactgcaacgaaatagagaaatcctagatgagtcattaaggttgttggatgaagaagaagcaaccgataatgatttaagagcaaaatttaaggaacgttggcaaaggacaccatccaatgaactgtataagcctttaagagcagagggaaccaacttcagaacagttttagataaagctgtgcaggcagatggacaagtgaaagaatgttaccagtctcatcgtgacaccatcgtgcttttgtgtaagccagagcctgagctgaatgctgccatcccttctgctaatccagcaaagaccatgcagggcagtgaggttgtaaatgtcttaaaatccttattgtcaaatcttgatgaagtaaagaaggaaagagagggtctggagaatgacttgaaatctgtgaattttgacatgacaagcaagtttttgacagccctggctcaagatggtgtgataaatgaagaagctctttctgttactgaactagatcgagtctatggaggtcttacaactaaagtccaagaatctctaaagaaacaggagggacttcttaaaaatattcaggtctcacatcaggaattttcaaaaatgaaacaatctaataatgaagctaacttaagagaagaagttttgaagaatttagctactgcatatgacaactttgttgaacttgtagctaatttgaaggaaggcacaaagttttacaatgagttgactgaaatcctggtcaggttccagaacaaatgcagtgatatagtttttgcacggaagacagaaagagatgaactcttaaaggacttgcaacaaagcattgccagagaacctagtgctccttcaattcctacacctgcgtatcagtcctcaccagcaggaggacatgcaccaactcctccaactccagcgccaagaaccatgccgcctactaagccccagcccccagccaggcctccaccacctgtgcttccagcaaatcgagctccttctgctactgctccatctccagtgggggctgggactgctgcgccagctccatcacaaacgcctggctcagctcctcctccacaggcgcagggaccaccctatcccacctatccaggatatcctgggtattgccaaatgcccatgcccatgggctataatccttatgcgtatggccagtataatatgccatatccaccagtgtatcaccagagtcctggacaggctccatacccgggaccccagcagccttcataccccttccctcagcccccacagcagtcttactatccacagcagtaatatgtctgctcagcagctcagctgattcagatcagagggaaagaaataccaaccctgcaataagtgtactaaactctacgctctggttaatgtaatgtactctcctggactgaatgcagtgtataatttctgtctacagctagaagctgtgccccagttccacatttgattacacatgtgagatttgctgctgttgcagtataaacactaggtataataggatttgaaattgcattacagttcataaaaattgaaaatgagaaattaaacctgcaagtgaaacatttgaaacgattatactttctacataagacatggttgggacatcagatacttacaaagatggtttaagtatggatactagagaaaattaagttttctttctctttggtttattgatttggtttaatttccattatgctattttgcataatcaaggcactgtaaatcttataattttaaaataaattacttaagaacagttgtcattgttatgttttgttattgattctcattactgtctaattttttttctggtattagtctcattttgtatgtatataagttaaacagatactgtttttaagtgcatgaatagtacaagttattatcaaggatgttttacagggaaatcaaaagaatattatcatactttatctttcgtatgctgattagtaaacgatttttgacatttattttagaaagtcctataatgtggaagaaacaaacagttgctaccaaagattcttcaaataaacatacaaataaatgtgtatatttaatgttttattgttagcttctccagaaaattgatgcaaattctggtaataattcttgcattttttccccataacctggttaaaataaatacgccattggcaatacttcataatgtaatggaattgtttggggaacacttactgtaccctctcatcctttttccaccttactgtgttaacttagtgacatttaatgcccaatatgtatgaatagatctaagccatttaattttttttccttaaagattggactattttataattcaaggagcatacaaaacaatggttgggaacatatgccaattatggaataggctatgtatttaatattaatctctgccattaggatatctactcactgtataaacctcagtaaaaatagtgaagacatgcatcatggaatgagaaaatgagaaaggaatgagttgtctaacatcacagtgggatctgttttttgtgaggttcatttctgaacacattaggcatatgagcagatttccagtgaatctatttatgtttattttctgagtttcaacgctgaccttttcttgcattattgtttcattttaatgatagtgttacttgtcccactgttgttttcattgagtttggatttatattttaaatgttcgaatgaaagtatgattgtaaaagggagtgaattggtttaaaaatatatgtatattttaaactttgttgtgtgtaggaaacatgaaggcatgttaattcaatataaatgacctttgatttcatggaatattaaagttggtttaaagtccaatagttaaaccttagcaaaaatagctttttactttatcagttgctaagatttaatactttggattcatcaaagtgtgacatgggcttgtttgacttctgtaagtggcatttaagttccacattcttattacttgaggtactttatactaacataagacagtgagagttagaggtattacaagttgctagtttataatgtcttactaatgcagaaacaaggaaaaaagcaaaattggcctgaatattctcttggggaaagagggcaccaaagaaaagggtaagtgcatctgagggccaaaagagatgtataagccttttagcccattccccatgctgggcctgctcacagagccacaggaagatcattcagaaactaggaaaggaggcccccacagctgatcctgccacagcacacctgactcactcggctctgttagtgtaaccttttaaatgtagcaacacaaaccctttccctcttgtcagttcactcatcctttggtttctttttaatcacctgtgtctgggcacagacaatcacaataaatgcagccctttattactgttaaggatcatactgttggtttggagttggaagggtactactctgtgattcaggtgtgttgtacccatatttataattaggctttattatcttcctaaatcaaggaaaggaaatcatccccagaccatttatgctgagctttggaatactattttaaactggattgtacttaaataatgaagctctgcatagaggaactagtcagaagtggggaaaacactgtctaatttttatcagtctggtataaagtattgatctaagagaactctccctgtgccccttggtctttattctcaattaagaaaaacagtcacatgtcacgacaaaccaatcaatctttatgagatattcctgtatccataccccagcttgtttgcaatttataaacctccccttcaaaactaaggagttgcagaaaaaaatggatttcacagagccttgtgtccctaaagttctgtcccagtcagcagtctttatagtccaaacagattataaaaaatgttttccatttgaactttacagtttgcaaaagtgcttttatacattttctaatttcagaaacaggataatataatttgttaagtgggtttcagtttgctaatagggattttttgtgttttgttttttaattttcagcatctcttgaagaatcttgctacagccaaatggcatctcactttttaaagacgtttgcaattattagttgattcacagtacagaacaaggtataaaggaaaaaaccctgctaggtagtgttataattgctagattaaaaatagactagaacaggttcattttaagatttacttggaagagcaaagaaggaaaaattatatttttaaagaaagagaatattcaggctttatttctggtatgaagtttatattttttaaaaaaatcctatattatcacaccagagattttagattcttttctggttagaaacattgctggtagttggattatatttttattgtattcatttatcttagggggaacattgtaaagaaacaaaaaggtccagatgaatgtatgctagaaataaaagttgaaagattctt

SEQ ID NO: 44256 - DNA, 5175 bp, Homo sapiens
gcacagtgttccgttacatcctgttgggccattagttcagtcctgtcatggagagaagaaagtcacctacaaagacttggaagctacctctgcagcattcctggaggtgttccctgtcttggctgcaaagcactgtatcatgcaggccaatgctgagtaccatcagtctatcctggcaaaacagcagaagaaatttggagaagaaattgcaaggttacagcatgcagcagaactgattaaaacagtggcatctcgctatgatgaatatgttaatgtgaaggatttttctgacaaaatcaatcgtgcccttgctgcagcaaagaaggataatgacttcatttatcatgatcgagttccagaccttaaagatctagatcctattggcaaagccacacttgtgaaatctaccccggtcaatgtacccatcagtcagaaatttactgatctgtttgagaagatggttcccgtgtcagtacagcagtctttggctgcctataatcagaggaaagccgatttggttaacagatcaattgctcagatgagagaagccaccactttggcaaatggggtgctagcttcccttaatcttccagcagcaattgaagatgtgtctggagacactgtacctcagtctatattgactaaatccagatctgtgattgaacagggaggcatccagactgttgatcagttgattaaagaactgcctgaattactgcaacgaaatagagaaatcctagatgagtcattaaggttgttggatgaagaagaagcaaccgataatgatttaagagcaaaatttaaggaacgttggcaaaggacaccatccaatgaactgtataagcctttaagagcagagggaaccaacttcagaacagttttagataaagctgtgcaggcagatggacaagtgaaagaatgttaccagtctcatcgtgacaccatcgtgcttttgtgtaagccagagcctgagctgaatgctgccatcccttctgctaatccagcaaagaccatgcagggcagtgaggttgtaaatgtcttaaaatccttattgtcaaatcttgatgaagtaaagaaggaaagagagggtctggagaatgacttgaaatctgtgaattttgacatgacaagcaagtttttgacagccctggctcaagatggtgtgataaatgaagaagctctttctgttactgaactagatcgagtctatggaggtcttacaactaaagtccaagaatctctaaagaaacaggagggacttcttaaaaatattcaggtctcacatcaggaattttcaaaaatgaaacaatctaataatgaagctaacttaagagaagaagttttgaagaatttagctactgcatatgacaactttgttgaacttgtagctaatttgaaggaaggcacaaagttttacaatgagttgactgaaatcctggtcaggttccagaacaaatgcagtgatatagtttttgcacggaagacagaaagagatgaactcttaaaggacttgcaacaaagcattgccagagaacctagtgctccttcaattcctacacctgcgtatcagtcctcaccagcaggaggacatgcaccaactcctccaactccagcgccaagaaccatgccgcctactaagccccagcccccagccaggcctccaccacctgtgcttccagcaaatcgagctccttctgctactgctccatctccagtgggggctgggactgctgcgccagctccatcacaaacgcctggctcagctcctcctccacaggcgcagggaccaccctatcccacctatccaggatatcctgggtattgccaaatgcccatgcccatgggctataatccttatgcgtatggccagtataatatgccatatccaccagtgtatcaccagagtcctggacaggctccatacccgggaccccagcagccttcataccccttccctcagcccccacagcagtcttactatccacagcagtaatatgtctgctcagcagctcagctgattcagatcagagggaaagaaataccaaccctgcaataagtgtactaaactctacgctctggttaatgtaatgtactctcctggactgaatgcagtgtataatttctgtctacagctagaagctgtgccccagttccacatttgattacacatgtgagatttgctgctgttgcagtataaacactaggtataataggatttgaaattgcattacagttcataaaaattgaaaatgagaaattaaacctgcaagtgaaacatttgaaacgattatactttctacataagacatggttgggacatcagatacttacaaagatggtttaagtatggatactagagaaaattaagttttctttctctttggtttattgatttggtttaatttccattatgctattttgcataatcaaggcactgtaaatcttataattttaaaataaattacttaagaacagttgtcattgttatgttttgttattgattctcattactgtctaattttttttctggtattagtctcattttgtatgtatataagttaaacagatactgtttttaagtgcatgaatagtacaagttattatcaaggatgttttacagggaaatcaaaagaatattatcatactttatctttcgtatgctgattagtaaacgatttttgacatttattttagaaagtcctataatgtggaagaaacaaacagttgctaccaaagattcttcaaataaacatacaaataaatgtgtatatttaatgttttattgttagcttctccagaaaattgatgcaaattctggtaataattcttgcattttttccccataacctggttaaaataaatacgccattggcaatacttcataatgtaatggaattgtttggggaacacttactgtaccctctcatcctttttccaccttactgtgttaacttagtgacatttaatgcccaatatgtatgaatagatctaagccatttaattttttttccttaaagattggactattttataattcaaggagcatacaaaacaatggttgggaacatatgccaattatggaataggctatgtatttaatattaatctctgccattaggatatctactcactgtataaacctcagtaaaaatagtgaagacatgcatcatggaatgagaaaatgagaaaggaatgagttgtctaacatcacagtgggatctgttttttgtgaggttcatttctgaacacattaggcatatgagcagatttccagtgaatctatttatgtttattttctgagtttcaacgctgaccttttcttgcattattgtttcattttaatgatagtgttacttgtcccactgttgttttcattgagtttggatttatattttaaatgttcgaatgaaagtatgattgtaaaagggagtgaattggtttaaaaatatatgtatattttaaactttgttgtgtgtaggaaacatgaaggcatgttaattcaatataaatgacctttgatttcatggaatattaaagttggtttaaagtccaatagttaaaccttagcaaaaatagctttttactttatcagttgctaagatttaatactttggattcatcaaagtgtgacatgggcttgtttgacttctgtaagtggcatttaagttccacattcttattacttgaggtactttatactaacataagacagtgagagttagaggtattacaagttgctagtttataatgtcttactaatgcagaaacaaggaaaaaagcaaaattggcctgaatattctcttggggaaagagggcaccaaagaaaagggtaagtgcatctgagggccaaaagagatgtataagccttttagcccattccccatgctgggcctgctcacagagccacaggaagatcattcagaaactaggaaaggaggcccccacagctgatcctgccacagcacacctgactcactcggctctgttagtgtaaccttttaaatgtagcaacacaaaccctttccctcttgtcagttcactcatcctttggtttctttttaatcacctgtgtctgggcacagacaatcacaataaatgcagccctttattactgttaaggatcatactgttggtttggagttggaagggtactactctgtgattcaggtgtgttgtacccatatttataattaggctttattatcttcctaaatcaaggaaaggaaatcatccccagaccatttatgctgagctttggaatactattttaaactggattgtacttaaataatgaagctctgcatagaggaactagtcagaagtggggaaaacactgtctaatttttatcagtctggtataaagtattgatctaagagaactctccctgtgccccttggtctttattctcaattaagaaaaacagtcacatgtcacgacaaaccaatcaatctttatgagatattcctgtatccataccccagcttgtttgcaatttataaacctccccttcaaaactaaggagttgcagaaaaaaatggatttcacagagccttgtgtccctaaagttctgtcccagtcagcagtctttatagtccaaacagattataaaaaatgttttccatttgaactttacagtttgcaaaagtgcttttatacattttctaatttcagaaacaggataatataatttgttaagtgggtttcagtttgctaatagggattttttgtgttttgttttttaattttcagcatctcttgaagaatcttgctacagccaaatggcatctcactttttaaagacgtttgcaattattagttgattcacagtacagaacaaggtataaaggaaaaaaccctgctaggtagtgttataattgctagattaaaaatagactagaacaggttcattttaagatttacttggaagagcaaagaaggaaaaattatatttttaaagaaagagaatattcaggctttatttctggtatgaagtttatattttttaaaaaaatcctatattatcacaccagagattttagattcttttctggttagaaacattgctggtagttggattatatttttattgtattcatttatcttagggggaacattgtaaagaaacaaaaaggtccagatgaatgtatgctagaaataaaagttgaaagattctt

SEQ ID NO: 44257 - DNA, 2096 bp, Homo sapiens
cggaacgcaggcggagcgcaagtccgtcagccagtcagtccgccagtccgccagcccagtacctctctctcctcggccctcgtaagctgtccgcggtctgtttggcccgaacggcggcggaggcgctgatcatggcgacattcatctcggtgcagctgaaaaagacctcagaggtggacctggccaagccgctggtgaagttcatccagcagacttacccaagcggcggggaagagcaggcccagtactgccgcgcggcggaggagctcagcaagctgcgccgcgccgcagtcggtcgtccgctggacaagcacgagggcgcgctcgagacgctcctgagatattatgatcagatttgttctattgaacccaaattcccattttctgaaaatcagatctgcttgacatttacctggaaggatgctttcgataaaggttcactttttggaggctctgtaaaactggctcttgcaagcttaggatatgaaaagagctgtgtgttgttcaattgtgcagccttagctagccaaattgcagcagaacagaacctggataatgatgaaggattgaaaatcgctgctaaacattaccagtttgctagtggtgcctttttacatattaaagagacggttttatctgccttaagtcgagagccgaccgtggacatatctccagatactgttgggaccctcagtcttattatgctggcacaggctcaagaagtattttttttaaaagccacaagagataaaatgaaagatgccatcatagctaaattggctaatcaggctgcagattattttggtgatgctttcaaacagtgtcaatacaaagatactctccccaaggaggtgttccctgtcttggctgcaaagcactgtatcatgcaggccaatgctgagtaccatcagtctatcctggcaaaacagcagaagaaatttggagaagaaattgcaaggttacagcatgcagcagaactgattaaaacagtggcatctcgctatgatgaatatgttaatgtgaaggatttttctgacaaaatcaatcgtgcccttgctgcagcaaagaaggataatgacttcatttatcatgatcgagttccagaccttaaagatctagatcctattggcaaagccacacttgtgaaatctaccccggtcaatgtacccatcagtcagaaatttactgatctgtttgagaagatggttcccgtgtcagtacagcagtctttggctgcctataatcagaggaaagccgatttggttaacagatcaattgctcagatgagagaagccaccactttggcaaatggggtgctagcttcccttaatcttccagcagcaattgaagatgtgtctggagacactgtacctcagtctatattgactaaatccagatctgtgattgaacagggaggcatccagactgttgatcagttgattaaagaactgcctgaattactgcaacgaaatagagaaatcctagatgagtcattaaggttgttggatgaagaagaagcaaccgataatgatttaagagcaaaatttaaggaacgttggcaaaggacaccatccaatgaactgtataagcctttaagagcagagggaaccaacttcagaacagttttagataaagctgtgcaggcagatggacaagtgaaagaatgttaccagtctcatcgtgacaccatcgtgcttttgtgtaagccagagcctgagctgaatgctgccatcccttctgctaatccagcaaagaccatgcagggcagtgaggttgtaaatgtcttaaaatccttattgtcaaatcttgatgaagtaaagaaggaaagagagggtctggagaatgacttgaaatctgtgaattttgacatgacaagcaagtttttgacagccctggctcaagatggtgtgataaatgaagaagctctttctgttactgaactagatcgagtctatggaggtcttacaactaaagtccaagaatctctaaagaaacaggagggacttcttaaaaatattcagctctctgagctattatagctattatttcaaatgacaatatagagaagcacctgggaaggtctttctggtggaagg

SEQ ID NO: 44258 - DNA, 3215 bp, Homo sapiens
cggaacgcaggcggagcgcaagtccgtcagccagtcagtccgccagtccgccagcccagtacctctctctcctcggccctcgtaagctgtccgcggtctgtttggcccgaacggcggcggaggcgctgatcatggcgacattcatctcggtgcagctgaaaaagacctcagaggtggacctggccaagccgctggtgaagttcatccagcagacttacccaagcggcggggaagagcaggcccagtactgccgcgcggcggaggagctcagcaagctgcgccgcgccgcagtcggtcgtccgctggacaagcacgagggcgcgctcgagacgctcctgagatattatgatcagatttgttctattgaacccaaattcccattttctgaaaatcagatctgcttgacatttacctggaaggatgctttcgataaaggttcactttttggaggctctgtaaaactggctcttgcaagcttaggatatgaaaagagctgtgtgttgttcaattgtgcagccttagctagccaaattgcagcagaacagaacctggataatgatgaaggattgaaaatcgctgctaaacattaccagtttgctagtggtgcctttttacatattaaagagacggttttatctgccttaagtcgagagccgaccgtggacatatctccagatactgttgggaccctcagtcttattatgctggcacaggctcaagaagtattttttttaaaagccacaagagataaaatgaaagatgccatcatagctaaattggctaatcaggctgcagattattttggtgatgctttcaaacagtgtcaatacaaagatactctccccaaggaggtgttccctgtcttggctgcaaagcactgtatcatgcaggccaatgctgagtaccatcagtctatcctggcaaaacagcagaagaaatttggagaagaaattgcaaggttacagcatgcagcagaactgattaaaacagtggcatctcgctatgatgaatatgttaatgtgaaggatttttctgacaaaatcaatcgtgcccttgctgcagcaaagaaggataatgacttcatttatcatgatcgagttccagaccttaaagatctagatcctattggcaaagccacacttgtgaaatctaccccggtcaatgtacccatcagtcagaaatttactgatctgtttgagaagatggttcccgtgtcagtacagcagtctttggctgcctataatcagaggaaagccgatttggttaacagatcaattgctcagatgagagaagccaccactttggcaaatggggtgctagcttcccttaatcttccagcagcaattgaagatgtgtctggagacactgtacctcagtctatattgactaaatccagatctgtgattgaacagggaggcatccagactgttgatcagttgattaaagaactgcctgaattactgcaacgaaatagagaaatcctagatgagtcattaaggttgttggatgaagaagaagcaaccgataatgatttaagagcaaaatttaaggaacgttggcaaaggacaccatccaatgaactgtataagcctttaagagcagagggaaccaacttcagaacagttttagataaagctgtgcaggcagatggacaagtgaaagaatgttaccagtctcatcgtgacaccatcgtgcttttgtgtaagccagagcctgagctgaatgctgccatcccttctgctaatccagcaaagaccatgcagggcagtgaggttgtaaatgtcttaaaatccttattgtcaaatcttgatgaagtaaagaaggaaagagagggtctggagaatgacttgaaatctgtgaattttgacatgacaagcaagtttttgacagccctggctcaagatggtgtgataaatgaagaagctctttctgttactgaactagatcgagtctatggaggtcttacaactaaagtccaagaatctctaaagaaacaggagggacttcttaaaaatattcaggtctcacatcaggaattttcaaaaatgaaacaatctaataatgaagctaacttaagagaagaagttttgaagaatttagctactgcatatgacaactttgttgaacttgtagctaatttgaaggaaggcacaaagttttacaatgagttgactgaaatcctggtcaggttccagaacaaatgcagtgatatagtttttgcacggaagacagaaagagatgaactcttaaaggacttgcaacaaagcattgccagagaacctagtgctccttcaattcctacacctgcgtatcagtcctcaccagcaggaggacatgcaccaactcctccaactccagcgccaagaaccatgccgcctactaagccccagcccccagccaggcctccaccacctgtgcttccagcaaatcgagctccttctgctactgctccatctccagtgggggctgggactgctgcgccagctccatcacaaacgcctggctcagctcctcctccacaggcgcagggaccaccctatcccacctatccaggatatcctgggtattgccaaatgcccatgcccatgggctataatccttatgcgtatggccagtataatatgccatatccaccagtgtatcaccagagtcctggacaggctccatacccgggaccccagcagccttcataccccttccctcagcccccacagcagtcttactatccacagcagtaatatgtctgctcagcagctcagctgattcagatcagagggaaagaaataccaaccctgcaataagtgtactaaactctacgctctggttaatgtaatgtactctcctggactgaatgcagtgtataatttctgtctacagctagaagctgtgccccagttccacatttgattacacatgtgagatttgctgctgttgcagtataaacactaggtataataggatttgaaattgcattacagttcataaaaattgaaaatgagaaattaaacctgcaagtgaaacatttgaaacgattatactttctacataagacatggttgggacatcagatacttacaaagatggtttaagtatggatactagagaaaattaagttttctttctctttggtttattgatttggtttaatttccattatgctattttgcataatcaaggcactgtaaatcttataattttaaaataaattacttaag

SEQ ID NO: 44259 - DNA, 4193 bp, Homo sapiens
gaactcctaggctcaggtgatcctcctaaagtgctgggattgcaggttgtaaatgtcttaaaatccttattgtcaaatcttgatgaagtaaagaaggaaagagagggtctggagaatgacttgaaatctgtgaattttgacatgacaagcaagtttttgacagccctggctcaagatggtgtgataaatgaagaagctctttctgttactgaactagatcgagtctatggaggtcttacaactaaagtccaagaatctctaaagaaacaggagggacttcttaaaaatattcaggtctcacatcaggaattttcaaaaatgaaacaatctaataatgaagctaacttaagagaagaagttttgaagaatttagctactgcatatgacaactttgttgaacttgtagctaatttgaaggaaggcacaaagttttacaatgagttgactgaaatcctggtcaggttccagaacaaatgcagtgatatagtttttgcacggaagacagaaagagatgaactcttaaaggacttgcaacaaagcattgccagagaacctagtgctccttcaattcctacacctgcgtatcagtcctcaccagcaggaggacatgcaccaactcctccaactccagcgccaagaaccatgccgcctactaagccccagcccccagccaggcctccaccacctgtgcttccagcaaatcgagctccttctgctactgctccatctccagtgggggctgggactgctgcgccagctccatcacaaacgcctggctcagctcctcctccacaggcgcagggaccaccctatcccacctatccaggatatcctgggtattgccaaatgcccatgcccatgggctataatccttatgcgtatggccagtataatatgccatatccaccagtgtatcaccagagtcctggacaggctccatacccgggaccccagcagccttcataccccttccctcagcccccacagcagtcttactatccacagcagtaatatgtctgctcagcagctcagctgattcagatcagagggaaagaaataccaaccctgcaataagtgtactaaactctacgctctggttaatgtaatgtactctcctggactgaatgcagtgtataatttctgtctacagctagaagctgtgccccagttccacatttgattacacatgtgagatttgctgctgttgcagtataaacactaggtataataggatttgaaattgcattacagttcataaaaattgaaaatgagaaattaaacctgcaagtgaaacatttgaaacgattatactttctacataagacatggttgggacatcagatacttacaaagatggtttaagtatggatactagagaaaattaagttttctttctctttggtttattgatttggtttaatttccattatgctattttgcataatcaaggcactgtaaatcttataattttaaaataaattacttaagaacagttgtcattgttatgttttgttattgattctcattactgtctaattttttttctggtattagtctcattttgtatgtatataagttaaacagatactgtttttaagtgcatgaatagtacaagttattatcaaggatgttttacagggaaatcaaaagaatattatcatactttatctttcgtatgctgattagtaaacgatttttgacatttattttagaaagtcctataatgtggaagaaacaaacagttgctaccaaagattcttcaaataaacatacaaataaatgtgtatatttaatgttttattgttagcttctccagaaaattgatgcaaattctggtaataattcttgcattttttccccataacctggttaaaataaatacgccattggcaatacttcataatgtaatggaattgtttggggaacacttactgtaccctctcatcctttttccaccttactgtgttaacttagtgacatttaatgcccaatatgtatgaatagatctaagccatttaattttttttccttaaagattggactattttataattcaaggagcatacaaaacaatggttgggaacatatgccaattatggaataggctatgtatttaatattaatctctgccattaggatatctactcactgtataaacctcagtaaaaatagtgaagacatgcatcatggaatgagaaaatgagaaaggaatgagttgtctaacatcacagtgggatctgttttttgtgaggttcatttctgaacacattaggcatatgagcagatttccagtgaatctatttatgtttattttctgagtttcaacgctgaccttttcttgcattattgtttcattttaatgatagtgttacttgtcccactgttgttttcattgagtttggatttatattttaaatgttcgaatgaaagtatgattgtaaaagggagtgaattggtttaaaaatatatgtatattttaaactttgttgtgtgtaggaaacatgaaggcatgttaattcaatataaatgacctttgatttcatggaatattaaagttggtttaaagtccaatagttaaaccttagcaaaaatagctttttactttatcagttgctaagatttaatactttggattcatcaaagtgtgacatgggcttgtttgacttctgtaagtggcatttaagttccacattcttattacttgaggtactttatactaacataagacagtgagagttagaggtattacaagttgctagtttataatgtcttactaatgcagaaacaaggaaaaaagcaaaattggcctgaatattctcttggggaaagagggcaccaaagaaaagggtaagtgcatctgagggccaaaagagatgtataagccttttagcccattccccatgctgggcctgctcacagagccacaggaagatcattcagaaactaggaaaggaggcccccacagctgatcctgccacagcacacctgactcactcggctctgttagtgtaaccttttaaatgtagcaacacaaaccctttccctcttgtcagttcactcatcctttggtttctttttaatcacctgtgtctgggcacagacaatcacaataaatgcagccctttattactgttaaggatcatactgttggtttggagttggaagggtactactctgtgattcaggtgtgttgtacccatatttataattaggctttattatcttcctaaatcaaggaaaggaaatcatccccagaccatttatgctgagctttggaatactattttaaactggattgtacttaaataatgaagctctgcatagaggaactagtcagaagtggggaaaacactgtctaatttttatcagtctggtataaagtattgatctaagagaactctccctgtgccccttggtctttattctcaattaagaaaaacagtcacatgtcacgacaaaccaatcaatctttatgagatattcctgtatccataccccagcttgtttgcaatttataaacctccccttcaaaactaaggagttgcagaaaaaaatggatttcacagagccttgtgtccctaaagttctgtcccagtcagcagtctttatagtccaaacagattataaaaaatgttttccatttgaactttacagtttgcaaaagtgcttttatacattttctaatttcagaaacaggataatataatttgttaagtgggtttcagtttgctaatagggattttttgtgttttgttttttaattttcagcatctcttgaagaatcttgctacagccaaatggcatctcactttttaaagacgtttgcaattattagttgattcacagtacagaacaaggtataaaggaaaaaaccctgctaggtagtgttataattgctagattaaaaatagactagaacaggttcattttaagatttacttggaagagcaaagaaggaaaaattatatttttaaagaaagagaatattcaggctttatttctggtatgaagtttatattttttaaaaaaatcctatattatcacaccagagattttagattcttttctggttagaaacattgctggtagttggattatatttttattgtattcatttatcttagggggaacattgtaaagaaacaaaaaggtccagatgaatgtatgctagaaataaaagttgaaagattctt

SEQ ID NO: 44260 - DNA, 3876 bp, Homo sapiens
gaaacaggagggacttcttaaaaatattcaggtctcacatcaggaattttcattagctactgcatatgacaactttgttgaacttgtagctaatttgaaggaaggcacaaagttttacaatgagttgactgaaatcctggtcaggttccagaacaaatgcagtgatatagtttttgcacggaagacagaaagagatgaactcttaaaggacttgcaacaaagcattgccagagaacctagtgctccttcaattcctacacctgcgtatcagtcctcaccagcaggaggacatgcaccaactcctccaactccagcgccaagaaccatgccgcctactaagccccagcccccagccaggcctccaccacctgtgcttccagcaaatcgagctccttctgctactgctccatctccagtgggggctgggactgctgcgccagctccatcacaaacgcctggctcagctcctcctccacaggcgcagggaccaccctatcccacctatccaggatatcctgggtattgccaaatgcccatgcccatgggctataatccttatgcgtatggccagtataatatgccatatccaccagtgtatcaccagagtcctggacaggctccatacccgggaccccagcagccttcataccccttccctcagcccccacagcagtcttactatccacagcagtaatatgtctgctcagcagctcagctgattcagatcagagggaaagaaataccaaccctgcaataagtgtactaaactctacgctctggttaatgtaatgtactctcctggactgaatgcagtgtataatttctgtctacagctagaagctgtgccccagttccacatttgattacacatgtgagatttgctgctgttgcagtataaacactaggtataataggatttgaaattgcattacagttcataaaaattgaaaatgagaaattaaacctgcaagtgaaacatttgaaacgattatactttctacataagacatggttgggacatcagatacttacaaagatggtttaagtatggatactagagaaaattaagttttctttctctttggtttattgatttggtttaatttccattatgctattttgcataatcaaggcactgtaaatcttataattttaaaataaattacttaagaacagttgtcattgttatgttttgttattgattctcattactgtctaattttttttctggtattagtctcattttgtatgtatataagttaaacagatactgtttttaagtgcatgaatagtacaagttattatcaaggatgttttacagggaaatcaaaagaatattatcatactttatctttcgtatgctgattagtaaacgatttttgacatttattttagaaagtcctataatgtggaagaaacaaacagttgctaccaaagattcttcaaataaacatacaaataaatgtgtatatttaatgttttattgttagcttctccagaaaattgatgcaaattctggtaataattcttgcattttttccccataacctggttaaaataaatacgccattggcaatacttcataatgtaatggaattgtttggggaacacttactgtaccctctcatcctttttccaccttactgtgttaacttagtgacatttaatgcccaatatgtatgaatagatctaagccatttaattttttttccttaaagattggactattttataattcaaggagcatacaaaacaatggttgggaacatatgccaattatggaataggctatgtatttaatattaatctctgccattaggatatctactcactgtataaacctcagtaaaaatagtgaagacatgcatcatggaatgagaaaatgagaaaggaatgagttgtctaacatcacagtgggatctgttttttgtgaggttcatttctgaacacattaggcatatgagcagatttccagtgaatctatttatgtttattttctgagtttcaacgctgaccttttcttgcattattgtttcattttaatgatagtgttacttgtcccactgttgttttcattgagtttggatttatattttaaatgttcgaatgaaagtatgattgtaaaagggagtgaattggtttaaaaatatatgtatattttaaactttgttgtgtgtaggaaacatgaaggcatgttaattcaatataaatgacctttgatttcatggaatattaaagttggtttaaagtccaatagttaaaccttagcaaaaatagctttttactttatcagttgctaagatttaatactttggattcatcaaagtgtgacatgggcttgtttgacttctgtaagtggcatttaagttccacattcttattacttgaggtactttatactaacataagacagtgagagttagaggtattacaagttgctagtttataatgtcttactaatgcagaaacaaggaaaaaagcaaaattggcctgaatattctcttggggaaagagggcaccaaagaaaagggtaagtgcatctgagggccaaaagagatgtataagccttttagcccattccccatgctgggcctgctcacagagccacaggaagatcattcagaaactaggaaaggaggcccccacagctgatcctgccacagcacacctgactcactcggctctgttagtgtaaccttttaaatgtagcaacacaaaccctttccctcttgtcagttcactcatcctttggtttctttttaatcacctgtgtctgggcacagacaatcacaataaatgcagccctttattactgttaaggatcatactgttggtttggagttggaagggtactactctgtgattcaggtgtgttgtacccatatttataattaggctttattatcttcctaaatcaaggaaaggaaatcatccccagaccatttatgctgagctttggaatactattttaaactggattgtacttaaataatgaagctctgcatagaggaactagtcagaagtggggaaaacactgtctaatttttatcagtctggtataaagtattgatctaagagaactctccctgtgccccttggtctttattctcaattaagaaaaacagtcacatgtcacgacaaaccaatcaatctttatgagatattcctgtatccataccccagcttgtttgcaatttataaacctccccttcaaaactaaggagttgcagaaaaaaatggatttcacagagccttgtgtccctaaagttctgtcccagtcagcagtctttatagtccaaacagattataaaaaatgttttccatttgaactttacagtttgcaaaagtgcttttatacattttctaatttcagaaacaggataatataatttgttaagtgggtttcagtttgctaatagggattttttgtgttttgttttttaattttcagcatctcttgaagaatcttgctacagccaaatggcatctcactttttaaagacgtttgcaattattagttgattcacagtacagaacaaggtataaaggaaaaaaccctgctaggtagtgttataattgctagattaaaaatagactagaacaggttcattttaagatttacttggaagagcaaagaaggaaaaattatatttttaaagaaagagaatattcaggctttatttctggtatgaagtttatattttttaaaaaaatcctatattatcacaccagagattttagattcttttctggttagaaacattgctggtagttggattatatttttattgtattcatttatcttagggggaacattgtaaagaaacaaaaaggtccagatgaatgtatgctagaaataaaagttgaaagattctt

SEQ ID NO: 44261 - DNA, 109 bp, Homo sapiens
aaacccatagaatcttttctaaagcagtgactcttttgcggtacattacactgtgctttatttagcattagtgttgtgggaaaaatcacattctaagaagaattgagct

SEQ ID NO: 44262 - DNA, 326 bp, Homo sapiens
gcctagtaagacaggggataggacacttataccacctgagaaatttggaagggctcatgcaagttggtaatatctctttttttctggagtataaatctccaacttcttctgtatggatcactttgtatttgcagagagcccacaaagcgtcattgtttttgaaagcattgcctcttgaaaataaatctgtgtcctttccctcgcagcaggcgctaccaagaccttttctgagggctcaaaccagacagatggagtaagcggccatgaagtaatactaacttacaattactgctctgtatttttaagttaataaataaataattctt

SEQ ID NO: 44263 - DNA, 404 bp, Homo sapiens
tctatccaaagatggccttagttgttatgtgtctcttgcaaatttgccattaactcctctctcacaagtaggactcagcccccatttccttctccttataggattttttggaaactgtttcaaccattgatgaaagagattatatttctgtgaaaatcttagatggattttatttgtaactaattcttggtatattttacttattagtatcaatttctcaagtcaacggtaatattcatctattcatgcttagaaggattttggctgtaatttcaggactgtttctcttcttttagctttgatactatagtatacaaaatactctcacattcatggtttccttcggtagaggtagggaaggggacatttataaataaaagggctttgagatcctaaaatgtatg

SEQ ID NO: 44264 - DNA, 409 bp, Homo sapiens
atcagcacaatctaacaggaagtcctttggaagagatctccagaggcacagaatctagtggcagctctgaaacagatttcttcagcgaccttgggtgtagactttcagtgccttattcatctaaaacttaaggcggacgagacctactttttccatgtctcattgaaatgtgatcaagattaatggcctaacatagaaaacgtttccagcaccttgaaagaccaggcacattattcaatgcctgcctctataaatctggcaaaaatcagtctaattcacttgtcaggaaaaatgttcacttaaaaccatataattttagaacttgatgtttagaaaatgatcgaatccagtgtttttcaaaatgtccttcagaccgatagtgttatctgagacttagggaatagttgac

SEQ ID NO: 44265 - DNA, 1776 bp, Homo sapiens
acaattcagtaggttccctttgtttttgccttttattgcttaaaatggtaattgaaatagctaaattattatttgaaaataggccaatttatatagataatagaattttataagggtgatttatattccaaataatggcccccttttttttttcaaggccttttcaaatagtgtcaacaggtgatctttaatttaactgcattagatgacatatggattacttttgtttttaggaaataacccccaccttaatctatattgccgaccaggtgcggtggctcaaacctgtaatcccagcattttgggaggtcgaggcgggtggatcacctggggtcaggagttcgagaccagcctggccaacatagtggtctctactatagtatagtagaatatatactactacaccctgtctctactaaaaatacaaaaattagctgggtattgtggcaggtgcctgtaatcccagctactcgggaggctgaggcaggagaatcgcttgaacccaggaggcagaggttgcagtgagccaagatcacgccactgcactccaccctgggcaacagagcgagactccgtctcaaaaaaaaaaaaagtctgtattgccattaataagaaaaccttagaaaaatttgtacttcatagttctttctgctcaattagctgttagcattagtgtaaaatatagtttttaataatttctgtacaaagcctttgtacagaaaggcttcatccttaaagtgatgagaatggagtcaaaaaggattcaggtgtttagaggagctgcttttcattaggaccttggagagtcccctcagttttgacacccttgtttcaccacaagaaagcacccgacaccctgggttgcatacttactactcaggggctttccccccagctttcagagcactgaattattgtgagctggtgactctgcaggcctgagtggtattagggttgtggaatgttgttgcatacacgtttatgagttaaccactatttaaatgatgctgctttttaaagttttttcaaagtacaatagatttttgaagtttcaggtaactggaaaaatctttaacttttgctttaagtgtttggggcaggataaaacaacatagaaaatataaaacaatttttgctttgaaaaatacagtgcaggtgaccatttactgcttattctgtaatccttactgtctataattaacttcagtaacactgaaacttgatgaaaagttttaaaaaattatttactgtagggacaaagttatatggaatgtttgttattttctatactatctgaatgcactgccagtgaagactgtaaagacagaacacactattttggagggaggatactaattgtttaaaatttttcatcatttgtgagtgataaaaagtttgtatagtttttataataaatccctattttgaaaaaaaatgctaaaaaaaaaaaaataaaaaaaaaaaaaaagggggggaaaaaaaaaaaaacaaagggggggaaaaataacaatcagctcaccaagatgacccataaaaaggccgacacatagaacacccaacgcaccgccattaaaagcgccaccctgcacacccacaccccgggcccctggacagccaccccaatcaggagagcaccaacgccaccctcctgcgacagcgcccagcacacaaatacctctacgggacaacaccaaccacgtctaaagccagccagaccccaccatacggcactaccagtacaaccacgctcgcccgaccaccatatcacccgcacaa

SEQ ID NO: 44266 - DNA, 1483 bp, Homo sapiens
acaattcagtaggttccctttgtttttgccttttattgcttaaaatggtaattgaaatagctaaattattatttgaaaataggccaatttatatagataatagaattttataagggtgatttatattccaaataatggcccccttttttttttcaaggccttttcaaatagtgtcaacaggtgatctttaatttaactgcattagatgacatatggattacttttgtttttaggaaataacccccaccttaatctatattgccgaccaggtgcggtggctcaaacctgtaatcccagcattttgggaggtcgaggcgggtggatcacctggggtcaggagttcgagaccagcctggccaacatagtggtctctactatagtatagtagaatatatactactacaccctgtctctactaaaaatacaaaaattagctgggtattgtggcaggtgcctgtaatcccagctactcgggaggctgaggcaggagaatcgcttgaacccaggaggcagaggttgcagtgagccaagatcacgccactgcactccaccctgggcaacagagcgagactccgtctcaaaaaaaaaaaaagtctgtattgccattaataagaaaaccttagaaaaatttgtacttcatagttctttctgctcaattagctgttagcattagtgtaaaatatagtttttaataatttctgtacaaagcctttgtacagaaaggcttcatccttaaagtgatgagaatggagtcaaaaaggattcaggtgtttagaggagctgcttttcattaggaccttggagagtcccctcagttttgacacccttgtttcaccacaagaaagcacccgacaccctgggttgcatacttactactcaggggctttccccccagctttcagagcactgaattattgtgagctggtgactctgcaggcctgagtggtattagggttgtggaatgttgttgcatacacgtttatgagttaaccactatttaaatgatgctgctttttaaagttttttcaaagtacaatagatttttgaagtttcaggtaactggaaaaatctttaacttttgctttaagtgtttggggcaggataaaacaacatagaaaatataaaacaatttttgctttgaaaaatacagtgcaggtgaccatttactgcttattctgtaatccttactgtctataattaacttcagtaacactgaaacttgatgaaaagttttaaaaaattatttactgtagggacaaagttatatggaatgtttgttattttctatactatctgaatgcactgccagtgaagactgtaaagacagaacacactattttggagggaggatactaattgtttaaaatttttcatcatttgtgagtgataaaaagtttgtatagtttttataataaatccctattttgaaaaaaaatgctaaaaagcctcattaaatattttcataaaatttttcagattatat

SEQ ID NO: 44267 - DNA, 1070 bp, Homo sapiens
cagaaattcactatgaccatacgtatcggctcgcgatcccgatctggtaagtgaccctgtgcttacataggtgtccccctagtgagcatcctgataatgactacgtagcttgctgttctctgcatacttaaacataacgccacgggggtctacacccgcaaccagttcttgagcaacactctgagatgtagtgcatcgaggtcgattccctggagtcctttcaaatgggtgtgtccaaggtcggaggcatctgattgtcagcataccagcgtcgatgatgttaaccactatttaaatgatgctgctttttaaagttttttcaaagtacaatagatttttgaagtttcaggtaactggaaaaatctttaacttttgctttaagtgtttggggcaggataaaacaacatagaaaatataaaacaatttttgctttgaaaaatacagtgcaggtgaccatttactgcttattctgtaatccttactgtctataattaacttcagtaacactgaaacttgatgaaaagttttaaaaaattatttactgtagggacaaagttatatggaatgtttgttattttctatactatctgaatgcactgccagtgaagactgtaaagacagaacacactattttggagggaggatactaattgtttaaaatttttcatcatttgtgagtgataaaaagtttgtatagtttttataataaatccctattttgaaaaaaaatgctaaaaaaaaaaaaataaaaaaaaaaaaaaagggggggaaaaaaaaaaaaacaaagggggggaaaaataacaatcagctcaccaagatgacccataaaaaggccgacacatagaacacccaacgcaccgccattaaaagcgccaccctgcacacccacaccccgggcccctggacagccaccccaatcaggagagcaccaacgccaccctcctgcgacagcgcccagcacacaaatacctctacgggacaacaccaaccacgtctaaagccagccagaccccaccatacggcactaccagtacaaccacgctcgcccgaccaccatatcacccgcacaa

SEQ ID NO: 44268 - DNA, 2228 bp, Homo sapiens
agcggcgcattctgggattacttcttttccgtgggagtaaggaagtgcttttgaatgaggtactgagggccaaggtgttggaagttcctaattctttcctcggttaactgtgaaactctgcgtattgggaaggcctggcctcagtcatcaggccaggagaggtactggacgccgcgcacgcactcgtctgccagcgaggcccaaaggggaagcctagcggagctcagtgtggcagctgctggcctctgggccgctacttgtcaataccatgctttcctgtaatatttgtggtgaaacagtaacctcagaaccagacatgaaagctcacctaattgttcacatggaaagtgaaattatatgtccattttgcaagttgtcaggtgtgaattatgatgaaatgtgttttcatatcgaaacagctcattttgagcagaatacacttgaaagaaactttgagaggataaatacagtacaatatggaacttcagataacaagaaagacaacaccctacagtgtggaatggaagttaattcaagtattctttcaggttgtgcatctaatcatccaaaaaattcagctcaaaacctgactaaagatagtactttaaaacatgaaggcttctattcagagaacttaactgaatctagaaaattcctgaaaagtagggaaaaacagtccagcctgaccgaaataaaaggatctgtttatgaaacaacatacagtcctcctgaatgtccattctgtggaaaaatagaggagcacagtgaagatatggaaactcatgtgaaaacaaagcatgccaatcttttagacattccattggaagactgtgatcaaccactctatgattgtcctatgtgtgggctcatatgtacaaattaccatattcttcaggaacatgttgacttgcatttggaagaaaacagctttcagcaaggcatggatagagtccagtgttctggtgatctacaattggctcaccagcttcagcaagaagaagacagaaagaggagatctgaagaatcaagacaagaaatagaagaatttcagaagctgcagagacaatatggtttagataattctggaggatacaaacaacaacaactacgaaatatggagatagaagtaaataggggaagaatgcctccatctgaatttcataggagaaaagctgatatgatggaatcattagctcttggttttgacgatggaaaaacaaaaacttccggaattattgaagcacttcataggtattatcagaatgctgccacagatgtgagacgggtgtggctttcttcagtggtggatcactttcattcatctttaggcgacaaaggttggggttgtggttacagaaatttccaaatgctactttcatcattattacaaaatgatgcttacaacgattgcttaaaaggtatgttgattccttgcattccaaaaattcaatctatgattgaagatgcatggaaggaaggttttgatcctcagggggcctctcaacttaataacaggttacagggaacaaaggcctggattggagcatgtgaagtatatatactcctgacctccctaagggtaaagtgtcatattgttgattttcacaaatcaactggtcctttgggtacacaccctcgcttatttgaatggatattgaactattattcttcagagggagaagggagtccaaaggtagtgtgtacatctaaacctcctatctatcttcagcatcaaggtcacagtcgaactgttattggaattgaagagaaaaaaaaccgaacattatgcttactaatacttgatcctggatgtccttctcgagaaatgcagaaattattaaagcaagacatagaggctagcagtctcaagcaacttcggaaatctatgggaaatttaaaacataagcaataccagatattggcagtagagggtgctctttctctagaggagaaacttgccaggagacaagcttctcaagtctttacagccgagaagattccttgaagaatcaagcatttaagcatttcagtgattgagaacaatactttgttttctaaatgtagatattgaactccttaatacaattatgaatctgtgaattctcttaagtcttaacatataatttaatttctaaaatgcctgtgttaattgaattatacctatcatacttcattgtttggtaaattatttcaataaaatgtcttgtttttgcattgtgaaaaatgtt

SEQ ID NO: 44269 - DNA, 2070 bp, Homo sapiens
agcggcgcattctgggattacttcttttccgtgggagtaaggaagtgcttttgaatgaggtactgagggccaaggtgttggaagttcctaattctttcctcggttaactgtgaaactctgcgtattgggaaggcctggcctcagtcatcaggccaggagaggtactggacgccgcgcacgcactcgtctgccagcgaggcccaaaggggaagcctagcggagctcagtgtggcagctgctggcctctgggccggttgtgcatctaatcatccaaaaaattcagctcaaaacctgactaaagatagtactttaaaacatgaaggcttctattcagagaacttaactgaatctagaaaattcctgaaaagtagggaaaaacagtccagcctgaccgaaataaaaggatctgtttatgaaacaacatacagtcctcctgaatgtccattctgtggaaaaatagaggagcacagtgaagatatggaaactcatgtgaaaacaaagcatgccaatcttttagacattccattggaagactgtgatcaaccactctatgattgtcctatgtgtgggctcatatgtacaaattaccatattcttcaggaacatgttgacttgcatttggaagaaaacagctttcagcaagtggcattgtttaaataatcattatggtggcttagaagtggaaaaatcctatatgaatgttagaagcccactgaacgaaaataaaaagtagatcccaagagaaaccaattgtgttttaccctatttcagttttttaaggcatggatagagtccagtgttctggtgatctacaattggctcaccagcttcagcaagaagaagacagaaagaggagatctgaagaatcaagacaagaaatagaagaatttcagaagctgcagagacaatatggtttagataattctggaggatacaaacaacaacaactacgaaatatggagatagaagtaaataggggaagaatgcctccatctgaatttcataggagaaaagctgatatgatggaatcattagctcttggttttgacgatggaaaaacaaaaacttccggaattattgaagcacttcataggtattatcagaatgctgccacagatgtgagacgggtgtggctttcttcagtggtggatcactttcattcatctttaggcgacaaaggttggggttgtggttacagaaatttccaaatgctactttcatcattattacaaaatgatgcttacaacgattgcttaaaaggtatgttgattccttgcattccaaaaattcaatctatgattgaagatgcatggaaggaaggttttgatcctcagggggcctctcaacttaataacaggttacagggaacaaaggcctggattggagcatgtgaagtatatatactcctgacctccctaagggtaaagtgtcatattgttgattttcacaaatcaactggtcctttgggtacacaccctcgcttatttgaatggatattgaactattattcttcagagggagaagggagtccaaaggtagtgtgtacatctaaacctcctatctatcttcagcatcaaggtcacagtcgaactgttattggaattgaagagaaaaaaaaccgaacattatgcttactaatacttgatcctggatgtccttctcgagaaatgcagaaattattaaagcaagacatagaggctagcagtctcaagcaacttcggaaatctatgggaaatttaaaacataagcaataccagatattggcagtagagggtgctctttctctagaggagaaacttgccaggagacaagcttctcaagtctttacagccgagaagattccttgaagaatcaagcatttaagcatttcagtgattgagaacaatactttgttttctaaatgtagatattgaactccttaatacaattatgaatctgtgaattctcttaagtcttaacatataatttaatttctaaaatgcctgtgttaattgaattatacctatcatacttcattgtttggtaaattatttcaataaaatgtcttgtttttgcattgtgaaaaatgtt

SEQ ID NO: 44270 - DNA, 886 bp, Homo sapiens
gacccacgcgtccgcggaccgcgtgggtcgacccacgcgtccgaggagaacttagatacatatgtgtcagagttttgttctagaacagtttttgttctttcatttgagataatttgaataagaaggatcaaaggattgggaaaggaaaagtaaaatatttggcagaataaaaatgttttttttggtaatgaagcctttagaaaactaaagttaaatgaaaaaactgaagtagaactaaactcttacgtcttaggagaacttagatacatatgtgtcagagtctgactgtatttatattctaaacacacatatgatcacacaacatacatacagagactatttgtataactgtaaatagatgtgacgtatgtataacttaaaaatcttttgataggtcacagtcgaactgttattggaattgaagagaaaaaaaaccgaacattatgcttactaatacttgatcctggatgtccttctcgagaaatgcagaaattattaaagcaagacatagaggctagcagtctcaagcaacttcggaaatctatgggaaatttaaaacataagcaataccagatattggcagtagagggtgctctttctctagaggagaaacttgccaggagacaagcttctcaagtctttacagccgagaagattccttgaagaatcaagcatttaagcatttcagtgattgagaacaatactttgttttctaaatgtagatattgaactccttaatacaattatgaatctgtgaattctcttaagtcttaacatataatttaatttctaaaatgcctgtgttaattgaattatacctatcatacttcattgtttggtaaattatttcaataaaatgtcttgtttttgcattgtgaaaaatgtt

SEQ ID NO: 44271 - DNA, 442 bp, Homo sapiens
ggctggaaaaatgtttattcctaatttcagaagtttgagattgcaatttttctttaggaattttcattattatcttgaaaaaaaattccagattttattttttacattagaatgacaacacatattctaattaattgacttatagcttaaaattgttttttaaaatttcttttcaaggccaggagacaagcttctcaagtctttacagccgagaagattccttgaagaatcaagcatttaagcatttcagtgattgagaacaatactttgttttctaaatgtagatattgaactccttaatacaattatgaatctgtgaattctcttaagtcttaacatataatttaatttctaaaatgcctgtgttaattgaattatacctatcatacttcattgtttggtaaattatttcaataaaatgtcttgtttttgcattgtgaaa

SEQ ID NO: 44272 - DNA, 2365 bp, Homo sapiens
agcggcgcattctgggattacttcttttccgtgggagtaaggaagtgcttttgaatgaggtactgagggccaaggtgttggaagttcctaattctttcctcggttaactgtgaaactctgcgtattgggaaggcctggcctcagtcatcaggccaggagaggtactggacgccgcgcacgcactcgtctgccagcgaggcccaaaggggaagcctagcggagctcagtgtggcagctgctggcctctgggccgctacttgtcaataccatgctttcctgtaatatttgtggtgaaacagtaacctcagaaccagacatgaaagctcacctaattgttcacatggaaagtgaaattatatgtccattttgcaagttgtcaggtgtgaattatgatgaaatgtgttttcatatcgaaacagctcattttgagcagaatacacttgaaagaaactttgagaggataaatacagtacaatatggaacttcagataacaagaaagacaacaccctacagtgtggaatggaagttaattcaagtattctttcaggttgtgcatctaatcatccaaaaaattcagctcaaaacctgactaaagatagtactttaaaacatgaaggcttctattcagagaacttaactgaatctagaaaattcctgaaaagtagggaaaaacagtccagcctgaccgaaataaaaggatctgtttatgaaacaacatacagtcctcctgaatgtccattctgtggaaaaatagaggagcacagtgaagatatggaaactcatgtgaaaacaaagcatgccaatcttttagacattccattggaagactgtgatcaaccactctatgattgtcctatgtgtgggctcatatgtacaaattaccatattcttcaggaacatgttgacttgcatttggaagaaaacagctttcagcaagtggcattgtttaaataatcattatggtggcttagaagtggaaaaatcctatatgaatgttagaagcccactgaacgaaaataaaaagtagatcccaagagaaaccaattgtgttttaccctatttcagttttttaaggcatggatagagtccagtgttctggtgatctacaattggctcaccagcttcagcaagaagaagacagaaagaggagatctgaagaatcaagacaagaaatagaagaatttcagaagctgcagagacaatatggtttagataattctggaggatacaaacaacaacaactacgaaatatggagatagaagtaaataggggaagaatgcctccatctgaatttcataggagaaaagctgatatgatggaatcattagctcttggttttgacgatggaaaaacaaaaacttccggaattattgaagcacttcataggtattatcagaatgctgccacagatgtgagacgggtgtggctttcttcagtggtggatcactttcattcatctttaggcgacaaaggttggggttgtggttacagaaatttccaaatgctactttcatcattattacaaaatgatgcttacaacgattgcttaaaaggtatgttgattccttgcattccaaaaattcaatctatgattgaagatgcatggaaggaaggttttgatcctcagggggcctctcaacttaataacaggttacagggaacaaaggcctggattggagcatgtgaagtatatatactcctgacctccctaagggtaaagtgtcatattgttgattttcacaaatcaactggtcctttgggtacacaccctcgcttatttgaatggatattgaactattattcttcagagggagaagggagtccaaaggtagtgtgtacatctaaacctcctatctatcttcagcatcaaggtcacagtcgaactgttattggaattgaagagaaaaaaaaccgaacattatgcttactaatacttgatcctggatgtccttctcgagaaatgcagaaattattaaagcaagacatagaggctagcagtctcaagcaacttcggaaatctatgggaaatttaaaacataagcaataccagatattggcagtagagggtgctctttctctagaggagaaacttgccaggagacaagcttctcaagtctttacagccgagaagattccttgaagaatcaagcatttaagcatttcagtgattgagaacaatactttgttttctaaatgtagatattgaactccttaatacaattatgaatctgtgaattctcttaagtcttaacatataatttaatttctaaaatgcctgtgttaattgaattatacctatcatacttcattgtttggtaaattatttcaataaaatgtcttgtttttgcattgtgaaaaatgtt

SEQ ID NO: 44273 - DNA, 348 bp, Homo sapiens
gagtgcagtggcgtgatctcggctcactgcaaggtccacctcccgggttcacgccattctcctgcctcagcctcccacatagctgggactacaggcgcccgccaccatgccccgcgaattttttgaatttttagtagacacagggtttcactgtgttagccaggatggtcttgatttcctgacctcgtgatccgcccacctcggcctcccaaagtgctgggattacaggcgtgagccaccgtgccctgccctggattgttatttttttaaacataagtagctttttaaaaattataaaagtaaaaatgctcattttataaaaattaaggaagctcagggaatataagt

SEQ ID NO: 44274 - DNA, 198 bp, Homo sapiens
gagataggttcttgctctgtcactcaggctggagtgcagtgatgtgatcctagactcaatcatattattcgaattcaatacaaatctattcaatatttgaatgtctaagtacccaacactgtgtcaggtgatattattttttatggggagaaaatttcaagttcacttaagcaaagacattctttaaggcttctttat

SEQ ID NO: 44275 - DNA, 448 bp, Homo sapiens
tgcatttacttttatgagtaagttttataattatcttagatttcaagatagttctgttgcgatttcactaattgcttcaacattttatattattttgagaaagaaatgtcattgttatgaactgcatcgttttccacaatatcccaaatttttatgttgaagtcctaactcccagtacctcagaatgtgactgtatttgaagacagggcttttaaaggagtaattaaaatgaggtaattagggtgagccctaatccaatgggacattagtccttctaagaagataaaatttagacataagtaggtacagaggaaagaccaagtgaagacacagagagatgatggccatctacaaaccaaggagagagcctcagaagaaactccccttgctgataccttgatcttagacttctgcctccagaactgtgagaaaataaatttgtattgtt

SEQ ID NO: 44276 - DNA, 208 bp, Homo sapiens
gcagcttgcctaggcatagcaaagctggcatggcatgacctcttagagagttgaggattgattaaatttgtgtttcccaggctccattcttggctacccagagaaggctgcttggccaaagagtgttaatgaatgcctgcttgttgccctcattatttgctctgttccagtaagttgtcgtttccattcatgttggaaagtatttggg

SEQ ID NO: 44277 - DNA, 441 bp, Homo sapiens
atttggatacctacagattggtggcttgaaagaaatgtacccgttcctccccccaagtgtgtatgatgtccaccagaagtaagaagaccatagaaaggagaaatttgaagtcagaattgttgtttgtaagcaatgacatcccctccaaatgttcctacaaaatattttattccagtccttacaaaaatttttttgatagttgttttaggtctctgacttgtattttgccttattaccctaattggcaagtaaattctacagattgttatttatcatttaggtatctattttaaaggaagagtttattgtttctgtgttaaaataatgcacaatgaataaaaatgaaaaaataaataaaatatttaaagactggaagaaaaaatatattctcattttcagacaatataattatcacatactaaatcccttaaaaaaaaaaaa

SEQ ID NO: 44278 - DNA, 391 bp, Homo sapiens
cacccacttccgcctccaggcaatgccgaattgggagcttggggaagatgaattgcctgactggttaaagcagggtacagtgggagctgagcttccagcgcggggccctgcgggcctagggcgcatgcgcgaggcgcggccggcccgtacccgtctcgacacccagctggagctcgagactcggggatctagagtttgaagcctggcgcgagatgcggtatacccgagaccggtgaactccagtcacttgacctggtcggatgtgaattgcgcagaaaaaagccattccatatccaccagtgtccatgtgaaaccttaacgaaataaagacggaaattaatgtagactgtttggatttgccctgaaaactatcaatctaactcatgattta

SEQ ID NO: 44279 - DNA, 237 bp, Homo sapiens
ccctgtgatgtttgcactggactcagtttgcttgggagatgcaatctttggttcataacatgggtaacatgtcaatgtagacaaagggtgacctatgctgcatagtttaatgcccaggtctcctggcctgacactgacattgtggatcctagatcatttcagataatggcaacagacactaaacaatgcaacatcgtttcaggtctaggattgctatagcgacttactctgtgacct

SEQ ID NO: 44280 - DNA, 409 bp, Homo sapiens
acccctcgagatgacacgcagtgaccaatttcctcttaaaactcccttcttttcaaaaaccctatgatccatgcaccctctgtctaatcctctgcgatggggccagtctgcagatccgtctgggcgggctgcggtagcattctccacctgccaacactcagttgctggtgagtaaccagcatacggactctcacttcctgtgagtatttctgaaagagcttatgatatttccttcaaaaaaaaaaaattgtggggaggaaagccactcggggaggagaagcaacttcaacaagcaaagctaaaagcatgcaacgtgatcactgttgaccagacacgcctaattttaatttggtttctcaacccctgtgtaattaagacagcccaaagagaacagcatcaagaggaaaga

SEQ ID NO: 44281 - DNA, 361 bp, Homo sapiens
agatacatgagactttgcatttcatttattcaggactgcaacattttgaatatggatgattttgaactccctatttactatttactaagtgatgatgtacttttcaggcggctagccacctgcgttatgtcccattattaacgtaatccaggaagttgcttagagagcatagaattgtgtaacaagaatttcatctaggcaatagaaaccagtttattcctaacccaaacctagtgaccagaaaaagaggcctgtaactctgcagtccggaccagtagttgctgtttacttttccagtgatgcgagacaaactcttaacatttttatttaacttaaaaactaacattcacttgccagtctt

SEQ ID NO: 44282 - DNA, 400 bp, Homo sapiens
tatatgccaggccctgtgctgaggacagaggttacggtagaatataggacttggaagatccctgttctaatggacttagctttcttgaagggaaggcagataataaataagaacattaataagattaatttcagatagtttctttctatgaaggtcaaaaggtacacacttgtagttatgtagaatgagcaaatttggatatctaatacatatgaggactacagttgatgatattgtgtactgcaagtttgctaagggtgtagacgttagggattcctaaccacacacacacacaacccactgactctgtgaggtgtgtaaatttgcttgactatagtaatcatttcacttggtatatgtatatcaaaacatcaagctgtacatgttaaatatatacact

SEQ ID NO: 44283 - DNA, 384 bp, Homo sapiens
attttcatcctgagcctcttattcccaccttcagtcacttcagaaactcccctgcactccattcaactttctggacctcccctttaatgtttgccatttgtgcattctacagctcggtgcacttgttttctgacctcaagagtcaggagaggagctatcccagcttcaattcctcatcaataaggtacagaaaatactctctaggattactgaagaaatgaaataagcaactgtattttaagtattttatgtactgtaaaagcattgtgcgtccgggtgcagtggttcatgcctgtaatcccagcactttaggaggccgaggcaggcagatcatctgaggtcgggagtgactggccaacatggtgaaaccccatttctactaaa

SEQ ID NO: 44284 - DNA, 255 bp, Homo sapiens
tccaaacccgcgcggggcgggggctcatttgtatgccgcaccctggatacaagtgataaggccccaaacactccaaggagaccgcacagatgaaacccggcgctgctcgctcaggaggcgagatatttatagaatccaaatatcagcattttctccccatttacacaaagcaatttcagccttttcagatgagaaaagagcagccccggccgtcattcattcgggtgcgggaatcacatttgggaccaggaagcc

SEQ ID NO: 44285 - DNA, 418 bp, Homo sapiens
ttggggaaatgttagctgacagagctgagagatcagattttcatgttctatcactgtaatggaacctcatttagacctctctagacctttgctagctgtgtggtctgaggaccagtaagtaggattggcattatctggtatcttgttaaaaatgcagaatttcatgccactctaggtctactaaatcagaatttgcattcttaacaaggttcccaagtgatttttatgagaagaaagtatcagagtgcaaacaaattactcgtctaatatgtagaattcccagtggtctcacagccctagatcaaatgtgtcagacactagatcattataatcttcattggttttgacagctaattaattagtttaataatattgacatatggcttcttaagtatttgaattctagattgctaatgat

SEQ ID NO: 44286 - DNA, 429 bp, Homo sapiens
agaaaagaaaaaaaagcagaagtttttttctcctgatttcccggcagccgagccgcggttcggggcgcgcgcgggatttccagcgcgcgaggcggcccggactttcgggggggcctggaatcccctcccgatccgcggagagtcccggaccgcgcctttcccaagttctgctgggggtggaggggctgcaccgggaaggggccccgtttgcagcgtgatctcgcccaggtggtggtgagggccggagtctctcctggctgcgacgaccccagcccctgggtgatttcgcttctcccggcctctctgttcccgtctgagtaatgggtctgcagcgccggcctcgctggtttgcagagcatggcataaaatacggctgacagtaagagcccaatacacatcagctgtcacctggtggtcgcgggaggcctc

SEQ ID NO: 44287 - DNA, 555 bp, Homo sapiens
gatgagccaaaacttgaggagccgggtaatgccattaactgagatgacgtcgactggagaagaacaggctgtcttgcaaatgtttgagtagcctactccacttttgcataaagctatcaaatgggcagttgcatatgagtctggagctcaaagaagagatcaagacaggaaatgtaatcaggaagttagtagcatatggatggcatttaaagctagggatgaaattggcttatgagcgaatgtaagctgaggagagaagagggcccagaaccaagcctgcagcactccagcatctggtggtctggaagggatggagacaatagcaaaagaaactgaggaggtgggagaacactagagggaactgtttcaagaaaccaccagttgggtcaaatgctgcttaaggattaggatgaaaacagagaagtggtctctggatttggcaacatgatgattgttggtggtgttgattgtgtaatggggggtccagaagccaaattggaatgggttcaagagtgaatgcgaagcgagggagtaggaatctgtaggagttaaatc

SEQ ID NO: 44288 - DNA, 442 bp, Homo sapiens
gcctcgaactcttggactaaagcaatcctccctcagcctcccaagtagctgagactataggcatgcaccaccacacccagctaatttttaatttatattttgtagagatagggtctttccatgttgcccaggctggtctcaaattcctgggctcaagcgatcctcctgcctcagcctctcaaagggctggaattacaggcctgagccaccacacccagctgcaaaaacttttgaggactgggaggcagatggaggaaagctgtttcttcccatgtagtccctgccacgctaagactctggcattcctggacctggcaaaaatgcccctcccctcccctccaaggcatggaagccacccaacttcaaggagccactttgggcttgagaaatagaatgagggagcggtgggtgattaattataatgggtaacactccacttaac

SEQ ID NO: 44289 - DNA, 351 bp, Homo sapiens
aaaagcctaccctgcctacttttaggggttgttattaaaaaccaaagcactttgtaaatggtaacacacaatgtaagtgtaaatggttttctttgtaattatactacagaattaacattagtataataaagaactttgtccatatccacattaagattttgagtgaagctataatatacatatttatgaaactgaaactcaagcatattttctattactggcaaatatctgtgtcagacagaacgtctctacttaacaagaactaagtcatcagtaactaattgtcaatacagtaaggtggctatgattcaagcaagcacttaacagatgtatgagtcacaataattcact

SEQ ID NO: 44290 - DNA, 399 bp, Homo sapiens
gacagagtcagagagattggcagtgataatctttacacgtgctttctccttatgtcattttacatttggagcaatcccttgaactcataggatgagtattgttagttccattttacagacaagaaaagaaggctcagagtagtgaaatgacttgccctttgagtagttgatgtctaactccaaatatttattccactattttctctactaatcatgggtatttctcatcaccattgctatgcctgtggggtaggaatttttatccctgttttcagggggggaaaacactaggggttttaaggaaacttttcccccttggataatccctcgattcagtaggttgtgcccgggtacccaacccggggacctctttgtaggggtcacacttcaatccctaac

SEQ ID NO: 44291 - DNA, 437 bp, Homo sapiens
acccctgtgagaggagggtaggcctaagagtgaagtcagaagagagaaaaccagaagcaagagatggaaagacagacatcgagtcttctcaatatcattttaccctgaagtcaccctgaccctggacttactggttaattgagccaataactttccataatggcttaagccagtttcggttggggttctggcacttgccaccaagatagtcctgattagggaagatctcaggttcaattttacacgcagtaaatttgagatacctcagagtggagacatcaagttggctgatgcaaatgtgggtctaatctagaggtttaaattggtaattctcctttgtatagatggaaagtgaattccccgtgcaaaagcagaagatgggtcttcattgaacatttgatgaataaatgaatgaaggcataaacaaatgaatacaa

SEQ ID NO: 44292 - DNA, 353 bp, Homo sapiens
gctcatctggcaagtttaaatcactccggaaacatacagagctgcagtcattggtttgacaagaacagaaagatacttgtctctgttgttgctagtattaaaagagaatttattggccgggcgcggtggctcacacctgtaatctcaactctttgggaggctgaggcaggcggatcatgaggtcaggaggtcgagaccatcctggctaacacggtaaaaccctgtctctactaaaaaatacaaaaaaattagctgggcgtgatggcgggctcctgtaatcacagctactctggaggctgaggcaggagaatggtgtgaacccgggaggtggagcttgcagtgagccgagtttg

SEQ ID NO: 44293 - DNA, 1085 bp, Homo sapiens
agggaaacgaaattatccaccctatttctggaaaaaatatcctgcaatttgtagccatcaaaaggaaggactgtggagaataggcaatcccagggggtatggtggatccaggagagaaaattagtgctacattgaagagagaatttggcgaggaagccatgaactctttacagaaatctaggaaagaaatgcaggagttggagagacaattgcacaaactcctcagtcaggaacattttgaggtctataaaggctacgtggatgattctagaaacacagataactgctggatagagacagaggctgtgaactaccgtgatgaaataatggaccatcttcctctggaagctggcgatgatgccaagaaagtgaaatgggtggacattaatgataaacttgagctttatgccagcctctcccaatttattcaacttgtggctgagaaacgaggtgcccactgatgtgaggatatgtatcctgattgccagggatagtagcttggagtctcatgtgaccaaaggccttcaaatgatcaagagtggataagaggcaaacagcacataactcccactaaacaggacagggagggtcacctctttggtgattacttccaaaactgtgctgtgtgaaggctttgtattaaggaataataatagacaaatacggggaaatgggatcaccagaattttggctttcctgttagaagaagaatatactcatatgctgtatatattgtatacatggtttaaactaacttacacagctactgctctttggagaattgtaagaaaaacaatgacatcttccttaacaaccatagcctctacttttcagccagtttgcatttgtcaattcttctttctcctgatgttttaatgtggcataatctaatgtataatctgacttttgagttaacatttattttttaaatttagctttatgtggtcttgtattccttccttttgagtatgggagctctctggcttttcctttttgtttttttagagcttcagttttatgggaaaagttcaatctctattttggtccacaaggatcaagtgcttatgaaccagaccaaaaaaaaa

SEQ ID NO: 44294 - DNA, 459 bp, Homo sapiens
gtgtggtgcctcacacctgtaatcccaggtactcaggaggctgaggcaggagaatcacttgaacccaggaggtgaaggttgcagtgagccaagatcacgtcactgcactccaacctgggcaacagagcaactccatctcaaaaaaagaaaaatttgaaatagcagtagacttccaaatctgttagaaggccttgtttttagaatagggcaaatgtttgctttagtcagagcttgactggatgagatatgttaggagagtaacagtctcctcttgctacttgtttctgagcaggtaatctaaaaaggaaagccctatactactccagaggtattttcattgcaaaagaaatgtttccaaggtggcccttctttgcacctgttcaataaatgacctttaacattaacagcaacatgaatcaggctgaattaagaaaacatgggtaggccgggtgtggtggc

SEQ ID NO: 44295 - DNA, 2664 bp, Homo sapiens
  misc_feature (72)..(72): n is a, c, g, or t
  misc_feature (251)..(251): n is a, c, g, or t
ctccaggaaacagagtgaagacactggccctggcaggcagcagctgggtctaagagagctgcagcccagggncacagacctgtgggccccatggccgggaaggcggcagaggagagagggctgccgaaaggggccactccccaggatacctcgggcctccaggatagattgttctcctctgaaagtgacaacagcctgtacttcacctacagtggccagcccaacaccctggaggtcagagacctcaactnccaggtggacctggcctctcaggtcccttggtttgagcagctggctcagttcaagatgccctggacatctcccagctgccagaattcttgtgagctgggcatccagaacctaagcttcaaagtgagaagtgggcagatgctggccatcatagggagctcaggttgtgggagagcctccttgctagatgtgatcactggccgaggtcacggcggcaagatcaagtcaggccagatctggatcaatgggcagcccagctcgcctcagctggtgaggaagtgtgtggcccacgtgcgccagcacaaccagctgctccccaacttgactgtgcgagagaccttggccttcattgcccagatgcggctgcccagaaccttctcccaggcccagcgtgacaaaagggtggaggacgtgatcgcggagctgcggcttaggcagtgcgctgacacccgcgtgggcaacatgtacgtgcgggggttgtcggggggtgagcgcaggagagtcagcattggggtgcagctcctgtggaacccaggaatccttattctcgacgaacccacctctgggctcgacagcttcacagcccacaacctggtgaagaccttgtccaggctggccaaaggcaaccggctggtgctcatctccctccaccagcctcgctctgacatcttcaggctgtttgatctggtcctcctgatgacgtctggcacccccatctacttaggggcggcccagcacatggtccagtatttcacagccatcggctacccctgtcctcgctacagcaatcctgctgacttctatgtggacctgaccagcattgacaggcgcagcagagagcaggaattggccaccagggagaaggctcagtcactcgcagccctgtttctagaaaaagtgcgtgacttagatgactttctatggaaagcagagacgaaggatcttgacgaggacacctgtgtggaaagcagcgtgaccccactagacaccaactgcctcccgagtcctacgaagatgcctggggcggtgcagcagtttacgacgctgatccgtcgtcagatttccaacgacttccgagacctgcccaccctcctcatccatggggcggaggcctgtctgatgtcaatgaccatcggcttcctctattttggccatgggagcatccagctctccttcatggatacagccgccctcttgttcatgatcggtgctctcatccctttcaacgtcattctggatgtcatctccaaatgttactcagagagggcaatgctttactatgaactggaagacgggctgtacaccactggtccatatttctttgccaagatcctcggggagcttccggagcactgtgcctacatcatcatctacgggatgcccacctactggctggccaacctgaggccaggcctccagcccttcctgctgcacttcctgctggtgtggctggtggtcttctgttgcaggattatggccctggccgccgcggccctgctccccaccttccacatggcctccttcttcagcaatgccctctacaactccttctacctcgccgggggcttcatgataaacttgagcagcctgtggacagtgcccgcgtggatttccaaagtgtccttcctgcggtggtgttttgaagggctgatgaagattcagttcagcagaagaacttataaaatgcctctcgggaacctcaccatcgcggtctcaggagataaaatcctcagtgccatggagctggactcgtaccctctctacgccatctacctcatcgtcattggcctcagcggtggcttcatggtcctgtactacgtgtccttaaggttcatcaaacagaaaccaagtcaagactggtgattcacgccagacgtctgcccgctggtgggggacctgagcagacccttcaactgcactccctcctcaggagccccttcctggggacagtgaggacaatgaccctacagatgctcagctacatccggcccagggtgctgcagtggcacagaccagccacaggatggcagtagaataaagacagtcgaaagggatttctgctcactggcaggagactgcgatgactgggagaaaacctgcactcggtggcacctacaacgttgctaatttatttccttttgatatgcatttatataggcaactcgatataggatgggagcaaactaggaatgaattgggtagctagactgtgcaggaattgttggaacctggagggaacaataacagtagctagcagatttggcttcatcttccaggggccccacactccgtggtgagccaccatcaatacagaaagtgacctaagatgtaccagcaagatgccatcccttctttttgtgtggggtcatgggctccaaaagccaacgtgaacaattaaaaatgtattgagcatct

SEQ ID NO: 44296 - DNA, 3143 bp, Homo sapiens
  misc_feature (72)..(72): n is a, c, g, or t
  misc_feature (251)..(251): n is a, c, g, or t
ctccaggaaacagagtgaagacactggccctggcaggcagcagctgggtctaagagagctgcagcccagggncacagacctgtgggccccatggccgggaaggcggcagaggagagagggctgccgaaaggggccactccccaggatacctcgggcctccaggatagattgttctcctctgaaagtgacaacagcctgtacttcacctacagtggccagcccaacaccctggaggtcagagacctcaactnccaggtggacctggcctctcaggtcccttggtttgagcagctggctcagttcaagatgccctggacatctcccagctgccagaattcttgtgagctgggcatccagaacctaagcttcaaagtgagaagtgggcagatgctggccatcatagggagctcaggttgtgggagagcctccttgctagatgtgatcactggccgaggtcacggcggcaagatcaagtcaggccagatctggatcaatgggcagcccagctcgcctcagctggtgaggaagtgtgtggcccacgtgcgccagcacaaccagctgctccccaacttgactgtgcgagagaccttggccttcattgcccagatgcggctgcccagaaccttctcccaggcccagcgtgacaaaagggtggaggacgtgatcgcggagctgcggcttaggcagtgcgctgacacccgcgtgggcaacatgtacgtgcgggggttgtcggggggtgagcgcaggagagtcagcattggggtgcagctcctgtggaacccaggaatccttattctcgacgaacccacctctgggctcgacagcttcacagcccacaacctggtgaagaccttgtccaggctggccaaaggcaaccggctggtgctcatctccctccaccagcctcgctctgacatcttcaggctgtttgatctggtcctcctgatgacgtctggcacccccatctacttaggggcggcccagcacatggtccagtatttcacagccatcggctacccctgtcctcgctacagcaatcctgctgacttctatgtggacctgaccagcattgacaggcgcagcagagagcaggaattggccaccagggagaaggctcagtcactcgcagccctgtttctagaaaaagtgcgtgacttagatgactttctatggaaagcagagacgaaggatcttgacgaggacacctgtgtggaaagcagcgtgaccccactagacaccaactgcctcccgagtcctacgaagatgcctggggcggtgcagcagtttacgacgctgatccgtcgtcagatttccaacgacttccgagacctgcccaccctcctcatccatggggcggaggcctgtctgatgtcaatgaccatcggcttcctctattttggccatgggagcatccagctctccttcatggatacagccgccctcttgttcatgatcggtgctctcatccctttcaacgtcattctggatgtcatctccaaatgttactcagagagggcaatgctttactatgaactggaagacgggctgtacaccactggtccatatttctttgccaagatcctcggggagcttccggagcactgtgcctacatcatcatctacgggatgcccacctactggctggccaacctgaggccaggcctccagcccttcctgctgcacttcctgctggtgtggctggtggtcttctgttgcaggattatggccctggccgccgcggccctgctccccaccttccacatggcctccttcttcagcaatgccctctacaactccttctacctcgccgggggcttcatgataaacttgagcagcctgtggacagtgcccgcgtggatttccaaagtgtccttcctgcggtggtgttttgaagggctgatgaagattcagttcagcagaagaacttataaaatgcctctcgggaacctcaccatcgcggtctcaggagataaaatcctcagtgccatggagctggactcgtaccctctctacgccatctacctcatcgtcattggcctcagcggtggcttcatggtcctgtactacgtgtccttaaggttcatcaaacagaaaccaagtcaagactggtgattcacgccagacgtctgcccgctggtgggggacctgagcagacccttcaactgcactccctcctcaggagccccttcctggggacagtgaggacaatgaccctacagatgctcagctacatccggcccagggtgctgcagtggcacagaccagccacaggatggcagtagaataaagacagtcgaaagggatttctgctcactggcaggagactgcgatgactgggagaaaacctgcactcggtggcacctacaacgttgctaatttatttccttttgatatgcatttatataggcaactcgatataggatgggagcaaactaggaatgaattgggtagctagactgtgcaggaattgttggaacctggagggaacaataacagtagctagcagatttggcttcatcttccaggggccccacactccgtggtgagccaccatcaatacagaaagtgacctaagatgtaccagcaagatgccatcccttctttttgtgtggggtcatgggctccaaaagccaacgtgaacaattaaaaatgtattgagcatctactctgtagcaggtcctgtgaaaacactttaggtggacaatcccttgaggtaagtggtatcccattttataggtgtgaaaactgaagcaaaaattcattttcctaagggcacatggatactttgtggtggagtcatatggggatcagaaaagcctttgaggcctttggagttagagggcagaaggcaaggcctgagccgctgtaagccttaggagtttaggaaggctccagaagacaaatggggtctgtagaggctgttaactcagccaggcttcttagagttgcatttcactaactgatatggtttggctctgcgtcctcacccaaatctcaccttgaattgtaataatccccaagtgtcaaggggcgggaccagatggagataattgaatcataggggtggtttctctgatgctgttctcctgagagtgagtgagttctgatgagatccgatggttttataaggggcttccctcttc

SEQ ID NO: 44297 - DNA, 335 bp, Homo sapiens
catgataaaagtaacaatcatttattgagtacctactgtgggacagatgctgtcatcagttttctgatttaatcctcagagccactctatgaggcaggtattaccatccccattttgcataggagaaaaatgaggcttatggagactgtgacattcccagggtcacggggctggtgtatgctgttgcctcagcatctcttccttttggtttttaagtcgtcagatttccaacgacttccgagacctgcccaccctcctcatccatggggcggaggcctgtctgatgtcaatgaccatcggcttcctctattttggccatgggagcatccagctct

SEQ ID NO: 44298 - DNA, 546 bp, Homo sapiens
atttatatttgacagcagaacacgagctacagacttgcaaaacctgaagagcctcatcaaacatctaaattgggatggctttactgtgcctatttaaaaaaaaaaatgagagacttgggcaatatgataactactttgaattgtattaagagagtctccaaaacagaagcactgtagatttattctacttcttcattctcttttcctttcccttactttttaggttactcagagagggcaatgctttactatgaactggaagacgggctgtacaccactggtccatatttctttgccaaggtgactgggcagggttgagagcaagtgcccccccccaccaccagggtgggggtaagtgtggagaaaacgttgctacaaggaaggcttttctgaaccatggggccgtgggtcatgtgaagtcaccgatgccaccagatgccacattttctaggggagtttcagagacttgaacttttattttaaacatttaccaaaacaccaggactgtggaccaggaatgatagttttctggccagaaggaatcta

SEQ ID NO: 44299 - DNA, 1262 bp, Homo sapiens
gaagtgggtggtagggatctagaacaacactgctctgcactctgacaattccaagcgcagactcctgtaaaagcttggacagagctacttaaatcccacatgccagccctgcttaggttggcagatcatgagaccatgactgtgtctgggaaggcaagggcagaggcctttgtctgctttttgggttacaaaagtggattgggctggcacctacagctatgaataaaaggggaagagaaggcaacaaaagagagggagtgactggggtggaggtaaaaatatcttttcctctagaggggactttagagaaatttcttctcctaggtctttcctatacatgtggctttttctccttttctcatgtctcagtcactggccatggggcacagaggctggaggataacagaagcaatgcgagagtgaagtccaggcatctcaggctaaacccactgccacccaagcatggaactgacagcatgcagagccaggtggctggaagttgggcaaaaggggcaactggaggagagttggggagaggcaaccatgagaataaggcagaggatttataggagaatatggcccagagcccttggggataggccacacaggacacagcagatggtccccaagctggcctgatcctcccatcccgtttaataaggagtcaggattatgtgctcaatacctgaggtcctcttcagttcagcattctccagtctggaagaagggactctagagagccaggggaaatgtctgtgtatatgtacatgcatgcacagacacttattaacacacatctacttatattcggggcctcagcctgagtagccaaagaacagccaaaaaactagaagagatgctggagagtatgaggttcagagaggggattttagaagcagaggggctaagtccaaactcagaagtttactacagctgtgtgaccttgtgcaagtgacagcctccctagacctccaatcccttgctggttgaatggagcaaataatagtgttaacctctcaaaggccaggagagagccctgagccacttccacttagaggctcctgtatacttcacaacaaagaacagaaaagttagattatcatagtgtgacgtattttaagtgtttaaagaaaaattttaggccaggcatggtggctcacacctgtaatctcagcactttggatgaccaaggcaggcagatctcctgaggtcaggagttcgagaccagcctgaccaacatgatgaaaacccccatctctact

SEQ ID NO: 44300 - DNA, 618 bp, Homo sapiens
gtaaatgcttgcaggtttctctggcccagcccaggctggagaggagattggctttgctgtcgataaacaagtccctggtgcagcatcaaagctgttctgctttatcaatcgtggcccccccttcccgcatgttcctgtaacttaccaagcatttatgacattgattttacagtcgggctgttaaccctcccgccccttcaggcctgccaacctttttggcccaagctatcaatcagatgtcatccagccaatcagaagcatccctaagaagagccgccctgcagtctcacctgtatcccggctcagccttgcgaggaagtcccattgcgtttgctgtttggtttggtttggtttggtttggtttgggtttggtttactgtagtcatctctgttttaagtcagtatgtcctttctaaggctcatggaactttgtggttgcaaaatctgaagttataaatggagagataggggtatgtgtttgcatgtgtgtattagacacatcatagctttattcttccaaaaagttatttctccctgagacttctggtaaacctgccttccccagtttttcccgagggggagctgttgtctcattgtgcagtcaataatcaagaaatg

SEQ ID NO: 44301 - DNA, 664 bp, Homo sapiens
ggatgttaaatttttatagttattgcatgattgatgtgtttccttttcccacagaactaaagcatgttaaagatgctatttgaatttaattctgggaacataataaaaatagcattggggcattgaggagctcagaggcacaggcctcatcagccctgctttaatacctgagcagcaagaggttacaggtggcttctcctccctcccaggggacctcagtaggtagaggagagaggaggcacacagtcaggggaccctgaggccagagccacaccaggggattctgctgccccagtcccttcccacaggcttgtttgtccattgacaggaacagttgcacgtacaaaatcaactttgctttcccatcctctgtaaaatgtagtgcccagcctctttattatgcattttattactcccatttagaattatattgctatcaggaatgggtttcttgagaactggagcggaagaaaggctgtgtcccacgatatgtgatcctgctaataaagtggatgatcagacacaaagccaagttcatcttcccaccttggggccaccacagagccacgtggtaaccccctttttctgaaggaacggcattgaggcccaggccatgtgcatttccccctgggctgcctcctctgaccccaggattccagctctt

SEQ ID NO: 44302 - DNA, 310 bp, Homo sapiens
ctccccattttgacttctgggttgctggaaacctcaaccagcccacagaccaagggccttccatgggcaggagtcttaaaggacagttcttcctgtgtggccttgggcaggtcacccaagctctctccaaatctgtttcctcctccttaaagcaagacttctggctgggcacggtggctcacacctataatcccagctactcgggaggctgaggcaggagaatcacttgaacccggaggtggaggttgtagtgagccgagatcgcgccattgcactccagcccgggtaacagagcaagacttggactcaa

SEQ ID NO: 44303 - DNA, 533 bp, Homo sapiens
cgctggttgaaagtcaacaacaggtcacttcgattactggcaaagcagagtggtccaaaatgcagggctgagtcgaactcggttacaagtctaccgtggaagtcccagatccggactgagccatcaatgccacctgtgacaaaaagtttcaggggaaggcagacatcaaatgaagtgatgtcacactcatgcaggcattttgtctctctccacacaaagctctgttttgattctgaagatgtcagaaagccttcatagtgccagagacaccagcagtagctttcagtgatggcacccacagaacctggcaagagtatcacacgttttagggggcagccacagaggattttgctgacaggctgaaggactaccttgttcacctgaagcacggcctctgtcaagtgtatgatgttatccgtgccataggaacagagcaaggcgtttccctgagggccttccagggtagacaatgccaatactgccccagagtgaacagtcttctctattcgggcacaactatagtgggaaagggt

SEQ ID NO: 44304 - DNA, 416 bp, Homo sapiens
cacaccttgcagtagttaattggtatttgtggatcgaatgaacatgttaggtgcccactagcaggggttggtcctgtagtctgtggccatggaacattagaagaataaagctattgtggttcatcctgtagtatagtaagttcgagctgagctaacctgtaataacacaaatacaatttttttttttacgtttttaaaagttagagatgggttcttgctatgttgcccagggtagtctcaaactcctcgccttgagatcctcctgccttggctccccaaagtcctgcgattacaggcctgagccattatatttggccaacaaatagaattatttatttatttatttatttattttttgcgatggagtctcaccctgtcacctaggctggagtgcagtggcgtgatcttggctcatt

SEQ ID NO: 44305 - DNA, 2546 bp, Homo sapiens
ctagtcccgattatggttattacagtttgatgaaatgtggctgagatcattggcactgtggagattaagaaatgtgaggtcagagtgttgggtaaattgttcctgcgagtgttaaggttgtcaggataatggtgggaatggggtgaagatgacaactcagcaatgacacaagaagagagtgacacagaaagattcagtagctgagaacttgagcgtagatatgttgtgggcaggagggaaatgatttggatggaagtagccaagtaagtgagaaaggaaagactttccaacaaaacttggcttagctcactcagatccctgagctgcaaacttcttctatacctttcttaccttttccagtgctgctgacttcaccccacttgcagggcatttgtgcagatggttgtttgttgaggaggaatgtgcttaatgttttaggaaccagttacattcaaggatgcctctgtggccttcaccgaggaggagtgaggtcacctggactctgctcccaggaagctgtgcggagctgtgatgctgggcaactacagaaacttggtcttggagacttgaatgaaaattctgtggagaatcttcagcagaaaacacttcaggatctgttacatgagctttcctcctggctagttttggaaggcatggccagtacaattactggaagtcaggattgtattgtgaatcatcgaggggaagtggatggggagcctgaactagatatttccccttgtcaacagtggggagaagcatcttctcctatttccagaaacagggacagtgtgatgactcttcaaagtggttgtttcgaaaacattgaaagtgaaacatatttgcctttgaaagtctcaagccaaatagacacacaagactcttcagtgaagttctgtaagaatgagcctcaggatcatcaggaaagcagacgtctctttgtaatggaagaaagcactgagagaaaagtgataaagggggaaagttgttcagagaaccttcaagttaaactggtgtctgatggacaagaactggcctcgccattgttaaatggtgaggcaacttgccagaatggccagttaaaagaatctttggatcccattgactgtaactgcaaagacattcatggatggaaatcacaggtggtcagttgtagtcagcagagaggtcatacagaggagaaaccctgtgaccataataactgtgggaaaatacttaacaccagcccagatggtcatccatatgagaaaatccacactgcagagaaacaatacgaaggtagtcagtgtggtaagaacttcagtcaaagctcagagctactacttcatcagagagaccacacagaagaaaaaccctacaaatgtgagcaatgtgggaagggcttcacaaggagctcgagtctgcttatccatcaggcagtccacacagatgagaagccttataagtgtgacaagtgtgggaagggcttcaccaggagctcaagtctgctcatccatcatgccgtccatacaggcgaaaaaccttataaatgtgacaagtgtgggaagggctttagtcagagctccaaactgcacatccaccagcgagtccacactggagagaagccctatgagtgtgaggagtgtggtatgagcttcagtcagcgctcaaacctgcacatccaccagcgagtacacacaggagagaggccctacaagtgtggtgagtgtgggaagggcttcagtcagagctcgaaccttcacattcaccggtgcatccacacaggagagaagccttaccaatgctatgagtgtgggaagggtttcagccagagctcggatcttcgcatccatctcagagtccacactggagagaagccctatcactgtggcaagtgtgggaagggatttagccagagttccaaactcctcatccaccagagagtacatactggagagaagccctatgagtgcagcaagtgtgggaagggcttcagccagagctccaaccttcacatccaccagcgggttcacaagaaagatcctcgctaactgacattagcccattcaggtcttcacagcgctcatactgtaaaaactgttaaatatttagtatcactcttactttatattctacaaaggagagagatgtaagggttatttagatatgttccctcactgaaaaatcactcattcaaaatatttaagtatcaagcactttgttatgctgtacaatgaatggattgttcttgtttctcagatgggtagagtaaaagtgtctgtactttacaattcaactacttgttctacccagcattttaacggcaagaactttatatttattctcaagcagggcatgtttccctttgttcacattctctgagaaattgaaactctggtttctcttcaaaaaaagatatagtacaaagaaccccgggcttatacgcgggggcgggaaaagggtatggaaggggccaggggcaaaggtgttccggacccggtttttgacaagggggaaattgccggccccaaaaggggggataattccaaagccgggaacgtagaagg

SEQ ID NO: 44306 - DNA, 2198 bp, Homo sapiens
  misc_feature (2)..(2): n is a, c, g, or t
  misc_feature (4)..(4): n is a, c, g, or t
  misc_feature (7)..(7): n is a, c, g, or t
gncngcntccggaatctggcccctgcaggcgtggggttccacgtgggaggaatccatcccctctgggagtaagaaatgaccagggtccgggaaccagttacattcaaggatgcctctgtggccttcaccgaggaggagtgaggtcacctggactctgctcccaggaagctgtgcggagctgtgatgctgggcaactacagaaacttggtcttggagacttgaatgaaaattctgtggagaatcttcagcagaaaacacttcaggatctgttacatgagctttcctcctggctagttttggaaggcatggccagtacaattactggaagtcaggattgtattgtgaatcatcgaggggaagtggatggggagcctgaactagatatttccccttgtcaacagtggggagaagcatcttctcctatttccagaaacagggacagtgtgatgactcttcaaagtggttgtttcgaaaacattgaaagtgaaacatatttgcctttgaaagtctcaagccaaatagacacacaagactcttcagtgaagttctgtaagaatgagcctcaggatcatcaggaaagcagacgtctctttgtaatggaagaaagcactgagagaaaagtgataaagggggaaagttgttcagagaaccttcaagttaaactggtgtctgatggacaagaactggcctcgccattgttaaatggtgaggcaacttgccagaatggccagttaaaagaatctttggatcccattgactgtaactgcaaagacattcatggatggaaatcacaggtggtcagttgtagtcagcagagaggtcatacagaggagaaaccctgtgaccataataactgtgggaaaatacttaacaccagcccagatggtcatccatatgagaaaatccacactgcagagaaacaatacgaaggtagtcagtgtggtaagaacttcagtcaaagctcagagctactacttcatcagagagaccacacagaagaaaaaccctacaaatgtgagcaatgtgggaagggcttcacaaggagctcgagtctgcttatccatcaggcagtccacacagatgagaagccttataagtgtgacaagtgtgggaagggcttcaccaggagctcaagtctgctcatccatcatgccgtccatacaggcgaaaaaccttataaatgtgacaagtgtgggaagggctttagtcagagctccaaactgcacatccaccagcgagtccacactggagagaagccctatgagtgtgaggagtgtggtatgagcttcagtcagcgctcaaacctgcacatccaccagcgagtacacacaggagagaggccctacaagtgtggtgagtgtgggaagggcttcagtcagagctcgaaccttcacattcaccggtgcatccacacaggagagaagccttaccaatgctatgagtgtgggaagggtttcagccagagctcggatcttcgcatccatctcagagtccacactggagagaagccctatcactgtggcaagtgtgggaagggatttagccagagttccaaactcctcatccaccagagagtacatactggagagaagccctatgagtgcagcaagtgtgggaagggcttcagccagagctccaaccttcacatccaccagcgggttcacaagaaagatcctcgctaactgacattagcccattcaggtcttcacagcgctcatactgtaaaaactgttaaatatttagtatcactcttactttatattctacaaaggagagagatgtaagggttatttagatatgttccctcactgaaaaatcactcattcaaaatatttaagtatcaagcactttgttatgctgtacaatgaatggattgttcttgtttctcagatgggtagagtaaaagtgtctgtactttacaattcaactacttgttctacccagcattttaacggcaagaactttatatttattctcaagcagggcatgtttccctttgttcacattctctgagaaattgaaactctggtttctcttcaaaaaaagatatagtacaaagaaccccgggcttatacgcgggggcgggaaaagggtatggaaggggccaggggcaaaggtgttccggacccggtttttgacaagggggaaattgccggccccaaaaggggggataattccaaagccgggaacgtagaagg

SEQ ID NO: 44307 - DNA, 330 bp, Homo sapiens
tatcatcgaaaaaatctttgaggcagattaatttagaaaggacttcaaataatttaagtacttctcagaataattaacattaaaaaattacagaagtaatacacatcagtatttagcttgatgagttttgacaaatgattacctccttgtaaccaccattgcaatcaaaatgtaaatatttctgtcttcccaaaagttcctccatatccctttgcagtaaccccttcctgtccctaacccttaggcaaatattaatctgctttctttcattgatcagcttgccttttccagaatttcgtttaaatgtgatgacaatacatactccttttg

SEQ ID NO: 44308 - DNA, 398 bp, Homo sapiens
tgtctgaggggttttgtctgtggcttgtcctgctacaatgggagtgacatggaacagcctaggtgagtgctgtgcatcactgctaagggaccttgagcttgggaaaccctgtctgtaagaaaactcactcaacttttgccccaggagaaggtattttatacaaaaataatagaaaagatggtctgaaacaaaagctgttcagtgctgctgctcaccaaatgcacaaacctaagacccatggaaatctttctaccagcctatttcttcctccttccccactttctttaactaaaagagaaatttatgaattaatttcagtggagaagtagatggttttttaaccatcaaatacattataattttactagaaaaagtataagcattatacatatggatat

SEQ ID NO: 44309 - DNA, 451 bp, Homo sapiens
gtctttgagaagagtgttccagaagtgtaaatgagatcaagcaggttgatatgttgtttagataatctataccctgttgcttttctgcattagttctatcaattaccaagagagatatgttgaaatatctgattataattgtggatttgtctgttactttattgatctaacaggtttttactcacatacttagaagctgtattaagagcataatttaggtttgttctttccactggatgaactgtatccttcatcattatgatgatgtaactttctttatccctgatatagtctttttggtgaagtcactttgtttttaatatagccactccagctttcttttgactagtgttaggattttatatatttttccatccttttacttttaacctattagtgcttttatattttaagtattacctgtaggtagcacgtatttgggtctgacttt

SEQ ID NO: 44310 - DNA, 532 bp, Homo sapiens
gcagtatgatattactgtatcggacctgaatcagcccatgcttgttagtctgttaaagaagaagagaaatgacaacagtgagcctcagctcgcccacctgatacctgagctctgctttctaacagggctgactgaccaggcaacatctgatttccagctgatgaaggctgtggctgaaaagacacgtctcagtccttcaggccggcagcagcgcctggccaggcttgtggacaacatccagaggaataccaatgctcgctttgaactagagacctggggactgcattttggaagccagatatctctgactggccggattgtgccttcagaaaaaatattaatgcaagaccacatatgtcaacctgtgtctgctgctgactggtccaaggatattcgaacttgcaagattttaaatgcacagtctttgaatacctggttgattttatgtagcgacagaactgaatatgttgccgagagctttctgaactgcttgagaagagttgcaggttccatgggatttaatgtggactac

SEQ ID NO: 44311 - DNA, 690 bp, Homo sapiens
gctaactgttaaagatattaaaattattgtcatttggcaaccatcgtaataattgattcaggcaaaaatcatgaggggatactaaagttaatggatcaaagttcagtgaggaataggatatttacacagttacaaagggaaaaaaatagtaactttatagtggagaagcctggcagacacctcattcaagtgattaaagttatcaacagtaatgggacatactgacattatatgcctcctgagatgatgcactgagaaggcatcagttctttgttgtttctgtcaaaaatgaataatctgaatctagttatgagaaaacaacaaacccaaattaagggctagtcttcaaagtaactggcctggtctgtatatttcacaaatggcagtcatgaaagacatgccaaataacttctagattagagaataccaaagagacgtgacagttgaatacagtgtgtgatctgaagttttccctttttcgtatttcattgacatttttctcttctagtagctagatactgaagtagtatatttaaacagaaaaaaagtacttctaactaatagtctgaatacagcaatatatcaatgtcccctcctattttctagtttatgtggattttaatcagtattgcagatttggcttggggtgtgtgtgtgtgtgtgtgtgtgtgtgtgtgtgtgtgtatgtgt

SEQ ID NO: 44312 - DNA, 477 bp, Homo sapiens
tacaccaaggttgggagagggccagggccaagagaggttttctgctcttctgatactgacccgaggtaagtaactttttacttttatcctctctcattccttgtcagtttgtgaaatgtgaaaggtgattcccctaggacttggacatcttaggcagattgccttgccctgcaggatgctccagccttgtggacagagtggcatggcttcactgctttgcaggcacctccttcattgtcatttattcattcagcaaactgtatgagtggcgactatgtgccaggtcccgtgctaggcactggaggtgcagtggtgactttttttttctgctgttggtttatctgagtgaatgttcaagtaagtaggtgaggtggagttttgtgagtctgtgggaaggaaggaaattagcatcacacctttcttttatgagcctgtttttgtttacagctttggaactttttgaatgaaaattataaa

SEQ ID NO: 44313 - DNA, 432 bp, Homo sapiens
gttagggtagtttgttttttggcagtcttgtctcttcagatgtgatgtggggtgtttgccaatatactgaaaacgcagcatcacggctgtttctctgacctcagcatcctgaagtggtgtttcagctcctgctctccttacatcgttttaccagtaggtccagtgcatttagatttgtcattagcttttaaggtgaggtttgggcaaaatccattttattttggatgacttatcatcccactgattcttgactccttggtaattctgctaatgctaatttttttagcttcatatattttcattagggcttgaaagtctctgagcttttcttactgattgcatcctatccatggcattcaaatgtgtctgaatttcaacttgttgaaatcattgaaacttaaataaaaactgagaggttgttttatagttaaa

SEQ ID NO: 44314 - DNA, 1218 bp, Homo sapiens
aacttatccaaggtcacaaagacactttgacttcctttgaacccatgtctagtgactccagaaccagtctcttacctagtatgcccccctccgtgaggtagagctctgtggaagaggtagcattttaggctgaatttctttgtttcccaaaaggaagttggtttctatctttatcctttttttaaattaaacttttatttcctccaaggcaattattctaaatggagttccatacctagagctccctttcatattgtaaaaatagcacaactgatggcgtttcatggtgaagctgtgttggatcatcccagagaagctccgagacagggcaagtgaacaccagaccacaaaggacagctacagtgtcaccatctgtggaaactaggcttttcccccatgcacgccttttcctgattcttcctctgcatagagacatttggctactttttccatcatggtggttagaacaagaaaatttgggcggaaaatgggagttctcaggagccaagatttgggcctgggaaaggaaggatgaagaggagcagtttggagcggggcatgaggttagactctcaaggccaggtgggcttgctgagggcagtgatcctctgaggttgttgactcccagtggcaggtgaccccttatcaggacttgcctggtagaagtccctggactgagccagataactaaattgggaccattggtgcttgtgttgccttttgtaccgggtaccctttacgccttgtttgctttttgttggagatatttatctccttgtaaaaagtgcagttctttccctaccccagtcatgaggctctggctcagaggaggtacaagattgtagcaaaaaatttgagagctgggccaccctggggcctgccggaccaggggcatactggggccagtgtgcactctctgaagggacaactgtgatttattctggctaatcattgtcgtgtaggatcacaggctgattgctagcacatttgccagtttttcaaaagaaattagaacctatatttttaatcaaaagtcttttgatttgtaaatagtggcaaccaattcatatatgtcttcaatgtatagtgaaatctggtcagtaggctgcccctgctctctctgacgtagaacataccgattcaccctttgttttctgttcagagcagactacttcaaattaaggaaaagagtacaaaaccaacaacaaactctccatg

SEQ ID NO: 44315 - DNA, 1164 bp, Homo sapiens
aacttatccaaggtcacaaagacactttgacttcctttgaacccatgtctagtgactccagaaccagtctcttacctagtatgcccccctccgtgaggtagagctctgtggaagaggtagcattttaggctgaatttctttgtttcccaaaaggaagttggtttctatctttatcctttttttaaattaaacttttatttcctccaaggcaattattctaaatggagttccatacctagagctccctttcatattgtagaagctccgagacagggcaagtgaacaccagaccacaaaggacagctacagtgtcaccatctgtggaaactaggcttttcccccatgcacgccttttcctgattcttcctctgcatagagacatttggctactttttccatcatggtggttagaacaagaaaatttgggcggaaaatgggagttctcaggagccaagatttgggcctgggaaaggaaggatgaagaggagcagtttggagcggggcatgaggttagactctcaaggccaggtgggcttgctgagggcagtgatcctctgaggttgttgactcccagtggcaggtgaccccttatcaggacttgcctggtagaagtccctggactgagccagataactaaattgggaccattggtgcttgtgttgccttttgtaccgggtaccctttacgccttgtttgctttttgttggagatatttatctccttgtaaaaagtgcagttctttccctaccccagtcatgaggctctggctcagaggaggtacaagattgtagcaaaaaatttgagagctgggccaccctggggcctgccggaccaggggcatactggggccagtgtgcactctctgaagggacaactgtgatttattctggctaatcattgtcgtgtaggatcacaggctgattgctagcacatttgccagtttttcaaaagaaattagaacctatatttttaatcaaaagtcttttgatttgtaaatagtggcaaccaattcatatatgtcttcaatgtatagtgaaatctggtcagtaggctgcccctgctctctctgacgtagaacataccgattcaccctttgttttctgttcagagcagactacttcaaattaaggaaaagagtacaaaaccaacaacaaactctccatg

SEQ ID NO: 44316 - DNA, 434 bp, Homo sapiens
tttattgatagaatgggaaacttactgctggtaactagttaattctgaaagggttagggtttctactgtatacttccaaaagtacaggcctgggggagccaatatgagagacacacataaccaaaaatttgtaaaaactttattttttaataaaaattataaataaaaattataggccgggtgcactagctcatccctgtaattccagcattttgggaggctgaggcggactgatcacttgaggtcaggagtttgaaaccagcctgggcaacatgttgaaaccctgtctctactaaaaatacaaaaattagccatgcatagtggcacacacgtgtaatcccagctacttgggtggctgaggcacgagagtcgcttgagtccgggtggtggaggttgcagtgagccacgatcacgccactgcactccagcctggg

SEQ ID NO: 44317 - DNA, 360 bp, Homo sapiens
gatagatactcacctgcagggacagatccaagttttgtgagtcctcacatatataatttgtgtgtgtgcaggggggcttcttaaagaataagattacaaaattatgaatataataattaggtataggcaacgcatggtgggccacacctgtaaccccagcactttgggaggctgaggcgggtggattgcttgaactcacaggtttgagaccagcctgggcaatatggcaaaacccttgtctttactaaaaatacaaaaattagccgggtgtggtggcgcatgcctctaatcccagctactaggaggctgagacatgagacttgcttgaaccctggattgcagtgagccaaaatcgggcca

SEQ ID NO: 44318 - DNA, 387 bp, Homo sapiens
gaatttaataccgacctcacctataggggaatttgggcccctcgaggccccaagaattcggccaccgaggagtctagtataggaataagatgtgtatgcattataccccattataaaataggatggtttaaatgctaaatttaagtaacagtagcatgctgtggcagcggaagagaatgaacatttaattcagcttggagttagctggaatttgatggacaaaaaggattctgattctgaattggcttaggttctacttgatgtagaataggaaagtcatcccagactttaggaatgacagttttatgacacatcaaaaaaggtttattaggccctatgttaacactatcaatatacattttatgcagtcacttggtagtatacaca

SEQ ID NO: 44319 - DNA, 751 bp, Homo sapiens
ctgtctcaaagaaaaaaaaagaaaattggttagttttctaaattgcattgaaaattttataaataatagaagcccgagagaaagccacacagcaaaactttctctctctgccaatgaaatgtattattttcagccacctctttttaaaaacaatattatcttcattcctgtacccttcattttgctttgtatttttgagagcgctggttgccttaaaatcagtatctcaaatctctggcaaagttccttctgtttctttgactctatgaccctgatattttctagaggtagctggtgtcaatttgagaagcatccagaggagtgaatagaaaagaggccttagcattaaaaagactaaatttaaatccttgttccgccacttcctaactgtgtgaccttgggcaagttaatacacatgctgagcttggattaatcagtggaggcttgtaggacacctactgtgatggcaaattctgtttgtttctagcaggagagattttaaaaagaagttaaagaaaaaaatatgtgagactatgatattctcccatattatcaaaaacacttattttcctcaatgtaggaatagtgcaagcctgtcgacccagctattttagaggctgaagtgggagcatcacatgagcccaggagttcaagaccaggctttaagagaccctgtctcttaaaacagataacaaatgtaaagtttataggaaagattacatcatgttgattcagcaaatattttcctctc

SEQ ID NO: 44320 - DNA, 384 bp, Homo sapiens
aactaatgtaatataccatattaatagaataaaaacatatcagattattatctcaatgtgtgcaataaaataaatttgacaaaataacctgtacccaatcataataaaatctcaacaaattatgaacagattgaactctctcatcctgactaacagcatgaaagaaataaacactcaccttaaacatgaaagcttgaagagattgaatgctttgcctataatattggtagcaaagtaacaatgtctgttttcactacttttattcaacattgcactggagatgtcagacagtacagtcagataagaaattgcaataaaaggtatccaggttggaaaggaaaaagtaaaattctttttagtctcagactacatgatcctgtatgt

SEQ ID NO: 44321 - DNA, 451 bp, Homo sapiens
gataggtaaaatttcttgtgttagtaaaaaaactaaaaatgcctcttcatgaaagtattcagtcactgccaaaagttgtcaagtttctggagcctgagtgtgtggacaggtagggggtcctggggagcctggcctgaactctctggtccacttcaaaggcctcagagctcagtgcaggcagctgccccgagaacaaaggctgctcaagtgagaaggctttaacctcttccttgctgttgctcagccccgctggaaagagatgacgtgttaaattccacagtccatagctacaatttgcctgtgattttccagattgtcacttctctgtggtgattctgtaggaggcctgccataaaactgctgtgatcatctgtggtaacaagggtgggggcagagtaacaagggtctggaaacctcactttggctgtagccctctcctttcacaccttct

SEQ ID NO: 44322 - DNA, 436 bp, Homo sapiens
tcaagacaagagtctcattctttcacccaggctggagtgcagtggtgcgatcataactcactgcagcctggacctcctgtgctcatgtaatcctcccacctcagtttccccaagtagccgggactacaggcacgcgccaccaggcctggttgatttatttttattttttattgagacagggtcttgctgtttcccaggctaacccccacttctgttgtcccaaactggacatctggaaccccgatctccagcatcccatactatccaaccagatcccagtctgttaccccaactaggcaaccagacctataatggctgcagcctcaaactagccaactggtcaccccaggtcttccaccccaagccaaggccctgatccccccaactggtcaccccaggtcttccaccccaagccaaggcgctgatccccccaact

SEQ ID NO: 44323 - DNA, 348 bp, Homo sapiens
cttattgtgaagaaaagatactaaagcatgctgtaggtcagtcattttctagtgacagggattagaggactagaatccattcaatttttaaaactttacctacgaatagttagaaaatatatgcttgaaataatctcattctagtttattgttattgtttattttctaagccttctttacaaatatattttcccactgtaattcagtttaaatggatggtttttacttcttaataaaattattgactattgatttatatctgatacaatcctttgtagtattcaatgctgatgttgaaaaaattcagccacaatgaataaggagtgttcccaaggaccctcagacaaa

SEQ ID NO: 44324 - DNA, 1089 bp, Homo sapiens
ccggggaccacacgccgcgctgtccccagcacccaacccaggttaccatggcctccctgttctctggccgcatcctgatccgcaacaatagcgaccaggacgagctggatacggaggctgaggtcagtcgcaggctggagaaccggctggtgctgctgttctttggtgctggggcttgtccacagtgccaggccttcgtgcccatcctcaaggacttcttcgtgcggctcacagatgagttctatgtactgcgggcggctcagctggccctggtgtacgtgtcccaggactccacggaggagcagcaggacctgttcctcaaggacatgccaaagaaatggcttttcctgccctttgaggatgatctgaggagggacctcgggcgccagttctcagtggagcgcctgccggcggtcgtggtgctcaagccggacggggacgtgctcactcgcgacggcgccgacgagatccagcgcctgggcaccgcctgcttcgccaactggcaggaggcggccgaggtgctggaccgcaacttccagctgccagaggacctggaggaccaggagccacggagcctcaccgagtgcctgcgccgccacaagtctgactggtttctctacgactgccgcctcctcagacacgtggcccttggccttttctgctgtgggatctccgtctatttagcagcactgtccatctatgccttgctacttttcgagatcgagacaggcgcagcagctgcttccatcctcggctcgggcaccctggttctggtggctgtgctgacccacactctcctccgggctgcccgggctgcccgccgtgggctccatgagttgtccccgccatcctttgaagacgacctcgcccgccctgccgaagtctccaaggccagccccagagctcagcctcagcagggtatccatcgtcggaccccctattcaacctgtccagagcctggggaccctttgggtccatggccactgcacagcacctgcagccctggagggaggctgggagagcagcctgcctgcatccagaatgcaccggacactgtcggctggcctggggcactgggacggggttacg

SEQ ID NO: 44325 - DNA, 394 bp, Homo sapiens
ccctggtgtacgtgtcccaggactccacggaggagcagcaggacctgttcctcaaggacatgccaaagaaatggcttttcctgccctttgaggatgatctgaggaggtgaggaggggcagggagggcttcctggaggagggggcatgttcgctgaaagtgaagcatccattctaactagagtgaatgagcagcccctgtgtgccagtccatatactgggaactagggggtacagacaggggtgcccacttccacatgctggcttccatgccaccccagggagcttagagccgagtgagaggaacagatgcaaaagacagaatcaactatgtaatagcaaggccgggcatggtggcttaaccctgtaatcccaggactttggcaggccgaggtgg

SEQ ID NO: 44326 - DNA, 906 bp, Homo sapiens
ccggggaccacacgccgcgctgtccccagcacccaacccaggttaccatggcctccctgttctctggccgcatcctgatccgcaacaatagcgaccaggacgagctggatacggaggctgaggtcagtcgcaggctggagaaccggctggtgctgctgttctttggtgctggggcttgtccacagtgccaggccttcgtgcccatcctcaaggacttcttcgtgcggctcacagatgagttctatgtactgcgggcggctcagctggccctggtgtacgtgtcccaggactccacggaggagcagcaggacctgttcctcaaggacatgccaaagaaatggcttttcctgccctttgaggatgatctgaggagggacctcgggcgccagttctcagtggagcgcctgccggcggtcgtggtgctcaagccggacggggacgtgctcactcgcgacggcgccgacgagatccagcgcctgggcaccgcctgcttcgccaactggcaggaggcggccgaggtgctggaccgcaacttccagctgccagaggacctggaggaccaggagccacggagcctcaccgagtgcctgcgccgccacaagtaccgcgtggaaaaggcggcgcgaggcgggcgcgaccccgggggagggggtggggaggagggcggggccggggggctgttctgacccgctagggtggaggagaggagtggggtttgttgatgaacctccacccccaccccacccccgcacgcctgtaatcccagcacttggggaggccaaggcgggaggatcgcttgagcccagaggttcgagatcaacctgggcaagagagtgagaccctgactctacgaaaattaaaagttagcccggtgtggtggcgcgcacctgtggcttagctaccctg

SEQ ID NO: 44327 - DNA, 632 bp, Homo sapiens
ggccaggagctgggcgccggccccgggctgccagaggacgcggccgggacgctgctgccgctggccgccgcgctggccgcgctggtgctcgtgctggggttcacctgcttgctgctcgccgcgctctgtggccacctgggcgccgagctggcgcgggggcctggccccaggaggtctgactggtttctctacgactgccgcctcctcagacacgtggcccttggccttttctgctgtgggatctccgtctatttagcaggtgtgtgctggaatagaacgtggggcatgggaccctgggctgggtagagagcagcaatggtcccctaactgggatcaactctgcagacagcctccttgagttcaactccaggctctgacacttctttgctttggtgccttgggcaaagtctctctgtgccttgatttcctcatcagtacaatgggaataactgtcattacctcacagaatcacttgaggagattctgagatttaatcctcatgaaagcccataggaccaggcatagtagctcacatctgtaatcccagcaatatgggagactgaggtaggaggattgcttgaggccaggagtttgagaccagcctgggcaacataacaaaaccccatctctac

SEQ ID NO: 44328 - DNA, 2019 bp, Homo sapiens
cctgcggggcggtgactggcccagccgcaccgcgtctcccgccttctccgcagccccgcaggccccgggccctgtcattcccagcgctgccctgtcttgcgttccagtgttccagcttctgcgagatgaccctcaaggcgagcgagggcgagagtgggggcagcatgcacacggcgctctccgacctctacctggagcatttgctgcagaagcgtagtcggccagaggctgtatcgcatccattgaatactgtgaccgaggacatgtacaccaacgggtctcctgccccaggtagccctgcccaggtcaagggacaggaggtgcggaaagtgcgactcatacagtttgagaaggtcacagaagagcccatgggaatcactctgaagctgaatgaaaaacagtcctgtacggtggccagaattcttcatggtggcatgatccatagacaaggctcccttcacgtgggggatgagatcctagaaatcaatggcacaaatgtgacaaatcattcagtggatcagctgcagaaggcgatgaaagaaaccaaaggaatgatctcattaaaagtaattcccaaccagcaaagccgtcttcctgcactacagatgttcatgagagcgcagtttgactatgatcccaaaaaggacaatctgatcccttgcaaggaggcgggactgaagtttgctactggggacattatccagattatcaacaaggatgacagcaattggtggcagggacgggtggaaggctcctccaaggagtcagcaggattgatcccttcccctgagctgcaggaatggcgagtggcaagtatggctcagtcagctcctagcgaagccccgagctgcagtccctttgggaagaagaagaagtacaaagacaaatatctggccaagcacagctcgatttttgatcagttggatgttgtttcctacgaggaagtcgttcggctccctgcattcaagaggaagaccctggtgctgatcggagccagtggggtgggtcgcagccacattaagaatgccctgctcagccagaatccggagaagtttgtgtaccctgtcccatatacaacacggccgccaaggaagagtgaggaagatgggaaggagtaccactttatctcaacggaggagatgacgaggaacatctctgccaatgagttcttggagtttggcagctaccaaggcaacatgtttggcaccaaatttgaaacagtgcaccagatccataagcagaacaagattgccatccttgacattgagccccagaccctgaaaattgttcggacagcagaactttcgcctttcattgtgttcattgcacctactgaccagggcactcagacagaagccctgcagcagctgcagaaggactctgaggccatccgcagccagtacgctcactactttgacctctcactggtcaataatggtgttgatgaaacccttaagaaattacaagaagccttcgaccaagcgtgcagttctccacagtgggtgcctgtctcctgggtttactaagcttgtagaatgggggaacccactgtatgcccctctccagcatttggaattccacccgccttgctttaagacaaacagggctgctccaactagttttgtgtcagcttccagctctctgcagctatcctaattcagccagtaaggttcagtcttcttgctcaggctcctgaagggttgattctcctgatagatggggccccactgatctggatttgaaaaggatttctagaaattgggggtaagaagtactaccaaaatgtaactgctaatcaagggtgatgcacagcaaaagcaatggaccccatccctctaaagcctgccctcctttgccttcaactgtatatgctgggtatttcatttgtctttttattttggagaaagcgtttttaactgcaactttctataatgccaaaatgacacatctgtgcaatagaatgatgtctgctctagggaaaccttcaaaagcaataaaaatgctgtgttgaaatgccaa

SEQ ID NO: 44329 - DNA, 734 bp, Homo sapiens
cctgcggggcggtgactggcccagccgcaccgcgtctcccgccttctccgcagccccgcaggccccgggccctgtcattcccagcgctgccctgtcttgcgttccagtgttccagcttctgcgagatgaccctcaaggcgagcgagggcgagagtgggggcagcatgcacacggcgctctccgacctctacctggagcatttgctgcagaagcgtagtcggccagagatgttcatgagagcgcagtttgactatgatcccaaaaaggacaatctgatcccttgcaaggaggcgggactgaagtttgctactggggacattatccagattatcaacaaggatgacagcaattggtggcagggacgggtggaaggctcctccaaggagtcagcaggattgatcccttcccctgagctgcaggaatggcgagtggcaagtatggctcagtcagctcctagcgaagccccgagctgcagtccctttgggaagaagaagaagtacaaagacaaatatctggccaagcacagctcgatttttgatcagttggatgttgtttcctacgaggaagtcgttcggctccctgcattcaagaggaagaccctggtgctgatcggagccagtggggtgggtcgcagccacattaagaatgccctgctcagccagaatccggagaagtttgtgtaccctgtcccatatacaacacggccgcgcaggtttcggggtcctctagagtca

SEQ ID NO: 44330 - DNA, 478 bp, Homo sapiens
  misc_feature (88)..(88): n is a, c, g, or t
ggggtcccccaaccccggggctgtggaacgggtacctaagccctggccctgttagaaaactgggcccgcacagccagaaaagtgaagntagccctgccctgaacattactgccctgagcttcaccctccccatcaaatcagtagtggcattagattatcataggagcacaaacccctattgtgaaactgtgcatgcacgtgatctaggttgtgtactccttgtgagaatgtaactaatgcctgatgatctgaggtggaacagtttcatcctgaaaccatcccacacagtccatggaaaagcctgccctcctttgccttcaactgtatatgctgggtatttcatttgtctttttattttggagaaagcgtttttaactgcaactttctataatgccaaaatgacacatctgtgcaatagaatgatgtctgctctagggaaaccttcaaaagcaataaaaatgctgtgttgaaatgccaa

SEQ ID NO: 44331 - DNA, 164 bp, Homo sapiens
cgaattcaagcttctaacgatgtacggggacatgtaagtagctcttaggcaccttggaggggaggtgacaggctggtaccactcgccatctgaaataccatagtgttattttattattttttaaattattttattttaaatgattattaaaactaaacaaaata

SEQ ID NO: 44332 - DNA, 2060 bp, Homo sapiens
gtgactggcccacgcgcgacgcgtgtcccgactactccgctgccccggaggatccgggccctgtaattccactagcgctgcactcgtgtattggcgttgccatttgttaccaagctaacatgacagagcaatgaccgcgtcaaacgggcagacgctgacgggacgagaagttgaggagtcgagacatgcagcacggcagtctctcgcgatcttactaaactgggagctattatggctgacgacgaagactgatacgtcgtgacagagcgctgtatcgcatccattgaatactgtgaccgaggacatgtacaccaacgggtctcctgccccaggtagccctgcccaggtcaagggacaggaggtgcggaaagtgcgactcatacagtttgagaaggtcacagaagagcccatgggaatcactctgaagctgaatgaaaaacagtcctgtacggtggccagaattcttcatggtggcatgatccatagacaaggctcccttcacgtgggggatgagatcctagaaatcaatggcacaaatgtgacaaatcattcagtggatcagctgcagaaggcgatgaaagaaaccaaaggaatgatctcattaaaagtaattcccaaccagcaaagccgtcttcctgcactacagatgttcatgagagcgcagtttgactatgatcccaaaaaggacaatctgatcccttgcaaggaggcgggactgaagtttgctactggggacattatccagattatcaacaaggatgacagcaattggtggcagggacgggtggaaggctcctccaaggagtcagcaggattgatcccttcccctgagctgcaggaatggcgagtggcaagtatggctcagtcagctcctagcgaagccccgagctgcagtccctttgggaagaagaagaagtacaaagacaaatatctggccaagcacagctcgatttttgatcagttggatgttgtttcctacgaggaagtcgttcggctccctgcattcaagaggaagaccctggtgctgatcggagccagtggggtgggtcgcagccacattaagaatgccctgctcagccagaatccggagaagtttgtgtaccctgtcccatatacaacacggccgccaaggaagagtgaggaagatgggaaggagtaccactttatctcaacggaggagatgacgaggaacatctctgccaatgagttcttggagtttggcagctaccaaggcaacatgtttggcaccaaatttgaaacagtgcaccagatccataagcagaacaagattgccatccttgacattgagccccagaccctgaaaattgttcggacagcagaactttcgcctttcattgtgttcattgcacctactgaccagggcactcagacagaagccctgcagcagctgcagaaggactctgaggccatccgcagccagtacgctcactactttgacctctcactggtcaataatggtgttgatgaaacccttaagaaattacaagaagccttcgaccaagcgtgcagttctccacagtgggtgcctgtctcctgggtttactaagcttgtagaatgggggaacccactgtatgcccctctccagcatttggaattccacccgccttgctttaagacaaacagggctgctccaactagttttgtgtcagcttccagctctctgcagctatcctaattcagccagtaaggttcagtcttcttgctcaggctcctgaagggttgattctcctgatagatggggccccactgatctggatttgaaaaggatttctagaaattgggggtaagaagtactaccaaaatgtaactgctaatcaagggtgatgcacagcaaaagcaatggaccccatccctctaaagcctgccctcctttgccttcaactgtatatgctgggtatttcatttgtctttttattttggagaaagcgtttttaactgcaactttctataatgccaaaatgacacatctgtgcaatagaatgatgtctgctctagggaaaccttcaaaagcaataaaaatgctgtgttgaaatgccaa

SEQ ID NO: 44333 - DNA, 1944 bp, Homo sapiens
cctgcggggcggtgactggcccagccgcaccgcgtctcccgccttctccgcagccccgcaggccccgggccctgtcattcccagcgctgccctgtcttgcgttccagtgttccagcttctgcgagatgaccctcaaggcgagcgagggcgagagtgggggcagcatgcacacggcgctctccgacctctacctggagcatttgctgcagaagcgtagtcggccagaggctgtatcgcatccattgaatactgtgaccgaggacatgtacaccaacgggtctcctgccccaggtagccctgcccaggtcaagggacaggaggtgcggaaagtgcgactcatacagtttgagaaggtcacagaagagcccatgggaatcactctgaagctgaatgaaaaacagtcctgtacggtggccagaattcttcatggtggcatgatccatagacaaggctcccttcacgtgggggatgagatcctagaaatcaatggcacaaatgtgacaaatcattcagtggatcagctgcagaaggcgatgaaagaaaccaaaggaatgatctcattaaaagtaattcccaaccagcaaagccgtcttcctgcactacagatgttcatgagagcgcagtttgactatgatcccaaaaaggacaatctgatcccttgcaaggaggcgggactgaagtttgctactggggacattatccagattatcaacaaggatgacagcaattggtggcagggacgggtggaaggctcctccaaggagtcagcaggattgatcccttcccctgagctgcaggaatggcgagtggcaagtatggctcagtcagctcctagcgaagccccgagctgcagtccctttgggaagaagaagaagtacaaagacaaatatctggccaagcacagctcgatttttgatcagttggatgttgtttcctacgaggaagtcgttcggctccctgcattcaagaggaagaccctggtgctgatcggagccagtggggtgggtcgcagccacattaagaatgccctgctcagccagaatccggagaagtttgtgtaccctgtcccatatacaacacggccgccaaggaagagtgaggaagatgggaaggagtaccactttatctcaacggaggagatgacgaggaacatctctgccaatgagttcttggagtttggcagctaccaaggcaacatgtttggcaccaaatttgaaacagtgcaccagatccataagcagaacaagattgccatccttgacattgagccccagacagaagccctgcagcagctgcagaaggactctgaggccatccgcagccagtacgctcactactttgacctctcactggtcaataatggtgttgatgaaacccttaagaaattacaagaagccttcgaccaagcgtgcagttctccacagtgggtgcctgtctcctgggtttactaagcttgtagaatgggggaacccactgtatgcccctctccagcatttggaattccacccgccttgctttaagacaaacagggctgctccaactagttttgtgtcagcttccagctctctgcagctatcctaattcagccagtaaggttcagtcttcttgctcaggctcctgaagggttgattctcctgatagatggggccccactgatctggatttgaaaaggatttctagaaattgggggtaagaagtactaccaaaatgtaactgctaatcaagggtgatgcacagcaaaagcaatggaccccatccctctaaagcctgccctcctttgccttcaactgtatatgctgggtatttcatttgtctttttattttggagaaagcgtttttaactgcaactttctataatgccaaaatgacacatctgtgcaatagaatgatgtctgctctagggaaaccttcaaaagcaataaaaatgctgtgttgaaatgccaa

SEQ ID NO: 44334 - DNA, 2010 bp, Homo sapiens
  misc_feature (1997)..(1997): n is a, c, g, or t
cctgcggggcggtgactggcccagccgcaccgcgtctcccgccttctccgcagccccgcaggccccgggccctgtcattcccagcgctgccctgtcttgcgttccagtgttccagcttctgcgagatgaccctcaaggcgagcgagggcgagagtgggggcagcatgcacacggcgctctccgacctctacctggagcatttgctgcagaagcgtagtcggccagaggctgtatcgcatccattgaatactgtgaccgaggacatgtacaccaacgggtctcctgccccaggtagccctgcccaggtcaagggacaggaggtgcggaaagtgcgactcatacagtttgagaaggtcacagaagagcccatgggaatcactctgaagctgaatgaaaaacagtcctgtacggtggccagaattcttcatggtggcatgatccatagacaaggctcccttcacgtgggggatgagatcctagaaatcaatggcacaaatgtgacaaatcattcagtggatcagctgcagaaggcgatgaaagaaaccaaaggaatgatctcattaaaagtaattcccaaccagcaaagccgtcttcctgcactacagatgttcatgagagcgcagtttgactatgatcccaaaaaggacaatctgatcccttgcaaggaggcgggactgaagtttgctactggggacattatccagattatcaacaaggatgacagcaattggtggcagggacgggtggaaggctcctccaaggagtcagcaggattgatcccttcccctgagctgcaggaatggcgagtggcaagtatggctcagtcagctcctagcgaagccccgagctgcagtccctttgggaagaagaagaagtacaaagacaaatatctggccaagcacagctcgatttttgatcagttggatgttgtttcctacgaggaagtcgttcggctccctgcattcaagaggaagaccctggtgctgatcggagccagtggggtgggtcgcagccacattaagaatgccctgctcagccagaatccggagaagtttgtgtaccctgtcccatatacaacacggccgccaaggaagagtgaggaagatgggaaggagtaccactttatctcaacggaggagatgacgaggaacatctctgccaatgagttcttggagtttggcagctaccaaggcaacatgtttggcaccaaatttgaaacagtgcaccagatccataagcagaacaagattgccatccttgacattgagccccagaccctgaaaattgttcggacagcagaactttcgcctttcattgtgttcattgcacctactgaccagggcactcagacagaagccctgcagcagctgcagaaggactctgaggccatccgcagccagtacgctcactactttgacctctcactggtcaataatggtgttgatgaaacccttaagaaattacaagaagccttcgaccaagcgtgcagttctccacagtgggtgcctgtctcctgggtttactaagcttgtagaatgggggaacccactgtatgcccctctccagcatttggaattccacccgccttgctttaagacaaacagggctgctccaactagttttgtgtcagcttccagctctctgcagctatcctaattcagccagtaaggttcagtcttcttgctcaggctcctgaagggttgattctcctgatagatggggccccactgatctggatttgaaaaggatttctagaaattgggggtaagaagtactaccaaaatgtaactgctaatcaagggtgatgcacagcaaaagcaatggaccccatccctctaaagcctgccctcctttgccttcaactgtatatgctgggtatttcatttgtctttttattttggagaaagcgtttttaactgcaactttctataatgccaaaatgacacatctgtgcaatagaatgatgtctgctctagggaaccgtcgattcgagggancctctagagtcac

SEQ ID NO: 44335 - DNA, 1634 bp, Homo sapiens
catctgcatttctcttttctgagacgtcacgtgcacaccaccagccagggaatgatcgtggcagtcttgggttgtaggcaggtaagggggtggagagtcaggatgacaccaggtctctatcttgagcagctgggtcaatagcaccaccatcttctaagataagggacattcaggcagaaccgagatagcattggcattcttcagctctaagtgccaagggaacatctgatactgaaactatggagaagagatgaggacaggagacaagaaaagttggctcagagagatagggcaaggaggaagagagggtgcaaaagttagataaactcccttgctcaaaattccctcaccacactaaaaatacagtccaaagtccttcctccacaccaacctccctcgtctcatctctagtcacttcctccctgcttgttgagatgtcgcgaggctgtttcccatttcagagtgtggaccactgttctccctagctctggaaatgaacactgcttggttttctttgtctctagtttttgatcagttggatgttgtttcctacgaggaagtcgttcggctccctgcattcaagaggaagaccctggtgctgatcggagccagtggggtgggtcgcagccacattaagaatgccctgctcagccagaatccggagaagtttgtgtaccctgtcccatatacaacacggccgccaaggaagagtgaggaagatgggaaggagtaccactttatctcaacggaggagatgacgaggaacatctctgccaatgagttcttggagtttggcagctaccaaggcaacatgtttggcaccaaatttgaaacagtgcaccagatccataagcagaacaagattgccatccttgacattgagccccagaccctgaaaattgttcggacagcagaactttcgcctttcattgtgttcattgcacctactgaccagggcactcagacagaagccctgcagcagctgcagaaggactctgaggccatccgcagccagtacgctcactactttgacctctcactggtcaataatggtgttgatgaaacccttaagaaattacaagaagccttcgaccaagcgtgcagttctccacagtgggtgcctgtctcctgggtttactaagcttgtagaatgggggaacccactgtatgcccctctccagcatttggaattccacccgccttgctttaagacaaacagggctgctccaactagttttgtgtcagcttccagctctctgcagctatcctaattcagccagtaaggttcagtcttcttgctcaggctcctgaagggttgattctcctgatagatggggccccactgatctggatttgaaaaggatttctagaaattgggggtaagaagtactaccaaaatgtaactgctaatcaagggtgatgcacagcaaaagcaatggaccccatccctctaaagcctgccctcctttgccttcaactgtatatgctgggtatttcatttgtctttttattttggagaaagcgtttttaactgcaactttctataatgccaaaatgacacatctgtgcaatagaatgatgtctgctctagggaaaccttcaaaagcaataaaaatgctgtgttgaaatgccaa

SEQ ID NO: 44336 - DNA, 1518 bp, Homo sapiens
caaaggagacagtcaatggaagatggaaagaggggaggttgggaggattgtgtttcaagctacaatatctggagcatattttactgattagacaatttatatgagtaatagaaaatagtccaacttttaacaacatgagctgaaactaaaccaaagtactcttctttccaagtcatgaaaaggaaaccttaaatatatttccaagaaatcctgaccatagtctgtagatctgtttttaaaatattttccgctatcttcatttctaagtttcaatattcctaggatttggtagtttgagagatgtaacttcatttaggggaaaatgataataggaattttctatgttaggctttgccccttaaaaattaaatgtgtcctgggcagatggagggatttcctgggtgtgcatcactttctagcatcagctcttcaggagcccacgggaggaacccctgtattaaagtcaatgcaccaaaggcagctagggtttccatacagacaccatggtccaagccctcatgaaagggtgaggacctggagtttgtcggggatttgggttcttgtacacagatacaacacggccgccaaggaagagtgaggaagatgggaaggagtaccactttatctcaacggaggagatgacgaggaacatctctgccaatgagttcttggagtttggcagctaccaaggcaacatgtttggcaccaaatttgaaacagtgcaccagatccataagcagaacaagattgccatccttgacattgagccccagaccctgaaaattgttcggacagcagaactttcgcctttcattgtgttcattgcacctactgaccagggcactcagacagaagccctgcagcagctgcagaaggactctgaggccatccgcagccagtacgctcactactttgacctctcactggtcaataatggtgttgatgaaacccttaagaaattacaagaagccttcgaccaagcgtgcagttctccacagtgggtgcctgtctcctgggtttactaagcttgtagaatgggggaacccactgtatgcccctctccagcatttggaattccacccgccttgctttaagacaaacagggctgctccaactagttttgtgtcagcttccagctctctgcagctatcctaattcagccagtaaggttcagtcttcttgctcaggctcctgaagggttgattctcctgatagatggggccccactgatctggatttgaaaaggatttctagaaattgggggtaagaagtactaccaaaatgtaactgctaatcaagggtgatgcacagcaaaagcaatggaccccatccctctaaagcctgccctcctttgccttcaactgtatatgctgggtatttcatttgtctttttattttggagaaagcgtttttaactgcaactttctataatgccaaaatgacacatctgtgcaatagaatgatgtctgctctagggaaaccttcaaaagcaataaaaatgctgtgttgaaatgccaa

SEQ ID NO: 44337 - DNA, 1839 bp, Homo sapiens
cctgcggggcggtgactggcccagccgcaccgcgtctcccgccttctccgcagccccgcaggccccgggccctgtcattcccagcgctgccctgtcttgcgttccagtgttccagcttctgcgagatgaccctcaaggcgagcgagggcgagagtgggggcagcatgcacacggcgctctccgacctctacctggagcatttgctgcagaagcgtagtcggccagaggctgtatcgcatccattgaatactgtgaccgaggacatgtacaccaacgggtctcctgccccaggtagccctgcccaggtcaagggacaggaggtgcggaaagtgcgactcatacagtttgagaaggtcacagaagagcccatgggaatcactctgaagctgaatgaaaaacagtcctgtacggtggccagaattcttcatggtggcatgatccatagacaaggctcccttcacgtgggggatgagatcctagaaatcaatggcacaaatgtgacaaatcattcagtggatcagctgcagaaggcgatgaaagaaaccaaaggaatgatctcattaaaagtaattcccaaccagcaaagccgtcttcctgcactacagatgttcatgagagcgcagtttgactatgatcccaaaaaggacaatctgatcccttgcaaggaggcgggactgaagtttgctactggggacattatccagattatcaacaaggatgacagcaattggtggcagggacgggtggaaggctcctccaaggagtcagcaggattgatcccttcccctgagctgcaggaatggcgagtggcaagtatggctcagtcagctcctagcgaagccccgagctgcagtccctttgggaagaagaagaagtacaaagacaaatatctggccaagcacagctcgatttttgatcagttggatgttgtttcctacgaggaagtcgttcggctccctgcattcaagaggaagaccctggtgctgatcggagccagtggggtgggtcgcagccacattaagaatgccctgctcagccagaatccggagaagtttgtgtaccctgtcccatatacaacacggccgccaaggaagagtgaggaagatgggaaggagtaccactttatctcaacggaggagatgacgaggaacatctctgccaatgagttcttggagtttggcagctaccaaggcaacatgtttggcaccaaatttgaaacagtgcaccagatccataagcagaacaagattgccatccttgacattgagccccagaccctgaaaattgttcggacagcagaactttcgcctttcattgtgttcattgcacctactgaccagggcactcagacagaagccctgcagcagctgcagaaggactctgaggccatccgcagccagtacgctcactactttgacctctcactggtcaataatggtgttgatgaaacccttaagaaattacaagaagccttcgaccaagcgtgcagttctccacagtgggtgcctgtctcctgggtttactaagcttgtagaatgggggaacccactgtatgcccctctccagcatttggaattccacccgccttgctttaagacaaacagggctgctccaactagttttgtgtcagcttccagctctctgcagctatcctaattcagccagtaaggttcagtcttcttgctcaggctcctgaagggttgattctcctgatagatggggccccactgatctggatttgaaaaggatttctagaaattgggggtaagaagtactaccatacatcgtgctctatctaaggattgatgcacactcactggcctctatacactgacagca

SEQ ID NO: 44338 - DNA, 1112 bp, Homo sapiens
cctgcggggcggtgactggcccagccgcaccgcgtctcccgccttctccgcagccccgcaggccccgggccctgtcattcccagcgctgccctgtcttgcgttccagtgttccagcttctgcgagatgaccctcaaggcgagcgagggcgagagtgggggcagcatgcacacggcgctctccgacctctacctggagcatttgctgcagaagcgtagtcggccagaggctgtatcgcatccattgaatactgtgaccgaggacatgtacaccaacgggtctcctgccccaggtagccctgcccaggtcaagggacaggaggtgcggaaagtgcgactcatacagtttgagaaggtcacagaagagcccatgggaatcactctgaagctgaatgaaaaacagtcctgtacggtggccagaattcttcatggtggcatgatccatagacaaggctcccttcacgtgggggatgagatcctagaaatcaatggcacaaatgtgacaaatcattcagtggatcagctgcagaaggcgatgaaagaaaccaaaggaatgatctcattaaaagtaattcccaaccagcaaagccgtcttcctgcactacagatgttcatgagagcgcagtttgactatgatcccaaaaaggacaatctgatcccttgcaaggaggcgggactgaagtttgctactggggacattatccagattatcaacaaggatgacagcaattggtggcagggacgggtggaaggctcctccaaggagtcagcaggattgatcccttcccctgagctgcaggaatggcgagtggcaagtatggctcagtcagctcctagcgaagccccgagctgcagtccctttgggaagaagaagaagtacaaagacaaatatctggccaagcacagctcgatttttgatcagttggatgttgtttcctacgaggaagtcgttcggctccctgcattcaagaggaagaccctggtgctgatcggagccagtggggtgggtcgcagccacattaagaatgccctgctcagccagaatccggagaagtttgtgtaccctgtcccatatacaacacggccgcgcaggtttcggggtcctctagagtca

SEQ ID NO: 44339 - DNA, 417 bp, Homo sapiens
cattatagaaagttgcagttaaaaacgctttctccgaaataaaaagacaaatgaaatacccagtaaggttcagtcttcttgctcaggctcctgaagggttgattctcctgatagatggggccccactgatctggatttgaaaaggatttctagaaattgggggtaagaagtactaccaaaatgtaactgctaatcaagggtgatgcacagcaaaagcaatggaccccatccctctaaagcctgccctcctttgccttcaactgtatatgctgggtatttcatttgtctttttattttggagaaagcgtttttaactgcaactttctataatgccaaaatgacacatctgtgcaatagaatgatgtctgctctagggaaaccttcaaaagcaataaaaatgctgtgttgaaatgccaa

SEQ ID NO: 44340 - DNA, 859 bp, Homo sapiens
  misc_feature (821)..(821): n is a, c, g, or t
  misc_feature (824)..(824): n is a, c, g, or t
cctgcggggcggtgactggcccagccgcaccgcgtctcccgccttctccgcagccccgcaggccccgggccctgtcattcccagcgctgccctgtcttgcgttccagtgttccagcttctgcgagatgaccctcaaggcgagcgagggcgagagtgggggcagcatgcacacggcgctctccgacctctacctggagcatttgctgcagaagcgtagtcggccagaggctgtatcgcatccattgaatactgtgaccgaggacatgtacaccaacgggtctcctgccccaggtagccctgcccaggtcaagggacaggaggtgcggaaagtgcgactcatacagtttgagaaggtcacagaagagcccatgggaatcactctgaagctgaatgaaaaacagtcctgtacggtggccagaattcttcatggtggcatgatccatagacaaggctcccttcacgtgggggatgagatcctagaaatcaatggcacaaatgtgacaaatcattcagtggatcagctgcagaaggcgatgaaagaaaccaaaggaatgatctcattaaaagtaattcccaaccagcaaagccgtcttcctgcactacagatgttcatgagagcgcagtttgactatgatcccaaaaaggacaatctgatcccttgcaaggaggcgggactgaagtttgctactggggacattatccagattatcaacaaggatgacagcaattggtggcagggacgggtggaaggctcctccaaagggaagttccagcaagggatttgattcctttccccctgaagcttgcaagggaattgggcnaanttggcaaagttatggggtcaattcaagcctcccta

SEQ ID NO: 44341 - DNA, 588 bp, Homo sapiens
cctgcggggcggtgactggcccagccgcaccgcgtctcccgccttctccgcagccccgcaggccccgggccctgtcattcccagcgctgccctgtcttgcgttccagtgttccagcttctgcgagatgaccctcaaggcgagcgagggcgagagtgggggcagcatgcacacggcgctctccgacctctacctggagcatttgctgcagaagcgtagtcggccagaggctgtatcgcatccattgaatactgtgaccgaggacatgtacaccaacgggtctcctgccccaggtagccctgcccaggtcaagggacaggaggtgcggaaagtgcgactcatacagtttgagaaggtcacagaagagcccatgggaatcactctgaagctgaatgaaaaacagtcctgtacggtggccagaattcttcatggtggcatgatccatagacaaggtactctgtgggagctctgggtggggtttgattcagggattaataatttactccctgttcagtggtgtggggcatgaagcttataatcctccaaactggtagcatttttgtgagtgtgccaagagactttttgtggct

SEQ ID NO: 44342 - DNA, 2514 bp, Homo sapiens
cctgcggggcggtgactggcccagccgcaccgcgtctcccgccttctccgcagccccgcaggccccgggccctgtcattcccagcgctgccctgtcttgcgttccagtgttccagcttctgcgagatgaccctcaaggcgagcgagggcgagagtgggggcagcatgcacacggcgctctccgacctctacctggagcatttgctgcagaagcgtagtcggccagaggctgtatcgcatccattgaatactgtgaccgaggacatgtacaccaacgggtctcctgccccaggtagccctgcccaggtcaagggacaggaggtgcggaaagtgcgactcatacagtttgagaaggtcacagaagagcccatgggaatcactctgaagctgaatgaaaaacagtcctgtacggtggccagaattcttcatggtggcatgatccatagacaaggctcccttcacgtgggggatgagatcctagaaatcaatggcacaaatgtgacaaatcattcagtggatcagctgcagaaggcgatgaaagaaaccaaaggaatgatctcattaaaagtaattcccaaccagcaaagccgtcttcctgcactacagatgttcatgagagcgcagtttgactatgatcccaaaaaggacaatctgatcccttgcaaggaggcgggactgaagtttgctactggggacattatccagattatcaacaaggatgacagcaattggtggcagggacgggtggaaggctcctccaaggagtcagcaggattgatcccttcccctgagctgcaggaatggcgagtggcaagtatggctcagtcagctcctagcgaagccccgagctgcagtccctttgggaagaagaagaagtacaaagacaaatatctggccaagcacagctcgatttttgatcagttggatgttgtttcctacgaggaagtcgttcggctccctgcattcaagaggaagaccctggtgctgatcggagccagtggggtgggtcgcagccacattaagaatgccctgctcagccagaatccggagaagtttgtgtaccctgtcccatatacaacacggccgccaaggaagagtgaggaagatgggaaggagtaccactttatctcaacggaggagatgacgaggaacatctctgccaatgagttcttggagtttggcagctaccaaggcaacatgtttggcaccaaatttgaaacagtgcaccagatccataagcagaacaagattgccatccttgacattgagccccagaccctgaaaattgttcggacagcagaactttcgcctttcattgtgttcattgcacctactgaccagggcactcagacagaagccctgcagcagctgcagaaggactctgaggccatccgcagccagtacgctcactactttgacctctcactggtcaataatggtgttgatgaaacccttaagaaattacaagaagccttcgaccaagcgtgcagttctccacagtgggtgcctgtctcctgggtttactaagcttgtagaatgggggaacccactgtatgcccctctccagcatttggaattccacccgccttgctttaagacaaacagggctgctccaactagttttgtgtcagcttccagctctctgcagctatcctaattcagccagtaaggttcagtcttcttgctcaggctcctgaagggttgattctcctgatagatggggccccactgatctggatttgaaaaggatttctagaaattgggggtaagaagtactaccaaaatgtaactgctaatcaagggtgatgcacagcaaaagcaatggaccccatccctctaaagcctgccctcctttgccttcaactgtatatgctgggtatttcatttgtctttttattttggagaaagcgtttttaactgcaactttctataatgccaaaatgacacatctgtgcaatagaatgatgtctgctctagggaaaccttcaaaagcaataaaaatgctgtgttgaaatgccaaaaaaaaaaaaaaaaaaaaaaaaaaaaaaaaaaaaaaaaaaaaagaaaaaaaaaaaaaaaaaaaaacgaaggaggggacaacaaaaaatatctgaccgcccagaggaggcactgagacaacaagcgagcaccccaattgttggtggcataggtgccccacagatagtgagcggatataataccacgccgcgggtggacaactagcacgcgtgggcaacgggaaaagcggcaccacgacgactcttgttggggggaacaaaccttgtggtcgagatggagcgataacaagaaatatttgggcgcccactcagcggctcaataataattatatggcccacggtggagtacaacgtttgtaaccactgacgcggagattaatgacggggcaaacaacaagattttagttcgtgcggggcacatatgaatcttgtgacgaccctaggagacaatgggattacaaacatatactacccgccgcggcataagaaaaaaacag

SEQ ID NO: 44343 - DNA, 1968 bp, Homo sapiens
cctgcggggcggtgactggcccagccgcaccgcgtctcccgccttctccgcagccccgcaggccccgggccctgtcattcccagcgctgccctgtcttgcgttccagtgttccagcttctgcgagatgaccctcaaggcgagcgagggcgagagtgggggcagcatgcacacggcgctctccgacctctacctggagcatttgctgcagaagcgtagtcggccagaggctgtatcgcatccattgaatactgtgaccgaggacatgtacaccaacgggtctcctgccccaggtagccctgcccaggtcaagggacaggagggaatcactctgaagctgaatgaaaaacagtcctgtacggtggccagaattcttcatggtggcatgatccatagacaaggctcccttcacgtgggggatgagatcctagaaatcaatggcacaaatgtgacaaatcattcagtggatcagctgcagaaggcgatgaaagaaaccaaaggaatgatctcattaaaagtaattcccaaccagcaaagccgtcttcctgcactacagatgttcatgagagcgcagtttgactatgatcccaaaaaggacaatctgatcccttgcaaggaggcgggactgaagtttgctactggggacattatccagattatcaacaaggatgacagcaattggtggcagggacgggtggaaggctcctccaaggagtcagcaggattgatcccttcccctgagctgcaggaatggcgagtggcaagtatggctcagtcagctcctagcgaagccccgagctgcagtccctttgggaagaagaagaagtacaaagacaaatatctggccaagcacagctcgatttttgatcagttggatgttgtttcctacgaggaagtcgttcggctccctgcattcaagaggaagaccctggtgctgatcggagccagtggggtgggtcgcagccacattaagaatgccctgctcagccagaatccggagaagtttgtgtaccctgtcccatatacaacacggccgccaaggaagagtgaggaagatgggaaggagtaccactttatctcaacggaggagatgacgaggaacatctctgccaatgagttcttggagtttggcagctaccaaggcaacatgtttggcaccaaatttgaaacagtgcaccagatccataagcagaacaagattgccatccttgacattgagccccagaccctgaaaattgttcggacagcagaactttcgcctttcattgtgttcattgcacctactgaccagggcactcagacagaagccctgcagcagctgcagaaggactctgaggccatccgcagccagtacgctcactactttgacctctcactggtcaataatggtgttgatgaaacccttaagaaattacaagaagccttcgaccaagcgtgcagttctccacagtgggtgcctgtctcctgggtttactaagcttgtagaatgggggaacccactgtatgcccctctccagcatttggaattccacccgccttgctttaagacaaacagggctgctccaactagttttgtgtcagcttccagctctctgcagctatcctaattcagccagtaaggttcagtcttcttgctcaggctcctgaagggttgattctcctgatagatggggccccactgatctggatttgaaaaggatttctagaaattgggggtaagaagtactaccaaaatgtaactgctaatcaagggtgatgcacagcaaaagcaatggaccccatccctctaaagcctgccctcctttgccttcaactgtatatgctgggtatttcatttgtctttttattttggagaaagcgtttttaactgcaactttctataatgccaaaatgacacatctgtgcaatagaatgatgtctgctctagggaaaccttcaaaagcaataaaaatgctgtgttgaaatgccaa

SEQ ID NO: 44344 - DNA, 1875 bp, Homo sapiens
gtcaattcaaataagaatgaggccaaacttatgaaataagttttcagagcctcttgaatgttagaattgcagattgtggactggctgtgggccttgctcctgatttcatacgttgctttgttgttttggcttggcaggctgtatcgcatccattgaatactgtgaccgaggacatgtacaccaacgggtctcctgccccaggtagccctgcccaggtcaagggacaggaggtgcggaaagtgcgactcatacagtttgagaaggtcacagaagagcccatgggaatcactctgaagctgaatgaaaaacagtcctgtacggtggccagaattcttcatggtggcatgatccatagacaaggctcccttcacgtgggggatgagatcctagaaatcaatggcacaaatgtgacaaatcattcagtggatcagctgcagaaggcgatgaaagaaaccaaaggaatgatctcattaaaagtaattcccaaccagcaaagccgtcttcctgcactacagatgttcatgagagcgcagtttgactatgatcccaaaattatccagattatcaacaaggatgacagcaattggtggcagggacgggtggaaggctcctccaaggagtcagcaggattgatcccttcccctgagctgcaggaatggcgagtggcaagtatggctcagtcagctcctagcgaagccccgagctgcagtccctttgggaagaagaagaagtacaaagacaaatatctggccaagcacagctcgatttttgatcagttggatgttgtttcctacgaggaagtcgttcggctccctgcattcaagaggaagaccctggtgctgatcggagccagtggggtgggtcgcagccacattaagaatgccctgctcagccagaatccggagaagtttgtgtaccctgtcccatatacaacacggccgccaaggaagagtgaggaagatgggaaggagtaccactttatctcaacggaggagatgacgaggaacatctctgccaatgagttcttggagtttggcagctaccaaggcaacatgtttggcaccaaatttgaaacagtgcaccagatccataagcagaacaagattgccatccttgacattgagccccagaccctgaaaattgttcggacagcagaactttcgcctttcattgtgttcattgcacctactgaccagggcactcagacagaagccctgcagcagctgcagaaggactctgaggccatccgcagccagtacgctcactactttgacctctcactggtcaataatggtgttgatgaaacccttaagaaattacaagaagccttcgaccaagcgtgcagttctccacagtgggtgcctgtctcctgggtttactaagcttgtagaatgggggaacccactgtatgcccctctccagcatttggaattccacccgccttgctttaagacaaacagggctgctccaactagttttgtgtcagcttccagctctctgcagctatcctaattcagccagtaaggttcagtcttcttgctcaggctcctgaagggttgattctcctgatagatggggccccactgatctggatttgaaaaggatttctagaaattgggggtaagaagtactaccaaaatgtaactgctaatcaagggtgatgcacagcaaaagcaatggaccccatccctctaaagcctgccctcctttgccttcaactgtatatgctgggtatttcatttgtctttttattttggagaaagcgtttttaactgcaactttctataatgccaaaatgacacatctgtgcaatagaatgatgtctgctctagggaaaccttcaaaagcaataaaaatgctgtgttgaaatgccaa

SEQ ID NO: 44345 - DNA, 1036 bp, Homo sapiens
acctagaggttccctcgaatcgacggttctcaagctccgaatgccctgctcagccagaatccggagaagtttgtgtaccctgtcccatatacaacacggccgccaaggaagagtgaggaagatgggaaggagtaccactttatctcaacggaggagatgacgaggaacatctctgccaatgagttcttggagtttggcagctaccaaggcaacatgtttggcaccaaatttgaaacagtgcaccagatccataagcagaacaagattgccatccttgacattgagccccagaccctgaaaattgttcggacagcagaactttcgcctttcattgtgttcattgcacctactgaccagggcactcagacagaagccctgcagcagctgcagaaggactctgaggccatccgcagccagtacgctcactactttgacctctcactggtcaataatggtgttgatgaaacccttaagaaattacaagaagccttcgaccaagcgtgcagttctccacagtgggtgcctgtctcctgggtttactaagcttgtagaatgggggaacccactgtatgcccctctccagcatttggaattccacccgccttgctttaagacaaacagggctgctccaactagttttgtgtcagcttccagctctctgcagctatcctaattcagccagtaaggttcagtcttcttgctcaggctcctgaagggttgattctcctgatagatggggccccactgatctggatttgaaaaggatttctagaaattgggggtaagaagtactaccaaaatgtaactgctaatcaagggtgatgcacagcaaaagcaatggaccccatccctctaaagcctgccctcctttgccttcaactgtatatgctgggtatttcatttgtctttttattttggagaaagcgtttttaactgcaactttctataatgccaaaatgacacatctgtgcaatagaatgatgtctgctctagggaaaccttcaaaagcaataaaaatgctgtgttgaaatgccaa

SEQ ID NO: 44346 - DNA, 1787 bp, Homo sapiens
cctgcggggcggtgactggcccagccgcaccgcgtctcccgccttctccgcagccccgcaggccccgggccctgtcattcccagcgctgccctgtcttgcgttccagtgttccagcttctgcgagatgaccctcaaggcgagcgagggcgagagtgggggcagcatgcacacggcgctctccgacctctacctggagcatttgctgcagaagcgtagtcggccagaggctgtatcgcatccattgaatactgtgaccgaggacatgtacaccaacgggtctcctgccccaggtagccctgcccaggtcaagggacaggaggtgcggaaagtgcgactcatacagtttgagaaggtcacagaagagcccatgggaatcactctgaagctgaatgaaaaacagtcctgtacggtggccagaattcttcatggtggcatgatccatagacaaggctcccttcacgtgggggatgagatcctagaaatcaatggcacaaatgtgacaaatcattcagtggatcagctgcagaaggcgatgaaagaaaccaaaggaatgatctcattaaaagtaattcccaaccagcaaagccgtcttcctgcactacagatgttcatgagagcgcagtttgactatgatcccaaaaaggacaatctgatcccttgcaaggaggcgggactgaagtttgctactggggacattatccagattatcaacaaggatgacagcaattggtggcagggacgggtggaaggctcctccaaggagtcagcaggattgatcccttcccctgagctgcaggaatggcgagtggcaagtatggctcagtcagctcctagcgaagccccgagctgcagtccctttgggaagaagaagaagtacaaagacaaatatctggccaagcacagctcgatttttgatcagttggatgttgtttcctacgaggaagtcgttcggctccctgcattcaagaggaagaccctggtgctgatcggagccagtggggtgggtcgcagccacattaagaatgccctgctcagccagaatccggagaagtttgtgtaccctgtcccatatacaacacggccgccaaggaagagtgaggaagatgggaaggagtaccactttatctcaacggaggagatgacgaggaacatctctgccaatgagttcttggagtttggcagctaccaaggcaacatgtttggcaccaaatttgaaacagtgcaccagatccataagcagaacaagattgccatccttgacattgagccccagacagaagccctgcagcagctgcagaaggactctgaggccatccgcagccagtacgctcactactttgacctctcactggtcaataatggtgttgatgaaacccttaagaaattacaagaagccttcgaccaagcgtgcagttctccacagtgggtgcctgtctcctgggtttactaagcttgtagaatgggggaacccactgtatgcccctctccagcatttggaattccacccgccttgctttaagacaaacagggctgctccaactagttttgtgtcagcttccagctctctgcagctatcctaattcagccagtaaggttcagtcttcttgctcaggctcctgaagggttgattctcctgatagatggggccccactgatctggatttgaaaaggatttctagaaattgggggtaagaagtactaccaaaatgacacatctgtgcaatagaatgatgtctgctctagggaaaccttcaaaagcaataaaaatgctgtgttgaaatgccaa

SEQ ID NO: 44347 - DNA, 772 bp, Homo sapiens
cgagtgggtcctgcttcggacaacagtagtagcagcagctgccttcttggacgcctttcagaaagtggccgacatggccaccaacacacgtggtgggaccaggaagattggatctgctctcaccaggatgtgcatgaggcacagaagcattgaagccaagctgaggcagttttcgagcgctttaattgattgtctgataaaccccttaagaaattacaagaagccttcgaccaagcgtgcagttctccacagtgggtgcctgtctcctgggtttactaagcttgtagaatgggggaacccactgtatgcccctctccagcatttggaattccacccgccttgctttaagacaaacagggctgctccaactagttttgtgtcagcttccagctctctgcagctatcctaattcagccagtaaggttcagtcttcttgctcaggctcctgaagggttgattctcctgatagatggggccccactgatctggatttgaaaaggatttctagaaattgggggtaagaagtactaccaaaatgtaactgctaatcaagggtgatgcacagcaaaagcaatggaccccatccctctaaagcctgccctcctttgccttcaactgtatatgctgggtatttcatttgtctttttattttggagaaagcgtttttaactgcaactttctataatgccaaaatgacacatctgtgcaatagaatgatgtctgctctagggaaaccttcaaaagcaataaaaatgctgtgttgaaatgccaa

SEQ ID NO: 44348 - DNA, 346 bp, Homo sapiens
aaatgtcttgtgaagatactatgtaaatatcctatttctcctcatcctttgcttactaatttttagcatgcttgttaactgaaacaattctactagctgattttaccaagagagtgccatggacagatttgccttttagaaagattactctgaaatgtttggatgtgagagagatgtgagaacagggaaaaagttactacagtagttcattcaagagcggggccctgatctaaggcagtgagaggaggagtagagaagacagaagagccatttaggctatgtttggaatcaataagcagggtttacattttgtgctatagatttaaatgctggaaaaattctgaaa

SEQ ID NO: 44349 - DNA, 361 bp, Homo sapiens
tttttatttggagacagggtctcactctgtctatttacaggcaccatcagagcacattacagccttgaactcctgggctcaagtgatcctgccatctcagcctcctgagcagctgagactacaggcacatactttactcttaacactgtgcaacgagtgctagaattttattcaattcacgactaccctctacctttacaccaagaaagagcatccattgggaaaaaggagccacaattttctctttgtcaagctgttttaagatatataacatgaatacttaaatactaaagggagggtcaatccagagacaaaatgaacataagagactactgagttaagatggatgtttattgagaca

SEQ ID NO: 44350 - DNA, 342 bp, Homo sapiens
ctgtaacatgtttttacttatcattgtatcttaggcaaattttcatagcagtacctgtagggtaactttactttttaaattagctacatggtattccatcatatgaattactataattatttacccaattcaagttactcccattttttttttcctgttagaaagcttgctgcagggatatgactactgattgtcccctcagtatccatttttcagccaggcacaatggctcacaccagtaatcccagcactttaggaggtcaaggggaaaggattgtttgagcccaggaatttcgagaccagcctggacaacatggcaagaccctgactctaccaaaaaaa

SEQ ID NO: 44351 - DNA, 376 bp, Homo sapiens
ggggcacattccctgcagtggcctgtgtcatacacagccaatttcaccttttcactgcctggttattctgcaaagtgcatcctagaatgaccttcctctctgagctcctcttcaaaattctgattctttctcaaactataaagcctctggcatttgccaagagccaaggccctcctgaagccacagtttgagaacaagcgaagaggcagacatgagaaagaagtaccacccctggcagggagagctgacacttcccaggctactgcatccttctcagggcccagaaatgaatgagaggtaattaaagcagaaagcattttgcagcagctcagctcagctcttcgaagctgccatggtcccaggatcagtggtgtgc

SEQ ID NO: 44352 - DNA, 386 bp, Homo sapiens
tgcaggccacttgtgatggagaaaacaaaaggttggaaggagctcggagaactggcctccgtgaccaaggaggttggcattggagacccgagtctgctcccagctctgcccaatgccttgtgaccttccatcatcacttcacagaggcagggccgtaggtgatgtggtgcgtggagccccggcttcacttcgccaggcccctcaggcccattttcttaggaagagggtacttgggtcactccagttgcttgaagagggttgcgttccccaactgaacatctgccaccctgggtggtcttgggagtcttgcgcagcttttaggaatcttttttttttttttggtgggggaaagggatcttgggagaaaaagtaacaggaaacttatt

SEQ ID NO: 44353 - DNA, 431 bp, Homo sapiens
aattttctttaaccttccatgtaaatagtgcgcattaagacatgaggtctactgttaaataatttctctttataaacatagtgacaacaagattgtacagtatcaattaaaaagacccaatgtgaccaggtccactgcttcctgcatcttgaagtaagacaagtgttcagcttagagatgagcacctttctttccagagggagaagacatgatgggagaaaaaaatgttctctctgagaatttacccagataaagagctgggtagtcggatctaaatggtcccacagcaatccttttctcgggggaggtgcgtagatctttgacaagtgatgaacgaactttgcttcgtgtggttaggcctgggactgaactttgtaaccagggatttggtgcgcggggcttcacaggctgcagagaaacatgaaaacatg

SEQ ID NO: 44354 - DNA, 481 bp, Homo sapiens
aagaaagtcaaacctactttacagtaaaatacttggtaagtgagttagaaaaatgatctttttctcagtgagaagtgctattctgtggcattttgaaaaataatcttacttctgctccactgaagaaatctggttattaaaagagttattccttttataaaatcaaaatctgcatgtggcaatttttattcattgatatggctctcttctcaaaacacaaagaacaaatctaacttttcactcaaaaattaatcttaaagacacaatttatgctcttcctgtaagcagcctgagatgatctcttaaaatggtttactattcacttgacccagaacaacccaaaaaatcattcaaatcaagagattgaaatcttcgtgttcactttaagaacatccatgaagctacccaggcaatcaagggttatgtatatctgaaaagccaccaagtatctgaaagatgtgactttacagaagcagtgtgt

SEQ ID NO: 44355 - DNA, 336 bp, Homo sapiens
gacttactacaacataaattttttgttctgacattgctgttggctacatctgccattttcaaaacgggtggcaagacattaatttttttgctaattgtgcaaaagaatgtatagccttatattcccattagagagaaagtgctgtggacattagattcaactgatgtccatttattcaagaaatatagtgtcttgtatgggccagctattaagctaagtgttgggtatttggtatagaacgaaagaaaataattcattccttttaaaagcttatatcctagtgggagagacagctattaatcaggtaaatatgtcccattccagcaggtgtagcta

SEQ ID NO: 44356 - DNA, 283 bp, Homo sapiens
gcagcctctgatggtgctggtgcccctaagggaacacagttctgcaagtgctggaaaaactgcaaactgggtttggcacctccgagaatgaatgctgctgctgaggtacagaggcattgctgggtggcacaagaacaggaaacaggcaggagccagttctatctttctccaccaccttctcagtctctctatggcaccccctggtggcggagcctcacatggaacccagtggtaaagtccagccccagccccagccccagccccagccccagtttgggaaaca

SEQ ID NO: 44357 - DNA, 609 bp, Homo sapiens
tacttgagtctccgtggaaaagaccttatcagggactgttagcaacttgcacagcaataaaactccaacgggacacttaagttcccatttcccaacttaaaaagtcagtttatcctgactcctggatgtccattccatcgggacactttaaattaagacattcttagaagccctccagaaactgctgactgcagaagtggccagcttcaactcaaggttaattttctgattcttagcagcccttttctttcctttcactctcctggctcatcttgcctattgtgctttacactctctctatgatactaacagacgaaaaggcttctcagtgtgttctcccttaccctcatcctgtgacttctgaacccttacagtcccctctcacttaagaaaaaacacagcctgggcaacatggcaaaaccccctctctacaaaacaagtacaaaaatcagccagacttggtggagtgtgcctgtagtcccagctacttgggaggctgaggtgggaggatcacttgagcccaggaggttgaggctgcaatgagccgtgatcgtgccactgcactgcagcctgggtgacagggcaagaccccatctcagaaataaatta

SEQ ID NO: 44358 - DNA, 410 bp, Homo sapiens
tcgcaaaggagaaattctcagcgcctttcttacagatttctggagaaggagagaaggagtcacaaaaacatcttagtaacattatttccatttctctcaacccttagaagcaataaaaagtctcattttctgtccgtttttaactctgcagttaaaaatgtatttcttttaccttggggaaatggcacaaaactagagcacactcaaacttttctatgatacattcttaaaatggggaggaagtgagcctaaaacccacggggaagggccactcagacagagaaacctctgccttattccagtgaaactggagttagcgagttagcacgggacagagactcctcagttcacctgagttcctctcctcgggccttttctcccctcagggcaccacacaggctttgagaatg

SEQ ID NO: 44359 - DNA, 366 bp, Homo sapiens
tcctgcagaatgtcgaagaaacctcaggacccacctcaacaacccaaagataacaacattaacgataaaaatcatgatcgtgtatatgggccggccgcggtggctcatgcctgtaatcccagcactttgggaggccaaggtgggcggatcacctgaggtcaggagttcgagaccagcctggccaacatggtgaaaccccgtctctacaaaaatacaaaaattagccaggcatgatgatggctgcctgtagtctcagctattcgggaggcggagggaggagaatcgcttgaacccaggaggcggaggttgcagtgagctgagattgcaccattgcactccagcctgggcgacagagcgagactctgt

SEQ ID NO: 44360 - DNA, 726 bp, Homo sapiens
taattaacattgccttgaagacttctggacaccgagactggcctcagaaatagttggcttttttttttttaattgcaagcatatttctttgaatgactccagtaaaattaagcatcaagtaaacaagtggaaagtgacctacacttttaacttgtctcactagtgcctaaatgtagtaaaggctgcttcagttttgtatgtagttgggttttttggagtccgaaggtatccatctgcagaaattgaggcccaaattgaatttggattcaagtggattctaaatactttgcttatcttgaagagagaagcttcataaggaataaacaagttgaatagagaaaacactgattgataataggcattttcatggtctttttaatgttttctgttgttaaacatttcaagatttattgattttttttttcactttccccatcacactcacaggcacgctcacactttttatttgccgtaatgaaccgtctagcccctgtggagatctcctatgagaacatgtgttttctgataactcacaaccctaccaatgctactctcaacaagttcacagaggaacttaagaagtatggagtgacgacttcggtttgagtttgtgatgctacatatgataaagctccagttgaaaaagaaggaatccacgttctagattggccatttgatgatggagctccatcccctaatcagatagtagatgattggttaaacctg

SEQ ID NO: 44361 - DNA, 1897 bp, Homo sapiens
acctcaaaattcgtggcctgtcttcccattcaccccgcttttgactattgtgctcctttataattctgaaaactaatcagcactttttaacaatgtttataatcctataagtctagatgtatccaaaggtgaagtatgtaaaaagcagcaaaatatttatttcaaagacttcacttctgtttcctgaatctaaagaaagacaacatgctgctttttaatcataggatggagaattttaaagaactgtttgggccaggcacagtcgctcatacttgtaatcccagcactttgggaggccgaggcgggtggatcacaaggtcagcagatcgagaccatcctggccaacatggtgaaaccctgtctctactaaaaatacaaaaattagccgggtgtggtggcacatgcctgtaatcccagctactcgggaagctgaggcaggagaattgcttgaaccagggagttggaggttgcagtgagctaagactgcaccactgcactccagcctggtgacagaacgagactctgtcttaaaaacaaacaaacaaaaaaaaaatctgttagataagctatcaaaatgcagctgttgttttgtttttggctcactgttttcgtggttgtaactaatatgtggaaaggcccatttccaggtttgcgtagaagagcccagaaaacagagtctcaagacccccgctctggactgtcataagctagcacccgtggtaagcgggacgagacaagctcccgaagcccgccagcttcctgctccactcagctccgtccagtcaacctgaacccacccagtccagctgtctgtgggaatggtggtgttcttagggacagactgacaccttacttgtcagtgttcctccgggccccatttggcagctcccgtatcttttgttatgttgcttttaaagatatgatgttttattgttttaactcttggtgacagtagatgctctctggagcgcagacgaggcacatgtgtcttcatagcctgggctgggtgggagccagtcaccctgcggatcgagagagggggtagagtcttcttcaaatggcagttttacttcaaatggcagatttcacaagagttggttattttttacaatggtttaggttgttaagtctcctttgtatgtaaggtagttttttcaacatctaaaatttttgttttagccttcaaaaccaacttaccaacctcagtccagctgggaaggcagcgttgattatggtagtttgtcaagaatatatggacctggaaacactttctctctctgtccacctggtagataaattgtcctgttgagaatttttagatctggactggaactgccaggaccaccgcctccagggagtcgctgggcacctggaggtatcgtcgatgcctctcccccatctttagaaaatttggctcttctgaggtcattattattttaagaatgattaggattgataagggtcccatgaccagcattatgaaaatgcgagagtgggaaggacacagtgtgagacttccactagaaaaaagtgaaagttagggttaggacatccttttttaaaaattacaaatttagtccgttttggtttttgtaatcaggctaggcacagtggctcacacatggaatcccagcactttgggaggccgaggtgggaggatcacttgagcccaggagttcgagaccagcctaggcaacatagcaagaccctgtctgtacacaaaatttaaaaattagttcatcggggtggcacacatcagtagtcccagctactctgcaggctgaggtgggaggattgcttgaacccaggaggtcgaggctgcagtgagctgtgatctcaccactgcattccagcctgggtgacagagttagattccaccctctcccaccccggcaaa

SEQ ID NO: 44362 - DNA, 1843 bp, Homo sapiens
acctcaaaattcgtggcctgtcttcccattcaccccgcttttgactattgtgctcctttataattctgaaaactaatcagcactttttaacaatgtttataatcctataagtctagatgtatccaaaggtgaagtatgtaaaaagcagcaaaatatttatttcaaagacttcacttctgtttcctgaatctaaagaaagacaacatgctgctttttaatcataggatggagaattttaaagaactgtttgggccaggcacagtcgctcatacttgtaatcccagcactttgggaggccgaggcgggtggatcacaaggtcagcagatcgagaccatcctggccaacatggtgaaaccctgtctctactaaaaatacaaaaattagccgggtgtggtggcacatgcctgtaatcccagctactcgggaagctgaggcaggagaattgcttgaaccagggagttggaggttgcagtgagctaagactgcaccactgcactccagcctggtgacagaacgagactctgtcttaaaaacaaacaaacaaaaaaaaaatctgttagataagctatcaaaatgcagctgttgttttgtttttggctcactgttttcgtggttgtaactaatatgtggaaaggcccatttccaggtttgcgtagaagagcccagaaaacagagtctcaagacccccgctctggactgtcataagctagcacccgtggtaagcgggacgagacaagctcccgaagcccgccagcttcctgctccactcagctccgtccagtcaacctgaacccacccagtccagctgtctgtgggaatggtggtgttcttagggacagactgacaccttacttgtcagtgttcctccgggccccatttggcagctcccgtatcttttgttatgttgcttttaaagatatgatgttttattgttttaactcttggtgacagtagatgctctctggagcgcagacgaggcacatgtgtcttcatagcctgggctgggtgggagccagtcaccctgcggatcgagagagggggtagagtcttcttcaaatggcagttttacttcaaatggcagatttcacaagagttggttattttttacaatggtttaggttgttaagtctcctttgtatgtaaggtagttttttcaacatctaaaatttttgttttagccttcaaaaccaacttaccaacctcagtccagctgggaaggcagcgttgattatggtagtttgtcaagaatatatggacctggaaacactttctctctctgtccacctggtagataaattgtcctgttgagaatttttagatctggactggaactgccaggaccaccgcctccagggagtcgctgggcacctggaggtatcgtcgatgcctctcccccatctttagaaaatttggctcttctgaggtcattattattttaagaatgattaggattgataagggtcccatgaccagcattatgaaaatgcgagagtgggaaggacacagtgtgagacttccactagaaaaaagtgaaagttagggttaggacatccttttttatcacacatggaatcccagcactttgggaggccgaggtgggaggatcacttgagcccaggagttcgagaccagcctaggcaacatagcaagaccctgtctgtacacaaaatttaaaaattagttcatcggggtggcacacatcagtagtcccagctactctgcaggctgaggtgggaggattgcttgaacccaggaggtcgaggctgcagtgagctgtgatctcaccactgcattccagcctgggtgacagagttagattccaccctctcccaccccggcaaa

SEQ ID NO: 44363 - DNA, 958 bp, Homo sapiens
ggtctcaccaaagccttgaccataggcagagggtaccagtggaaaaggtggggtgaagaacattgaggacaaaaggaagaagtgcaggaaggccctgaggcaagggagtggggggtgccctggagggatggcagcagggcagtctgtcagacccaagtggcctccagccctagaagccaattagtcctcctcaaaaagctgtcactgtcccctaagaattgctgccagcttcagcctttgcctaacaccgcaaggcaaatggaaaggtaaacgggaaggagatgtctccccagcaggctatttgaggacagtcttccctgcagaagatctcaacctggggtccacagagtggaaatgttagagtagggagctaggcaaacatgagcaggacaggtgagggcccccacaggaatgtcaggctaccatcaggtgatggtcaggtggttgttaaactgtctctgtaaaataataattggttgcagccagctccaagcaaggacagtctctcaatagatacaaaacaccctgatctggtgatcagccgcttcccgataagatctcaggagctgggcaagcagcctggagcatgcgcaccaagaggcaaaatggcggaatttaaccagtatatgacctaccttcctctgggaacgcacgactggtaaggggaaaaatgcctcaagtgagcatgcgcgcaacttcagtaatcacactgtgcatgcgaccccttccaagtgctggcaggtcaccacatacgcggacagcctgctgcaagggaagaatcaggggagatgagacgtaaatcccagaactatgccaaatacataaaaccccaagttaagggtcaggcagggcacttagatctctcaagttgcctgcctgacccaagtgtagtgtacttccttttgttcctgctctaaaactttttaataaactctcactcctgctctaaaacttgcct

SEQ ID NO: 44364 - DNA, 1109 bp, Homo sapiens
ggtctcaccaaagccttgaccataggcagagggtaccagtggaaaaggtggggtgaagaacattgaggacaaaaggaagaagtgcaggaaggccctgaggcaagggagtggggggtgccctggagggatggcagcagggcagtctgtcagacccaagtggcctccagccctagaagccaattagtcctcctcaaaaagctgtcactgtcccctaagaattgctgccaggctcccactggcctgactcagtctttgagagtcttaaggaggaggtctctgaaaggtacacaccaagaactctccccagcacagctgtttttaagactctccaccagcgtcattggcgtgttgggaagaaaccctctgccacagaggccagcttcagcctttgcctaacaccgcaaggcaaatggaaaggtaaacgggaaggagatgtctccccagcaggctatttgaggacagtcttccctgcagaagatctcaacctggggtccacagagtggaaatgttagagtagggagctaggcaaacatgagcaggacaggtgagggcccccacaggaatgtcaggctaccatcaggtgatggtcaggtggttgttaaactgtctctgtaaaataataattggttgcagccagctccaagcaaggacagtctctcaatagatacaaaacaccctgatctggtgatcagccgcttcccgataagatctcaggagctgggcaagcagcctggagcatgcgcaccaagaggcaaaatggcggaatttaaccagtatatgacctaccttcctctgggaacgcacgactggtaaggggaaaaatgcctcaagtgagcatgcgcgcaacttcagtaatcacactgtgcatgcgaccccttccaagtgctggcaggtcaccacatacgcggacagcctgctgcaagggaagaatcaggggagatgagacgtaaatcccagaactatgccaaatacataaaaccccaagttaagggtcaggcagggcacttagatctctcaagttgcctgcctgacccaagtgtagtgtacttccttttgttcctgctctaaaactttttaataaactctcactcctgctctaaaacttgcct

SEQ ID NO: 44365 - DNA, 1056 bp, Homo sapiens
ggtctcaccaaagccttgaccataggcagagggtaccagtggaaaaggtggggtgaagaacattgaggacaaaaggaagaagtgcaggaaggccctgaggcaagggagtggggggtgccctggagggatggcagcagggcagtctgtcagacccaagtggcctccagccctagaagccaattagtcctcctcaaaaagctgtcactgtcccctaagaattgctgccaggctcccactggcctgactcagtctttgagagtcttaaggaggaggtctctgaaaggtacacaccaagaactctccccagcacagctgtttttaagactctccaccagcgtcattggcgtgttgggaagaaaccctctgccacagaggccagcttcagcctttgcctaacaccgcaaggcaaatggaaaggtaaacgggaaggagatgtctccccagcaggctatttgaggacagtcttccctgcagaagatctcaacctggggtccacagagtggaaatgttagagtagggagctaggcaaacatgagcaggacaggtgagggcccccacaggaatgtcaggctaccatcaggtgatggtcaggtggttgttaaactgtctctgtaaaataataattggttgcagccagctccaagcaaggacagtctctcaatagatacaaaacaccctgatctggtgatcagccgcttcccgataagatctcaggagctgggcaagcagcctggagcatgcgcaccaagaggcaaaatggcggaatttaaccagtatatgacctaccttcctctgggaacgcacgactggtaaggggaaaaatgcctcaagtgagcatgcgcgcaacttcagtaatcacactgtgcatgcgaccccttccaagtgctggcaggtcaccacatacgcggacagcctgctgcaagggaagaatcaggggagatgagacgtaaatcccagaactatgccaaatacataaaaccccaatgtagtgtacttccttttgttcctgctctaaaactttttaataaactctcactcctgctctaaaacttgcct

SEQ ID NO: 44366 - DNA, 359 bp, Homo sapiens
ctccaccttaggagaggatagggaagagtaaagaggactttacttgccacttggataccagtttagccacagaaagacagggcactaggcagagtcctgagggccccatcccagaccttaattccaggatgacatttctagacacaccctgggccaaaagggaatccactgccttgaaggggagaacccagtcctggcaggattcatcatctgctgacaaaagagcccttgggccttgaactttcagcagtggtagctgggcagtactcgctgtgggccttgggtgagactcaaagacatgctggcttcaggtgagacccagtacattcccagctgtgatggctatagggagagactcc

SEQ ID NO: 44367 - DNA, 337 bp, Homo sapiens
gagacggagtctccctctgttgtccaggctggagtgcaatggtgcgatctcagctcacggcaacctctgtctccctggttcaagcgattcttctgcctcagcctcctgagtagctgggattacaggcgtgcaccaccatgcccagctaatttttgtatttttagtagagacggggtttcaccatgttggtcagactggtctcgaactcctgacatcgtgatccacccgcctcggcctcccaaagtgctgggattacaggcatgagccaccgcgcccggcctacaattcattcttaagtttctctaacaccaatgatactagcaccatcctcctcatg

SEQ ID NO: 44368 - DNA, 552 bp, Homo sapiens
  misc_feature (190)..(190): n is a, c, g, or t
tgagacggagtctcgctctgtcacccaggctggagtgcagtggtgcgatccggctcacttgaagctccgcctcctgggttcatgccattctcctgcctcagcctctctagtagctgggactacaggcgcccgccaccacgcccagctaattttttgtatttttagtagagacggggtttcaccgtgttanccaggatggtctcgatctcctgacctcatgatctgcccgcctcagcctcccaaagtactgggattacaggcgtgagcaaccgtgcccggctggccatgctagtcttgaattcctgacgtcgtgatccccccacttcggcctcccaaagtgctgggattacaggcgtgagccaccgcccccagccccatttctcttttctattctggacatttgtttaatgaaataactcagtagcagagatactaatatgcatcctaccagtgttgttggataagtgtaaaagtgcttttaaattttaaagcattttaaaaatagaataaaagcactttgagccctctagagaatggtgtcatctgaggaaa

SEQ ID NO: 44369 - DNA, 499 bp, Homo sapiens
ctgtgattttaatctagaacactgaatgtaggtcagtatccaccccattttcagaaatctgggaagatctttttttgtttttcagcttctcagaataaatactttctaggatgttacaaacatggatgaagttcaccagaacagatccagggttaaccttttaaagtcattagatatggctccagtaaaaggcatgagaaggcacccgtgagaccctgcagaggaagcctcactcctgggcagccttatggctgacgagctaccttactgagcatattcctgcctctacaccagagactcactctgtggtccggtgtcacctcgattctaaattccctgcttcctggtgaatgatgctatcacactttagaaacctggccaataaatgctttgaaatttaaggatagctatcctgaaaaaatttaatataacctaaattgatagtctaatgacatcagtattcagaagaggcattctatttcagcaagtggttttcaga

SEQ ID NO: 44370 - DNA, 267 bp, Homo sapiens
cgtatcagactgggcaccagagctcctgctgggagtcttctccaagtagtggcaagaactgcaactcaagaataagggcaactaaattagcatcccagagttagaaggtccttttgtttaaaccagtagtttttagcccatgatcttttacaagccctgcatgcaaactggctcctgggttcctcagtcactgaatgtcaaatgcggtgagatgctgaggtggtgctgctaaagttagaatgctcaaagttgccaattaattctgtg

SEQ ID NO: 44371 - DNA, 397 bp, Homo sapiens
gtcttctccctgtgatgtaacccagtggtaagccactgagattaaggtgtttgtatggggtaaccctctggggccattgccctcatgggacaagatctgctgccattaaaagagcggatagctatggcacattctgtgtgtctctcactatcctacttagtattttccttttaacatgtgccaatttgtccagggctctttaaaagtgtggccctaaaaactaagcagaagcctgagcaacaaaaattagccagggtgtggtggtgtgcgcctgtagtcccagcaacttgggaggctggggtcggaagatcaattgagcccaggaagtggaggctgcagtgagccaagatcacaccactgcaccccagcatgggtgacagagcgagacactgtgtca

SEQ ID NO: 44372 - DNA, 425 bp, Homo sapiens
agctgctttgtattaaaacagacctatctcaacccagtagcttagcagtcaggataattattttgatgtggcatattgttgttgttagtagactgaaaagaaatctaacatgttaatataactagaggaaggaaatgagagaaaattataatagaattatcttaatttttgtatattagtgttcagtctttgtgggcatgtttttaatagttattctcctagcaaacatcattttatattttctgttttagcataaacaagtttcattcttactgatgtgtgttaaattgttcccccttttatacttcagcttgttcccagtttttgataatgtagatacaaatttaaggaatatttatatgtatataactttttacttttaaaaaagttgtgacaaaatatacataaagtttatcattatagcc

SEQ ID NO: 44373 - DNA, 420 bp, Homo sapiens
gttaaataatcttttttatactagtctgacctggcatatatactagtctgacctttttatactagtcttccttcaccagtgcttcttttacctctcaaataaactgctttgctattgtatctttgtttcaaggtgagtttttggtgtaacccgaactatggtaatttttttaattctagtatttaactctctctctctctctctctcctatatatatatatacatatatatacacgcacacacatatatatacatatatatacacacacccccatatatatatacatatgctagtctgaccctagcatttaactttattttataaggaaactcaccctggtaaaggcatttgaattccattgtaacacaacctgtggtgttaagtttgtgcatttgtaactaaggcaagcaatttgattt

SEQ ID NO: 44374 - DNA, 385 bp, Homo sapiens
actattgttcaaagatgagatacaggaccgtttgtttcccttatattgagctgattttttcagcacatttaaaataagtaaaattgcctgccatctttatagcagttgatactttttgaattgcctaccagaactaactgcccaatcaacaacaggaacacaggccatatgcgacagtatgagctaaacctcatgtctctagttaacttcaagactatcacaaatttttttaatgaattctgattctcttttgttaaaaatgaattgccattgaacactttggggctttgtgcagtaaaaaaaggtttggttcttgctgaattgttgaatccatatggcagggaagcagctaggtatctgctaaaatgggcccctgcagcgtgtc

SEQ ID NO: 44375 - DNA, 555 bp, Homo sapiens
ggttacaaatgtttcacaagacagcaagtgacctgagaatattcatttggtttccaaagcaaactgccttgctcctttggggtgatttatggtatagaagaaactgacttaacatatactatagggaaaaaataagccatgaatcagcaagccaggcctgcgggaaaagtatgaacccaaacaggaaagggctgaggcaggtggtagggctggcacttatttcttccatctgcctcagagtttatccaaattttgaattttccgtaccttaaccatgcctaaatgctttggcttgttcaattttggcagattaagcagttcaaggtaagcagagaagtaagttcccaaccacaaggaatttaaaaggagtaggaacgtactttgaactacatttcccattttgcgatcattacgtcttctattacaatgccctactttggcagcatgaagagtactgcattaatttaatttaatttaaaatttaatttaaaactgtctttctctgtattttcaggagtttgaaaattcaaaaaataaataataaatgtcaataaa

SEQ ID NO: 44376 - DNA, 358 bp, Homo sapiens
atacctgtgaaacagaataaagaacctagaaacagactcacgtacctgtggacactttgtgccagatagagcactgtagaggaagcagatggtgctggtgcagctgggaatccaagaaaaaactggaacccttccttaaaccatccacaaaaataaattccaggtggagtaaagatctccatgtgaaggcagagcaaaggtttttagctttgagaactcagtcattctttaatctgtacaagcgaccttagttatagatgagctctaggatttcttttcttttttttctttctttcttttttttttttttttgagacagagtcttactttctcacccaggctagactgcaatggcgcg

SEQ ID NO: 44377 - DNA, 368 bp, Homo sapiens
aacaatatgaagaaaatgcaagaatatgtatatttaagtcacatgtatcaatttaatatacaaacttttatatatattataaaatgaaaatggttgatgttcataatgagagtatttcttgaaacccataaaattctaccctattgcttatagcaatagaacaattttaataagaactgatattagaattattgtggttaaacatttttgcatgaaatttgtacattaaagaaaatggagttaatgtgtggcacacattaatagtttagatgttaataaattcaaacacaatgaagaactcgaaaaaaaaacaaaaacacacatacaaatagatgttagtaagttacaactgctgcttaccaagtaca

SEQ ID NO: 44378 - DNA, 421 bp, Homo sapiens
agccaccagtaaacaactccagtccagtgtgccaggtagcaggactggggccgggccagggtgcattcttcaaatgcctctaccagatagaacaggcatgctaaaggcagatgagggggacccagaaggaccaacggaggagatacactatatcaaaagccaggactggcttacagggcccagcataaaatgaaaaacacggagccccttgcttaaaaattaagaattccaagacagtgacagcagcgcattaaaccaagtgcgtgctgcacgggtcacatgcctgtgaagctggccctgattaaagtggacagtttgggcctgaaacagagccctttgaaggacaggaccagagagaaggaagcttagagtaagaactgctccttctttttctagtacttcctgaggcaacatggaaagg

SEQ ID NO: 44379 - DNA, 384 bp, Homo sapiens
agacgcgttcgagaatctgaaatgactatcttggtccctatctaacttagcaaaaccttaaagaatgattcctggttgaaactaaggcaatcaatatggtcataggtatcacttatttcctaaagggagctcaaaacagcctcctactctaaggtatataattctggaggaaattcatcctggaaaatgcagctacctactgtgagaggaaaaaaatgatcctaattattaaggtcatatatgcaaggcaacgttactctgaaggtgctaagtgaccattaacactacatttctgtaatcttcaggtagctccacaatattgaaagcctcctctagcaaaaactgcactagtcacaacttcccacccagttcaatttccagatc

SEQ ID NO: 44380 - DNA, 617 bp, Homo sapiens
taaataactttcatttgaagctgcaccatttttcttcccatcttcaagttattaaaaaaacctagatccctctgcttaaaatacaaatgccaactccccaaatattaactgtaatgtagtatgtggaaaaacttctgtagcattgtatttagtctggtatgaagttggattctggaaggacaagacaaatatgtacagttttccctcagtatccaagggggattggttccaagaccccaagacccctgtggataccaaaatctgtgcatgcaccagtcccacagttggccctgccagaaccacatacacaaaaagtagccttgcctttggtagtggatgtgcaactcacggataaggagaactgactgtacttattggaaaaaaaatctacttataaacagacttgtgcagttcaaacccatgttaagggtcagctgtatttataataatgtctttcagaaactgatctatttctgtgttaaatgataatggagaattggtttgtatagcatgaaggggatttccttagaaaagtgtttcaagtggaagttgctgatggaaactcgtgcttcttgtgagcatttctattatgagaagtatggataaaatagttggct

SEQ ID NO: 44381 - DNA, 433 bp, Homo sapiens
gtgctcaaaaaagagaaaaatgggggctgaacttgtctttttatcatgcctgtgataatgaatccactcttgtgataatggcattaatccacccaggaaggcagaaccttcatgacctagtcacttcttaaatgttccaccagttaatactgttacgatggcaattaagtttcaacatgagttttggaggaacattcaaaccatagcacaagatgtagaaaaagaaggcagtggtcaccaattgagtaagaaataaatgtcactagttacaaccttgtcatactggatgtgttggatcatccattttggcctcctttcacctccccacgggcccttctctgagtctctgaggtcttcaccctcttttttgcaatgaccattacctagggcttactcttcttattcctcagttaatgtcttcttgttcatactt

SEQ ID NO: 44382 - DNA, 517 bp, Homo sapiens
taagccactgatttagagagcaggacgtctggcttccgagcaggaaccttcatattgccagtgatgaaagagagaattaaatacgggtgatattgagaaaggcaagaagatttgtgttcagaagtgtgcccagtgccacactgtggaaaagggaggcaagcacgagactgggcctaatctccatgtctctttgggtggaagacaggtcaggccactggattctcttacacagatgccaataagaacaaaggcattacctggggagaggataccgatggagtatttggagaatcccaagaagtacatccttggaacaaaaatgatctttgccgacattaaggcagaaaagggcagacttgatagattatctcaaaaaagctactaatggataataattggacactgccttatttattgcaaaacagaaatgcctcatgacttttttatgtgtaccataatttaacagatctcataaaccagaatccagatcatgaatgactgacagatttttgttggg

SEQ ID NO: 44383 - DNA, 436 bp, Homo sapiens
caaatataaaacagactagggccgatactttgctgttttcaacacagaagtggaaagcatgattttacacttctggaataatttagagtgacatctggtggttgcctgtgagacaagaattgttgaagaaactgaatttaaaagcctataataaataagactaccagacataaaaagataagaacgatgaattaaagtagtaaaaagtttaaaaaacatatcttaaatcctcactaaagaaaaattttaaaaaatgctagttgcagattttcaatccactggactttaaaaagaaacaatagattccttaatgagtagttgtaacgaaaattgtaacagttaattgatggcaggaaatacgaattgatttatactggtttgaagattctggcttgagaggaaatgcaactttacgggggaagaagactcaaacgtt

SEQ ID NO: 44384 - DNA, 563 bp, Homo sapiens
aggaagcttctgccaggccatgcgctcccttccctcccttctccctgtggctccaggaagcatttatcacaggtggaatatcccttgtcggaaatgcttatgaccagaagcatttcagattttagacgtttttggattttggaatatttgtattatagttaacatttcagcatcactaatctgatatccgaaaatcactgttgatgattctagattagtgttttttcatgttttgtgcccaaaaacttcagagtttgtagcatttcacatttcagattttcagatcagggatactcaacttatgtctcttttctatggaagccctttctggaggtcctcgagttcaggccaggccctgtgcttttttgaggcagccctgccctccttcctaggcagctccagggtggtcagtgtcagccctgctgtccttcctttgcccagtcgtgggaagctggtcagattgaaaaagcaatgccagtcgggggtcatggcatagcagaccatattgtcagaaatctttggttgcaagggacagaaactcagttcagtctcacttaaggaaa

SEQ ID NO: 44385 - DNA, 1041 bp, Homo sapiens
ggagccttccaccacgactgcaagtttcctgaggctgccccagccgtgctgaactgtgagtcagttaaacctcttttctttataaattacccagtcttgggtatttcttcatagcagtgtgagagcagatgaatacactggccctgcctgggtttcagaaccagccttgaacctttcacagtggccagaggatggggaggcagaggcccaggttgcacacttcttgcctgagtgttggggactatctgacccaaaacaggtgcacagagggcaggagaggatgttcccaaaggaaaattagagtttagaatcaaaagaaggggaaggtgcgtgtttgggaggtaaatagcaaatactcttcataggttcactagagtcttgctactccaagtacgatccctgggccagcagaatgggcacagctggagctgattggataggtcccatgagcctcaggccccacccaggctcaatgagtcagagtctgcgtcttaagaagaccccctggtgatctgtgcacattcaagcatgctgccgttttccaaagcacttgcaacactcaggatgcttgcacggtcatgttgccaccatccaacctgcagaccccattcttgagattgactgggagttcctatcatgtcctccatagcaaggggatctagaccagaatcaagccttggatctagttctcaagtctcttttgtctctttcagtttaggaacagtttgtcaactttccttcacttttgtgaccttgatacttgagtttgaaggctgtctctcaatttgtgttctgcccagtgcatcctatcagaaggcatgtgatttcaacttctcccataccaacaacgttcactttgatcacttgattaaaggggtgtctgctaggcttctccacagccaagttactattttccctccctttataattaataagcattttgtaagtgggtactttgaaactatgtaaattgtaaactttccatttatgcattttaaaattttgattgatgtaaacttgtgaattcccattgtatcctta

SEQ ID NO: 44386 - DNA, 119 bp, Homo sapiens
ccaaacactttgggctgctggagaccgccctggaggaggaagacctggcctcctgcaagagccctgagtatgacactgtctttgaagacagcagcagcagcagcggcgagagcagcttc

SEQ ID NO: 44387 - DNA, 1377 bp, Homo sapiens
gttttcaaactactattcccaggaagacgggggtttcccaggtgactttgcgaaggcatggcggggacactgtgaatgtcagcccagaaggtgatcagagcctgttaattaaaatggaaagaagacagaagggaaggtagacatcaggttctccctggagacttttcgttttcatttacgctgcggaaactgacgtttttgcctaacaccccatgtaatgtaaacgtataggcttgagtacgtgtccggccgcatgtgtagtgaaccctaaagctttcctaattgtagttagcatcgtccctaagcggaacgattttccgtgaacatgatttgtacttttctacgagccgtacagtatacggagaagctgcacaggtcctcggcaaagcgattgcttttgccatacatcgtgcttaacaaagcgtgcttgaagactgagcccagtttgagatgtgggcttcaatatcaaaagaaaacgctgcgacctagatgtattcttggagtcacccagaaaaccatctggacgcagggaccgagcccccgaaaagcaaaggaggatggcagcaaacaagtgtctgtgcacaggagtcagagagggggaaccgccgtcccaacatcacaaaaagtgaaagaagccggaagagattttacctatttaatagtggtgctttttggaatcagcattacaggtggcttgttttacacgattttcaaagaacttttttcttcatccagtcctagcaagatatatgggagagccttagaaaaatgcagatcacatcctgaggtgatcggtgtctttggtgagtctgttaaaggctatggggaggtgacaaggcggggtcgccggcagcatgtcaggttcactgaatatgtaaaagatgggctgaaacacacgtgtgtgaaattctacattgagggctctgagccagggaagcaaggaacggtgtatgcgcaagtgaaagagaacccaggaagtggtgaatatgattttcgatatatatttgtagaaattgaatcttatcctagaagaactattatcattgaagataatcgatcccaagatgattaaaatagggtttctgatggatgttgaatggcgtggactcgctactccgttcttcacagctgccttccagaatgtgttcaaaagaaagacaagaaggagtgtatggcttataaagtgaatctaatacagtatttgttgcatttaaacaaactagacattttcttacggaaaaattatgaaatacagcatattttatgttctcccattgactcaatcatgacaatatttctgctttaacaccatctttcatgattagaaatgtttgttattggaaatgttacaccatgtaaataaaggaaatagatttt

SEQ ID NO: 44388 - DNA, 1390 bp, Homo sapiens
gttttcaaactactattcccaggaagacgggggtttcccaggtgactttgcgaaggcatggcggggacactgtgaatgtcagcccagaaggtgatcagagcctgttaattaaaatggaaagaagacagaagggaaggtagacatcaggttctccctggagacttttcgttttcatttacgctgcggaaactgacgtttttgcctaacaccccatgtaatgtaaacgtataggcttgagtacgtgtccggccgcatgtgtagtgaaccctaaagctttcctaattgtagttagcatcgtccctaagcggaacgattttccgtgaacatgatttgtacttttctacgagccgtacagtatacggagaagctgcacaggtcctcggcaaagcgattgcttttgccatacatcgtgcttaacaaagcgtgcttgaagactgagcccagtttgagatgtgggcttcaatatcaaaagaaaacgctgcgacctagatgtattcttggagtcacccagaaaaccatctggacgcagggaccgagcccccgaaaagcaaaggaggatggcagcaaacaagtgtctgtgcacaggagtcagagagggggaaccgccgtcccaacatcacaaaaagtgaaagaagccggaagagattttacctatttaatagtggtgctttttggaatcagcattacaggtggcttgttttacacgattttcaaagaacttttttcttcatccagtcctagcaagatatatgggagagccttagaaaaatgcagatcacatcctgaggtgatcggtgtctttggtgagtctgttaaaggctatggggaggtgacaaggcggggtcgccggcagcatgtcaggttcactgaatatgtaaaagatgggctgaaacacacgtgtgtgaaattctacattgagggctctgagccagggaagcaaggaacggtgtatgcgcaagtgaaagagaacccaggaagtggtgaatatgattttcgatatatatttgtagaaattgaatcttatcctagaagaactattatcattgaagataatcgatcccaagatgattaaaatagggtttctgatggatgttgaatggcgtggactcgctactccgttcttcacagctgccttccagaatgtgttcaaaagaaagacaagaaggagtgtatggcttataaagtgaatctaatacagtatttgttgcatttaaacaaactagacattttcttacggaaaaattatgaaatacagcatattttatgttctcccattgactcaatcatgacaatatttctgctttaacaccatctttcatgattagaaatgtttgttattggaaatgttacaacatgtaaataaaggaatagatttaaaagaaagcaaaaa

SEQ ID NO: 44389 - DNA, 1471 bp, Homo sapiens
gttttcaaactactattcccaggaagacgggggtttcccaggtgactttgcgaaggcatggcggggacactgtgaatgtcagcccagaaggtgatcagagcctgttaattaaaatggaaagaagacagaagggaaggtagacatcaggttctccctggagacttttcgttttcatttacgctgcggaaactgacgtttttgcctaacaccccatgtaatgtaaacgtataggcttgagtacgtgtccggccgcatgtgtagtgaaccctaaagctttcctaattgtagttagcatcgtccctaagcggaacgattttccgtgaacatgatttgtacttttctacgagccgtacagtatacggagaagctgcacaggtcctcggcaaagcgattgcttttgccatacatcgtgcttaacaaagcgtgcttgaagactgagcccagtttgagatgtgggcttcaatatcaaaagaaaacgctgcgacctagatgtattcttggagtcacccagaaaaccatctggacgcagggaccgagcccccgaaaagcaaaggaggatggcagcaaacaagtgtctgtgcacaggagtcagagagggggaaccgccgtcccaacatcacaaaaagtgaaagaagccggaagagattttacctatttaatagtggtgctttttggaatcagcattacagcaaaaaacagcaagtataagcccttgaatattttttaaactggactttttatgttgcccttgcttcgcttcatctttgttttctgtgatttcaggtggcttgttttacacgattttcaaagaacttttttcttcatccagtcctagcaagatatatgggagagccttagaaaaatgcagatcacatcctgaggtgatcggtgtctttggtgagtctgttaaaggctatggggaggtgacaaggcggggtcgccggcagcatgtcaggttcactgaatatgtaaaagatgggctgaaacacacgtgtgtgaaattctacattgagggctctgagccagggaagcaaggaacggtgtatgcgcaagtgaaagagaacccaggaagtggtgaatatgattttcgatatatatttgtagaaattgaatcttatcctagaagaactattatcattgaagataatcgatcccaagatgattaaaatagggtttctgatggatgttgaatggcgtggactcgctactccgttcttcacagctgccttccagaatgtgttcaaaagaaagacaagaaggagtgtatggcttataaagtgaatctaatacagtatttgttgcatttaaacaaactagacattttcttacggaaaaattatgaaatacagcatattttatgttctcccattgactcaatcatgacaatatttctgctttaacaccatctttcatgattagaaatgtttgttattggaaatgttacaccatgtaaataaaggaaatagatttt

SEQ ID NO: 44390 - DNA, 1422 bp, Homo sapiens
cggccgctcaacatcagaatctgtgaatgtcagcccagaaggtgatcagagcctgttaattaaaatggaaagaagacagaagggaaggtagacatcaggttctccctggagacttttcgttttcatttacgctgcggaaactgacgtttttgcctaacaccccatgtaatgtaaacgtataggcttgagtacgtgtccggccgcatgtgtagtgaaccctaaagctttcctaattgtagttagcatcgtccctaagcggaacgattttccgtgaacatgatttgtacttttctacgagccgtacagtatacggagaagctgcacaggtcctcggcaaagcgattgcttttgccatacatcgtgcttaacaaagcgtgcttgaagactgagcccagtttgagatgtgggcttcaatatcaaaagaaaacgctgcgacctagatgtattcttggagtcacccagaaaaccatctggacgcagggaccgagcccccgaaaagcaaaggaggatggcagcaaacaagtgtctgtgcacaggagtcagagagggggaaccgccgtcccaacatcacaaaaagtgaaagaagccggaagagattttacctatttaatagtggtgctttttggaatcagcattacagcaaaaaacagcaagtataagcccttgaatattttttaaactggactttttatgttgcccttgcttcgcttcatctttgttttctgtgatttcaggtggcttgttttacacgattttcaaagaacttttttcttcatccagtcctagcaagatatatgggagagccttagaaaaatgcagatcacatcctgaggtgatcggtgtctttggtgagtctgttaaaggctatggggaggtgacaaggcggggtcgccggcagcatgtcaggttcactgaatatgtaaaagatgggctgaaacacacgtgtgtgaaattctacattgagggctctgagccagggaagcaaggaacggtgtatgcgcaagtgaaagagaacccaggaagtggtgaatatgattttcgatatatatttgtagaaattgaatcttatcctagaagaactattatcattgaagataatcgatcccaagatgattaaaatagggtttctgatggatgttgaatggcgtggactcgctactccgttcttcacagctgccttccagaatgtgttcaaaagaaagacaagaaggagtgtatggcttataaagtgaatctaatacagtatttgttgcatttaaacaaactagacattttcttacggaaaaattatgaaatacagcatattttatgttctcccattgactcaatcatgacaatatttctgctttaacaccatctttcatgattagaaatgtttgttattggaaatgttacaccatgtaaataaaggaaatagatttt

SEQ ID NO: 44391 - DNA, 1444 bp, Homo sapiens
gttttcaaactactattcccaggaagacgggggtttcccaggtgactttgcgaaggcatggcggggacactgtgaatgtcagcccagaaggtgatcagagcctgttaattaaaatggaaagaagacagaagggaaggtagacatcaggttctccctggagacttttcgttttcatttacgctgcggaaactgacgtttttgcctaacaccccatgtaatgtaaacgtataggcttgagtacgtgtccggccgcatgtgtagtgaaccctaaagctttcctaattgtagttagcatcgtccctaagcggaacgattttccgtgaacatgatttgtacttttctacgagccgtacagtatacggagaagctgcacaggtcctcggcaaagcgattgcttttgccatacatcgtgcttaacaaagcgtgcttgaagactgagcccagtttgagatgtgggcttcaatatcaaaagaaaacgctgcgacctagatgtattcttggagtcacccagaaaaccatctggacgcagggaccgagcccccgaaaagcaaaggaggatggcagcaaacaagtgtctgtgcacaggagtcagagagggggaaccgccgtcccaacatcacaaaaagtgaaagaagccggaagagattttacctatttaatagtggtgctttttggaatcagcattacaggtggcttgttttacacgattttcaaagaacttttttcttcatccagtcctagcaagatatatgggagagccttagaaaaatgcagatcacatcctgaggtgatcggtgtctttggtgagtctgttaaaggctatggggaggtgacaaggcggggtcgccggcagcatgtcaggttcactgaatatgtaaaagatgggctgaaacacacgtgtgtgaaattctacattgagggctctgagccagggaagcaaggaacggtgtatgcgcaagtgaaagagaacccaggaagtggtgaatatgattttcgatatatatttgtagaaattgaatcttatcctagaagaactattatcattgaagataatcgatcccaagatgattaaaatagggtttctgatggatgttgaatggcgtggactcgctactccgttcttcacagctgccttccagaatgtgttcaaaagaaagacaagaaggagtgtatggcttataaagtgaatctaatacagtatttgttgcatttaaacaaactagacattttcttacggaaaaattatgaaatacagcatattttatgttctcccattgactcaatcatgacaatatttctgctttaacaccatctttcatgattagaaatgtttgttattggaaatgttacaccatgtaaataaaggaaatagattttagtattgtattcattttatattatagaactgcataatgtctgcagaataaaattaaaactaacaaat

SEQ ID NO: 44392 - DNA, 1395 bp, Homo sapiens
cggccgctcaacatcagaatctgtgaatgtcagcccagaaggtgatcagagcctgttaattaaaatggaaagaagacagaagggaaggtagacatcaggttctccctggagacttttcgttttcatttacgctgcggaaactgacgtttttgcctaacaccccatgtaatgtaaacgtataggcttgagtacgtgtccggccgcatgtgtagtgaaccctaaagctttcctaattgtagttagcatcgtccctaagcggaacgattttccgtgaacatgatttgtacttttctacgagccgtacagtatacggagaagctgcacaggtcctcggcaaagcgattgcttttgccatacatcgtgcttaacaaagcgtgcttgaagactgagcccagtttgagatgtgggcttcaatatcaaaagaaaacgctgcgacctagatgtattcttggagtcacccagaaaaccatctggacgcagggaccgagcccccgaaaagcaaaggaggatggcagcaaacaagtgtctgtgcacaggagtcagagagggggaaccgccgtcccaacatcacaaaaagtgaaagaagccggaagagattttacctatttaatagtggtgctttttggaatcagcattacaggtggcttgttttacacgattttcaaagaacttttttcttcatccagtcctagcaagatatatgggagagccttagaaaaatgcagatcacatcctgaggtgatcggtgtctttggtgagtctgttaaaggctatggggaggtgacaaggcggggtcgccggcagcatgtcaggttcactgaatatgtaaaagatgggctgaaacacacgtgtgtgaaattctacattgagggctctgagccagggaagcaaggaacggtgtatgcgcaagtgaaagagaacccaggaagtggtgaatatgattttcgatatatatttgtagaaattgaatcttatcctagaagaactattatcattgaagataatcgatcccaagatgattaaaatagggtttctgatggatgttgaatggcgtggactcgctactccgttcttcacagctgccttccagaatgtgttcaaaagaaagacaagaaggagtgtatggcttataaagtgaatctaatacagtatttgttgcatttaaacaaactagacattttcttacggaaaaattatgaaatacagcatattttatgttctcccattgactcaatcatgacaatatttctgctttaacaccatctttcatgattagaaatgtttgttattggaaatgttacaccatgtaaataaaggaaatagattttagtattgtattcattttatattatagaactgcataatgtctgcagaataaaattaaaactaacaaat

SEQ ID NO: 44393 - DNA, 1402 bp, Homo sapiens
aagcattgtatatccatgcatagggcccattacggccggtgaggctaaagtgcatggtgggtcgaatcactgtgtaactgtacgggagcatacatgggttgattcacgtagccgtgttgagattcatcatggaatagaagaccgcacacggcagggtaccagatcagtgttcgtccctggtcacacatggcgttctcatgtcctctgtggatcttgacgtaggagctctaagagcccatgtaatgtaaacgtataggcttgagtacgtgtccggccgcatgtgtagtgaaccctaaagctttcctaattgtagttagcatcgtccctaagcggaacgattttccgtgaacatgatttgtacttttctacgagccgtacagtatacggagaagctgcacaggtcctcggcaaagcgattgcttttgccatacatcgtgcttaacaaagcgtgcttgaagactgagcccagtttgagatgtgggcttcaatatcaaaagaaaacgctgcgacctagatgtattcttggagtcacccagaaaaccatctggacgcagggaccgagcccccgaaaagcaaaggaggatggcagcaaacaagtgtctgtgcacaggagtcagagagggggaaccgccgtcccaacatcacaaaaagtgaaagaagccggaagagattttacctatttaatagtggtgctttttggaatcagcattacaggtggcttgttttacacgattttcaaagaacttttttcttcatccagtcctagcaagatatatgggagagccttagaaaaatgcagatcacatcctgaggtgatcggtgtctttggtgagtctgttaaaggctatggggaggtgacaaggcggggtcgccggcagcatgtcaggttcactgaatatgtaaaagatgggctgaaacacacgtgtgtgaaattctacattgagggctctgagccagggaagcaaggaacggtgtatgcgcaagtgaaagagaacccaggaagtggtgaatatgattttcgatatatatttgtagaaattgaatcttatcctagaagaactattatcattgaagataatcgatcccaagatgattaaaatagggtttctgatggatgttgaatggcgtggactcgctactccgttcttcacagctgccttccagaatgtgttcaaaagaaagacaagaaggagtgtatggcttataaagtgaatctaatacagtatttgttgcatttaaacaaactagacattttcttacggaaaaattatgaaatacagcatattttatgttctcccattgactcaatcatgacaatatttctgctttaacaccatctttcatgattagaaatgtttgttattggaaatgttacaccatgtaaataaaggaaatagatttt

SEQ ID NO: 44394 - DNA, 1051 bp, Homo sapiens
tctagaggatcatgatagcgaccgtacagtatacggagaagctgcacaggtcctcggcaaagcgattgcttttgccatacatcgtgcttaacaaagcgtgcttgaagactgagcccagtttgagatgtgggcttcaatatcaaaagaaaacgctgcgacctagatgtattcttggagtcacccagaaaaccatctggacgcagggaccgagcccccgaaaagcaaaggaggatggcagcaaacaagtgtctgtgcacaggagtcagagagggggaaccgccgtcccaacatcacaaaaagtgaaagaagccggaagagattttacctatttaatagtggtgctttttggaatcagcattacaggtggcttgttttacacgattttcaaagaacttttttcttcatccagtcctagcaagatatatgggagagccttagaaaaatgcagatcacatcctgaggtgatcggtgtctttggtgagtctgttaaaggctatggggaggtgacaaggcggggtcgccggcagcatgtcaggttcactgaatatgtaaaagatgggctgaaacacacgtgtgtgaaattctacattgagggctctgagccagggaagcaaggaacggtgtatgcgcaagtgaaagagaacccaggaagtggtgaatatgattttcgatatatatttgtagaaattgaatcttatcctagaagaactattatcattgaagataatcgatcccaagatgattaaaatagggtttctgatggatgttgaatggcgtggactcgctactccgttcttcacagctgccttccagaatgtgttcaaaagaaagacaagaaggagtgtatggcttataaagtgaatctaatacagtatttgttgcatttaaacaaactagacattttcttacggaaaaattatgaaatacagcatattttatgttctcccattgactcaatcatgacaatatttctgctttaacaccatctttcatgattagaaatgtttgttattggaaatgttacaccatgtaaataaaggaaatagatttt

SEQ ID NO: 44395 - DNA, 498 bp, Homo sapiens
gctctccataatcttatacctcactgtatttcagtgacttgattttgcgagtgttttctactggattgccgttcatcaggaataagacctcttacttttctgcccctggcacctcgaatctttcctagcacacagaaagggcattattcataaacgcttgttgaaggaagttaaagaaactgcactgcaactccgtttctcggtttcttaacagttaaaaggtgataaagaccaagcttggtggctgacacctgtaatcccaacacttaggaaggcaggtggatcactttgaactcaggagttcaaatgagaacaacctgggcaacatggcgaaacctgtctctaccaaaaaaaaaaaaagatataaaaattagccaggcatggtggctcctgcccgtggtcccagctactgggaggctgagatgggaggaccgcttgagtctgggaagaggaggttgcagtgagccgagatcgcaccactgaactccagaaaaaaaa

SEQ ID NO: 44396 - DNA, 535 bp, Homo sapiens
  misc_feature (469)..(469): n is a, c, g, or t
aaaatgttatcctgggtttacactgattgtcagataatacagtcatgcaccacataatgacgttttggtcaatgatggacagtgtatatgacggtggtcccatacgattattatgcagctgaaaatttcctatcactgtcatagctgtcttactgccatagagcaatgcattacgcaggtgtctgtggtgatgttggtataaatgaacctactcaggaagaacctcagacaggtccttcagaaggtatcgagaaggaggcattgttatcatagagatgacagctccatgcgtgcttttgcccctgaggaccttccagtgggatatgatgtggaggtggaagatagtgatattgatgatcctgaccttgtgcaggcctgggataatgtgtgtgtctgtgtcttagtttttaacaaaaaagtttaaaaagaaaaaaaaatttaaaaagcttgtaaataaggatataaaaanttttttgtacagctgtacaatgtatttgtgttttaagctaagtgttacacaaggataaaaaaaaaa

SEQ ID NO: 44397 - DNA, 342 bp, Homo sapiens
tttaaatttaaatctattaaaatcactgccccccaactacggcattaggctagattagtgacaaaaggcaaatagacatggctaaagccctcctagaagcatgactcactcctgagtcacgtcaggtgtcacacaccaggagcgggccctctcaaggccacctctgtctcagcaaagtctctgttctctaccacctccaccctacagatgtgcgtcttcagctgtgtggccgcttcaccctgttgcctcccttctagaaacccagtcggggagtgtgttgccacacccagtgggggtagtatcagaatagggtctagggtctcttcccgttctaaagtctct

SEQ ID NO: 44398 - DNA, 426 bp, Homo sapiens
gtggacttacctggctgtgagaggcagcagtgtgtggggcctattagaaatctccctgggctttgtggtcagggaggctgcatttcagtcccagctctgccagtgactgtgctgccatggcctggattcaccatctctcagagtcccttagtgccagtgtgtgacatggagatagtgttttacctgtgacctgctggccatgctgaggaaccgtgtccacaagtagctcagggcctggcacaccataagcactcacacatatgacaccaagaagagttgtttgtgaggaagaggagggaacctggggaggagtaaggggtagagagaagccaggagtgtggtgcctgtgggactgctttggaaggaatccatagtgaagggaaagtgcacccaagtgacaaacccagtgtattctggcttaagtca

SEQ ID NO: 44399 - DNA, 308 bp, Homo sapiens
aacctctgcctcccaggttcaagcgattctcctacctcagcctcccaagtagctggaattacaggcacctgctacaacacccggctaatttttgtagtttttgtagagacgagtttcaccatgttgaccaggctggtctcaaactcttgacgtcaaatgatccacctgcctcagcctccctaagtgctgggattacaggcgtgagccaccgcgcttggccctctctgcgcaattattgatatgtagcattttcacacttctatggccatgaaaccattttgaacctgtatcagaggcgcacactttag

SEQ ID NO: 44400 - DNA, 375 bp, Homo sapiens
gtcgacgtagtcagttaccattaaaaacaacttcatgccaataaatttggcaagttagatgaaatggacagataccttgaaagatactacatggtttgaatgtgtcttccaaagttcatgtgttggaaacttgatccccaatgcagaaatgttggaaggtggcacctttaagagctgtttacatcatgagagatgtgtctttataaatggattaatcccattattgcagaaatggttttgttatcatgggagggggtcattataaaaagacaattttgccaggtgcagtggctcacgcctgtaatcccagcaatttgggagatcgaggcgggtggatcatgaggtcaggagatcaagaccatcctggctaacacg

SEQ ID NO: 44401 - DNA, 324 bp, Homo sapiens
atccctgtagttgcctcagcagcccctcaagccacaaaaaccccagcaagtgacaaacctgcggttgatctttctgagcatctcctcacccttgatgagtacagtaacttctagtgatagtgaagaaagcagatcttcatagagttcttgaggcatatggcatggggactcttttgccttctgattttattagtgggcagacagcagagggaagaggctacattttttctttactggcacctgcttggcaggaacccagaggatgctcaacaaactgttttgaatgaataaatttatatagtgtaagacaatctgaattttctt

SEQ ID NO: 44402 - DNA, 421 bp, Homo sapiens
atatattcattgatgaaatttagagaacatttaaatctgtaaggaagaaaataataacgactcacaattacatcattgactgctaacattaagacacatttcctctcatagacagatgattagaaaaagtcactggagccagatgtggtggcttatgcctgtgatcccaacaatttgggaggccaaggccagagggttgtttgagcccaggagttcaagaccagcctgggcaacatagtgagactccatctccacaaaaaatttaaacaatttaggtgggcgtggtggtgcacatctgtatttttatctactcaggaggctgaggtgagaggattgcttgagcatgggaggctgaggctgcagtgagtcatgattacaccactgcactccaggttgggtgacagagtgagaccttgtctca

SEQ ID NO: 44403 - DNA, 848 bp, Homo sapiens
ggcaaggggagggaaagcattaggacagatacctaatgcatgtggggcttaaaacctagatgacaggttgatgggtgcagcaaaccaccacgacacatgtgtacctatgtaataaacctacacgttctgcacatgtatcccagagcttaaagaaaagatacagatagatagatagatacgtagagagagagagcgagctaaaaaaattgttttaaagtaaggcccaatgaaaaagatttagtttgagttaaagaaaaacctttcttaaatgacccatttaactgcacgagcttcatcctctggcactgttttacttcagctgaggggtcttgcccagagccatgtcccacctgctgtctccataaatgcagtgctcaggggagcaggactggctccccccctcttcctggccaccagcaccctctgtgaccttgcaaaagtcacattcacatctaggtctgctcccttcgttggaaacaagggagtcttcctgcccgtgttcttccacccaggctggcccgaaagttctgagaatcttgactgcactggcgtcgtcagctggagagtaagatcagtgaggtggcgatttgtgtccttcagtgcctcgctctgcacccgcctccgactctgctcagcgtggcctccagggctgccagcaccaaatgcctaatctcactgctctgttgatgcagcattacacttctgtacgagtttgcagtttgttcacctgttggaagcatggaaggactaaatacttggaacacactcttctgccccttgcttggaagttcagaaaactcctggtgatttataacttcatggtggatcactgctaaaatttatgacct

SEQ ID NO: 44404 - DNA, 488 bp, Homo sapiens
cttcccatcctgccatctctttgacccagctagtcagcattctctacttttaaatactttagtgattagattgggcccacctggataatcctggctactcttcccatctgaagggtaaccttaactacttctgcagagtcccttttgccatgtaaggtaacatattcataaatttaggggattaaggtgtaaacatctttgcagggtgtggggaggacattattctgccaaacaaagaaatgggctgtcagtctaattgtctttcctttgtagatgatttggctgttctctctagctgcttttaagatctggctgtttcttggaatgtatttcttatttatccttgtgaacactgactctcctccattctcttttaaaattcctactaagcacaaactagatctttcttcactctttctttctctctttctttcttaacagggtcttgctctgtcacccaggctggagtgcagttgctctatcatgac

SEQ ID NO: 44405 - DNA, 480 bp, Homo sapiens
cagtaccccacccctgagccaacaccatttctagcatgactgtgcgcacagtcaccagcaggggccccctgcgccctgctccagctgcattcccttcactactctggtgaacacccacatggagacaggcatcctggcacctactagcactctgccacagctgctgctaccactgctgctggcacatgcaaatgaggatggatcctgctgtcattgcactatgaaatgctttcattcacaccacctatcagagtgtagtgaccagcggtctgggaacaccttaggccccccccgaccccagcacagtggatttctaacctcgaggagccagagaacaaagagccaatgcaagtccgccagagttagagcacacagtcctggagttgagagctgagcagtggccctctaacaccttccagaaatgaagccagtctgctgaattcacctataccacagtcaaactcttatggtcatcaaata

SEQ ID NO: 44406 - DNA, 219 bp, Homo sapiens
cctggagcccagtgcgtcctccaccggccagactgtacaacggttggatcctgtgtccactgctaggacccaggctccacgagcacgggcttgtgtggcacacggatgcaccctaagtcctggcacagagactgctcaacaaaggcctcggtgcttttgtgtatgtttgaaattttccataataaaatgaaaaatgggaaaatgggaaaacaaaaatgg

SEQ ID NO: 44407 - DNA, 574 bp, Homo sapiens
gttttctgacagtattattgaatggttttgactattatcccttgaaataattgacctgtggaattgtcaagagttgtgtttccattttaatattatttttccaatgcaacagttataaacaaataattaacaattttttggtaccaatgaattattgaaggcaagagctagaatctctaactgcatgttagatatctgtatattaattagaggacttgcttcaaatgatagacacaatttgtgttagagatatcaatggggatgcttcagtaacagctattctgagcaactaaattatgcaaaagctttaggataaattgggtgggtgcagtggctcatgcctgtaatcccaggcaggcagatcacttgaagccaggagtttgagaccagcctggcaacataccaaaaccccatctctgctaaaaatagaaaaattagctgggcgtggtgccacgtgcccatagtcccagctacttgggaggctgaggcaggagaatcacttgaacccaggaggcagagattgccatgagccaacatcatgctattgtactccagagcgagactccatctcaaa

SEQ ID NO: 44408 - DNA, 555 bp, Homo sapiens
gtaagtgtgtgaataaaataatgaggacaattgccaaagagcagtttaggaagatgaatttttttagcattgtggtcacactggaggtaataataaattactatgataacagtaggggagaaaaagaatggatagtagaggctgggtgtggtgcctcatgcctgtaaccccagcatttggggaggccgaggcagatggatcacctgaggtcaggagttcgagaacagcctggccaacatggcaaaatcctctctctcctgaaaatacaaaaaaattagccaggcatgatggcgcgcacctgtagtcccagctacttgggaggctgaggcatgagaatcacttgaacctgggcagcagagattggcagtgagctgagatcgcaccactgcactccagctgagcgacagagcgagactccatctcaacagtaaaaaaaaaaaaaaaaaagaatggatagtagaaaagaaaagaaagttgaggaaagaattaaatgagactgtgtgaaaagaatagttagtggacaactggaatatttttatcttgagcacctgaaac

SEQ ID NO: 44409 - DNA, 427 bp, Homo sapiens
gccgaggctcccccgcctccgcatgctcgccgcgctctcccctcagtctctcgctcctgtttctcctcagattcgcgtcgggacgacgagccccgcgggaggattccagcctaggagggggccgggccggcgaaacggaaccgagcgggagtcagtgcccgcgcggtggccgggcggagcggggctgcgggagccgcccgcgcggcagcagaagcggcggcggcggcagcatcccccgcgctcggcgcctgcactcggagttgctgctgctggcaggcatgagtgttattatagtgagcggcgttgccggtccattgcactgagccaatggcagggagccactgggctgatactgagagctgtcagaggagtacatctgtcacccgctgcctcccccgcccaccccgccgccgggacccgcggccgc

SEQ ID NO: 44410 - DNA, 164 bp, Homo sapiens
tgttcagacctcacagtggtaattgctacaggcaagagctgccgatgaatgctgacattggtgggcagaactttaaggaaagagaggatatttgcataacctcaaaatatctattaattactggggtggctttaacatctgtccgtgggttctttgatactctt

SEQ ID NO: 44411 - DNA, 751 bp, Homo sapiens
aggaactggtagctaaataagaagaggaagagaggcctgagctagcattagcatgctcggcctccttgccatgtgatatcccacaccacttcgggactctgcagagagtctccaccagcaagaaggccctcaccagatgcagccccttgagcttggcctctgtaactgtaaaaagtaaatttattttctttataaatgacccagtttcaggtattctgttataagcaacagaaaatagactaaaatatccagcaatctaacagaattgagtttatagataagggaaagggtttgtgacccacctacactatataaattctcccaagaaagttatgagctagaaactccatgtcaggccttggtgtggaaggtgctgtggactgaattgtgtttctccttctcccctcaaactcatatgctgaagtcttaaccccagtgtagctgtatatcaaggtaggatctttggcagatggtttaggttaaatgaggtcatgaggatgagaccctaatttaataggactgtggccttataagaataggaggagggcaggcacagtggctcacacttgtactctcaggactttgggaggctaaggcaggtggatcacttgagcccaggagtttgagaccagcctggacaacatggggaaaccccatctctacaaaaacaaacgaacaaacaaaattagcctggtgtggtagcatgcacctgtagtctcagctacttgggaggctgaggtgggaggtttgc

SEQ ID NO: 44412 - DNA, 309 bp, Homo sapiens
ccaaagctgccagattacaacctctaatgaaaaataatcacctacatagactcttttaccatcatggacagagagccttggaaaagaaagctctaaactcaactgctaacaggttgatgagtagaccctgaggaagtcccagtgtgtgtggcttctttgtccatgggattctgtggattacgggctgaggtggcttatgacacctctgcactgtattgcatgaagttactgcacacatatgttgtgtgaccactgatcacatggagcttttcgagtgaggaggtttggaaatattgttgacccttgaac

SEQ ID NO: 44413 - DNA, 387 bp, Homo sapiens
aaaaaaaaagactgtaactataaagcccacaataatcaagatagtgtggcactggcaaaagaacggcaaaatagatcaacaaaacaggacagacagccctgaaacagaacaataaaaatatggtcaactaatctctcacaaatgggcaaaggcaatttaatggagaaaagagagtcttttcaataaatgaggccaaatgaactggatatctacatgtaaagaaatgaatctagacacagattctttatacctgtcataaaaatccaaaatggattctagacttaaaacataaaatacaaaactataaaactcctagaagacaataaaaaagaaaatctatgtgaccttggttttggcaattacattttagatacaacagcaaaagca

SEQ ID NO: 44414 - DNA, 890 bp, Homo sapiens
gcagtgtcagttctgcatcaggaacccctcgcgctgtaatcctttgatatttttcaagccatgagaaaaatgaagtggacttaccagggtccctccagtgacctagtggatgttcttacaggactgccgtgtgccactggctgtggcttccctggtcctgtgcttggccaccgggagctggcatctccaaaatagagcctccttagcctgtgcaggtgggctgtcttccaaagtcaccacaccagtgacttgtgctgtgcggagccttcctcaccaggaccactggctgctcctgtggctagaagtcacaattataggcttcattgcaagagccagcatttgagtttcttctgggcacctgccactgtgcatgtgtgacctcaactgctttgtgcaccctgactggggggtaggtgctagcgttccaacattacagatgagaaaaccgaggcacacagaagaggtaacctgcccaaggtcacaggtgttaggtggcagagccaagatgttattgtcagtctgacttcaggtgcataaaacctgaggctgagcctccccatgagaggaaaaatgtgtttgtggtgtgacctcagttgccagggaacttgtgcaggaagccgggagagatggcacagacccacctgtgctcacagtacatgttaagaattcccaagtctcaggcaaaccatctccaagggtgttcacagaagacacaccttaaaggcaaacgggttcatgatgtaatcttctattgactagctgtgaacctcatttttcttatctgtgaagtgggaacagtaataatccaagtctttttatggagttatcaagatcaaaaaaggaatggatatacaaagtgttttgtgaaataaaagctccctaaaatggta

SEQ ID NO: 44415 - DNA, 1136 bp, Homo sapiens
  misc_feature (12)..(12): n is a, c, g, or t
  misc_feature (20)..(20): n is a, c, g, or t
  misc_feature (81)..(81): n is a, c, g, or t
agccttttgacnttgatttncggaattttaaaatacggccttcacttattggggaaattttggccctcgaggcccaagaanttgggcacgagcgccccaccttggcctcccaaagtgctggcattgcaggctgagccacggtgcccagcctgaacaccctttcctggtaaaacactccaaaaccaggaaaagaaggaatgtacagcaacaaaataaaggccagtcatgcaaggcccatggctgaaagtctttcagtcattttaggtgaaagactgaaatctttgcctccaagatcaggaataagagaaggatgcccgatctcactacttctattcaacacaggatttgaagtcaggctggtcacagtggctcacacctgtaatcccagcacttttggaagtcgaggcaggtggattacatgaggctatgagtttgagaccaccctggccaacatggcaaaaccccatctctacttaaaaaaaaaaaaaaaaaaaaaagatttgaagtcctagccagagcaattaggcaattaggcaagggataaaaaggcatctaatttgaaaaggaacaagcaaaatgatctctgtttgcaggtgacaagatctcatatgtagaaaatcctaagtattgcacaaaattacctgttgaatgaatgaattcagcaaagttccaggaaaccaatttaacatgcaagcaaaaatgtattacatttctgtgcactaaacataaacaatctgaaaagaaaattaagaaaacaattccatttacaataatgtcaaaaaataaagtaagatctttaggaataaacctaaccagggaggtgaaagacttgtacactgaaactacaaaacattgctgaacaaatgaaagaagacacaaataggtggatgacattcttgttcgtggagtggaaagattaatattgtcaaggtgtccatgccaccaacaacaatctccagatccaatgcaaatcctatgaaaaccccaatggcattgtttttgctcaaacaaaaaattcatcctgaaattcaaatggaatctgaaagcactaccacaaaccaaaataatctttagaaacgtgaacagagaggacacgcattccctgatttcaaaatgtattaaaaactatggtaatc

SEQ ID NO: 44416 - DNA, 1812 bp, Homo sapiens
tgcggtggctcacacctgtgattctagcagaaaatcagatcaggagatcacagaaggtcaaggaactactgagagagcaggaatggagagcaggggggtcagcaggaagcttggagaatctgcaaaatagtagattacaaaggatcaaaagtcagtgaggttcaacaagaggtagggtgggataatgaccaaagacagagggaacacttccaggttcattctgtgaggtcagcaacaccatgacctaaaagccagataaagaccctgcaagaaaaacaatacacaaaatacagatgaaaaggctggtgaatattgatgggaaaatcttcaacaaaattctagcaaaccaactttcacagcatgttaaaaggactgtacgccatgaccaagttggagatagccctggaatgcatgtatcacccaaaacaggaaaattaatgtagtgcaccccattagcagaatgaaggacaaaacccacatgatcatctcaactgatacagaaaaaacattggacaagattgaacacctttcctttttttttttgtgagatggagcctcgctctgttgcccagcctggagtgcagtggtgccatcttggctcactgcaacttctgcctcccgggttcaagcgattcttccacctcatcctttcgaggagctaggattacaggtgtgcaccactatgcccggctaatttttgtatttttggaagaaacgtggttttactatattggccaggctggtctcgaactcccgacctcaagtgatccgcccaccttggcctcccaaagtgctggcattgcaggctgagccacggtgcccagcctgaacaccctttcctggtaaaacactccaaaaccaggaaaagaaggaatgtacagcaacaaaataaaggccagtcatgcaaggcccatggctgaaagtctttcagtcattttaggtgaaagactgaaatctttgcctccaagatcaggaataagagaaggatgcccgatctcactacttctattcaacacaggatttgaagtcaggctggtcacagtggctcacacctgtaatcccagcacttttggaagtcgaggcaggtggattacatgaggctatgagtttgagaccaccctggccaacatggcaaaaccccatctctacttaaaaaaaaaaaaaaaaaaaaaagatttgaagtcctagccagagcaattaggcaattaggcaagggataaaaaggcatctaatttgaaaaggaacaagcaaaatgatctctgtttgcaggtgacaagatctcatatgtagaaaatcctaagtattgcacaaaattacctgttgaatgaatgaattcagcaaagttccaggaaaccaatttaacatgcaagcaaaaatgtattacatttctgtgcactaaacataaacaatctgaaaagaaaattaagaaaacaattccatttacaataatgtcaaaaaataaagtaagatctttaggaataaacctaaccagggaggtgaaagacttgtacactgaaactacaaaacattgctgaacaaatgaaagaagacacaaataggtggatgacattcttgttcgtggagtggaaagattaatattgtcaaggtgtccatgccaccaacaacaatctccagatccaatgcaaatcctatgaaaaccccaatggcattgtttttgctcaaacaaaaaattcatcctgaaattcaaatggaatctgaaagcactaccacaaaccaaaataatctttagaaacgtgaacagagaggacacgcattccctgatttcaaaatgtattaaaaactatggtaatc

SEQ ID NO: 44417 - DNA, 660 bp, Homo sapiens
aaataatacagagaggtctcttgtacattttgcccactttcaccgaatggtgacattttataaaactacagtataatgtcacaacaaccagaatattgaccgtgatataacctaccagtcatatccagatttctctagttttacgtgttctcatatgtatatatattaagtactatacaattttattacctgtgtaattttatgtatccaccactacagtcaagaagctgaacagttctaacacaacaagaattcttcatgttgcccttttatattcacacctccttccctctcacccacctcatcccctccttaacccttgacaccactaatctgtcttctaaaatttcgtagtttcaaaaatggaataatgtagtacataactttttaggattgtcttttttattgttttagacaggatcttgctctgtcacccagaatggagtacagtgtctcaatcatagttcactgcagccttgaaagcctgggcttattagctgggcatggtggcatgctcccatagtcccagctacttggaagactgaggtgggaggatctcttgacctgagcggcagagattgtggtaagccaagatcatgccactgcacgccagcctgggtgacacagcaagaccccatctcataaaaaagaaaatatgtt

SEQ ID NO: 44418 - DNA, 308 bp, Homo sapiens
attcagttcaatagaattgtatcttttaaaatacttatagtccttagatactgttttgttataaagtattttgttttgaagatgtctttaaattcactggcttcaaagataacttctgcattattccttgggctttcctcttagttcaatttagaaggaacagagaaaacacaaacatttaggtaaataatggaaataggattcacgtcataaaacgatactttgcaaaattgacaaggtggcaaacatacaggtgatgttagttttttgattaataacaagagacagaatctgaagggttagaggaa

SEQ ID NO: 44419 - DNA, 379 bp, Homo sapiens
cagcatcgtgtccccttcccgcttatatatcaagtcacactcaacaggaatgggggtttagcacatacatggctagggaggggaagaggctagagggctgtggttgctcaggattcaaatacaatttgcaaagaaagtaaatgtggatttacagttcttgtggaaatctattaaacagatgtcactgaagcataatcaaatcagcactatggcaattctacacttaagtctgatattggggttttgccatttttatgatcagttcaagtgtatgttttgtgatggtgcaggaatttgcaattaaggatgaaacctcccaagtatgatcaattaactaacgtgcctgaatgacaaacttacaaatgcaaaactccattct

SEQ ID NO: 44420 - DNA, 370 bp, Homo sapiens
aagaaaacaattttttgaggcagggtctcactctgtcgccatgctggaatgctgtggcatgactcgttgctcactgcagcctcaaactcctgggctcaagcaatcctcccaccttagcctcccaagtagctaggactaacagcgtgcaccaccacactcagctaatttcttttttttaatttttagtagacacaagatcttgctatgttgccaaggctggtctcgaacctctgagctcaggcgatccttctgtcccagcactttggaaggctgaatggggaagactgattgaggccaggagtttaagaccagcctggtcaacatggcaagatccctatgtctattaaaaaaataattttaaaaaagcaat

SEQ ID NO: 44421 - DNA, 333 bp, Homo sapiens
gttttgagaatgaagaaacaatagctctggagagatcatctttggaaaattaatattttcccccccaaaaaatacctaagaacatattgatttgaggtagctaggtaggtaaagcatgaaactcctaacctcgtgataatggaatacagcctcttttggagagttccattttaagtggcaccctcaaccattgatttgccttagttttcatattttagacacattcatgtgttcattcaaaaataatatttaattggccagccacggtggttcatgcctgtaatcctagcactttgggagccccaggtggatggatcgcttgagccctggtgt

SEQ ID NO: 44422 - DNA, 678 bp, Homo sapiens
gttgactgcagggaaaaatacactgttcgcaccagaaaacaccaaaactgacactgtggctgttgggcagcttcgggttcctgctgttgtatcaggggcagagagagaggcagagcttggtgtctgcagatccgggcccttggggccaccagcccctaaggcttggcctgtagcatcttccatactcactgtgttgcccagacccaggcctgtggggccacctgcccatgaccgccacagatggcgccgcttctgagccacagccttgatcacctgtgggtgcggttctccttgttctgccacaaaggcaaaatgggacgctgtcacccctgagacaagggaagctggccaggtagattaggagacctcggaccctgtggggtggaaaaaatggcaaagttttacaggcaaagcagtgaccacagcactacccaggcctaggactggggtaggatcagggctgccgggtccatagccagtccccttcccaggactcggtgccacagtggggttctcattaactcagaattccccaaagtggagacattcagcggctctcctttttgctagatattcacatcttttactcactaccttttttttcatgttatttctaccagtttatttgctttttgtattttaaggaaatagaaataattgcagccaggcccggtggct

SEQ ID NO: 44423 - DNA, 448 bp, Homo sapiens
cctttcgctcctgccctctgcccggccctactgagattcccaaggagaaggccgagagggggcgctccaggtctggagcaggtataattggagcatttgcactgagacccctgccagagaggagaaaaccctttcaagggaaattttaatctaaaaggaaaaaaccaaaatattgatgagaaggagtcctccagttagtgaaaggggagtttcgttttcagctttctttggttcctactccaattccacatccttcatcctggccatgcccccaccttcaagagcatgaagcactcttgggagttgtgggtcctgcccagagtccagagagcagcctcagctgagcacaggtccgagggggcgggggcagggccaagagttcaaaagaagccaatggagggagagggagcgtcagaagcccggaggagctggtggtgggagaatgacg

SEQ ID NO: 44424 - DNA, 399 bp, Homo sapiens
tagtagatctgaccatggaaagactgtagtctacaaagagaggtaattgcatctttacttctccagagaaaatttagtgatttgaaaaagcaaagatggctgccctcaaattaatccctgatggaccaatggtaagttgagcttgggaatttctcccaacctgacatttaaaaatgtctatctactagcaagtagctattgaggctttatagaaactccctaaattgcctcttttccctcctattatcaaattctcagcaaattacatgatcattttcatagcttccaaatgacgtgtctatatggttgtgagaccaaatttgtccttaagaccaaagctactgataaccattagggatcctgatagatattgataggccaaatccccattttgttcca

SEQ ID NO: 44425 - DNA, 313 bp, Homo sapiens
agaaacaactcaaatgtttaataggagtcagttgaacaaagtgtaacaaacctatcaaacgatgtattttgtagctacaaaagtaagtaaagacattctctaaaccaatagagaataactccaagatacttgagtgaacaaaaggaagttccagaacactacatatttttcataagacaagacacacagaattacacatagatatgcatacatatttgttatattaacagaaataatgggggccaggcacggtggctcacgcctgtaatcccagcactttgggaggccgaggcgggcagatcatctgaggtcg

SEQ ID NO: 44426 - DNA, 324 bp, Homo sapiens
ctacatacatttaaaagacaaaatgattgtatgcaaaactttacaccaatgagtttgaaaaaggtagatagaaattgactaaggtccagaaagcctcaattataaaattaacacaagaaacatagaacctctgaatagtactaaatctatgagagaaaatttatcaacaattaaacatttttttctacaggaaaagaaattcaggcctaaatgctttcaccagtaaatttactaaaattttaagatagaaatgataccaaattattctctatttcttttatgcaaaaacataacttgatatcaaatctgacaagtacattacaa

SEQ ID NO: 44427 - DNA, 481 bp, Homo sapiens
caggttcttgccaatttgttctctctctgatcaagtaagctgcaaacagtatattttgaacctatttttttggtattcattgtagtataaatggttataatgattttcaagtgtgttcttcctatctaaacaatatgcattaatttgaaacaatgaaattgccatttttctaagtcagaaatgttcaaacatctgccatttcttatagttcaacataatacagtaagaaaggattaaccaggcaataaagaaagaggttcaggagatttgggagatattcccaggggatatccccagaggctgaatggtcctggagaaatcataagcatccttgtgcttgttttcttattttcactgtgaggctaatgaaataaaataaaatggccaattaaaatttgatagtgttttgatagtgttgttgttgtttgaggtggagtgtcgctctgtcacccaggcttaactacagtgagacaatctcagc

SEQ ID NO: 44428 - DNA, 276 bp, Homo sapiens
caagggatcctagtactttgaagattgtgaaccactgtctgtgctcttaggcctagagaattcgtaattccttagctttgtagagatgtgtatcactatctgtgaatgctcttatttccaacaccctttgtaatttgacaatatttgtgttctgacatatgttgtatgtgatatttcagtctaaagaaatgtagtttgaaaagatctttctctgcatctcctttgttttttatcatttttaatggcccaagtaccaaagtagtatattcagtaaga

SEQ ID NO: 44429 - DNA, 721 bp, Homo sapiens
gaacgatcttaaccccccaatttcatcaccctcaccgcaacctccgcctcccaggttcaagtgattctcctgcctccacctccctagtagctgggattacaggcatgtgccaccacagcacggggccttaattatacatttgaacttaagtgacattttattgaaaactaattgtggtgacgaggaatggtctaagcatatgattaggataattcatattcattatgaaaacttaggtgaaatacagacttggcatttagcttgtcaaatgtaaacatgttttctgctttctttgctaaaatcatatttccaatttcaagggaaaatgttaagaaccaaaatcatctttttcagctacccgcctgaaaaaattattgctatttttcttttcttttttttgagagtctcgctctgttgcccaggctggagtgcagtggtacgatcttggctcactgcagccttgcctcccaggttcaagcgattctcttgcctcagcctcccgggtagctgggattacaggcgtgagccactgcgccaggccttcacagtcatctttagtatgtataacatttcatcctgtggtgtattattacttgtttttttttcgttacattaactgttttgatgatacagcatctcattgtttcttgataaagtatttccttctttttggataaattacctgaagtggaaatatatgtgtagggcattaaaaaaaaaa
